United States Patent Application Publication US 2005/0208558 A1 - sequence listing, part 25

SEQ ID NO: 24949 - DNA, 2351 bp, DROSOPHILA
tacaaatatgtatatatacatattaaatatgatctttaaatacttgctattgaaaaaactttctaaaggctccaaaaggcacgcctcttatgatggacattactcatacgcactgttgcacgcatattaaccttttcttaatttatttgtatatactatactctaaattcctatagccttaaatgacgaaaaataatgttataattttatttttgatgaaaactatataattatttcagaatatagataagaaaacttgttatttaataaaaataaatgaaactgtatttaaaattcgaaaaaattaccattaggtgtcattctaattttaaataattttggtatttagtaattgaaagaagtaagaatttaattatagaaataattgtttttcaaaatacttaaataaagttgagctttatgcctgaatttcattttaaattatttacatagccatattgactttcttacaaaaaaaaactatgactccctgccaatccaaaaccataatctttccaagtaccttggctaaccttttttgcataaaacttgctaataaactgtgtgctaatatgacagtttattgattcggcggaattgaacgcattaaaacgggttcgcaatactgggaaaaacgaatcgcatggggcgccgccaagtcaaatggaatcaggtttgcaatctggccaccttgcacgtgaatagaatcgcgttctggaccagcttggatttccctcttccaatcgcgcagctcggggctatcagtctgcacttgtttacgctcaatttcattgagaacgtcgcaccgctgcactcgggaatttctcgatggaggtgttggctttggcttgagcttgggagaatcccaatctcggccagacttttcccggtgtcgctgccagttggttgataagacagatcggtacacttggctgctctatgactatataaagcgtgttgttctcaacacttagcatcagttgtcaacggctaatacgcgggagtcaagctcagaattcaaccacaaaaaccaacaacatgaaattcctatcactcgccttcgttttgggtctgctggctctggccaacggtgagtaatgccaactatttacaaactaaataagttatttaattatgattttaattatatttccaacacagccactcccctgaatcctggcaatgtcatcatcaatggcgattgccgcgtctgcaatgtgagggcctaagggcagcggagaatgaaggatgccagttgaagttcacacagccacacatatttttaagtcgaaaatgtaatagaaattcctagaatcaagtgcccatattaaatatattccaaacaaaacaacatattatttgtaatggggaaatattattgatttctatagataacaactgaaaggcagttgaggttcaggcaaaccacttaaatgtattccaattgcaaaatgtattacaaagttctaggaaaacaaactatgaaacaatcacttgtcattaaaagacgcttaaagtcagcttaatatttgttatttgttagtttagagatctggaatgagaaacaaattattgaaaatgatcttaggcgatggagaataccgtatttaattcaaataaatgttttaaagactaatacaaattttatattatcatattatgatttgattaattacattattatccaaatagatcagccttgctactgtatggtttagcaataaaatcgatacagcttaccgattttttgtttaataaataacaataattaaacaactaattaataggcactcctttccagacatttctttaaaataactatgtaaaatcccgcaaaataattataaacaattatatatataatatagcaaatactatatgtactatggcatataaaaagcagagcactcgcactttggcagtcagatttattcgaaatccccaaggaaaaacatgaaagctcttcaagtcgccggaactttgatgctgcttttctgcctgctggcagctgttaatggtaattatttaatgaaataataaaatatatatatgatatttttagctaatcatttccttattgcagctacgccgggacaagtgtatatcaatgggaaatgcattgactgcaataagcctgataatgatccgggaattataattcctccagaccataaatcagctggatccatgtcttacacactcacatctggagccatcttctttggaattatatatcatatattcagttaaattactatgtaatcaataagttaataaaataatatcttttatttctcaaaaaaaaaccttaagcttgtgacaaattgcgaacttaaatacaacccttatca

SEQ ID NO: 24950 - DNA, 280 bp, DROSOPHILA
ggagtcaagctcagaattcaaccacaaaaaccaacaacatgaaattcctatcactcgccttcgttttgggtctgctggctctggccaacgccactcccctgaatcctggcaatgtcatcatcaatggcgattgccgcgtctgcaatgtgagggcctaagggcagcggagaatgaaggatgccagttgaagttcacacagccacacatatttttaagtcgaaaatgtaatagaaattcctagaatcaagtgcccatattaaatatattccaaacaaaacaa

SEQ ID NO: 24951 - protein, 39 aa, DROSOPHILA
MKFLSLAFVLGLLALANATPLNPGNVIINGDCRVCNVRA

SEQ ID NO: 24952 - DNA, 2464 bp, DROSOPHILA
tgtgacggattgaacagccccaggctgcagggaggaaaggaagcggaagcggatgggagtcagtggccgtttccggacaagtaccacatgaggaacacccggatccttcaggtgtcaaaggctcaaatcagcgaggtgcccatggaggtattcgaggcagctcagcaggagctagtgaatatcgtgagcttggatggcaacaggttgctcgagatgcccaaagatctgcccttgctctccgagcacctcacccagttggtcctgaacaaaaaccagatctccttcgttcccaccaacatctcgcagtactcgaagttgactaacctgagcctctccaacaatcttctgtgcgacttgcccatggagttgggcggactgcggctgctccgcaatctggacatctcccacaatcgcttccgccagttgccacgctgcatctacgagctagagagactggaaaccttgtcggcccacgacaaccagatccgtgccatcgatgctagtgaatcgggcctgggcggaatgcgggaactgaagagattgaacttgggaaacaatgacatccaaatagtgccgccgatcttgggcaaaatgcagaatctcgtggaattggagctgtggggaaatcccttccgccagccccgccaccagattctatcgatggggactccggcgctgctcagctacttgcgcacccgcattcctatataaatcatatattatttattattaattcaaatcaaatttcaaagtattgccaaataaattgacagcagtgcagtttagcccctaattccgtagttttgcttaaatcgtgctcatggaagattcctcaccaaagattcctccttgggtaagtttctggcagcctgagtttgctgaactcgtaatgatagtaagctctgattcctgcgtcatcaaatcaaataggtcaaaacctagttggctgggaagaggacactactatactcactactagttacatttgcgaagcccgaaaatgtccagaagttcgaggttatcagtaactgaaactcagcgcaaaagcactccagtggtaaagaaggcggttatgtaagttggaacacgaaatcgtcaacagcaacagaccccttgacctgctccgcatttgtccatctccctagtcgcagtcgatcctacgatggggatgcgttcgtcaatctcttcgcccatcgcggcgcccgagacatcatgatcttggatagccatggagtgcccctccgatccacctgcagtcagagacgcaccttcgtgttcgtctctaacctgaagccgctgctcttcatggcccgcaacgtggtcagggatctggacccctcgaacgacataaccttcatgcggattcgctccaatatgggcgaaatccacatgaccctgggcacggacttcattttgatcgttgtgcagaagctgaggaggctcaggagcagctcaacatcataaaacatttccggtcgctgtgcgtgtgtgtgtgcggatgttaattgtactgtatccatattccacccaaattaaattgcatgcaattgcggcaaatgagcaaaggtcacagtggattgggcggaaaattgtaaaatttaggaaaagcccagcgagaccagagcaaactaatccgtttatgcagcgcttgcaatccggaaaacgcatcaaagcggcaattagtgcagcctcggatgcgtcagttgtatcgtggtttggaatccaacgacctctcaattgggtccgccacattcattaatcttcgctggtctttggtagttggcctttggctttctgaaagccacgatgcagcttcattaaaacccaatcacgctggctgtcagtaagccaaagaccccactgcgcatcgctcgatggccacagattaccggaaaaattaatggataatggcaattacacttgggcgggctcacaacgtgactttcgggaaatcgttacatgagtacagtttcacctgtagagcgaataaaatattttggatttttttgcagatccattggaagtcgagatatgaaaagtaacataaaaactatacaaattcctgtggatcagtttacccaatcaaacatgcgatgaatataatcaatagaaggcacacatcgagctttgtttgtatgcctcgtttaggtttgcctcgtaatttatagaacaaaaaaatcacaatttcccaggggacgaaatgttaaactcctacaatgaaatctggttgctttgtgcccattgttcggcaaataattcggcattgttttagtttccaattgcccgtgtttattcaacctgttgttggagcaggaatacgagtatggcattttgccgggggcttacgaatgtattttggcggtgtttaagctgtcaggatacatgtgctgcccgttggttccgtgctcttttattattcaatgtggtgaaaatatttatattacggccagacagagcagcaaat

SEQ ID NO: 24953 - DNA, 393 bp, DROSOPHILA
atgtccagaagttcgaggttatcagtaactgaaactcagcgcaaaagcactccagtggtaaagaaggcggttattcgcagtcgatcctacgatggggatgcgttcgtcaatctcttcgcccatcgcggcgcccgagacatcatgatcttggatagccatggagtgcccctccgatccacctgcagtcagagacgcaccttcgtgttcgtctctaacctgaagccgctgctcttcatggcccgcaacgtggtcagggatctggacccctcgaacgacataaccttcatgcggattcgctccaatatgggcgaaatccacatgaccctgggcacggacttcattttgatcgttgtgcagaagctgaggaggctcaggagcagctcaacatcataa

SEQ ID NO: 24954 - protein, 130 aa, DROSOPHILA
MSRSSRLSVTETQRKSTPVVKKAVIRSRSYDGDAFVNLFAHRGARDIMILDSHGVPLRSTCSQRRTFVFVSNLKPLLFMARNVVRDLDPSNDITFMRIRSNMGEIHMTLGTDFILIVVQKLRRLRSSSTS

SEQ ID NO: 24955 - DNA, 10083 bp, DROSOPHILA
caccaattattcattaattgcaggtttttaatctatgttacctataaatactgggcacgtagtccttgaggcgcaggatctctgctattatagaattacccaccgacactatattcagcagattctgcccacaggcattattgtcatccagaaaactcattatgcatttccttgatttctgtgattctaacaaatgcctctctggagaaagcttaatttgtataatcacattattaattaaagctgtacatactttttatcagtccacgaattatgttattgtttgtttatattgtctattcatttagtcatatcaattcttttttgcactagtgtattatctgcagtaatcttacataagtccggtcacactattttgttgttatagagttaccatgaacttcgaaatgttggcgcataaatttgaagtgagaaactgatgataacaacctatgaggtacataatttaataacaattattaaatttattaaaatgagatatgaaactactattgtattgaataataaaattataatattggcttaataactctattcgatgcattaaagtgcaataatgatggaagatctaatggtttccgactttagattcacgatttcaattttaaaatttaaaaaagaaagcaagttgtaatacgacattaagaaaattgccaattcgttatgtgtttctggttgaatccaaacgtgaatttggttctatttattttgtgttagattttcattctatgggagctacacaaagtttcagtaggattaattaacataataaatgaatataaaaatattaataaaattaattaattcaactacataaattgtaatgatttaactagctaattaactgagataccgttacatattccatacgacataaaataataatatgcataagcaaacactgcgcactaaaataaattctgcatattcccagctaataattctccgtgctcagttgaagttttctcaattttttcttttatttttttgcttaatgttaaaacataataataataatatatatatattcagttatatgcctaccaaactatgcgctgtttacggttgcatctgcattttgtttatcatattaatttttacacacaaagaatttgcttagaatggtttcactttttgcttaggtttactgaattacatcaattgttgtcaatttatttgttataatttttttacgggactctattttacaagatttatcgagctaattgtataaaatttgtctattttgtgtgtagttcagattggattaggggatttatggatctatggagcctaatgaatcgccattcttaatggatgaacgagcgccactaataaaaacatattttttcggtgtgccaagttgtctgcgctcgcatcgctccttgccatcgataatttgttaattacgtttgcgtttttacctagttatctattagaaaaaccgtagcctagaatgtatttacaatttgttgggtttgttgtggtcttgcctaacgattgatttccgtttatacattatgggtaattaaaaattacatcttttttaaacaactaaacctaattcaatggatgtttaaatggatatttttcggttctttttttgatgtgttcttttgttttgctgttgctgaacttgtttcgatctagttggttttaaaaacctttatctgtaattcggtttcgatttctcttcacgcgcccttgctttttacttaaaatctaggaattatggttcgttttcgtttaacaaactaagctaaataattaaatattaataattatgtttatatcgtttagataaggccgtcaatgcagttgatgcaaacattattatgttacaaattacaaatcaaacgcccgctgactgcgcgctctcttttaccttcttttactttcctctctattattttattctcttcgtttactctggttttgttttgtttttggattggtttggtttaagttttacagagaatttattggaaaaataaacgagctttaaattaggcttaaaatcaaatacgattagaatttaggatttatgtaaataaatgtaaaaatagaaattaaatagagccgcctaactaaaaagaaacaacaacaggggacacgcgacgcatttaaagttgaggctaaaatatattgcaagtggatgaaatcgtaaagctgtataaaacaacaacacgacagtccacggagtaggaggatcggcgaggagaagacggtgcgattgatgggcaacagcagcgatcacttgaggtatgtcttgaacagcatggaactgcgacagaactcccgctcttgctccatgtagaagagcatgtcgcgcaggttcacacgttttatgcgaggccgtaacgtcgtcggcgcagatcccgagctgcttagcactccgccgccacttgaaccctttttggataaacacagcttaattaataaccgttctggtagtcaactatcctaaattttagacactatctttttgtataattgcaccatacataccgctcccgaactgactgtttcgccgtctagcttcagctttttccgaggtccaatcgcctgcagcgccgtcagattggcatctcgttgacgcaactcctccatttcggcgcgttgcatctccttggcctaaacaacaagagaaagacttaagtaaacggctacagagaaagacgattgcgaacacaccctcgccttcatcttggcctgctcgggatcttccaccctcgaccgtgacttggctgcccgcagcagcatctcacgctccagttcctcgtgtcgcttctgctcggccttgtccagctcctcgagaaacttgatctgaccgcgcacatccttggcgggctcatagcgtggatccaactgtaagaaataggaaatcaatattttcatttgaatataaaaccatttccaacaaaccttgatgacatcaatgcggtgctccgctatcacagccaacttctcaacgatgttcttcaggcgctcctgacaggcgtgcgatatcagaacggccacatcctgcgacggctcatccagtcccgcctccgaagtaattgcccgtattctagcttgcagcgaggggagattgagaaatacctcatctttgcaggatcgaatctgcgtgccgatgttttcggtacagccgagaattcgctgcgactcctccgccaagttaacacctcccatggcggcaacatcgttgatatcatcgtcaccgtacatcgaggacatggagctctgctggaaaaacgagttcgcagcggacgccgctcctccgctcgatgtgttcaatttggcgtccatttccatggcgtcgcgtttctttttgcctatcgccttgttgatcgcaggcggcggccttgccatcgtcttggctccaatcggtgtgagagatgcgttgatccgctccatgtgcggcggatgcagcgacggcgccttgatctccaccagttttgcatcgaagtgattgctgttgtggttcagcgaattttgcatctgctcacgggctcgaagagcttcggggggaaggtggaccgtgggtaacgatggtatgggcagcgttgtggtcgaggcggagttcaacgtagacaaaacagacagcgtgggtgtcggcggtggtccacctgagattgccgccagcgagggtggatgcaggctgggcgtaatcgctttgatttgcgtctgtcccaccttgacggcagtgagtttgttcgcggtgggcacactgtttggcggacgagtggtggcccggatctggaccgatccagtacgctgcagctgagcatgctgcggtccacgtatttgcacaatgttctgcaaatcaatattgaaacgatatgtttattttatattgataaatcaaagttttcataaaataaaaatttaatatataaaataaataaatgataagttaaacttaccgcctgaccaggcacctgcaacgagggtatctgggtgcgaattcctccagtgttgacgagacgcggggccgtaggcaaccgaatattcggtggctgcttcgatatcgtggtgtggccaatggtgggtcgcggcgtgcccaaggcattcggcgttatcatacgcacctgcgtctgtccaatggtcgttgtctggctaggaccgatcggacggatttgcgcttggattttctaaaacaaatggaaaacaaatgaaaccaattcacaaatagttgaatggcttggtcgacttacaggcaactgttgagagagtccggccaggccgagaacgtgctgcggcggaggtttaatgccttcgatgaccagctcctttgtgtagagggcttgtcgtagcagaggcaaactcttcttaaggaatccaatcaaacacggctgcgggctggcgttgagcaagcgctccaggcggtcacaaaactcctccggctcgacattcgcattgaccagctcctggatgagggtgcgcacgttcttctccaccggcttcggttcccgtgtcgacaattcaattaaattggctagaaacttgcgacacttttctttggtattgccctgctgcgtcgtcgtcgctgccgtcgtactgctgaccgccgttgccgttcctcccgcggagcttacattgttcacctgctgctgctgagactgctgggccggtattgtttgaatctgcgtaatctgcggcagttgtggcgcctgcgcatttagttgcgtcagatgcggcggctgcgaagagtttgcatatccactgcttgccaccgaattgacaatgatgttgctggtggcggtcgtgttggtcatagactgcggcagaaaaatggataattagttatcagcttgtttggataaatgaaaatcatatatagaagtgcaaaattaagaccaaaaagcgttagaataattattaaaaatatttcatagcggaataaagatgatgatggttcttttttatcaggatgggggagttcaaggtcctggtctccaggtatgtgtgcaaggggcagggctatggctggggcatggataatgaggtgaactggttacaatacagtaaaatgccccaaggagcaaggttaattttgttcgaagcacaaagatatttatttgtgaaaatcaagtgggttattaacatactcaacgtttgataaatgaaaaaatctttgaaaaagaaaataaattgattatattgaatactaagaagaaagaatcgcgttgtgaaggagtttttgttattacacgaatgataattttctgagatcttactaggcattggcataaggcattatacaccagtggatttcggttagaaaatataaatcaaagaaggagtttttgagaattagacaacagcccagcacacatcgttggtaaagccggtgcagcccgatagccaggcctctagcatgatgtttggtctggaacagcaactcgtgtacagcgcatttaactaaatcaaatcgaaataaggagtatcgaaaatacagacagttacacaacgcagcatgcagtacatttacagtatattatatatgccatcatattcttgataaatcaaaatgaagtgttcgattgtgacgaaccaaaacggaactgaagcgtaggcatagttatatataagttatataaataagaagatcaaatccaagtgcataacagacaaaggagaacagaggagagaagagcaaaaaatatgttcgaataggagtatatcctgctggcttctctttacgttttgcttgatctttatggtggctgccacattggcggcagctgctgcagcagcagcggcagcggatgcctgttgctgtttctgttgctgctgggccttcagatgttgctgctgttggagcttctgctgctgctgttgctggttagtagcgggtttgttgttgttgttggtagtggtggtggtggtggtgttggtggtggcattgatactattattgttattattgctggatgggactgtggatgatgtacggacaatcgttttgcgcagtgcaatactagtgctggcggttgtgctggttgcatgttgctgctgttgcgattgttgctgctgttgcgattgctgctgatgttgttgttgttgttggtatctacttacagctgcagccggcacagtttgcagacggatctgtgtggttgtgggatggtttgtggtgcttgtcgtgttgctgttattgctggtgttggttatagtctgtgtcaccgtcggcggacccgtcgtcgtgcccacgcgcaacagctggaatccgttatccgtcttgaccagcaatgccggggtctgacccgtattaagtgtgcttaaagttatctaaaagtagagagagaagacagagagactcggttttcatctgctggagcatggtgtgtatggtgtatggtgtgagtgaatggtgggctgtgcacatgcgtgtttgtgaggagcgtggctgggttagggagctctgtgagttagtagggaagaacccaccacaacaaccatagtaatagcaatattatccttcatactcaccgatggactctgcggtctcacgcccgccatgtgggagttgatcaccacgcgactgagcgggttggtgggcacattcttctgctgctgctgtgacggcgcctgttggcgcatgcccaccaccacgccagccggcagcattgaattgagcagcggttgaccggcctggcaaatacgcaacattatcattagtctatcaattcatctcatcacattttcaaagtctatttggaccaaaggatgcattaagaggttttgcgggattctaaattagcctacatcatgcagcagttggctcggcaaaggaccccaattagtgcggaaataagttgtttaactgattctctctgtgctaaccaaatttgaaggcgtataatctactatatcttgttctatttaaagcgagcattgaaagcaatagttctacaaatgtaatggtttggatattggtgtagaataaggtttctgttgaacaagtgcgtgtttttgaacagttgttagggatttgatctttgggaaacttttcggcattgggataaagtatttcaaattaaagatatgtcttttatggtgattaaactgctttaagttctaatgaagtgaattgatatgacattcgtaaaaaaagaaattaattttaaataaaagtacaaaaatgagtgcaacaaactcagatataagtttcagatttcaactcagatataagtttcagatttcacattaatgaattaaggatattttttaagcgtaaaatacgttatcaagcctgggactaaccccatttggataaggatatgggaatttcgggcagcgaggtagacagatgaaagcataataaaagtatacaaccaaagtgtgtgcggccactactatccgattcgagcgaggaattgagggggttttgattggggatcagatttggacgaagtgatacgcccgagttgcgatcgcctagcgcccgaagagtgggtttagctttaatatggatacctgattgatggtcttggtcatggttacgattcctgctggtgcacttgagactagacccgccggcagggtgacagcatggtggttggatttaataactagggtttgtgtttgggtggcacctacggattgcgtctgctgttgctgctgttgttgctgttgcgactgctgctgctgttggacatgatgcacctgctgaagtccctgatgctgaccaccgatccccgcctggatcgtcttgatggtggtggtattcggtagctgggccgtggagatgaccgcgccgggattgccggctatgctgatggtgccattgggcagcggctggctggtgaaggtgatgcgattgccggcagctgtctggctggtgttcatcgtgctgtgtggtgtttatgttattggcgagtgtgtttctcctattccactgacttctgtgtgttggtgtgggcgagcgatcctgttccgatcaactagttgcgcacatcctgtgttggtgttggcggagttgttgcatgctgtgcgctccagaagcgaactgcaatgcaaggggaggcgcttttagtatttatacaagattcggctcgaggcggtggagaaacaggtaggcggtggaggtgctacctgaccgccggctacctggcggccgtgcgccataaaccagatgctgcgtacacctggatgccgcgcacaggtaatcgcattcaccttggccaaaaaagcgggtgctccgctgaattggtgctgcgctggctcactcgcactcgcctttgccgtcactgtcgtcggcctttctcctggcgcatccgttgcagtcgttgtcgcgtgtgtgttatctcgctaattcgctgccttttgtttgcgccgctaagcctttctacacttttcccgatcggcgggttttcctgcgcacacacacactcgcgcgtgctcgcacggactgattgttgagcactggaagaatgctttattttgattattttgatgtacaaaaaatttggcagcgacggtgccagaacgccgccattttcacgaatgcgcgtgcaaagcgaaaatcgaggctggtggacgttgccagatagcgtgcgaaaaacacgtaaccaacgatctggcaatgccgctcgtttatgcgggtggcgagtgcgcaatattcgtgaatgcactaaatttaaaaaaaagttcaactcgaaagtggagcacttaataattgatgatttctattaggaaaaattcatatttttcgaaaatccgcataaaaatatttaaaacaaaaagaaaacaaatgcatcttgtacatgtctccagtggcaatatggagcatcgtgccagccgtagtattagtaatttctactttagtggccagcgggtggtggcataaacccacgtccgtgtctgtgcgactgtgtgcgtgtgtttcagtataggttttgtacagcctgcaatgtcgggggaaattttctgggccctgtggcagatgcactcacttcaattcattttgcgttcaaactcggtgcactggggcgcattttaaacgatttcccgttgcgtttctctggcgatttagccgaaaaccgagtaaatattgtttacggaccgccgaggtacggacgagttgtgcagtgtgaccgttggcgacaatatcgtcgtgttaaacgcgataccgaattaaaatactagaaaagaagtagtgacttggatatcatgtcgattttttatagccttgttgcgtacattttcaaaaccaaaaacgtttgctggcattttgatgccatcggattttagccgcataccaaattaattatatgctcattagtttttatatgggtaataagccacaatttttaaggatcaaaataatttattttaatacattcgaatacgatacattttaaatcctttgaactattattagagtactgtttaaagctgaatgttaggtaattgaataaatgaagaatacgctcaaaaattagaaactactaaaactattattagagtactgtttaaagctgaatgttaggtaattacagaattgaagaaaatgctcaaaaatgttattatttttttatatttaaacgctatttgctcatatacttaaatcatatatatattcaaacgaaggagtagtactttgtaacggtcaaacaatcgatagttccactttgataccgaactacatgccccaccaccaacgtgatggtatttttgttagttttcggtatctttgaaatgctaaacttcagcacaacgggcaaaataattctgtagagcgagttaaatacatatcgtacaaatagcggtcttaataaaatagaccataccaattttaatattaaacaaattccgttaaataagcaacatatatagtgtaatggtatattttccaaaaacttccaaaaataaaaagtggtatttgtttcaagtcgggctcaacatagtatgattatccgattacgctgcggtcacactagtaccggcccatagagacggaagaaaaattttatttaaccgatttcaggtaattgccatttgcattaactgttttttaaccatgcacaactagggctaaaatgccgttggaaaaga

SEQ ID NO: 24956 - DNA, 4559 bp, DROSOPHILA
acaatatttactcggttttcggctaaatcgccagagaaacgcaacgggaaatcgtttaaaatgcgccccagtgcaccgagtttgaacgcaaaatgaattgaacattcttccagtgctcaacaatcagtccgtgcgagcacgcgcgagtgtgtgtgtgcgcaggaaaacccgccgatcgggaaaagtgtagaaaggcttagcggcgcaaacaaaaggcagcgaattagcgagataacacacacgcgacaacgactgcaacggatgcgccaggagaaaggccgacgacagtgacggcaaaggcgagtgcgagtgagccagcgcagcaccaattcagcggagcacccgcttttttggccaagttcgcttctggagcgcacagcatgcaacaactccgccaacaccaacacaggatgtgcgcaactagttgatcggaacaggatcgctcgcccacaccaacacacagaagtcagtggaataggagaaacacactcgccaataacataaacaccacacagcacgatgaacaccagccagacagctgccggcaatcgcatcaccttcaccagccagccgctgcccaatggcaccatcagcatagccggcaatcccggcgcggtcatctccacggcccagctaccgaataccaccaccatcaagacgatccaggcggggatcggtggtcagcatcagggacttcagcaggtgcatcatgtccaacagcagcagcagtcgcaacagcaacaacagcagcaacagcagacgcaatccgccggtcaaccgctgctcaattcaatgctgccggctggcgtggtggtgggcatgcgccaacaggcgccgtcacagcagcagcagaagaatgtgcccaccaacccgctcagtcgcgtggtgatcaactcccacatggcgggcgtgagaccgcagagtccatcgataactttaagcacacttaatacgggtcagaccccggcattgctggtcaagacggataacggattccagctgttgcgcgtgggcacgacgacgggtccgccgacggtgacacagactataaccaacaccagcaataacagcaacacgacaagcaccacaaaccatcccacaaccacacagatccgtctgcaaactgtgccggctgcagcttctatgaccaacacgaccgccaccagcaacatcattgtcaattcggtggcaagcagtggatatgcaaactcttcgcagccgccgcatctgacgcaactaaatgcgcaggcgccacaactgccgcagattacgcagattcaaacaataccggcccagcagtctcagcagcagcaggtgaacaatgtaagctccgcgggaggaacggcaacggcggtcagcagtacgacggcagcgacgacgacgcagcagggcaataccaaagaaaagtgtcgcaagtttctagccaatttaattgaattgtcgacacgggaaccgaagccggtggagaagaacgtgcgcaccctcatccaggagctggtcaatgcgaatgtcgagccggaggagttttgtgaccgcctggagcgcttgctcaacgccagcccgcagccgtgtttgattggattccttaagaagagtttgcctctgctacgacaagccctctacacaaaggagctggtcatcgaaggcattaaacctccgccgcagcacgttctcggcctggccggactctctcaacagttgcctaaaatccaagcgcaaatccgtccgatcggtcctagccagacaacgaccattggacagacgcaggtgcgtatgataacgccgaatgccttgggcacgccgcgacccaccattggccacaccacgatatcgaagcagccaccgaatattcggttgcctacggccccgcgtctcgtcaacactggaggaattcgcacccagataccctcgttgcaggtgcctggtcaggcgaacattgtgcaaatacgtggaccgcagcatgctcagctgcagcgtactggatcggtccagatccgggccaccactcgtccgccaaacagtgtgcccaccgcgaacaaactcactgccgtcaaggtgggacagacgcaaatcaaagcgattacgcccagcctgcatccaccctcgctggcggcaatctcaggtggaccaccgccgacacccacgctgtctgttttgtctacgttgaactccgcctcgaccacaacgctgcccataccatcgttacccacggtccaccttccccccgaagctcttcgagcccgtgagcagatgcaaaattcgctgaaccacaacagcaatcacttcgatgcaaaactggtggagatcaaggcgccgtcgctgcatccgccgcacatggagcggatcaacgcatctctcacaccgattggagccaagacgatggcaaggccgccgcctgcgatcaacaaggcgataggcaaaaagaaacgcgacgccatggaaatggacgccaaattgaacacatcgagcggaggagcggcgtccgctgcgaactcgtttttccagcagagctccatgtcctcgatgtacggtgacgatgatatcaacgatgttgccgccatgggaggtgttaacttggcggaggagtcgcagcgaattctcggctgtaccgaaaacatcggcacgcagattcgatcctgcaaagatgaggtatttctcaatctcccctcgctgcaagctagaatacgggcaattacttcggaggcgggactggatgagccgtcgcaggatgtggccgttctgatatcgcacgcctgtcaggagcgcctgaagaacatcgttgagaagttggctgtgatagcggagcaccgcattgatgtcatcaagttggatccacgctatgagcccgccaaggatgtgcgcggtcagatcaagtttctcgaggagctggacaaggccgagcagaagcgacacgaggaactggagcgtgagatgctgctgcgggcagccaagtcacggtcgagggtggaagatcccgagcaggccaagatgaaggcgagggccaaggagatgcaacgcgccgaaatggaggagttgcgtcaacgagatgccaatctgacggcgctgcaggcgattggacctcggaaaaagctgaagctagacggcgaaacagtcagttcgggagcgggttcaagtggcggcggagtgctaagcagctcgggatctgcgccgacgacgttacggcctcgcataaaacgtgtgaacctgcgcgacatgctcttctacatggagcaagagcgggagttctgtcgcagttccatgctgttcaagacatacctcaagtgatcgctgctgttgcccatcaatcgcaccgtcttctcctcgccgatcctcctactccgtggactgtcgtgttgttgttttatacagctttacgatttcatccacttgcaatatattttagcctcaactttaaatgcgtcgcgtgtcccctgttgttgtttctttttagttaggcggctctatttaatttctatttttacatttatttacataaatcctaaattctaatcgtatttgattttaagcctaatttaaagctcgtttatttttccaataaattctctgtaaaacttaaaccaaaccaatccaaaaacaaaacaaaaccagagtaaacgaagagaataaaataatagagaggaaagtaaaagaaggtaaaagagagcgcgcagtcagcgggcgtttgatttgtaatttgtaacataataatgtttgcatcaactgcattgacggccttatctaaacgatataaacataattattaatatttaattatttagcttagtttgttaaacgaaaacgaaccataattcctagattttaagtaaaaagcaagggcgcgtgaagagaaatcgaaaccgaattacagataaaggtttttaaaaccaactagatcgaaacaagttcagcaacagcaaaacaaaagaacacatcaaaaaaagaaccgaaaaatatccatttaaacatccattgaattaggtttagttgtttaaaaaagatgtaatttttaattacccataatgtataaacggaaatcaatcgttaggcaagaccacaacaaacccaacaaattgtaaatacattctaggctacggtttttctaatagataactaggtaaaaacgcaaacgtaattaacaaattatcgatggcaaggagcgatgcgagcgcagacaacttggcacaccgaaaaaatatgtttttattagtggcgctcgttcatccattaagaatggcgattcattaggctccatagatccataaatcccctaatccaatctgaactacacacaaaatagacaaattttatacaattagctcgataaatcttgtaaaatagagtcccgtaaaaaaattataacaaataaattgacaacaattgatgtaattcagtaaacctaagcaaaaagtgaaaccattctaagcaaattctttgtgtgtaaaaattaatatgataaacaaaatgcagatgcaaccgtaaacagcgcatagtttggtaggcatataactgaatatatatatattattattattatgttttaacattaagcaaaaaaataa

SEQ ID NO: 24957 - protein, 921 aa, DROSOPHILA; identical to SEQ ID NO: 11376

SEQ ID NO: 24958 - DNA, 7051 bp, DROSOPHILA
aaggatcgtcctcggcaagaagcctactacaatgcgatattggggaataaggatctgttcaaggacaagatcgtaatggatgttggtgccggcacagggattctgtccgccttttgtgcgaaagcaggagcccgtttggtctacgccgtagaagcatccaatgtggccaccaaagttgcgctggatttgattgaggataacggcctgacgaacgtggtgaaggtgatccagtcgcgtgttgaggaattcgtactgcctgccgaggcggaaaaggtggacatcattgtgtccgagtggatgggcttctacctgctgcacgagggcatgttggactcggttctcctggcccgggacaagttcctcaaggagggtggactcctgttccccagcgagtgcacaattttcgtggcaccctgctcggtaccatcgctcttcgatgattggcacaacgtggacggcatcaaaatggacacgtttgccagaaaactcagaacccaaaagtcatcccgaccggagattacacagctgaatccgcaagatcttctgcacgagggcgtcgtctttcactggatgaatctgctggatgtggaagccagcgatttggacagcattcagttcaaggaggtaataacagcccagaaggcgggcaatcaccagggcttctgcatttggttcgatgtacagtttcctggcgaagattttgttctaagcacatcgccgctatccccgccaacgcattggaagcagtgtgtagtcgtcctgcccgaggaatcctgcgaaaatctggaggagaagtcacccattgcatttcaaatcacaatgaagcgcagtgctgccgatatgcgtaaatacaatctggaggtggatttgctagaccccaacacagaggagcatccagtgccttgctcctgtcacatgacgaagtgcattctgacggaagctcatctaaaaatgatggacacctcatgagttacatgccatctcggaatccgaacaacgatctgtggggaaatcaatttatttaacatgtttaatacaaatacaatatatatctcagtcaaacttaacgtctagtccagcactttcaaaaatttaattaaaataacgcaggccgacggctttaaatcaacaaccgctgcagctgactctgaagttccttgagtgaatgttgaagacgattagtgtcgggcttttggtagcaaatattcaggcagccggccactatgtcttgagccttgccaacaattcgtcgtctgcaagttaaatgtgaatgtaagtaaatcgtatcggctagcattttacttttgcacttactttgaccggtaccaaatagattgtgcgttgtctgccagaagcgagaccactcgtatgacggattgtattaaatgccactcattaccctcgttggcccacactcgttcgttcattgaaatcattctgaaagtttttaaaagtttagcctttaaacaattttatctctgcgaaaacccttcaatacgtacctcgaatagtattccaggagcagttcaatgtccaaattcatactcaccagtttttccggcactatgccctcgggaaatcgcagttggcaggctttaacttccagttcccttatgagaaaggcaaagggaaagcaaactccagactcgccatactcccttaccaagatttcgattttcgtgaataacctattgcagcgctcactagttgtgcccggcttatccacaacgctgttgataatctggccccaaacggactcgatcagtagggggtcgttgtgatgcgagcagttgagtatggacaattggcactcccaaaggtcgaagggctccgcaaagtgctggtatagctgagttatgtcgtacaacgcatagtttagttccttaacagccgtagctgcctccagcttatcgctagccaactctgtcatcgcggcaagcactgatttttgaactcgtgcgatgtccagctgaatttttaaattatgttattaaatataggtcaccacatctttccagagatcttataacgtaccttatcctctagctctttcaggaatattccattgcttaatgaagagccaacgttaccatttcgcatacacataacagcacgcaccaagtactcaatgcgctgctccagattaatgttttcactgcgtgtcatagccaaattgtccaatatatgggctgcctgggaatgatggctattcttttcgtagtacttccacagcaaatcgataagaacgacattatctacattttgcgacacactgcgccgcaagaactctcctaatgacggctcaaccacgtctaaaagctctttgagcatgtcgtgggccagcagccattcgtagagcgttatatgaatgagcgggtctttcacctttagggtatgggccactatttttggaatcgtttgcgtagcaccgttttttgcatcggacgctttagccgtacctttaagtggatttatagacttatcctgaacgtgcgtcttgttgcatactctctggtagatatggtccagcataagttgcacttccttgtagtaggccatcctaagatgtggaaataattagtttttccaagaaaaaaaaaaactattaaagaagttaccttgtggcaaagcaagtgtaaccctcgcgatcatcggcgggttccccattgttatagaaatgaacaccaacctcctctggatcactttttgaggcacaaacagccgaaagctcgatcactccctcaaagaagtcagccgatatgaattgcatgcaaatactatgcagtggcaatgtgggagcagcttccttgcacatatgcagggtggttcgcagcatatgttccttttcggttgccgaagtgcaattctttgcattcatcaacaactcggtggccttgtaggtcacgtcatcctcatgcctgtataggttggggcagttctcacgtaagttcttggacacttcagacactcccgccgcgtccttcagatacagattgatcagcgagatgatcaagaatgcgcagacctctgaacgtgtaatcagaagatcccggaaggtggagcatgtcaacaacttctgatgttccggactgagttgcacgcatatcagctggaaggaatgcgagtttaggatgttccacagcgatataacctcacatgcatgttctgcaaacggcggtagataagttcaagctttatgatttaatatcccaactttacttactgacaaataggttgagagcggaaagcgaacgtgtttcctctacttgagcctgctcggacaatacgcgttgctcaggaattggcagcaaagtgttgcccatcatgatggtgttatatgaattggttctatccaaatggttatcaaatgacactcgagtagtcgctgcaacaattgtataattaataagtaagtaccttaacttgcaataaaaagttcacgacttacaggaaatatcgtgcacagagtgcacttccagaaagctacgcagggaacgcagatcggatagcaagagggcacactcactctgacttagattagagcaaaattgctcatttacacagcgcatttgccaaacagaatgcagcatgcgggagacatacatgtaaagtccgtcgtgtttggccgagaaaacgattggggaattctcgttactaactgccacctgtggtggctgcatatttccaactgataaatacatatttgtgtttactatttcgcaatctggaagatcttatttaactcacttggacttatgggctgattgaactgcgatccaggaaaaccaaccggactatttgccacgctattcggcattggcgtggacataaacatggattgacgctcccttacattcgtcgtattcgggcctagagtttgattagccatattgcggttgctggcgttcaggaacttttgatgctgatagcatggctctccgccgtacagcataaacgcctgggcggcccacaaagcaacgtcactgccacgataagtatccgatgtggccagcagcagagccgtgacacatgcctctcgctgattctgcgactggaagaacatcttcacctcctcgtggtgtgggccattgcacgacagaaggatctgacgcagtacgtccaccattttaagcacctctatgatatgtgtgccttggttggtgagcagggctactttgcgggcgtgtcgggcactatttaagggtgactttcgttgtggcgtcgacggttcatgtacctcagccaatccccaaacaactccatccaggctctccagagccgtcgactccaccaggtaggtaaagttaaccgatggggcagagctgagcgaccagaggagatcctgttcatgctgttgcgttgtgatcatcaacatggttccctccgtgtagtgagcggcatggacctgctttggtttgttggtggtggcatttggggtgtagccgggtggtagacgcacgtggagcagataaagtcccttaggagcctcagcatttggagacagtggtggctgaactgctggctgaccgaatcctgtattctcacctggactgcaaggaaccgcgggaccaaattgttgcttcacatttagcgatgttgtggagaaaaagagccgcacaccacactgagtaacggccacaagatgtagtttgtcggcatcgtcggcgctcagagggcagatggctttcacacttttaaaaatggacgggtccacagtcctaaagtttaaataatggttattaattaaccatactacagttaaattctttgcgaaactagcacttacgtgatcagactaactgcttgattcgtaatatcgttctgggtaatccgacctagtcttcgagctgtcgtgtaactcgtactgatgtcccaagcctcaatgacacctttttccgtaaggacatagagaagcttgcgactgttatcgatctcaatgtgttcgattggatccacttcctgcaaacaaatcgcgctaaatagttacggacattttttgaagtaaagacaatagttaccgaaaagaccttcaaaaaactgggaaccatataggagaccagtccttgggagagatttattttcttgcatcgcttgccaaaccaactggactcggcctgatagtaaatttcatagaggcagccatcgcgaccgcccaaaaagatgcggccgtcatccgttcctttgatgacgctgatggacacgttgtcggtaccaatcacaaaaactggccggttcatcagctgcatttcgttgtacgagctctcaccgaatgtcacgcccaggacaatgacctcaatgggcgtagtgagaaccaggaggtacttgacgtcctgcacaaagacgccgggttttggtttcaccaggccaacgcttacgatcagatgactgaggccatcgtagtacgccacatccctcgtctgattgaacgtccagatgtagatttccgaatcgatagtcagccaggcacgtccgatttccggaaagaggcccatggtgcagtggcattttatgtctacaacaggtaggatcgaagattggaacggatagatctatgggctatgaagcccaggatacgtacgcttaaagtgctccagaatctcgttgggaatagccgacttggtcaccgttcgcatttgttgtaggttatgtgttctatccgatttcaaaaacgacaggctctggtaatcgtagtcattaagtccgctcatcgtggcccgcccatgctggctaacgccggtcagctacaaagaacgtatcattaaaggaggagaagctgataaacatccgtatccaatacatacttccagcagacccggcttatttctctccagattgtaatgccattccagcatactggtcgccgtcgtgaaaaagtccagctgtgcttgcggaagagtcatcgtgctgaaaactgtgatgaggcgggctaactcgggtgcaatgctaacttaaaatgccgtcagaccactgttttgggatgaaactacaaactaatctgaagatttggtcgactgatgctcaatgtacccacgctcccgccttctgctaagtgttaccagatatcctcacattctcggtattgttttggtatatttcgattgaatattaatggatttcacaatttcaggcgccttagcggggtattatgaaatcgtctgtcacaagaaacatttgcaaacgtgcatgaaattaatattttaataataatttcttttactgctaatatatattatatgataaggacgcgtatattaatagacaataatggttttagtaggcatattcagtgggcttaaatactttgaaaaaacgttgataattttatataaacagtaactgtgctaatacaagtataataaaaaaagcacttcccatgccggaaacttttgagaatataaaaatattagaatgtgaagagtataactcagttgagcgcaacaggtgtgttattctctaaaatcggtaaaacctcaaactactgaatgaattcagcatttcgaagctttgccaatggattttataattgtgattaaaatccactttccgctttcccaaatagacttgatttaagccttcttttcaaaaaaaaaaaaaaagactactgtaactcaacacagaaactctagcgcttaacagcacaatgcgtaacgttaacagcaccccaacggcacatggcgctcaaaatttagcgcattttgtgcgcctcacacagccacattaaatttcccttcttttcttttccccgtttccggtgagtagtgtgttccgcgttatatttttattgaaattttaacccaaaatatctctaaaaccaccccttgcagcgaggagtccatccagaatttgtgtcatacaaacgagggactaacggagcgtaagttttgtgtgaaaaagcgccccaaaacatcgaatcgagtgaaacggcaattggcgtgtggcactgaagagccgccgtttttccatttccgctgggatggatgatccataaacaaattggaaaacaataggcagcgcacgttttgttagcccgatgtgaactctgcgattcgat

SEQ ID NO: 24959 - DNA, 4321 bp, DROSOPHILA
acttagcagaaggcgggagcgtgggtacattgagcatcagtcgaccaaatcttcagattagtttgtagtttcatcccaaaacagtggtctgacggcattttaagttagcattgcacccgagttagcccgcctcatcacagttttcagcacgatgactcttccgcaagcacagctggactttttcacgacggcgaccagtatgctggaatggcattacaatctggagagaaataagccgggtctgctggaactgaccggcgttagccagcatgggcgggccacgatgagcggacttaatgactacgattaccagagcctgtcgtttttgaaatcggatagaacacataacctacaacaaatgcgaacggtgaccaagtcggctattcccaacgagattctggagcactttaagcacataaaatgccactgcaccatgggcctctttccggaaatcggacgtgcctggctgactatcgattcggaaatctacatctggacgttcaatcagacgagggatgtggcgtactacgatggcctcagtcatctgatcgtaagcgttggcctggtgaaaccaaaacccggcgtctttgtgcaggacgtcaagtacctcctggttctcactacgcccattgaggtcattgtcctgggcgtgacattcggtgagagctcgtacaacgaaatgcagctgatgaaccggccagtttttgtgattggtaccgacaacgtgtccatcagcgtcatcaaaggaacggatgacggccgcatctttttgggcgggtttggcaagcgatgcaagaaaataaatctctcccaaggactggtctcctatatggttcccagttttttgaaggtcttttcggaagtggatccaatcgaacacattgagatcgataacagtcgcaagcttctctatgtccttacggaaaaaggtgtcattgaggcttgggacatcagtacgagttacacgacagctcgaagactaggtcggattacccagaacgatattacgaatcaagcagttagtctgatcacgactgtggacccgtccatttttaaaagtgtgaaagccatctgccctctgagcgccgacgatgccgacaaactacatcttgtggccgttactcagtgtggtgtgcggctctttttctccacaacatcgctaaatgtgaagcaacaatttggtcccgcggttccttgcagtccaggtgagaatacaggattcggtcagccagcagttcagccaccactgtctccaaatgctgaggctcctaagggactttatctgctccacgtgcgtctaccacccggctacaccccaaatgccaccaccaacaaaccaaagcaggtccatgccgctcactacacggagggaaccatgttgatgatcacaacgcaacagcatgaacaggatctcctctggtcgctcagctctgccccatcggttaactttacctacctggtggagtcgacggctctggagagcctggatggagttgtttggggattggctgaggtacatgaaccgtcgacgccacaacgaaagtcacccttaaatagtgcccgacacgcccgcaaagtagccctgctcaccaaccaaggcacacatatcatagaggtgcttaaaatggtggacgtactgcgtcagatccttctgtcgtgcaatggcccacaccacgaggaggtgaagatgttcttccagtcgcagaatcagcgagaggcatgtgtcacggctctgctgctggccacatcggatacttatcgtggcagtgacgttgctttgtgggccgcccaggcgtttatgctgtacggcggagagccatgctatcagcatcaaaagttcctgaacgccagcaaccgcaatatggctaatcaaactctaggcccgaatacgacgaatgtaagggagcgtcaatccatgtttatgtccacgccaatgccgaatagcgtggcaaatagtccggttggttttcctggatcgcagttcaatcagcccataagtccaattggaaatatgcagccaccacaggtggcagttagtaacgagaattccccaatcgttttctcggccaaacacgacggactttacatgtatgtctcccgcatgctgcattctgtttggcaaatgcgctgtgtaaatgagcaattttgctctaatctaagtcagagtgagtgtgccctcttgctatccgatctgcgttccctgcgtagctttctggaagtgcactctgtgcacgatatttcctcgactactcgagtgtcatttgataaccatttggatagaaccaattcatataacaccatcatgatgggcaacactttgctgccaattcctgagcaacgcgtattgtccgagcaggctcaagtagaggaaacacgttcgctttccgctctcaacctatttgtcaaacatgcatgtgaggttatatcgctgtggaacatcctaaactcgcattccttccagctgatatgcgtgcaactcagtccggaacatcagaagttgttgacatgctccaccttccgggatcttctgattacacgttcagaggtctgcgcattcttgatcatctcgctgatcaatctgtatctgaaggacgcggcgggagtgtctgaagtgtccaagaacttacgtgagaactgccccaacctatacaggcatgaggatgacgtgacctacaaggccaccgagttgttgatgaatgcaaagaattgcacttcggcaaccgaaaaggaacatatgctgcgaaccaccctgcatatgtgcaaggaagctgctcccacattgccactgcatagtatttgcatgcaattcatatcggctgacttctttgagggagtgatcgagctttcggctgtttgtgcctcaaaaagtgatccagaggaggttggtgttcatttctataacaatggggaacccgccgatgatcgcgagggttacacttgctttgccacaaggatggcctactacaaggaagtgcaacttatgctggaccatatctaccagagagtatgcaacaagacgcacgttcaggataagtctataaatccacttaaaggtacggctaaagcgtccgatgcaaaaaacggtgctacgcaaacgattccaaaaatagtggcccataccctaaaggtgaaagacccgctcattcatataacgctctacgaatggctgctggcccacgacatgctcaaagagcttttagacgtggttgagccgtcattaggagagttcttgcggcgcagtgtgtcgcaaaatgtagataatgtcgttcttatcgatttgctgtggaagtactacgaaaagaatagccatcattcccaggcagcccatatattggacaatttggctatgacacgcagtgaaaacattaatctggagcagcgcattgagtacttggtgcgtgctgttatgtgtatgcgaaatggtaacgttggctcttcattaagcaatggaatattcctgaaagagctagaggataagctggacatcgcacgagttcaaaaatcagtgcttgccgcgatgacagagttggctagcgataagctggaggcagctacggctgttaaggaactaaactatgcgttgtacgacataactcagctataccagcactttgcggagcccttcgacctttgggagtgccaattgtccatactcaactgctcgcatcacaacgaccccctactgatcgagtccgtttggggccagattatcaacagcgttgtggataagccgggcacaactagtgagcgctgcaataggttattcacgaaaatcgaaatcttggtaagggagtatggcgagtctggagtttgctttccctttgcctttctcataagggaactggaagttaaagcctgccaactgcgatttcccgagggcatagtgccggaaaaactggtgagtatgaatttggacattgaactgctcctggaatactattcgagaatgatttcaatgaacgaacgagtgtgggccaacgagggtaatgagtggcatttaatacaatccgtcatacgagtggtctcgcttctggcagacaacgcacaatctatttggtaccggtcaaaacgacgaattgttggcaaggctcaagacatagtggccggctgcctgaatatttgctaccaaaagcccgacactaatcgtcttcaacattcactcaaggaacttcagagtcagctgcagcggttgttgatttaaagccgtcggcctgcgttattttaattaaatttttgaaagtgctggactagacgttaagtttgactgagatatatattgtatttgtattaaacatgttaaataaattgatttccccacaga

SEQ ID NO: 24960 - protein, 1349 aa, DROSOPHILA
MTLPQAQLDFFTTATSMLEWHYNLERNKPGLLELTGVSQHGRATMSGLNDYDYQSLSFLKSDRTHNLQQMRTVTKSAIPNEILEHFKHIKCHCTMGLFPEIGRAWLTIDSEIYIWTFNQTRDVAYYDGLSHLIVSVGLVKPKPGVFVQDVKYLLVLTTPIEVIVLGVTFGESSYNEMQLMNRPVFVIGTDNVSISVIKGTDDGRIFLGGFGKRCKKINLSQGLVSYMVPSFLKVFSEVDPIEHIEIDNSRKLLYVLTEKGVIEAWDISTSYTTARRLGRITQNDITNQAVSLITTVDPSIFKSVKAICPLSADDADKLHLVAVTQCGVRLFFSTTSLNVKQQFGPAVPCSPGENTGFGQPAVQPPLSPNAEAPKGLYLLHVRLPPGYTPNATTNKPKQVHAAHYTEGTMLMITTQQHEQDLLWSLSSAPSVNFTYLVESTALESLDGVVWGLAEVHEPSTPQRKSPLNSARHARKVALLTNQGTHIIEVLKMVDVLRQILLSCNGPHHEEVKMFFQSQNQREACVTALLLATSDTYRGSDVALWAAQAFMLYGGEPCYQHQKFLNASNRNMANQTLGPNTTNVRERQSMFMSTPMPNSVANSPVGFPGSQFNQPISPIGNMQPPQVAVSNENSPIVFSAKHDGLYMYVSRMLHSVWQMRCVNEQFCSNLSQSECALLLSDLRSLRSFLEVHSVHDISSTTRVSFDNHLDRTNSYNTIMMGNTLLPIPEQRVLSEQAQVEETRSLSALNLFVKHACEVISLWNILNSHSFQLICVQLSPEHQKLLTCSTFRDLLITRSEVCAFLIISLINLYLKDAAGVSEVSKNLRENCPNLYRHEDDVTYKATELLMNAKNCTSATEKEHMLRTTLHMCKEAAPTLPLHSICMQFISADFFEGVIELSAVCASKSDPEEVGVHFYNNGEPADDREGYTCFATRMAYYKEVQLMLDHIYQRVCNKTHVQDKSINPLKGTAKASDAKNGATQTIPKIVAHTLKVKDPLIHITLYEWLLAHDMLKELLDVVEPSLGEFLRRSVSQNVDNVVLIDLLWKYYEKNSHHSQAAHILDNLAMTRSENINLEQRIEYLVRAVMCMRNGNVGSSLSNGIFLKELEDKLDIARVQKSVLAAMTELASDKLEAATAVKELNYALYDITQLYQHFAEPFDLWECQLSILNCSHHNDPLLIESVWGQIINSVVDKPGTTSERCNRLFTKIEILVREYGESGVCFPFAFLIRELEVKACQLRFPEGIVPEKLVSMNLDIELLLEYYSRMISMNERVWANEGNEWHLIQSVIRVVSLLADNAQSIWYRSKRRIVGKAQDIVAGCLNICYQKPDTNRLQHSLKELQSQLQRLLI

SEQ ID NO: 24961 - DNA, 4298 bp, DROSOPHILA
atgcaaaattcacggatcctcccattttgccgacggcaaatagtaaaaatgtagcgagatgtttttgtaaagatttttcttttatttgtttttttttcgtggattttttgtggattttgtttttattatttccaggtgcttggcaatgttttgttggatttgtttgttttcgctgccttgcgccatgtttcacaatcacgtttgcacgctgcttcttggtttgtttttactaaatttgctttaggtttactaacattttctctggttgtgtttgtattatgcagtagatgcttgccttcgattcgatttatgttttaataataataataattttgttttcgctttattacaattaattatggttgtcttgtctggtatttgtaagcataattaataattaaattgtttatataatagataataattataattacttaatgcataagagaatttataaaatagaatgttttttgacatttttctttgcttttctgaaatattttcatcgcctcgccacaactgcctttactcctactaaacttgtgcttgattccgcgtcccgttgctcccttcaattgaacgcacatttaatgtctgagaatgttttgtacagcaaaaggtgagtggaaatgaaatgctaaaccaaacgaatttgttgttgttgccgttgtccccgtaattggcaacagtttatttgtatcacacaattgttttagctatgcaacaagcgggaaatcaagggaaatcgaagcagaacggtatggaatgcaagtgagttgtcatcttactattgtggtacaacagtgcgtatgcatcatttaaatgactaaacattaatcctattctcatttatttatatgcgcatgtgttactctgccacttcgaaattcgaattaaacctgcttaagaactaaggctaaaattgtgtctgtgtgtgtgtggctgtggttgtgggcgtgggtgtgcgtatcctagggctttagttaatattttcaataatttacaatgtggatatatccaggaggccagcactggcagccaccgctgcctcgtggccaggatgatagtgatggtacagctggtgttgctgctgctgcgggaggtgctgcagctgctgctgttgctgctgctgctgctggtagtgttgctgttgctgctgctggtagtgcaggtggtggtgctgctgctgctcctcgagatgctgctgttgcatgtccagcatgctggccgaggcggcaaaggagctgcctgcagccgcagcagcagcaacggcagcagcagttgccgccgcagcagcagccgaagtggcggaggaggtggcagcggagggggtcagctggtaggcggctgccaaggcgggtgaatgcgcggcggtatggccactggaatgcgccgaggagcggccgcccgacgaccccgatgccgtcggactaggccgtccgttgagcaactgttgctgctgttgttgctgctgctgctgttgctgcggggccgtcggcatgtacggcggcagtggaggcgaaacgctcacactggagcctgctgctccataggcgctggccatttctcacatgtgtgccagcggcgccatcgccctcagcgattgctgatgctgcaggtggtgttgctgctgctgctgctgcatggtatggtgttgctgcgggatctgttggtgctgctgcgaaaggtgttgctgcgggaggtgctgctgctgctgttgcatcgactggtgctgctgctgcagatcgggcgagtcagtctgatagtgcagcaggtggcgctgctcatccggcagatggtacatattcatcaggtgattcagctcgccgccgccggcggctgctgccgctgctgctgctgctgctgccgccgctgcagagctgtattcccgcttcatgatgtgattgttgttgatgttgttgttgttgttgagcgctatggcactgggactgggcgacaccggttcggacttgatgctcgagtcgctggggctgtggctctggcaggaaacctgaccgccaccgcctccacctccgccgtacggagtcggactgccgggctgctgctgcaagctactgccgccatacggcgacggtgatccgggctgctggagactgctgccgtacggcgatgtctgtccgccggacaccgtctggtacatcgcatacccgttgttgtacatgtgtcccatgtcgtaccgctgcgccgcgtagtgctggcccatgtaggaggtctgataggctgccgctccggccggatctgcgtgcatcatgtagccattgggcatgtatccattgggcgcgttcatctggtacatatcctggcgcgcctgttgcgctgccgctgctgccgccgccgctgccgctgctgcactgcctccactaccgtttagcgactggttctggccaggctgaccttgcacccgcgtgggcgtcaccggctcacccggtgctccgccgcccaccgtctgtccgggcatcaggccgcccattgggtacttctccttggtcttggtcagcgttttagtcttgcggcgcggccggtacttgtagtccggatgctccttcatgtgcaccgccctcaggcgcttggcctcgtcgatgaacggtcgcttctccgattccgagaggtccttccactgggcgcccagtcgcttcgagatctccgagttgtgcatcttggggttgtccgaggccatcttcctccgctggccccgtgaccaaaccatgaacgcattcataggccgcttcacacgatccgcgtgctgttggttcttgttggccgtggcgctgttgttgttgttgttgctggatcctccagttaggctgctcaatgcagatcccgcgcccagatgctgctgctgcccgtgctgctgctgttgcgtgtgctgctggtggctgaccggcgatgtcatgtgatggcttccgatgctgctctgggtgggactcaattcgctggagctgtgcagcggggagctctgctgctgctgctgttgctgctgctgctgccccacctggctgccattgagggtgttcgccatcgaggactgcagcgagctcagcggattgggactctggctggccgcgatatgggcgctcatgtggtgatgatggtggttgtgatggctcagctgcgagtgggtcaggtgcgactggcccaggttcataaggggagctagggcggagtacggcgatgccgcatgtccgtgcaacgcggcacttgtgtgatgcggcggcatggtggcatgcagcaggctgcctttcatatccgattccatggtcagcatcttgcggggattacttccagttttcggtgcgataaagctgatttgactcaaagttggttctccgtggatactcgcctctaagatgcagttactctttagctttagtttactctttgcttagttagacattttgaacattttttgggaaaccatgttgcacttgtgatttttgagattttgattttcgctgcagtttttatttcgtagtttttcgtatctttacgcgtatcaaaaatgtggcgctcggctatctttggatttgtagctaaacagcttgaattgcgttttttccacagtcacaaatatcagatatacatatatgttgtttgctagcaaacaaacaagaggcggcgtaaaacacttgaaaattgttgctaaaacccgacgcgaaattgcctcagaatattgttgttgtttgtattagattttgttgtaaatatatttggtttggtttggttgttgtttttttttttcgtatgcgagaagcgggaacaccgaaaaaatacctccacactgggcggaattgagcacctttctgtttctccggacgacggcgaaacctgttcgaggtgcgttctacgctgctttttccctggctgtatgatgacttttttttctttctttcgtatcaccgctttttggctagctgatgacgaggcacgaaccagaaccaccgatgcgatgcgatgcgaaacgatacggatacgatacgacacgaaaccgaattcgagacagcgaacaaccgagttgatgttgctgcgtgatgttgctgctgatggcgtgctgcgactgccgtgcggtacgttgcgtgcgcgtgtgctgacgacggcgaatgcgagagtcgaatgagagaccgtctgccgctggccgctcgaggaggcggtaaatgcggtgcggtccgccagacagggtggctggaaaaactggtcttgagtcgcgagtagctgtgtgtgcgtcgctgctgtccaagtgtgcgtcggcatttccattgcccgtcgcctgtgcgggagcg

SEQ ID NO: 24962 - DNA, 2298 bp, DROSOPHILA
aatccccgcaagatgctgaccatggaatcggatatgaaaggcagcctgctgcatgccaccatgccgccgcatcacacaagtgccgcgttgcacggacatgcggcatcgccgtactccgccctagctccccttatgaacctgggccagtcgcacctgacccactcgcagctgagccatcacaaccaccatcatcaccacatgagcgcccatatcgcggccagccagagtcccaatccgctgagctcgctgcagtcctcgatggcgaacaccctcaatggcagccaggtggggcagcagcagcagcaacagcagcagcagcagagctccccgctgcacagctccagcgaattgagtcccacccagagcagcatcggaagccatcacatgacatcgccggtcagccaccagcagcacacgcaacagcagcagcacgggcagcagcagcatctgggcgcgggatctgcattgagcagcctaactggaggatccagcaacaacaacaacaacagcgccacggccaacaagaaccaacagcacgcggatcgtgtgaagcggcctatgaatgcgttcatggtttggtcacggggccagcggaggaagatggcctcggacaaccccaagatgcacaactcggagatctcgaagcgactgggcgcccagtggaaggacctctcggaatcggagaagcgaccgttcatcgacgaggccaagcgcctgagggcggtgcacatgaaggagcatccggactacaagtaccggccgcgccgcaagactaaaacgctgaccaagaccaaggagaagtacccaatgggcggcctgatgcccggacagacggtgggcggcggagcaccgggtgagccggtgacgcccacgcgggtgcaaggtcagcctggccagaaccagtcgctaaacggtagtggaggcagtgcagcagcggcagcggcggcggcagcagcggcagcgcaacaggcgcgccaggatatgtaccagatgaacgcgcccaatggatacatgcccaatggctacatgatgcacgcagatccggccggagcggcagcctatcagacctcctacatgggccagcactacgcggcgcagcggtacgacatgggacacatgtacaacaacgggtatgcgatgtaccagacggtgtccggcggacagacatcgccgtacggcagcagtctccagcagcccggatcaccgtcgccgtatggcggcagtagcttgcagcagcagcccggcagtccgactccgtacggcggaggtggaggcggtggcggtcaggtttcctgccagagccacagccccagcgactcgagcatcaagtccgaaccggtgtcgcccagtcccagtgccatagcgctcaacaacaacaacaacatcaacaacaatcacatcatgaagcgggaatacagctctgcagcggcggcagcagcagcagcagcagcggcagcagccgccggcggcggcgagctgaatcacctgatgaatatgtaccatctgccggatgagcagcgccacctgctgcactatcagactgactcgcccgatctgcagcagcagcaccagtcgatgcaacagcagcagcagcacctcccgcagcaacacctttcgcagcagcaccaacagatcccgcagcaacaccataccatgcagcagcagcagcagcaacaccacctgcagcatcagcaatcgctgagggcgatggcgccgctggcacacatgtgagaaatggccagcgcctatggagcagcaggctccagtgtgagcgtttcgcctccactgccgccgtacatgccgacggccccgcagcaacagcagcagcagcaacaacagcagcaacagttgctcaacggacggcctagtccgacggcatcggggtcgtcgggcggccgctcctcggcgcattccagtggccataccgccgcgcattcacccgccttggcagccgcctaccagctgaccccctccgctgccacctcctccgccacttcggctgctgctgcggcggcaactgctgctgccgttgctgctgctgcggctgcaggcagctcctttgccgcctcggccagcatgctggacatgcaacagcagcatctcgaggagcagcagcagcaccaccacctgcactaccagcagcagcaacagcaacactaccagcagcagcagcagcaacagcagcagctgcagcacctcccgcagcagcagcaacaccagctgtaccatcactatcatcctggccacgaggcagcggtggctgccagtgctggcctcctggatatatccacattgtaa

SEQ ID NO: 24963 - protein, 572 aa, DROSOPHILA
MLTMESDMKGSLLHATMPPHHTSAALHGHAASPYSALAPLMNLGQSHLTHSQLSHHNHHHHHMSAHIAASQSPNPLSSLQSSMANTLNGSQVGQQQQQQQQQQSSPLHSSSELSPTQSSIGSHHMTSPVSHQQHTQQQQHGQQQHLGAGSALSSLTGGSSNNNNNSATANKNQQHADRVKRPMNAFMVWSRGQRRKMASDNPKMHNSEISKRLGAQWKDLSESEKRPFIDEAKRLRAVHMKEHPDYKYRPRRKTKTLTKTKEKYPMGGLMPGQTVGGGAPGEPVTPTRVQGQPGQNQSLNGSGGSAAAAAAAAAAAAQQARQDMYQMNAPNGYMPNGYMMHADPAGAAAYQTSYMGQHYAAQRYDMGHMYNNGYAMYQTVSGGQTSPYGSSLQQPGSPSPYGGSSLQQQPGSPTPYGGGGGGGGQVSCQSHSPSDSSIKSEPVSPSPSAIALNNNNNINNNHIMKREYSSAAAAAAAAAAAAAAGGGELNHLMNMYHLPDEQRHLLHYQTDSPDLQQQHQSMQQQQQHLPQQHLSQQHQQIPQQHHTMQQQQQQHHLQHQQSLRAMAPLAHM

SEQ ID NO: 24964 - DNA, 7179 bp, DROSOPHILA; identical to SEQ ID NO: 13231

SEQ ID NO: 24965 - DNA, 4372 bp, DROSOPHILA
cacacgccgctacacacctctatggttttgcggcaaaaaaaaaaaagttttttgcgaaaatttgtgagtttacgagaagcagccaactaaatggtttagtttcgctaagtagacgatcaattgctggaggccagttttaccaagtaccggctgggtgcatttagcaggagtaaaggagaccattcgactgctgcgtattgatagggcaggttggtgtgcgagtcgttgctgttcatcaactggcgaaattaataatgtgtacccccatgccgtatcatcctcccacctgcagtcagccgatgtgtcaatgttaatcgcgctcttcgcgcttgcacacttgccaatctttcgtaagacgcctttgtcagcctcctcctccccgccgccgtctgtccaccggtcgccaaggtgtggcaaagcaagtaccgcgtaccatccaccgccagcagacgcctgcatcagcattactgcttcagccattgacgcagcatccgggatgagcaacagcgccgaacaggacaagccgattgccgccaacggcaatgcggcagagccccaggaaatagaagtcatccatttccaagcgcaagagaagcagtgttgccgcgttattagatccaataagaccaaggtcctcacatccggcggcgttcacacacgcggttcctccaaggtcaagctaaagaacatcgtcgactacaagtgggagcgcaagtactactatccgggtcacctggtcgctgtccaccgcgatggcaagcacctggcgtacgccattaatgtcaacaacaaagccaccggaatggagggcatggtgcgcgtatgcaacatagccaccagtatgcgagccttgatcaagggaatgagcggcgaggtcttagatctgcagtttgcccatacggattgtgagcgtatattagctgtgatcgatgtcagttcgctgtttgtctacaaagtcgatcaaatcgaagggaacctgctgtgcaatctagtgctaaaggtggaggaccccatcgccaactatgtgccggagtacgatatggtctcctggtgtccctatgtctgcagcagcagcgccaccgttccaatcaacgacgatgacgatgagaatcagctgctcatttggtcgcgaagctctcaatttcaatgctttcaagtgaagatgattgtctctgaacatgggcgcggcaagatccaaccagcagccctagaatctggatatctgaagattgaggaggactcgttgatcacgtgcgccgctttgtccccggatggcaccactgtggctgctgcttgcgccgatggcttggttcgtttctaccaaatttatttgttcgatgtgcgcaaccatcgctgcctgcacgagtggaagccacatgatggcaaaaaagtctgctctctcttttttctcgacaatatcaacaagcctgtggaagaatcctactggcagcacgtgatcactacgagcgatgccaataccgaaatcaagctctggaactgctcgctatggaaatgcctccaaactatcaatgtggtggccagtccgtcatctttgcagcccagaaactttatcgcgggcatagatcgcagtgcgaactacttggtgttgtcttgcctggactctctggccgtgtatgtaatgcagattggcagtactggcggcgcagactccgagaataggagtagcgatagcgaaggagaaggctgcgacacttccaaacgcattcagaatgttgccgaattcaagctgagttcggggattctctctttttctattgtaaacgctagtatgcgtcgcgttaagaactccatcgagagctactatcctattgaggagcccgatgacttcgatgacgattccaattccaccagtgcccttgtgctgcacatgtttgtggtgcaggcaaagagcctgcaggaatgtcaaataatctaccagccatgtgtggctgaaaagacggagcggagcagcctaaacagcaagcgatcacagacgccagaagacaatctgctaatcaaagaggagccggaatcccccaacagtggaactgtgggtgctgttcagctggatgcattattcgcaaaatccgcaaagagagcttcaacgggcagttcatctgccatggtggccgtggcggcagccgcggctgcggcaccttcggccatcctgcaggacgccactaaggaggcggccaagtcagagtccccgcaactaagcagcgcgtatacgcagcaggttaatctcatgactccagatgccttcagtgcaagcggaaccgcagcggcagcagctgtatttgtgtctaccagcaccacaacttcaataggaactgatagctctaccaccaccagcggtcaggatagatccattgattcagcggttctgcaaactatacgaatgctggccacggtaacgtccaagacttccgaaaaccccaatgccgaggtactcctcaacctaatgaacaacaccctaatcgaagatcgcgagcaacaaaagctgaaggaaaagcttgacgctcgcaagaagttcattgcaattgatcgcaatccagagcggaatgtggctgagaacttggccagcggcagttcgagtccgagtcgagaggtgcaggagataatggccacacaggacgatgccgatgcctacgaagcagagctagagaatctggacgacgatgatgacgatgaggaagaagagctggcaaattcatcaccgctcccggaagctgttgacggaacatggcccattgtcaagctgtcatcccactcagctgagctccagaatgctgcccagatcatgtcccaggcggtgcagaacaccaacaatggcaatgtgccgcctacgctaggtggagggcacaataataacacaagtgtaggcagcaatagcaacaacaacacggctacaactcttagcaccagcaacaccagcagcagcaacaacgcgggcggaacatgcgttgattcaagtggaactggagagctaaatgccaaaatggaactactcatagatctagtaaaagcccagtccaaacaaataaacaaattggagaacgaagtcaacaagctacaaaagcagcaagaagcggcggcggccctgcatagcaaacaagacacttcattggagcctaaaaatcttagtcagctagcatataaaattgagatgcaactgtccaagctaatggagcagtatctcaagcgatatgaaaacgagcataagaagaaactgacggaattcttggcggcgcgtgagagccaaaaccgagagctacgtgactccgtgctgcaggtactaaatcagtatgtcatgaaccactttacggacattattggcaacgttctcaacatggaactgcagcgccaactgcttcctcgcgtgaatgccaacatggatcagctccaagcccaaatgcaagtggagattgtgcagaagctgagtgtgtttgacaaaacggtgaaggagaatattgcccaggtgtgcaagagcaagcaatttctggatacttttggcaagtccgtgttgattggtgttcaaaccagcctacaaaccgccttcattgaatctatgagcagcaccttgattccagcttatgagaagtcctcgcagaacatgtttaaacaactgcatgacgctttcagcgtgggcataaaagactttatggtccagtttaacacctacctgcagcacatgccacagccccaagccgggagtggcaatacggaggagataaacaacaagttgtccatgcttaagcaattggtagagagcagcttgcacaagcaccgcactgaactcacggacgccatgctcgagacacaaagagaagtgaagagcttagagattttgctggcgcgtcaggtacaggaaacgatcagagcagagctacgcaagcacatggaagcccagaacgtggcaatgcgttcgcaggcagctacgcctgcaccaccttacgacctcagggacagcattaagcagcttttgatggctggacaaatcaacaaggccttccatcaggctctattggccaacgacttgggcctagtggagttcactctccgacacacggacagcaaccaggcattcgcaccagagggatgcagactggagcaaaaggttctactgtcgctcattcagcaaatatccgctgacatgaccaatcacaatgagcttaagcagagatatctcaacgaggcactgttggccatcaatatggcagatcccattacccgcgagcacgctcctaaagtgctcaccgagctgtatcgcaattgtcagcagttcattaagaacagccccaagaattcgcagttcagcaacgtccgtctgctgatgaaggcaatcataacgtaccgcgatcagctaaaatga

SEQ ID NO: 24966 - protein, 1291 aa, DROSOPHILA; identical to SEQ ID NO: 13233

SEQ ID NO: 24967 - DNA, 4506 bp, DROSOPHILA
atcggccgacatgtgatcagacctgtagctacattctatatcttatctgattgtactttttggcaatttagatattttcgaatgcgcctcctctccgcccccgccggcacaagcacattgacaaatccattaataaccataattgacaaattgctcggcgagtgaaaaggaagaaagctagcgaaatgacctcgagtcacgcaatcaggatatcgagtggggaattcgaatcgtgtcccaaggaattacgtaagtttcattgaagacgtgactctcgtgaggcgggggaccttctggccaaatactcagatatatgtatatactcgtactatctatagtatgctggctgtcgcacttgcctgattttaaaaatacccctagcatatattgtacgtatagtatagggattctttctgttggtcgctagcggcaagtaaatattttgatttattttcgttgcttcgagaaaacttggtatcgaacttgacagtgctcggataatgagatatgtgtgtgtgtggactcggaaaatgcttgcattgtaagactcctcttctcttatctcctctgctaagttaactagcaagttattctttggtctcccggtcggttgcaccaccgcctgctatctatacttaccctctttctcggtcagatcggagaacttcacaccgccactagatattcggatggtttgggggagaaacagagagaaagacaagcgggaattagcatcattcacatgaaattctatttgtattcactagatcaagtatttcaaagttcaagagcatcgagaatggaactcgaatggaattaagttcgtatcggcatggtcatcgtcacaggtaaaagacgagcggcaggcaaggctacttggtccaatctcaggtggcaaactcctgagcggctcctttcgctttgattgcctagcattgcattgattacgttaatttcttttttttttttttgagtgtaagagtgtgtgtggagagggaatttacctgagtaaaacagtggccgtttcaggcacgcggaatacctgaaaatatttaacatgctcattgctttgtttcgagttttcggcacaatagaattgtaatgaggggaatcgtatctaaaggtaatcccgctatcgccatggcttcacttcctcctctacttacagagcggcccgcggcccaaagcaatcgctaacttgccttagtctaggatcggcatacccatttcccatttcccattcccccaatagaatccacccacgacactcaccttccatccaaggttttcgaagaaagtgcacaagcgggactgtcccgtcgtctttccgccgcaaggccctgaaaaaacaacgcataatgtattcattagttttatttgtttattggcaaacgggctaaggttacattcttcaaatctatactgcttgtattgtcagaaaaaaggggagaaaggtgcgctcaaacttgttggaaaattcccgtaaaatgttttatagctcaattgaaatgtgccgagctagtgcggaaaatattgctaaaaagtttaaaacgaaaacttgctggtttctaaaaatacattttaaaaagaaccacgttcctttagcatggttgtattaattaactaaacaaattcgcacgtgcttgcagtttacataaattaaaatctgaaccagtaaattgggtttgtaaatgccttaacatatcgttagacaactaaatacgttttaggtacaccattaaaaaattaatgaattctatgaaaaactatcaacgataacgcttattttaaaacaactttaaaattgatgagatgaaagaacatgtattagaagctatactctatctatctatctatcagttggataagatatgtggtggctctaggtcgccatggtcttgttcattgcttgaatcgacgaggcggaaacgaatccattcgatttgtgtcccaaattccagcaaatcaagtgcacttgagtttcccgccgctgtgcatatcactcgattaggtctgcggactgaccctgaaggcaattacgcccattgctgaatgcattgcgcagcgatctggagaaatcgattccgaatgcacgcttaaaaagagtcacgttcgtcattcaaacgataagaaattccttgaatgggtccttactgggattcccaaagggattttcgtcaatgtaacacacgtggcgatgtgcctgtcttttatcagcctcttccgaaaattattagagcactcgggcggaggaagcccgcaccgtaggcgataatactataagtagtatgtgtggggtagataggcccgtcaatacatcaatgctttcgttttttttttgttttttttttttttttgcgcttctaatcacagccataacttgggcccaaattaaatgattagaccacgcgcccaaccgccgctcatatgatggtcgagcaaaaacaggtttcctatgaattaattcttcgcatatgaattgtaaatagtttttggcgagggtctttgaagcgccgactggccgcaaaagccggtagccacatgaatacaaagaacgaaatatgatagagctaccccacttgaaaggtggcgaaagagcttgggaagctgcgcgcaggacataatctctacccattggttgaaattcgcgaccttgacacaaatcgtaaacaaatcgcaatcgggtgggtgtatgggccacgaggatgcgagtgaacgaggacacttgtaacagatacacagcaaacccagatagctaacttagatatacattcgttttgggggaaaattaaaactcaccgccagtgaggacgattttgtagactcgtttatctttcggtgacaccgaacccattctgttcagcttcaagctgggcatggcgcctggtttcggtgagctcgactttctgatctcgacctgctgctgctgctccggttcgtcctggtgccgttgctgctcctgaccattactggtgctggccattaccgactgctgtccgttgctgaggagggtggccatgtcttcgacttcgggaatttggtattgcgtgtttgttttttgggagagcaaccgattcgctgtgtggtggcacgcagagaactcttctacgcgcggtgcacgtgccgtttaaggttatgcctgtggaactcgggcaactcctgtggctcctcgtgcttttctgccgacctggtctcgatcctggtctatgaatcctggagatccagctggtggctcggactcgtgcgctttgcaatttaaatgacgcactggcgcgctgaaatcattcccagaatttggattgcgcgggatgctatcagaaagtctgatgacggagcaggaggaactttacaagtttaagtagacggcagcgttgcacgctactttcacaatctgtaccacattcgattgtttgggcaatatcaaagtttattcgacttgggatggtattgcatttttactagttgacaccgcatccgttaattacacaagcgaataacagaatcttgtggaatacctgtgccgacggggtcttatactgttggaatgaaatgcggccgcatttggattgagggaaaacggtgaaattttatgcaaatggtcacactaatatgaacagtgatataatttaataactttaagttaaaataaacgcaattataaatatgtacaacaaatatatgtatagatacattgtttacttctttggatattaaaaactcataaaatggttttttttttataaaaatgtatttcgaattggcttgcttcaaaattgtattttttttatttaaaacatacacagataatgtgagttgaaagttttttaatttaatttaagcagatggtgctataacattctgattaaagttcttttatgctaattagaacagtgcatattgttttaagtgcctcccaacttaattataaaaaatgaaatacactatcgatagccaactgtgcaatcgatagcgtgtcatctctgactcaaatgcactcgaatgcagcatgaccgtttatgccagttatcgataattccacggccacactgctcaaatgttcagttctaaatttaaagcgtagtttgtcgcacacgaaacgatgcgcgagtgtaatcgactgcaataattaaacaaatcggcagcgtgccacaactagtgaaattgcaatagcctagcggggaaaattgacgagcagttgaattagcaaaggaacaaacattttcacaaaccacgtaacgtaacacatgtgggtgcgtgtgtgtgtgggtgcgagcgagaggcagtgtgtgtcaaaatgacagcagtagcaacaacaacaatagaaacagaagcagcagaaatcaaatgaacaacaacagcttagttaaccagctgtgcgaggtcgcttcagaccctcctcccacctttcccacagaaaactgaaaaaccaaaaccacatttgacaaaagtaacaaaattgttctgttccctgtggcaggcaagatcaagcaccaaattgttagttac

SEQ ID NO: 24968 - DNA, 817 bp, DROSOPHILA
aagattctgttattcgcttgtgtaattaacggatgcggtgtcaactagtaaaaatgcaataccatcccaagtcgaataaactttgatattgcccaaacaatcgaatgtggtacagattgtgaaagtagcgtgcaacgctgccgtctacttaaacttgtaaagttcctcctgctccgtcatcagactttctgatagcatcccgcgcaatccaaattctgggaatgatttcagcgcgccagtgcgtcatttaaattgcaaagcgcacgagtccgagccaccagctggatctccaggattcatagaccaggatcgagaccaggtcggcagaaaagcacgaggagccacaggagttgcccgagttccacaggcataaccttaaacggcacgtgcaccgcgcgtagaagagttctctgcgtgccaccacacagcgaatcggttgctctcccaaaaaacaaacacgcaataccaaattcccgaagtcgaagacatggccaccctcctcagcaacggacagcagtcggtaatggccagcaccagtaatggtcaggagcagcaacggcaccaggacgaaccggagcagcagcagcaggtcgagatcagaaagtcgagctcaccgaaaccaggcgccatgcccagcttgaagctgaacagaatgggttcggtgtcaccgaaagataaacgagtctacaaaatcgtcctcactggcgggccttgcggcggaaagacgacgggacagtcccgcttgtgcactttcttcgaaaaccttggatggaaggtattccgcgtgcctgaaacggccactgttttactcaggtaa

SEQ ID NO: 24969 - protein, 109 aa, DROSOPHILA
MATLLSNGQQSVMASTSNGQEQQRHQDEPEQQQQVEIRKSSSPKPGAMPSLKLNRMGSVSPKDKRVYKIVLTGGPCGGKTTGQSRLCTFFENLGWKVFRVPETATVLLR

SEQ ID NO: 24970 - DNA, 6930 bp, DROSOPHILA
ctctctgattttgggctgctgattgtctacgatattttttgcagtaactggctcctcatcatcaggataaatgattttaaatttcggatctgccggaccgtacttgttggacggtcgtgaggtgggcaaaatctcttcctcgggtatatccagttgatttggaggcaaataatttggctggggcttttccactggatcgaactggtccactcgtgcctttgtgatttctactccctgacttgatcggatagcaggcacatactcgttgggtaagttgaatggaatctgcggatgccaaccagttggtgcataaggtgctatacgtccaccggtaaaatccacttcagcttgtacaatggccacaaatggcagcagtagaagcaactttaggaatgccaaaaagatttacgtaaaaatgtttattaaatagccacatcatacctttgtcaccattttaatgaacggctcgattgaaactgcggtgcaatatttgggatttgctcatttttatattaaacaattggaaccattgcaatatttatcatgccggacacgcaccttgttcgtctgacaccaattggactgcatctgttccatcttcggactacatagtcacgtatccagccgacaaaaataaaaaagaatcaaatgcacacaaccttgacaacggatgagcgaataattggcaaaggctcaactttggttttgcttttagatgcacataaaaagtgaaagtgttataagagcattaatttgcaaaataatttatagaaaatctaactaagaatacatttcaatgtaattattatttatttaagtgcgtatgcatttcaagaatattgaataaatgcaacttataaaacgcttagcaatttacaattttcgaaaatacgttatttctagggtaaccacattttaactgtaaagtcgtatgcagccacactgctgtgtcgtgcatttttgtatcttccgcatgctgccctataatctacgacatacggtcacactgcgcatgtggaactttaagaaaatctgcaaaacattgacaaaattattaaatttaatagcttaatcggacgaataagagtgtatttatgttgattagttgttgtctctgagccagtgggcaatgtacacgtgcttactatgcctaaaaccgaggaatcagcgagatttatgtgacgaaattccgtaaacaaatcagcgtgcagctcgagaagaacctggtaatacagaattccttaagaggaaaccactcaagctaacatttcattgtcttccagatatgcggtaaattcaatagtatgccccagtggccacggagtccgccggaaccacaaaaaccatgtggcccaacagcaacctaaacgccgtgctgctcatcctggcagtgctggcgtgcccaactagcagccaacatgttcctctggccatggccaattcaactagcaaccaagtgcctacggatcctggcttcatgccgctgcagcagtcgccgggaagcgtctttttcgtgcaccacaaccagcagaatgccatgcagctgcgacatagcatggagggcaagctgcggaatattcgtaatacggagctgagggtggccaagatacaggtgggctatcaatactgcacaagctattaaactccattttaatgcccacaatccccttccaggaaatctttgactccatgcacttcagcagcgccaaaggagcgtcaaacactcgtcaagcttcgagcaacgatagcaacgtggtcaatccccagttgcagcgggacttgcaattgtttagtgagcgtctgagcaagaaaatccagaaagccacttacgtggtgttggaactgcgcgaactgcttcgctacaacctgaccaaggtctggcaatacagctacgacgacgaggatgatgagtcggagagcgaaatggatctagaaatggagctggaagatctacatgccaggaacacggcctcaccaaccgatgagcatgtgcagctctacttgaacacccaaatagagagctgccagcctgactacgaaacggacttggagtacggctcctcatcgacccaatcgattcactacaacagacagcagatccaaatcctaaactatctcaagtcggatgatgcacgcgctaccttcctgaatgagaataatgcccgttccttggctgtcaatggctacatatcgaatcaactagtactactcaagcgcaggctcagtcgaagcgatgcggaaaactcgaatagcaagccaattagcgggaatcactttaaacacatatatttcctatccaattcggatggagcctctgctagcctccattttcgtcagctctacgtgtcagctattaagcagaaatttgtgctcttcctcatcgacgtgggatcagctctaagcgcggagttattcgacctctcaaaaagctttggtaaattattgattcttattgaaagacaaccaaaatcaattgtgtttattttcagttcacgaaatgctccagctgctggaagatacggataaagtttcactggtgacggttgcgagtgaagcgaacttcatgtccctagaagcctttcccgccgaggctggtcacggcatctacagtgcgactcgtgcgcacaaggaggaaattataagcttcattaacagcttgagccgggcacaggcctttacaaaccactccttgggatttgagtactcctttgagctactccatcgactgcaacagtcgggtatgataaatacggcagagcaaccagtggaattcgtttacattactcgtggtctgctgaccaacttgtctgatgcaatggcagtactgcgagtagtggccgatggtcaaagacgactcagggctccagtgatcattaacacatgcgcagtggtgctcgacgagaagcgtataatgtacgaaaaacaattccttaacgacgtcgccagtcagaactacaccaagtacgagattgatgtggcaagttggtggcccagtggacaggaagcgtctgagttggttggacgcttctatgtgctcagcaaaatgcacgcggaaacgtcgttaccccaaacgagttcacggatatttggaccgctctttcaagagcgatatttgagtgatacgctggaagttcatcctccagttgtggacgcagacagcggaggtaagttaaagaaccattaatcttgatttcccaatcaatattttgccttcttgcagatgttcttgtctccatcacgcatgccgttcctccctacggtgttgtaggagtaaacttgtacctgtcggatctgcttgaggatctacttaactaccccagtactacatccagtgccaagcagggcttagggtatgcctttctgctcgatcgctcgacgggaaacacgctagctcatccggcttttccacgaccgctcattcagcgcgagacctcgtatcccgtaaacatcgcctatctggaaaacgccacagatttttccagccatatacgggatcgccttctgcgcgaggagagcggtaatgtcaccacggatgtctatgtgggcagacagcgactgcagcgtacctactactggcaatccgtgctgggattttatgtactctgcctggtaagcagtggcggcgacacactgcgcaatgtttcctccacgcaacgttacaacctaaaggacaccgtgtccaactacgagcccggctactatggtgagagcatggacctactctaccatcgcctggatttaaaccaaggcggcagtgcaccgccaaaaacctgtcgctacttcagacaagtagccacaatgggtgagttttagtcataccccatcataaatgttaaaacataattatatttaaaattcttccagatgctccaactctgttcctgagtgctgccgcattcgagtctccgttcggattccttcacaacaataggcctcgcacccagctgcggcatgtggagtctataatggcctatcttcgcgactcaagtggcctgctggccaatatgggcctgcgtcccagtattcggcacgaagtgggcgtcctttaccaggcgatgcagcagttgagacgacggcaccaggacgcaaggggctcactacgcagccatgtcattcgacggtacatcgccagtgtgagtggagtgctgcaattgtacccaggttgcttgcttagcagcagctatgatccaacgcgaaggccatggttccgacaggcaatagcgcagcctggaaagattgttagcacagctccgtatctggatgccggaggagctggatacataatcaccattgcgcacaccatcttcgaaggcaaggcccatgcgctgcactctgcccagcaggacagacccgtagcagtggtagccctggacgttccttatgccttctactatcgcctgatcctggagggcacaccgatctgccagctgccgcatataaagtgtctgctgttcgagcacgagggatatttgttggctcaccccagcatgttgcagcccgccacactcacgaaaaaccagcgacgtccacatgagcacctcacacacaaggaatcgtatttggccaacgatatgttgaaccacggccaattggtacgaaaactcggctgtgccagctaccaaaaccgcacgttgcagcgttactacgccttcaacacatctctgtccagcatcctgggcaacgtagtgcacggcgagcgaaccaagtacgcgattgccctgatccgtggtagcaatctattcgcagccgtactaaactccagctgcgatggcggcgccttttgcccgtgcagcacaatcgacagagagtgtctcaactgcaagcgaatggaccaaacagactgcgagtgtccttgcgagtgtccaatggtgggagacagcagctcaccatcgtccctcatgtactttgccaactacacgcgacaatttccgtactgtccaccgccaagtgaacatttcattgcacttccaccgaccacacagctgctgagtactctgccgaattgtcctggttctgctggcatatgcgaaacgtattccactcaaagagaatgcctcggagtgatgggctgcgaatggtgccagctggatgtggacggcaatagtttttcgacctccttctgctcgtcccaggcgagctgcttcaacggagtacttgcctcgctgacaccctacggtgagctggacgagatggaactgctggccgcccacaatccgcagagagagcagcacgcttactctgcatttggtccgctaggaggagccattgtggtgcttgtcatggtgattggctttgccatctactgctacagacacaatctggatgcgcagacgcaggagcacttctatgtggattcggtacaggaagagaattacggcttgccgctgtccaggttcaactttgacgattgcaaagcgcatgacgagccgcctcttggtggcggctatgaccacgcatctgcacagcggcagctgatgcacgcggcggatatttcgccctaccacgtttccagcggcagtagctatcgccggccacccaacggtgagtcggatcatggctacagcacaatgacgccgcacgaggacagttccgatcagcagtgcttcacgctggcggaacctttgctgctgcacgacaagcggcacagcaagtcggacaccatgtccatatccacatccatatcgagtcccacgaatcgacagcagtcctcctcgcagccaaacacgcatccctacttgagcaatcagccgacctcaaagacggaacgctacaagcaggtgcaggccacgccctcgccatgtcgcggaacgccagcaggtggtagtgtctacgggcagacgacgttgcccctcgagggggataagacccggccacactatatcctggcaccagtgacggtgcaccggcacatggaaactgccgaatcgtagtccacaatagcgttgttaagttttagagcgtaagatgtccgcttgtttgccaatttagttatgtaagtttccaaaatgggcagttcaactgccgacagtccagaatgctgggcccgcattccaaacccgcaatgtgttttgtgagctcgcggtggcctccattgttggcccatctgtatctattagagcctccgtggacgagacgaacaccaactattaagtgatgacattgtttctgccatttttgatcgatgtattgtatttgtattgtattgtattttactgtaatttattgcaaaaagtattactatattatgtgcagctatatacttccgatatttttagcatttatttgataagcaccaacaacagaaatgtacttacttgtctgattgtaagataccatgtcgtatatcgttttttgtaatagcccctaagactacagagttactaactactgattttagtaatacacatctataatagcattgtacgtttcaaataaaatgtttaaattttgcaaaaaaaacccacaagatcttaaccttgatccagagcgatcggatgaatcgattgggctgccaattgctcgtcctccgatcagctggtcgtacgttaatgaaattatttttacacctatacattttataagcaaaccagacgctgctcaatgggctctttttttgctgtggtggccaagaattgccaatttataaataacaatctctattcgggggttgtcaggtggcttttagagcaaaattagctatggatctttggtgtaagtttttacccgatacccaaccatttcataaccgtcattaaccgatgtcataaggctgagatagccaacatattcaatatcttcaaaaagaaagtgtctttatactgattagctgtgcatttgctgtgtaagttcttacccgatacgcaaccgtttcgaaaccgttatcaaccggttggctttgcactcggctggcaaccctgaaccgaagctgct

SEQ ID NO: 24971 - DNA, 4638 bp, DROSOPHILA
gtcacactgcgcatgtggaactttaagaaaatctgcaaaacattgacaaaattattaaatttaatagcttaatcggacgaataagagtgtatttatgttgattagttgttgtctctgagccagtgggcaatgtacacgtgcttactatgcctaaaaccgaggaatcagcgagatttatgtgacgaaattccgtaaacaaatcagcgtgcagctcgagaagaacctgatatgcggtaaattcaatagtatgccccagtggccacggagtccgccggaaccacaaaaaccatgtggcccaacagcaacctaaacgccgtgctgctcatcctggcagtgctggcgtgcccaactagcagccaacatgttcctctggccatggccaattcaactagcaaccaagtgcctacggatcctggcttcatgccgctgcagcagtcgccgggaagcgtctttttcgtgcaccacaaccagcagaatgccatgcagctgcgacatagcatggagggcaagctgcggaatattcgtaatacggagctgagggtggccaagatacaggaaatctttgactccatgcacttcagcagcgccaaaggagcgtcaaacactcgtcaagcttcgagcaacgatagcaacgtggtcaatccccagttgcagcgggacttgcaattgtttagtgagcgtctgagcaagaaaatccagaaagccacttacgtggtgttggaactgcgcgaactgcttcgctacaacctgaccaaggtctggcaatacagctacgacgacgaggatgatgagtcggagagcgaaatggatctagaaatggagctggaagatctacatgccaggaacacggcctcaccaaccgatgagcatgtgcagctctacttgaacacccaaatagagagctgccagcctgactacgaaacggacttggagtacggctcctcatcgacccaatcgattcactacaacagacagcagatccaaatcctaaactatctcaagtcggatgatgcacgcgctaccttcctgaatgagaataatgcccgttccttggctgtcaatggctacatatcgaatcaactagtactactcaagcgcaggctcagtcgaagcgatgcggaaaactcgaatagcaagccaattagcgggaatcactttaaacacatatatttcctatccaattcggatggagcctctgctagcctccattttcgtcagctctacgtgtcagctattaagcagaaatttgtgctcttcctcatcgacgtgggatcagctctaagcgcggagttattcgacctctcaaaaagctttgttcacgaaatgctccagctgctggaagatacggataaagtttcactggtgacggttgcgagtgaagcgaacttcatgtccctagaagcctttcccgccgaggctggtcacggcatctacagtgcgactcgtgcgcacaaggaggaaattataagcttcattaacagcttgagccgggcacaggcctttacaaaccactccttgggatttgagtactcctttgagctactccatcgactgcaacagtcgggtatgataaatacggcagagcaaccagtggaattcgtttacattactcgtggtctgctgaccaacttgtctgatgcaatggcagtactgcgagtagtggccgatggtcaaagacgactcagggctccagtgatcattaacacatgcgcagtggtgctcgacgagaagcgtataatgtacgaaaaacaattccttaacgacgtcgccagtcagaactacaccaagtacgagattgatgtggcaagttggtggcccagtggacaggaagcgtctgagttggttggacgcttctatgtgctcagcaaaatgcacgcggaaacgtcgttaccccaaacgagttcacggatatttggaccgctctttcaagagcgatatttgagtgatacgctggaagttcatcctccagttgtggacgcagacagcggagatgttcttgtctccatcacgcatgccgttcctccctacggtgttgtaggagtaaacttgtacctgtcggatctgcttgaggatctacttaactaccccagtactacatccagtgccaagcagggcttagggtatgcctttctgctcgatcgctcgacgggaaacacgctagctcatccggcttttccacgaccgctcattcagcgcgagacctcgtatcccgtaaacatcgcctatctggaaaacgccacagatttttccagccatatacgggatcgccttctgcgcgaggagagcggtaatgtcaccacggatgtctatgtgggcagacagcgactgcagcgtacctactactggcaatccgtgctgggattttatgtactctgcctggtaagcagtggcggcgacacactgcgcaatgtttcctccacgcaacgttacaacctaaaggacaccgtgtccaactacgagcccggctactatggtgagagcatggacctactctaccatcgcctggatttaaaccaaggcggcagtgcaccgccaaaaacctgtcgctacttcagacaagtagccacaatggatgctccaactctgttcctgagtgctgccgcattcgagtctccgttcggattccttcacaacaataggcctcgcacccagctgcggcatgtggagtctataatggcctatcttcgcgactcaagtggcctgctggccaatatgggcctgcgtcccagtattcggcacgaagtgggcgtcctttaccaggcgatgcagcagttgagacgacggcaccaggacgcaaggggctcactacgcagccatgtcattcgacggtacatcgccagtgtgagtggagtgctgcaattgtacccaggttgcttgcttagcagcagctatgatccaacgcgaaggccatggttccgacaggcaatagcgcagcctggaaagattgttagcacagctccgtatctggatgccggaggagctggatacataatcaccattgcgcacaccatcttcgaaggcaaggcccatgcgctgcactctgcccagcaggacagacccgtagcagtggtagccctggacgttccttatgccttctactatcgcctgatcctggagggcacaccgatctgccagctgccgcatataaagtgtctgctgttcgagcacgagggatatttgttggctcaccccagcatgttgcagcccgccacactcacgaaaaaccagcgacgtccacatgagcacctcacacacaaggaatcgtatttggccaacgatatgttgaaccacggccaattggtacgaaaactcggctgtgccagctaccaaaaccgcacgttgcagcgttactacgccttcaacacatctctgtccagcatcctgggcaacgtagtgcacggcgagcgaaccaagtacgcgattgccctgatccgtggtagcaatctattcgcagccgtactaaactccagctgcgatggcggcgccttttgcccgtgcagcacaatcgacagagagtgtctcaactgcaagcgaatggaccaaacagactgcgagtgtccttgcgagtgtccaatggtgggagacagcagctcaccatcgtccctcatgtactttgccaactacacgcgacaatttccgtactgtccaccgccaagtgaacatttcattgcacttccaccgaccacacagctgctgagtactctgccgaattgtcctggttctgctggcatatgcgaaacgtattccactcaaagagaatgcctcggagtgatgggctgcgaatggtgccagctggatgtggacggcaatagtttttcgacctccttctgctcgtcccaggcgagctgcttcaacggagtacttgcctcgctgacaccctacggtgagctggacgagatggaactgctggccgcccacaatccgcagagagagcagcacgcttactctgcatttggtccgctaggaggagccattgtggtgcttgtcatggtgattggctttgccatctactgctacagacacaatctggatgcgcagacgcaggagcacttctatgtggattcggtacaggaagagaattacggcttgccgctgtccaggttcaactttgacgattgcaaagcgcatgacgagccgcctcttggtggcggctatgaccacgcatctgcacagcggcagctgatgcacgcggcggatatttcgccctaccacgtttccagcggcagtagctatcgccggccacccaacggtgagtcggatcatggctacagcacaatgacgccgcacgaggacagttccgatcagcagtgcttcacgctggcggaacctttgctgctgcacgacaagcggcacagcaagtcggacaccatgtccatatccacatccatatcgagtcccacgaatcgacagcagtcctcctcgcagccaaacacgcatccctacttgagcaatcagccgacctcaaagacggaacgctacaagcaggtgcaggccacgccctcgccatgtcgcggaacgccagcaggtggtagtgtctacgggcagacgacgttgcccctcgagggggataagacccggccacactatatcctggcaccagtgacggtgcaccggcacatggaaactgccgaatcgtag

SEQ ID NO: 24972 - protein, 1449 aa, DROSOPHILA
MWPNSNLNAVLLILAVLACPTSSQHVPLAMANSTSNQVPTDPGFMPLQQSPGSVFFVHHNQQNAMQLRHSMEGKLRNIRNTELRVAKIQEIFDSMHFSSAKGASNTRQASSNDSNVVNPQLQRDLQLFSERLSKKIQKATYVVLELRELLRYNLTKVWQYSYDDEDDESESEMDLEMELEDLHARNTASPTDEHVQLYLNTQIESCQPDYETDLEYGSSSTQSIHYNRQQIQILNYLKSDDARATFLNENNARSLAVNGYISNQLVLLKRRLSRSDAENSNSKPISGNHFKHIYFLSNSDGASASLHFRQLYVSAIKQKFVLFLIDVGSALSAELFDLSKSFVHEMLQLLEDTDKVSLVTVASEANFMSLEAFPAEAGHGIYSATRAHKEEIISFINSLSRAQAFTNHSLGFEYSFELLHRLQQSGMINTAEQPVEFVYITRGLLTNLSDAMAVLRVVADGQRRLRAPVIINTCAVVLDEKRIMYEKQFLNDVASQNYTKYEIDVASWWPSGQEASELVGRFYVLSKMHAETSLPQTSSRIFGPLFQERYLSDTLEVHPPVVDADSGDVLVSITHAVPPYGVVGVNLYLSDLLEDLLNYPSTTSSAKQGLGYAFLLDRSTGNTLAHPAFPRPLIQRETSYPVNIAYLENATDFSSHIRDRLLREESGNVTTDVYVGRQRLQRTYYWQSVLGFYVLCLVSSGGDTLRNVSSTQRYNLKDTVSNYEPGYYGESMDLLYHRLDLNQGGSAPPKTCRYFRQVATMDAPTLFLSAAAFESPFGFLHNNRPRTQLRHVESIMAYLRDSSGLLANMGLRPSIRHEVGVLYQAMQQLRRRHQDARGSLRSHVIRRYIASVSGVLQLYPGCLLSSSYDPTRRPWFRQAIAQPGKIVSTAPYLDAGGAGYIITIAHTIFEGKAHALHSAQQDRPVAVVALDVPYAFYYRLILEGTPICQLPHIKCLLFEHEGYLLAHPSMLQPATLTKNQRRPHEHLTHKESYLANDMLNHGQLVRKLGCASYQNRTLQRYYAFNTSLSSILGNVVHGERTKYAIALIRGSNLFAAVLNSSCDGGAFCPCSTIDRECLNCKRMDQTDCECPCECPMVGDSSSPSSLMYFANYTRQFPYCPPPSEHFIALPPTTQLLSTLPNCPGSAGICETYSTQRECLGVMGCEWCQLDVDGNSFSTSFCSSQASCFNGVLASLTPYGELDEMELLAAHNPQREQHAYSAFGPLGGAIVVLVMVIGFAIYCYRHNLDAQTQEHFYVDSVQEENYGLPLSRFNFDDCKAHDEPPLGGGYDHASAQRQLMHAADISPYHVSSGSSYRRPPNGESDHGYSTMTPHEDSSDQQCFTLAEPLLLHDKRHSKSDTMSISTSISSPTNRQQSSSQPNTHPYLSNQPTSKTERYKQVQATPSPCRGTPAGGSVYGQTTLPLEGDKTRPHYILAPVTVHRHMETAES

SEQ ID NO: 24973 - DNA, 56686 bp, DROSOPHILA
gttatatttatgggtgtaatacgtggctatgcatctacgagctagacttaagtagttaatagctatacacacacatactaggtaataaacacttcttgaactgtcgattaacgcactagggaaactatggatcctatgtatctaggattagcctataagtatacagatagcagacgataacaagggctcatcatatatgtacatacatgataagctattgtgccgttttacgtttaaaacttttgggatcgcacggaagcgcacagaagtacagaaataaaaggggctttttgtggagtggaaaacttagttgtaccagtagcacagattacaatttagacatacataaatactagagacctacttatatgccattcacatcttcaacgctatatacatgcatgattttgaaatgtttgtggtgccccgtgcgggtaaaatgattatgtacgtataacaaaatgttgcgctctaatatcacttttgggggacacatgctttatggcctctatcaacgttcgatccttgcagctgacatcttctacagactatgtgagaacgaagaaatatcatcgcattgcacacagaatttcaaatttaattcggtttatcttcaactggttctcttgctatagatcggcttacaactaaatctgatgtattttaaattaatttcaaattaatttaaaagtctaatttttacacggtaattacaagcaaatcggtttgacaggttggtgggtggggggttttctttttgtttgtgttttttgtgtgtgtggggggggggggagtcaggactttgggtacttaggggttggccaacactttaatctcgttgcaagatcgcagatcgggggtagctgcttaaaagctaacatcacgcttggtaaacaataacgctcgaaagtattttgcggttggttgagtacaatccgtggctgggcgcagatctcctggagctgttcccgttttaggcagcttctccgctgctccgctgctaatccacatcttttttctcaatcttaagatcatacttggccaccagctcctcgggtgtgtgcctgtaaatgaaattaattgcttttaataagaattcgataattcgtcttcaatctgtcgactacttacccaactagattctggagatcacagacaaagcggtagacatatcgtttgcctgccgtcttgtggatgatgtttttgtcataatagtagcgcagaccgcgactcagcttctcgtagttcatcttcggtttgtttttgcgaattccccaacgacgagccacctgatcaaaatagatatatgttagttaggaattcaataatagttatattacaaatggatttacctcatcaggatctgttagcttgaactcccagccatcgccggtccacgaaatgaaactctgacacgtcttgtccagcagcaattcgagcaggaattgccacagttgaatgggacccgatcccgtgaagcacggcactccgccctgcgtcgtatagccacccagcaggcccttatccagacccaaggtgctcatatacgctgccggatgctggtgggcatgggctgctccccactgatccatggccgtgggctgggggcccatcgactggaaggattgagcatcatagggcgtaaattccggtggataaccatcgtggaatcgattcctgcccgcgtaactgccatagaactccgagctgctgtccaagtaaccgttgctgtttccggtgcttccaccgctggctcctccactgccatttcctccactcgattgctgactctggtgatcctgcgccgagatcgtgctgtgataatcgctttcatcgccaccgccaccggagctcctgccgccggttggcccactgccactcccaccaccgtaagcggccaggtgggcgggcaatccataactactgagatccgtgggatcgttctggctattactgccaccaccatagccaccgatattaccattctgggtgcccggctcctctttgaggtgatgttggaagatcgccgccgctgccataaagttaatattattgttgttattattgttgttattgctgcccgcattcgaattgttgctgccaccgctgttgttgttgttgttgctgctgttgtttgtgttgctgctgctggtgttgttattttcgttgttgctttgctgtacagcgggcggtagcatggagttattgttgttgctgctggcgctaccgctgccattgacagtcggctgctgcgattgctgctgctgcgggggcgtgctgttgttgatgcggtcgtgtgtgttgctggtgttgtagcctgtaagcgatacgaaatatgagatagtaattggattagacattgttgtatagatatgggtatggaaagagtataatctgtggccgtcaacttatgaatgaaacgtttaatttcaataaaaattaaaaattatatttctattaaattctgtttcacagaagtcttgtcataaattaaaagatataatataaaatgtatatgcaaatcttagaaagccatttatttatcgtgggaaattcgcatcgctaaaatccccagatacatttttcacacgccaaaatccggtgattacagattgttcgcaatttctattaaatggtgttcatagaaatggggcgtctctcaagcgagcgcaagacttcgaaaaccaatcaaaatcacagcgcgcacacacacaagcacaggccgcagcacacagatacccacgcacacaggcacaaccaacccgatctaatggtgtgcacgctacattaattgcgaatacaacgaaatttaacacatttcgatgtacactcgtgtatctgtgggatacgaaaacctgttggcacataaccacatacacacgcgcagccctgtagctgtccctctcgcgcacggcaaagaaataaaaaaagctttgccagcgcttcgtttcgattcccattcgctcgcaggcacagagacacaaagatacagatacagcccctcgttggctggccaaagagttggcagcgcctctttaggtgccgcctccagagagcgcaagagcatccgtatctgccagatacatctgaggccggccacatcttctagcgctcaacaagccacttatcacccagcgcaatctgatgcacgcagcgaaaaatgtatttatagtaatatattgtaactttacaaatataattaaattgaaatttgtttattttgtaaagtgaaaactaaacgtagtatatgttgaatatcattagttactagaacttagttactagaacattttttctctgcgtgtatatcccagtcagttccccttagccaccccgacttgttgcgtgtcaaacacttaaaaacaaattacgaatttaattatgccaccgcaaagcgtcttcttctggtttgctgccttttcacaccccagcaatcgtaattaaaagcaccgtttttgatgtcggtaaatatttgctgacctgtacctgaactaaagaagttgacatccgagtccgtgtagtaggcattcgcatcgcccacaaagggcgccatatcattgaagtagcccagtcccagcgaagcagccgtggagctgctcaacgcccccaccagattgttcgcagtcgcgctcccgttggcgaatccctgcgatgaggcactcgacgaggagccactcgaactggagccggaggaggtggtggtggtgctgcccgtactgccgccggataaacgatgatggggcagctgggctgatgatccgtatccgtgttgctgctgctgttgcgactggtggctgtgctgctgctgctgttgttgcgggtgttgcaggagtagggattgctgctgctgctgcagctgctgttgcatcgtatgatggctgtgcagccctgtctgctgcgccaattggtgatgcggatggctgtggtgatgatgatgatgatgatgatgctgagccaggtggtagctgggatagttctcatagctttgcaggaccatgttgtagttgggcgccgtgtggcaattgttattgttgctgctgttgctgctgctgctgctgctggtgaagtgactctgattgagatgctcctgaagctgctgctccttatcgctgtccaaggcgttggcggcactgattatgctggcattcactaaaaacgcagagggcggcatttcttcgcttcaaaatgatcggtactcaaaaacggaaactccacctcgctggtcaaagtgcacgtcattgactctgaactaggcaaatctgcgggatcagctctcaattgattagaatggattgtccccttatgctggtggtacttgcagttgtattaaaattgatttcacttcactttcgtttctcgggttttgtttgatatttgggggtatattttaatttttgcactgtcagtaaatgcatatatgtggtttggtcgtttttgtgtggtttatgaatttggtttgctttcggtttttttttttttttgtggatgcgggttctaatcaattggatggcccgctggacaattgataagttttgaggtatgagggtgtgatattaccaaatccctgcttagctagcgggattttttttttaataagtatgtgtgtatttacgatcgcacttgttcagatacacgtaatttgcagcattcgcagttcacacaccgtcgcgaattcttagcacttttgcgaattaatggcaattaattgtgagcacttcacgatcgtcgctctggcacgggcgataaattaatgcgcatatcgtaactatatgtacattgttttcattccccgcgcgacaatcagtatgtttggtgttgttgtttttcttctttcgttccttaaattcacatttatttctattttttttttttttatcgttattgtgtattttgcgcgccttttccccgataaaaaaaacagaacagaacgcgttgtatgagggacccaagatcaagttgggaccactagagtatggtactatatagatggtgggatactatatatacacaatgagcatgcgacgtcagctctgccaccttcgacatccgttcaagaactgaagttgctctgaagttgcactcggattgttggctgctcgtcggccagctcggcattcgctctctctttctggccgggttgcctctcgctcgcactcaaacgaccgtgtgtgggagagagcgcttcgtgtgtacttcggctcgacgacttcgactcgcattccgagataccgagatacagatacgaatgtgccaatggcaaataataataatcgagtccgagaatactttcacagggtgtttctcacacgctctcgctcaatcagccatccatcgactgctctcttagttagtggcagtgactaaaaaaaaaagccacagagactaaaattaaatggtacgccgctgcgcatttaaggcaaacgtttgcttaaagagtttcgtagtttctacttgttgaatgggaactctaaacgcagcttaaattatcggaatatttgaatttgcttaatatcagctagacagagttcttgggaaagtttaaacgcaatgttatcattaaccgaaagttactcatttcacaaaaaagacttaaactattatttgatatcattttcttaaacggatgttactgtggaattttagctcttatccaatgcaattagattttccttttacgaattattcaccatttaagtgtttcttttagcaaacagtacagttgctagtcgaaattgggttttttttttggaatcattaacaacgccaactcgcaagacccgtcaaaatggccctcagcaaatcagaagacagctagcagcgacgaacggtataaaaagatacaaaagtatctcggcccactggtcagttggttgggctcttggcgatcattaccatgatgatcgagtgggcagcacatcatcagcaagctccacacagcaaatgtatctcacagatactcgcataatgagccaaagtgggattggctgccgcctctcacaaacacattcgttcgatgagatcatgccaaaaaaaaaaaaaagaaaacgaaaaacagacaaaaaaaaaacagagcagcaagaaattaaaaattagttaactattccaaaccgaaggcgtacgtgtctttgacttggccccactttcagatacacatatgtattatataaattattttttgttttggctaatgaacagcaaaaaaaaaaaaaaatggtggccatagctctggaaacgtgttttggggcattttttccgctgtccgttagccaatgacaatttgctttggattttcgggctaaatacgagtccgaaacgtgaagtccagaatgacacgttcccacttcgaaaagatagatccatggctgagtggttagagatattgaacgccataaagaagccataggtgaggtgcatttttcgcttatcaggtttttgggggcagctgctcttatcggcgggggaatcgcttgttgattctcaacccgctgatacaaattgcaatggcctcaagtggtcgtcttttcttggaaatccccaatgcacctcgagctgataaagcacaaaagttatgcgctggggttattacacgaaacaaagttgccaatttaacggcatacataataaatacgcataaggaagccccaaaaccaaacagctgttgaccatgtttggttgtggccacaaaaggatggattgtttttttttttttttttttttggccacttaagaattcttgcagcacaatcatatttataatgtaaaatatatttaaaaaaatattttttcgttagcttcttgtttttccttctttgatttgctgcgcaaagtgctggagaacaatagagagacacaaaaaacacaagcggaaatacaaaaaaaacccagtgaaagaagcagagctaccttaatgcgtgcaagggagaggggctaccgagagcgagatagatgatgcgcctcgcttacgaccatttccggttgaagcacgtgcgcacattttgaagaggagcgtaaccatcgaaccccagctactcctcccatttcgtctcctcccaaagactgcacatgaaaagccaccaccaaagcagaaaaccaatcacaatctcataaaaccggcgacacttccaccaaaaaagggataaagaaaacaaaacaagccccgagtcttcgttttcgtcttcaggggagtaaatgtagatcctacttgccgaaaacgcacacgttcgcagccaagggttaacataataattgtcgttgtcttgagtaaaagcacacacaaaaaaaaaatcagatcaagctaacttaaatatataataactataaacataaagcggaaaatcaagaaacctcaaagttaaagctacaaaagcaattaatccttaagcttatactaatattttctagccttaaattgcattaatccaaaacgtttctttctgtgtaccaaataataagatggtgtgtgccaaaaacaaaaaaaaaaagaaggagcaaaatggtataagcatactttcagttgaatttcaattaaaactcgttctgttcgcacaaaaggattacacatttaatgcaataaggattgtcagggaggaggagttgcaggaagcgcctacgggaagaacaaaggcggatgggcaaggtactcccgaatctagggattccttcggatgggcctgccaacaacagctgtcgactgacactcgagatcatcagcccattcaattgatatcaaattggagtaggatccttgccagaatctcgctcgatcctgtgcacgtgtacaaattgcactctctgagctctgagctctgagctctgtatcctataatatggtctgagccctatgctctgtcttttgtaccatatagcactgcaagcacttccggccccatcccgctaatgtaaatcggatgtcaatgcattgcgcgtgaggcatatcaattaaaaaagacgaggcgagcgagagagcaagtgagtgcgaggcgaaaatgccagagagaacctgttagaagacaagccgcataaataaataaactgttaggctggaaaacggaaggaaatcgtaaacacaagccagtagttgttgctgatgttttgacacgcatactatcataattacagctcccagtaatatccatttcccgccccctttggagcaacaccatccagcccaccatgcccaccttgcccacctgttctgctcttttctgttctgaagctgatgcttccgtgcagcggccaagaataatatcaattttctatgtaaactcaccccaaccgccttggcgggcccccatctttcgactgcaatttcaggttgggaagaatacctgcattttgacaacaaaataaacactgattccagcagcagcagcagctatagctatagctacctctgattgttgggagccgtaaacaacacacactaaatacaaacaacaataatcataataacgctggattcttacgatcttacgatcttgagatccgcgtttcacagctcctggctgagaagagcggaaatgaaaccagatactttgatagcaacatggcaacgcatgtgcagctgggccacaagatcttcactcgtaatacacatgtatacatgtatgtatacatgtacgagtttgagtgcgagtgtatatgtatgtactgaatatgtacttatcgatcttgattaagcaaaacgctgccaagtgctcttgatcttgatttagatttcgattgagactgctgaagtaggatatgatcctgcagttgctaaatgccgcggatgtcattgatctggtggcatctaatcggatcggaacgaatctcgatctaaactaaaatgaactgaacagagatcgatcaaaaggccgtctgaaaactgagaagttggctgacttttgtgcgaaaatgagacactaaccgatgttgcctgggaaatggtcgaggaaatcggatcttgacgacaggtggatcaagattgtgggtcagattctaagatttaggtgcgcaaattaggcgatcatgctgcgaaagaagatttgccaacagatagtagtattttaaatgaagatcttatcatagaccaatatccaggtaatatagcagatcaagtgcacattctgtatccctatcaggattgagtgatcgtgagaaactgatttctaatgtgacagtatgtgtatctgtttagtatgttaatgctgtcactcgtttaagacatgcaacctgtaaagctgatggtaagtttgcctcagttttgtactattcgttcaagatatttactattcagatgcttttttctgcaattccaatctaacatgtattgattttttctgatatgactgatattgttcaagtgatcgtgagagtgccagacattcaatcaatatatattgtattttacatcattaatatcattttacaaaaccggaaatggtgctgctggctatttgggtcataaatcagaggttctttggttcaggatctttgtatgatgcgtttgtttctcatatgatgataaaaatgtacaatagctgtttgaaaatccttttcatctagagacctcaatattggcacataaattcttaggtgtcctaattctccgccacaagctgatcgcttggggggacctttagctgtaattaaatctaagatcaatggcaacactttccgttaaaccagaaatgatcaatgttggccctcaagtgatcttcaatcaggactcctaccattcaggatcctctatctgtgtgctcatgtgtgtctgtgtgtgtttctacagttcgtcagatgtgcagtcgaaggaaacagttggccagaagacagagagtgactcgctaaatggctcatttatggccatttcccactgcgcggcaacaacgcacccaaaatgtggcatgcggtcaccttcgacaactacaacaataacaacaacaacaacggcaacatcgaagcggtacgacaacaacagctagagtaccgcaaagcacaaacgaatgaacctgaacctgaatatcaacctgaatgtgaatgtgagcctgcgagagagctgcgggggtggggcagttgcaactcaagcggctgactaaatgtcagggtattctgcacctgtccgactatcgtcatgccaacaaaaacaacaacaacacaccaacatcaggggcgagggagaaatgctcatatatacatacatataggtaaaaagatataatgaaaaaactgcgtgcgtcgacagaattttggacagcgacaacatgtgttgctgctgcagcgaggcacaactgttgtgcaccgttgactgcgtttgctcttttttcccagttgtatactgcactaaaaatcatcgtacaaattctctatagaataattaaatttacagactatacaattagtcactattaatactgataaaaccaatgttgaacttttttttgatttccttttcgatttctacaaatatttttgtgctcttgaacagatgtcacacgtttagttgcttaacccatattcatatttttctcgccgtgtactttcgccctggtcagattgtgtgagcctacgcacacagatgcaggtatcgcccacacaataacgatgagagtgtgagaaactgcaggcagcctgtgttcctcctacgaacgcttcagctccctttccatgatcctgcctcctgcccttttcctggttccttcttccttgttccttattccttatttattccactttctgtcccccaactcctccactttcctgtgtgtctactgtgtgcctacttcgggcgaacaagatgcagtcaagcgatatagggatattagaatgcccgacatgcggagccaggggatctatggatctcaagatccgcagggccgaagggcagaggagggaatctacctgccgggccactttgggcttgcctaatttacttgtgcccttcttgccgcattgttcttgcagttttcattcataaaatctgaaatctctaccctggcgaggcattgaactggtctgtggataggatcagaataaaggaatctcaaggtgcatcgattcggaactaaaggaagtaaattaccggatgttgtctactcatttgcctgttgttcttttcgtattccctttgcccttttgcttttgattcatcgaaatgtcctgcgggcagtcctttgtggacgaccttgctgtgctgcttgttgctcatttttcacttgaaaccgaaaccaaagcgaacaaaacgagctgaatgcaagccaataaaacattttgccaatccctgggatacacctttttattcttgttgttgttgcgtcggcggttagtgggtatcgaatggcacgatatcctggcagcccttttaattgcacacctcgtatgcaatgagtttttaattgccattcaactgttggccaaactcggtagttgacgctttcccacgccgctacccaactaactttttatagttttgtgcgttttttgtttttttttctttaatttttgataaattacacaacaaatgcagcagcgacgttccggctgattgcgccgcaatgtctcgttaaaggacacgtacaatttgtgagggtggcgagcgtgggagagctgcgagggggtggtggcaattgctttattgctttatggcccataacttttaaacggtgaactaattatgaaacaagttgagtcgatcatggcgataagtggtggcaaatgtattgctattaacttactgaatgtttaatttatgaaaactgtcgttatatcatgcacattctagctgcttgaatttcttaaatatttatcatcttttcattagtacctttgagttatttacaattttgttgcactttttactgccatttttaacaaccaatcaaacaaaactaaaaaaatacttgtaagccgcttttgccccaacactttcatctgttatcatctatggccattggagtggataactttggggcattacagatacttactagggactaagcaaatagagttaaacctctcaggtaaacaactacaacgaggtctggctggcaaatagcagcgaatgaaacaatgagaaaacaacgtggacagaaaaaatataaacaaatcagctgcgcaagcgcacagatcaaacgacgaaaggccgacagctcagaaaagaaaaaaaaccaaaaacaacaaaagcggctcgacacttttaaaattgcaagaagattgggcgaggagacgaggaggagagttgcgggaggagagtctcgaaaattaaagctaaagcaagctgaaaattcaaatttatttacactttgacgcatttaaaacaaagagagcgggcgatacaacaacaagaacaacaaaaaaccacaacaacagtctggtaaaaaaacataaaaataacaaaaaaaaaaaagagaacagtcaaatgtaggcaaataaatgacacaacaacaatggctataacgatgtgaaaattaaatgaaaatgaataaaagcccaagagagagagatggcaagatggagccactaagcagggcaggcaggtctcaaactgattaagatcagaaaatacggaaaatagttaaagccgaaagagcaacattaacggagactgagaaatgttcaagttttgcacagaatttacgagttcgcttttgagcccggccaaattgcattagcaccggccacaggggtaaaacgggttggctggggaaatgagaattttcccacgttccgactttggaaactcaggtgttcgagttggacaaattattgccgcaaatgtaggcaatccacacgaactacgcggccagtcagccagccgaacaaccagcacaaggagacgccaacccgaaggacgcattcacacacaggtcctgtgcacggtggttgcatccactgataggcatcgcaccaccagcaccacttgcaccacttgcaccccctatcattcgaacctgcacttgctgctgcactctggcggaattttgctcacccctctgtaaaatagagttctcactattacactgaacacaatattttatactagttactgaactatacttataaacgtgaaatattaagcatttcttgttttagttatctagaaaaattacacattttttaaaagaatttaacaaatgtttctctctgtgcacacacccttatatcccacatcccttttccgatttgttgcatttcccatctaccaattgcatttctatataattttgttatttgtctgcggggcgacaagtgctgcaaccaaaatgtttttgttgttttccctgtcagttcccaaggttttgggttagtagagctatgcttttccacatagaagagggtggttttaatgcaactacgagtattttccttgtctgggatttatcttgttttcgagtatttgtttgttgattttagcatcataatttcgtgtcgcattgtggtttttcaagtgggaagagatattttaccggaagtgaacaggttggaaaaatgtttttacgaaactataagtgttgaaaagtattttgttttaaaaaagtaaaaagtattcatatttggatacaaaaatcaatgtaaaatattcatcgaattaagccatgactcattctcacttacaatgagtagattttttcctttcgcgaatctctttacatttctatccccattgattttgccatcaatcgcgcgtgtttccccctcacgattcaaaaagagaaaacaaattttcaacacaattcaattagcgcacacgcggccgcaaaattcaaaatcaaaaaccgaaattgttaatgaaaattgcaaaatgaccccctctgttcaccgcgcgccaatgtaaataaacacgaactgcaatgctgcggagaaaacgaaaagaaaagctgatggaaaaacgcctcaaaacggaaatatgcaaggaaattgccaaggcgctgacagccgattaatcgcgttgaggtccctctgagactaagaaatcgatggatggctaggatggatggatgaaaggatgaggtcaagggttaggcggatattttcatgcaaatgcaacggaaattgcggcaacaaaatgtcctcaaaactctgaaaaggcacaagccatcagcctagctatagacagtgaaaaaaaaagagagcagccacagacggaggcataatttcatcagagttattaattttagcactgaaatttgctttaataatataattaagcgcgagcgagacaggcaaaggagcgacaaggcgggcagatagaaaaaaaaaaaacgcagcctcacatccggtcaacattttgtcgctcatgtgaactcttttcaaaaggcgaacgaaataaataataataataaaaaaaaagagaggtaaaccaaattacagatggggtctcttggcggcccggagtcttggtggcttggagtcttcaagtcttcttggcagattgtctgcaaatccaaaacaagttacagttcattcattccccactcattcattgattcattcgctgggccattcattcagtcgatcgccaaccggctttggcctggcttttcggatttcctacacttgtacgtatgtacatatgtaaaccgaactcaactccgctccattcatccaacggatgttggttcagttcagttctttacatggctggcattaccccctttccatccatttgcccgatagacgaacaacaagctgagagatttgatttgactttatttatttgattcgtttgtttgccgcttgcagcggcgagttaataattatgaattgacgttcgttcgttgggcaagccgatggctgttggcacagcctctagatacaaagatacttttgtatctatgtggctgtttctccattttgtcgttcgccttttttgtttgcctaattcttaatgatgcataaagtgctttgcctcgtcgtcgctttgcaaacagagttttgaaagttgattgcaaattaattgcccacacccgctaacctctggcctaagtttaagaattcttaaatgtattattaccatttaattatagctttttattgcgatttgtggtctaattggcaagccaaacccaaagtaaatatagtcaaattagtggtttgataaaaaataaacattaggcgcttggaaaccaatttgttttttttttttacacctttaagatagatatactaatttctttatcgacatatccaataattagtggttatattaatttctcactttacaaattgtaaacttgttaaacattttcggtttctaaatatatttatggcggcacagattgactaacaccgatatacgcgcattcttacacggcttaagaccataagtcagcccaagctttatagttcaaggtagtgcatccagcactccaaagtgcacagatgcatatatcattctatatggcctgcatttgcatctgaaatcaaatgcgattcgtctctttcagttttttacgtttcgttcgttgccttttcgggcctccaaatcgaccctctctttcactcactcccccatactattagcggcttttgcattatacaaatttaatgtttaattttttttttttttctccctctacatatacacctcgcttgttgttgttcttttgagcgttctttgttttaagtgaactcgaccgtaacgcttttctatggcgtaaatttacatctacgtacgtaacgaaataaaatggaaatacatcagagtcagatacgaaaacaaaaaacaaaaaaaaaaaacagaaaagaacagaactgaaacgtaaaaaattaaagttcgaggagacgccgccgtcgacaggcggcaacaatggtgttgttgctgatgtgcctgcagcaacatcagcaacagttccaatccgcggatccactccgccctggaatcccatttgaatttcagttgagctggctgagggagggggtagaaaaggggttaagtgcaggccgcattagaaccaatgtcggtcggttggctgcgcgtcggattcagctgaatatggtaataaattaaacgaaatccgcgcaagatagataaaggtatgcatacataggacgcaccacccgctgcaccaccgatgtgatgtggttgcactggtgtgtggtgttatgcaagccactcaacggaccaaccgcagaatgcagtcaacgcacacagaagtagaaacacgaggctatagaatgcagttttgcaagggaaattggggaatcgaccttaaaggtacttaggatacttagatatccattgaaatatgcacttgcttttaacaaatatgtttgaaagttagcattagttagttgtaatttcatatatgtatataggttatcaatatagttagctttataaacagcgctaaatgcgcaaaactgcgtattaaaaacgagtgcgaaatagcagaaaactgaatatgttgacttgagttttcacagctctctgcgctctggcacccacggaacccagccgtccccaaaaagaggttcctagatcatcatcaccaccaccaccaccaccaccattcagtttaaccatcagcatacaacactgtattataacttcgccataaagttgggctccagtagcagttgctctgagcagcgaagcgcgcaggcgcgtagtcgtagtccacaaaactcccaacggcgtcgactatgttaattagtgacaatgtgatttctggccctgaaggcgctgctcccccccccctccccttcaccggccacgcccctcccccacgccagctgcccaacggggcgaatgattaatttgctagcactgaaagcggactacagtctaaagtgggttgccttaaattccgctaaatgctttaataatatgcttcttttttcttctgattcttcttcgccagtgcatttgcaaaacaatggcgttgaaattaaaaatgaaattccactttatgaccttaacaaattagcaatcaacataattccttatgttatgactctttaggttttatgttgcgtatcgaaacagatttccttaccatccaaaaaaacaaaaaaaaaaacgaagagcataaaactatagttctaatttctttgttctgctccgttggtcgcaacaatttgtgggaggtgaaaactatcttgcgttaatggctgaatttagcgtaattaatacgaaggagccgcaaatgaagttgatgtagaaacatcaagccgaggtgatcatatttcccatttggcctcacattgtatggtaattggctttgaatcgctgccttcttttcgtttggtttttaatttcatatatgaactggattcccgataattttgtggccttatatattcgttttttttcaatggtttaggctactgtataattatcagtgttctaaattccaagaaacatcgaaaattgcttctttttgttggcttatcttttttttttttttttaatttttaggcaagaaattactggttaaaaattgctacattttcgtattaaaaaattaatcatgactatactatttttgaatatgaaaatttatgataaaagtggaaagaaagtcggcttagaaatatattcagtttatctttattatttgatatttaaattctctattaatattttccaattaatttccaaatgaaagtgaaaacaccactcacgataactgtctgccacatgtctgtcttggcgagaactgaaagattgtcattccattgtcattttcaaaaccaacaaagtgtaactaaacctcacgaagggctagtgagatggagaatttacgaactgtcacatgcgagaacaccaaagacatgtgacttgtgatcggtggacgacgcatggaggtgctttgttcagacgaatggatctacaagtcaaatgtgcattaaatgtgtcattctgtgaagcaaccgacgatggcaacgatggcctggcggagatcggggtatccaaagaggttcaaaacagaaacagttctatggtcggttgatcggtcggttgcctgggctgaggttatatggagctatattgcgacgatgatcataatgatgatgatgatgatgacgatgatgaatcaacagccggcaagaggcaacaatggcaactcttcaagcttggacaaacatttcacgcatcaggcattttattatgtagaaataaaaacacacagaaaacaaaaaacaaaaaaaaaaaaccggggaataaaagcaaatacgaatactaaaacttcatgaatggcaaatcatagaataggaacagacatatagccatatagctcggtgattttcgcaaatctaaatttagtggaacaatggacgagagactaaaaatggattttcaccgcatagctcccagaggtaaataaacttgatttctctccacttcgacttgggtttcattaagggttcatctaatgacatcatacgagtgtaaaaccaaaaaaaaataaatcaaatttgaacagattgttttagaggagaaggcacagaacaatgaataaaggagacactcaaaaaaaaaaacaaccaaaaaaggcagcggcaattttgcgtgcaaatatctaagatacactagcctagatacgctctcaaccaaaacatcgaaagaccctggtcatgatggggtctatagtccgtcgaacaatcagccagccagccagtcagctcacatatgtatctgtgcaccattgtatctgcgatgtgtgcaaagatttttaaaccgctgactaagcgttagatactgcaaattgatcgaatgcgtatgaaaataattggtatggggcatcattattcattaaaataaaacgaaacacacactttccatatgaatggatgaatatttagatggtgttcaaataccgaatgccaagccgacttatgtatgaataaattcccggctgtgttaaagtgcaacaccgtaaatcattcaactcccctcactcctgaatcttcaagcgatgatgatgatgatgatgatgaaactttgaaacattttcagcctttttgcgcttcgttgatttcgcttgtaggtgttgcaccagtgggagggtcaaattaaatgaagaatacacagtaaaaatgagaaaagactcagttcgttggccatagcaaaagtgaagcgtgttcatgacactgtttttattatttgaagatttggaaactcgtttgccaaaggcatgaactcgattcttaatgtgtgttattaatcataatttgttttttagttttaattactgacttttaaggttcagttgtgaaggctttggatatctgtttgtttgtttgttttttagagccaagtaggcacacctggatgccatccataaacgcagggcactcatctgcataattacctatcacagggagcctaggagttaagtgccaggagccaggttaaaagtgtcaacaagtcacgcacttaggatcccagagacttggaatctctttaagtaatcctcgccagctggggtcaatcaatttttcacacagccctcgtcgcaagagagagagagagagagtagccacactacttgtatgcaaatgatcggtgagggcaaaaaaacatcaataatatgcaaatgcagcaaattaatgactgacaaaaagacaatcgaaacgaattaagaaaaccaacctacaaaccactggacgccaatgcacacaaacgatccgatccgttccgatacgagtcgcataatttccgtagatgcgggccaagcagggacaatgactatccgagtttggtggatggggtccggtacccagacgacggtggcttatccgcaagattgaaataataacaatgctgacaacaggggctgattccacaacaaccacgcaaatgattgaatcaatttgatgtccagaacttagccactgaaacgatcgtgatggacttacatgtgtccaatcagactatgacattgatgatgacttttaaattgagttaagaactagggaatatcttagggattttactagaaattgagcggtttaagttcttcaaaatataatgataaagaataaaatctttcaactggatcatacatttattattaagtactctggtactctttgaggcaaccaaaagaaagagtatttaaaagtcccacaaaatattcagtcgccgcttcttttttttttttggttttgtttgacttagccaatgaattgattgtttcattagccgcgcacacgtctgcgactgggatatgtaaatttgtattgtaaatgttttaacatttatggtcataatgtgtcaaagaccataaattcaattaatttattataatgacaggagtgggcctgccttggcttggagccatcgacaaagtgcagacgaccatgtgtccatgctgggggtcagttgattaataataagaggaaatttgtatcgcatactacatcatcttgacactgcaactcggttggagaaacaaaaacgggcacaatgcagcctgatgacgatgctgatggtgatgatgttgctgctgtgttccaatttgtacggcgacgcattaaataaatgtatctcaatctcaagctgtgccctggcgtcgacaccgccccgcgactccaccaacaccccctcatgccatcgaatatgtaaacaatttaaatagatatttagatatgctgcctacgctggcgccaagctcacaccgtccgacagctcgctatttgttttaaaatttaatttccgtttcaaattcacataaataaattaaaatcacaaaaatataactcacataaactcaagacatggcctgcattcgccacactacacaaatatcatcgcaaacgaagccaacgacataataaaaacattgtatctgtgcaaatgaattgtttaaattggctctcaatttgaatttagttatggatctgctcgtgatttagagtcttttgccggatgcactaaacacatgccaaacaactgttcatcatttggccaaatcggtgcggaggatgtgcaataaataaaagtgatagcttaatgagctccaatatccatctcccatcgatcgttgtaatttcaatatcactagcgattgtgtgtaattttacggaggattacgttgaggaatgctgaatgattttgcccattcattaagtctttagccaagacaaaaagtgaatgaaatctgctacgaatagttttgcctagtgcaatctaagcaattttcttatcaatttgaggctatttttagtttgcaaaaccaagccccccatcatatctttataggtcatgcatctgtaaagtttatggttttccagttctaggaaatttcaatgaaatactaagtctcagcttatgataagatgtttttgttgttattacggaattttaataacttgaattgattcctcaatggggtaattaactgcattgacgacattgtgaatggcttgataaggaacgtctttagaattgctgaagtctcccttgaagttcttgatttttacgcatttgatgtgattataagattgataagaacacattttcaggatgtaccactcaaaaatcggaaacggaagttatatatttaactcaaacctttttccgtccgaaaacctttcaacttctcatcactgaaggacattcactttcgattcaatttaatgtatgcatttatgaatacgcctaaattactatctttcaggattggttcacttaccattgtgggagtggggcgtggcgcggtggaagtttttattatcactattccccgccgacgtcacataatccatggacaggcggctgtttatgctgctgttgttgctgttggcgtgcgtctcgttggggtaattggccacctggtggtccgatccacagaccgaggccgtggtggccgactcaaaggaattgccgtgcacaatatcctcatttggtttctcgcaatctgaaaatgtcgaaatgccgaaaaggggttcggtgaaaaaggtgagcaacaaattgaattagttgcataaaaatactaatagggttttttttttcccaaactaagagctagccaaactcaataaattataaaaatatgaaactgtcccaatgagtttattttttacaggtacgtacgtacacttaagtttcaaccgctaactatatagtgtacaaataaattgattcaaatttattgagttgcatttctacaatctcttttataaatctgtttatcttggtgcaaaaccaagaaaagttttcttttttctattcgagttcactgaaaacattcgtttttttcaagtgcttggtctaactgcgacctctacttcaaatcaaatttcagcctggacaggaagcttcaggagtggaaaaaaaaagtttaatataaagggtatgggactgctcaacaggtcagagaaccggttcacatcccattccgacccaatagagccaccaaccacccaaccatcatgacggactccttgactttgttagacaggcttccgttttgggtttgccacggttggctttggttctctttggggcaggtaaatttcgttactggcgccagtcgtgtccatgtttatggcttactcttttgccgtcggcgcactggcattcggctcacgtactcacctttttgcaggatgtccaagtgctcccacagtatgtcgccggtgaagggcggcgtgatggccaggaacttctccttgcccagatccaccatggcgcgtcccttcatcttgtagaaggggtccaggttcatggagaccaatgagaactcatttttagcccaattgagccagtagatgacatgctcctccgtccattcacgcggatctgcatgggaaataatagaaagaaaacattgtgggtggagtgtaaataggaatagaaatatacataaatataaatagcgatggaaattaatcgttttctaatgcctctagctcggtggcgacttaattaggcgtgggagcgcactttgttattgctgtgggaaactattaatattcattggtactcgggccggaactccaattgatagttcacggttagttaggataattaagattatcttcttcaaattggaagtttcagcggtcagcagggataactcttctttaggttttttgcgcatatctatagtcatagtcctctaatcaaatcactttctacgcattttcttacctttggttatgttgcatttttggacctccttttcccaggaggcaaaggatgccttcagtacctcgttgaccttgcgattggtgcccggcgtgaggggtggcaaggcggtgggaacttctgtaaaacacgaaaagaatcaaaacattagttatattgtaatacaacataaaacttgcttcaataaaaaaaaacatgaaagtgcggactgtagacattatcgaacctttgagcttgctatgattggtggttagctgctgcaacttttgtcccttcaggtggaattttccagtaaagcactgataattattgggcaagaaggtctgaggatggtagttatagtttgccgaccgcagcggcggtagcatccgactgtcattccaatcgatccactcattggtcatagtcaggccaattgagatcttgccgaacgtgtttgtttacgcactgggtgtcaggggttaaaaagggggacgacgatcgtacaattgatcttaattgattggtgcggcacaatcttgacccgaaatgtcagtgaaagtcgcgaccctttcacagcgctcgaatccgtcagatacaaatgtatcttgggcgtgcaattgtcgcgccttaattgtggtaattgaacgttaattgcatatatcacagcaccatttagccattaacagattgtcagcattagcaaacgggtttacagaacacactgcagcactcaaacacacacacgtactcccttctggagatttattcaaatttgttcttatttttaatgagttcgataaaaacaacacacggaacggaaaaatatattttgtaattcgctcgtcgttcgttctgtgtatctatcggatagctggatttgtgaaaccaaactgaaacgaaacgatcgtatccgtagctatagctgcatatcctaagcaaagcgagcgaagcgaagagagagagcgccagagagcgcaacaagtgggaacggaactcgtaaatctggaaaccctcttgcggaacgaaatggaattcattcataaaacgatgcgagtgcgtgtgtgtgcgtgcgctctctcggctgcgtctgtgtgttgtgtgcttggaacggaaacggccatcatcagagcaacaacaagagaaacaacaactacagctagtaaaacaacaacgccaggttgtttgtttagccgagagtagaaggcaaaaggcaagggaaaaaaaaaacaaaaaataaaacaaaacgcacagccacacgaaaaaattaaagcaaaaaactgcaagaaagagaacaaacacaaataaaacagccagcgcttgttttttaggcaacaggtgaccaaatgtgcgattatacagggtgtaacaggtgcacaaaatagaagtgttttaaaatgtcagcattacaaaaaactatacatcttggtgagttaagtaattgctaaaaagacctgggactcaaattagtttggcgcaaaataatactttgaaagctatataatttaaactagaaaaatgtttttctcaataataaatgccttaaataattttcctaaaacaagtagttgttaagaaactttgtttttctattgatcccattacacttagttacatctttgaatttctggtgcacttcctatctcccggcttgatcataatttgtaaattttcttttttaattttttaaccagattgtgcagcacatatggcaaatctactcatgtttctccgcccccctccccctgcaatgactcgagaaatgcccaggcacacaggcaatttatgaatgaatttcttgtgttgcctcacacgcgcattcttctcaaaagaaactccagacaacgaacacaacgaaaacaacaacaactaaaaagaagaagacaccgatattgtagtaagggaacgcttcgtatttcgaagatacaatacctccaggcgatagaagcaacaacaacaatcgatcgagacgtcgacgtcgacagaggccgcttccgctgcttccgttcgatgtattgatatagggtgcaaaagagatggctagatgcagaacggccagcgtggaaaagagaagatagtggccagggcaaaggagaggaggaggataagataaagctattattatgatgactacgcgaccaggtaaatttatgaatgggatacgaaacgaaacgagacgcgaaacattgactccgcggcttaacgtctatgaatgaattgaaattacgtgcgacggcgacggagacgtaagggagatcatttggtcattatcacaaaaccgcataattggcgacaaatgcaggggaaaccctttggctttatcttcgccacgacgtttacctggacggcaccggaaaaaataaccaatccgcttgctaggtataccaaagtaagctatttcattagtcacaatctttaagaaccaaaagccatattgtatctttcagttaacttgcctctctattttcatagcttttcttatcacatcaaatgaacttcttctctcagtgtatgttttagtcccaaggtgggctgcgtgttaaagaaattacttctcatagccatgactatgggccctgtacatatttggcattgcatacatatgtattataacaattattatgacttgtagtcggttgaagaagtagacgcgaggcacttcaaagcccagcacttacaactcaaaattacaaaacgtctgtgcgtgttcgaaattcattatgcgatccgtctctaaagtcgagaagtcgggggttccaaccatccaactgggagcacctttgtggacctgtgggccacacacatggccagggatctttcaattggagccacgccactccagccgatgcgctgcggttggtaatcatacgaggtgttcattgttcgctcctagttgcctcactttttgcagctcgacttggaaatgggtcaatcacgccgacagaccaccggccaccgagcaacgtctgtctgctgtcttcttagatcacgagatggacccatccacatccacgtcacggtggcttagttattcactgagacgcctcctgggctgcctcggattacttcagttatgattaatttcatttaatttatttaatatttatatttgcactgggtggcatttgattaagttgataattatgaatgtgtgcagtagagatagggattatccattataggcaagtgccaagcttgacttgcgttctagtaaatagttgaacaaaaaccgtagcaactacgagcatttccatgtgcaactattactaaccaattgttttcatattaaccaactaggaaactgagaaaatcgaaagctatgccggtcaacttttgagcgattgtttttagatctgcagccgttactcaggctcaactgcgatattgaagtcacgtagtcacacaaatggcaagcgattgcattggatgttacgatcttttcaatgctagactttatggcttcaaaatggcaatctatgcgaggccctttcgtaccaggcacccgctttggtcttatttaatcgggcactaagtaaatggagattggaaactgtgttcgtgtttcgtgggtggacttgtgccaatcttaaagtgtgagtaattgcgcaattagcacacgagtctgaagaaatcttatcgcaattcccagaaatgggactcgagcgaagtactagctgaaatttattagtgcaggttatttttgaacccaatacatcttatcagctgaagacctggcttccgataacttggccgagtgtcgagtgttcattcataaaaagtcggaaaacgatcggcgtatttcagcgcgtaagcgtggacaatgaaattctatttccgtttcctgttgtgatcagatcgttatcgagcgataaccggagaaatttcaaatttaatggagtgtctgattgtcgaatcgaatcaaaggcaattgaagcgcacacttagcgttcacgttcacaggcaaggtgggacctcagttcacctgatggcgcaacaagctgcacgcaattttcttccgagggaaattgcaccagaaaaactgacaagaaattagtgcaaaatttagttgtaaacttagaacttgtatcaaaagaaagtgtctttaaaagaagtgtttgtatgtgttaaataataattctttctattgttgcaaacattaagtatatttagtatttagttttcccaagtgtaataaaagccaaaaggcagacatcgaaactcagccaacaactgacaacaggcaaccacaaaggcagcgaacaacattattaagtatttgccattgacttccggtcgttagatatttcattaccaacttcgacttcaactttggttccctggagtcggggtcccaagctcttctattaaattgtataatattccgccttgcactagcctgggcggtcccgatgatgggctggtccagggaaaagatatacgagatgcaatcgagaccagatgggcaggcagatcccaatgatggcggggtaattatggcaaaatatatagtacaatcaatagctggtgctgtagctatctataatgaaagcgtttgtggtatatgtaggtcttcgaaagagtcctctgtctcatcttttgaaggtcctttgacagccagtcagccataaacgattcgcgcctcgagccaaacaaggcaactaatttgattgacatttcaacagtttaacatcgattggcagactttcgtattttaatatatgtatatgcatatatgtagttgtttgtttgggtttgatgaacgcttctcatttagtgcttaaatcgtaaattaagtcaataaaaggggcgttataagaggaattaaataaatacaaattcaaacagaggcaaaatgtgacaagttcttggaaaatgttgtcaacataaaaaaaggcatagccgcaaaatgcattggtttgattttagaccagcaaataccctagaacataaaatatatataatatatataaaataattactatacatttttgtccatttacttatttcaaaatttattcatttatttattttattcatttttatctatttattcatttactagtgatgttatctttaaaagtatatttttaaatatttaacacgctttttgattaagaatttttaaagaacaaattcacatatatattcttctacatattttcgagatcacaacatttcttcgaattctgtaaatgcaccttaagtttccttaatatcgaaaaaaaaaacgaggaaaacaaacttaaaattctcgataaaaaatggaaagagaatggcggacggacagaccaactgaaaattatattgaaagcaaataaatcaaataatgtgcagccaaattacgacaaaatacacattcgagtataaataaatacgtatgcatgacaggaggcatggagttggagttggaatcttgaaaagggggagtgagcgtgtgtgtgtgtgtgtgtatcgtgtgtgtgcggggagttttcgatataaaaataattgcaggaattgtatgttgttgacgacgttcgaaaaagaaaaaatacaaaaaaataaaaggccatataggaaaaaatcagcgagacgatcggcttcttcttgttgcacttttgcagctgaaacagcaaaagtagaaagagacggggcgaagcaagtgtaaaagagaagtgcgctggctaacaagaagaagagggagctgtgcgaccctggtgaaaaaataaaaaaaaaatggggggggggggaaaagaaagaaccgaggagttgtcgtacgaaacttactacaccggaaatataaaattacacactcaacacttaaatggcatgtgtgtgtgtgtgtgtgtgtgcgagtgagttgcatgctgcagttgagattcttcgagatacgtggagatgcagtgcgtcacgtctacagggtgcaaaacgatcgaacccaatttgaccgattgttccgtcggcaaagggcagggaaacgcaaattaattgcccaatttgaaaggtaggtagtagcccccattcgacaatcaatggacatgaaaagtgttgcacctcaggtgtgttccataattatgggaatatttatttagccaactgcacgagagaatgatttacgcacgaagtgcgcataaagcggattatatttatggcatttgctggggattaagggtgcaaatacggtgtagaaaatcccaatatcaagagagtgaaattttgagaaggatatgaaagtgaagggtcctcaattggaagggtccagcaataatatcaattaaaagatgatgcattgcattcaaaaaaaaaaaatgaaagcattaataacgatcaaaaggaaagtatttcctttacgatttaacaactctaaacgtttgatttaattaaaatttctaaaacttttatcattttaattgctgtaccacatttaaaccctctatgaacttcttttgtgtcccattctcacagaaagcgaaattcgcagaaaataaaattcccacgcacttgaacttgaattgttcgttgtgttattttgacagattccaaatacaagtccatatgcaaacatatattaatgctttgcgcttaaatgggatgttaaaaagactcaaattacacagatactcactcgcacacaagcacaagcgaaggcgaggactgccgaaagattaacaacacacaatatgtctgtgtcctgcagcttttacctgctaatgatcctaatgaaaagatcgcataccctctcttttggccgcggtcatgtccgacttgttgagtcctttggcggcttttgacccctctccactcccccaatctgcggacgatcaaggactctgctcgcttggcgtctgtggcgtgggaaaaatcggtccaaaaaatcgctccttctgttcggtttctctttttcccccatttaatatttctttctttttttttttggcaaaaaaaaatatttctcaagccgcgccgagatcttgtctcccccttcaataatttctgcactgatttttcgaaggggactcagtctggatttttcgaactggactgagtcacactgcaacaggtagtgaaattcaatggctgattacaaaggcaacccgctgtctagtagccctcaaaagtccagcagacagcttgaccctgcgatagttatgcatacatatgtacatatatgcaatatatactcactaacagtagataggccatggttgctggcaaacattcttgactcattgccgataaagtccggaattctaggaaacatttcgagctgacggctcccctctctcaatttgtgtcgccaagtgctgtctttaatttggttctttcatttttaattccattcaattagcccatggaaatctcacaacacatacaaaaccaattcaccagccttctttgcgagatctcttgtttaattgttctctaaattgatggtgggcggacatggacggacactttgtctaattgcatttattcataatgtacatcagcattcgtagtttacaacaatttcagtaaattgaccgagctttaagtgtgcaaaggagattttgatcggtaagatcaaatcgttaagggtttagattaggatggcatgctagagttctcttcgtgatgcagtaaattcaattttaaaattttgtttgatttttatttactttcgaccatcttgcttaacgataaacgtgtttttgtgccaacttgattatttgcagccgaaaaacccacaagtgcatgcatactcttacactgtaacttgatttagccaaaaaaaaaaaatctgctgataaaaatatatgttttacacaatattctacgaaatttccagcttgaaatgcacttccaagaacatgaaaatttccatcagaatatatacatatatgtttccgacataactttatagccgcgattatttgactcgaaagtgagaaacgtttggcagctatcgcggctgttgttgttttttccatccacactagcagtgagtaaaaatgtttatttagcaaacgatcaacaggagaatacaaatttatatggacaggccaaagtcaatcgatggaaatccccaataacaattgcaagccataaacttgatgatcaaacgaaaactctcacattcgggtgagtgcgacaaggaaagcactatgcggacgaaaaagagaggcaaaacaatgccaaacggaactgagatcaatcgtatgtcccagataaccgagaattggtcggttgcttcgcctcaccactgcgatattctggctaaaagcaaataaattcatttttaatatgccccaaggaaaccaaattcaaggcaacaagaaagaagaaaaaaatgatgtttttcaaatttttatgggtattttgtttcaacaagaaaaacaaaggcctagacattaaagaacacaaacagcagatatacaatatacagagcgagctgcaaagctggtaaaagctgagaaaacccgaaacagacagcgcggcattttcgattttccaaattttccaacaactgcaatcgcaacttcaacggaacttgtcaatgtttacaaacaaacaaacacggtaccaatatacatatatgtacaactacattcaatacgataatatctaaaccgatttatatgaaacgcagttcttatttttttggcacaataaattccagttgcaaacattgtttattttccgtttttggggggaaaaacatcaaacgacaaaaagggaaaaagccccaatgaaaattttgaaaaaatatcccacaaaaactaaagtttatgatctgtgcgggttatctatatgctatcgattgttcttcctgcccgctcttccactaattatgaattgtcttaggggttggggattttctttggttgtggggtttgtgtttcttttaggatcaaagatcaaagagctcgactgccgtatttgttgccattgcactagtcgatggtgttattggtgggtggtggttacggggtcgggataatgcccgcaaggtgtgaaataagctgagaatcgggggagaacgtgcaacaacgtgccgcctgcaacggaaggcaacgccgaatgtctgatatcaaacagacactttggcaactgtttgaagtgcaatcgacatactagcgatcgacgttctatatataggaaactaaaacgcttcgaaaagatatgttatgagtgttttatgaaaggaaatgtttaggcatgtgattgcagatctgagccgatcattaagtataggttctatggcatatttgtggcatgtatgacgtagaaactaaatttaaggttaatcatatatgtttactctttgctttcatcttttcaatcatgccaattattgcaaaacgcttgcagtgatgccaagtttttttttttcattttcaatgatctttcatatgatgccagtgcatatgcaaagcttgacgatttttagcagattttgaaacatttctatgcttaaaaatacataaaaatcacaagttatctttacaaatcaacaacgctgcaattaattatgcaccttccaataatttggccatcaaaaaaggtgtaatactgaacgaattgattgattaattgactgaccaacggaccaagtctttccgtaacgaactcccataaaatctttgctaaatctaaacaacggccaaaactatcaattgacagcgaaggaaatcacaaataaatctctggccattcatggctatacatagtatatatataaatctttatatgcatggccataaatctcgggccagatcatggagaaacaacaacagcaataacaacagcaacagcgaaattttaatcaacactcattaagtctgtaagatcgctggcaatataattaagagaaataagatttccatcggcgctacgttgacgtcgaccacagatgatgctgatgattatgatcattgcgatcgtgatgatcggttgcgttgcgattcgatgcgatggacgacctgttggatcaatggacacccagagtagcaacaaatatctatatagcgtcgagagcttttcgttgtttaacgattttgcaattcagctgtcgatcatttcattcataaaatcttggcacgctcgcacacacgctcacgttctccattcacacagagggagatccgctgatctggaaaactcgcacatccacatccacatccgcacatgctgggttaatgccagtcgccgtgagtccacaagaccagccacccgccttttgctccgctcgctgggatcggtttggttttgctttggtttggattggatggatctacccatcggtccactacaaacgaagtgattaattcatgtagtggccggtggagtcccctgatctccaccagccagccacctcctttggccccctaggccattcgacgttttctcaatgggaactggtttcgtcagttcggttcgttcgttcggtttgttcgttcattcgatcgatcggccgtcgctgccgttgttgatattggggtttatgttattatattcatcctcacctgatccccagcagctgctcatccggtcaatgtgagaaaaaacttaaaacaaacgcaacaaatttccatgctggcggaaaagttgcgaagttggtataccctatcaacgcatttcactatcaacgctagcatttttaaggatgtaatatataataatactttgaagatattttatttatattgtccttaatatgcaaagtcattagttgcaatttatgaatctgcatttcattggtactacttatatatagtttctcaaccctcatcgaacatttcatcttgtaaactgagtagctacgctacttaaataatatctaagtcattcatgtcgcccagaaatagtttagggtatccaatgataaggaaacaagccatgctaaaaaaaaagtcatggcaaaaacgcatgcaactttttcttttcggatttgttagcagtttctattcggactttagctgcaacatggagtttggagctgggtgtttggagttcggagtatggagagtatggaccatggagctgggggagccgatcaactggccagatattgagcagtgcaaagcgaggctaagtgaatgatgtggtggcggtggggggagcttgagaccgtgccaaatgaaatgcgaaagttgctgcccggcaatacggccatgcatctatctgacattcaaatcagcttagaaaactgcaactccagtggtcaagtggggtgttcgatggcagacgggacaggccaggtccaggtccaacctatttgcagcatccgcagcagcagcagcagcagcaactgcaacagcaacagcagcaaaggaagccgagtgggttgagaaaaaactaaagcaaaactctttttttctccccactgcggaagtttgtcaagcacgtaaaacagttaatggacacaggatatgtttccgggccaaactagtttctccgtctccgttcgtttttattttcgttgttttttttttttcttcttacctgtctgcacccatcgaagttattaattatcaatttgttttaatcaatgaatgtgtagaaaactggccagacccaaatgccacttgtaagtgagaaaacgaaaaattggaaatggaaacaaaactagttcgttctgcgtgtattggcaaatgtttgcctcgattatgatgggatgatatcgtcttaattggcttttaattgctatgggaagttcggtttgatgttttcacaagttcctcttaatcaaatcagtagttaacgcataaattagatatgcagatatcaatgggaagcggcatttgggtttatttcattcattattaatagggtcactcacccaatcataggggcaaaaaaaaaaaacggttcacaatcggaaatacacatggattataaagtttaaaattctaatcagcgatttggcaaagaaacggatctttgttgaacttaataaatgaaacgggaattttcccaataaacggaagaagatttaatttgcaaactaagctgtgagaatataattttaaaccaagttaatctgaatgttcttaaacattattctctccctagattcatttaaaaaatcaatcaactaagttaatcatcgtaaaattgagtaactacctatttagaaaaatatataaatagacataaggaccccaaaaggcattaatctcctgcagctccaacgagtttttaaagctctcaacttcaatttaatttaatttaccaatatgaatatcaataattgagcgtaaccaatgaaaattcccccatagcacatagctttaatgaagccaccgaaaggaagcggctgcacgttaaaaatccatggggcagtgagtcccagatgagagactccacattttaaagcgcaagataaacacgaacgattggatgccgatcggatcagttgtggctatgcccaaagagaagcacccaaagagaagacttaagctgaactgaagcggccgtcgattgtcgcggcttacaacaaacaaagagtcccccccccactccgatccctcacgagatctaccaactccagagcccctgctcttgagtaccccatctaccgatctcgaaatgatcgtgtagagatgttcgagcggtggctgtgttggaaaatacagtagccgagcagtagccaggcaaacaaattacacacaattcaaactccaaacagaagatttcacagcatccagagccgaacaacaagaacaacattattatctgctttatgtccagaactgaaggactgaagaggcttggcctcgacggatggcgcttccagtgtccaacggcggcaccccacactaccatccagaatttttagctccaacctccagctccatgttcaccatctcagcagttgaagttgaagacaatgatgaagatgccccagctgctgcgaatgatcatcacgttgcttctgttgatgatgatgataatgatgacgatggcgtagacatatgctcgtaagaacgaatcaagttgaatggaactagtgtcgttgctgttgtcgcaaatgcactgagagaaaatagtagtgcatactaccaaggcattgataagtctttagaacttattcattcgaaatacacgcagttaacctgattgcctgatatataaacttgcacgggcttgttaacctattaattgttaatcttacaatataagttcatgcttttctagcagtgcagctactgttcaatggggaatgggacacagcctggacagcccggcttggattcgttggctccgctgattcgtttgctcggttgttcggttgcttttttcggttagtaaaccggatgttcctaatcattgctagtttgcctcaaattaaatatgctccatgtgtatgcgagcgagtatcttttgtttgtatgccatgccatgcagatagattatatagtccatatacacaagtcccgcactcggagatacttactcgcaaatgcgaagccttcgctacgacgtcctatcttgaatcatgaatgaaattttgtttttgctctttatcggacaacaactggctcagttcagttcagtgacgcatcttggtatacaaatatcatatattattcgagagttggcccaaccagataaccacgggcaatattgctcgcccatttggcaaggccaaattagccacttctcatggctacgtatgaaaatttgcttttgcattttacaactttgatataactggtcgaaacaggtccgcgagtcagaatcaatttaattgatagaagagtgaccgcgcaacagcgacagaaacgcattcataaattcatttttatcagcatcaattagcaataattattcattacgcgaagcgcgaccagaatgataataaagatcgctggcctgcattgcaaaaaggggaaaaatgtccattgaaatttcactgcagctcaattgtattcagattatggacaagagtgacttagaacttcaaaacaaactataaaataaaaactgatttcagatcttgaactcttctacttagagctataaaactaaactcatttctaattaatatcccatttcctcagcaataattttaatagctttcacacactccagggggaaaagatcaaacctaagagtgaaaccccaaactcaagaccactatctcaatcgattggtggccttaagtatccatttggtaacggctgtgaataaattaagatgctaaaaacgaaatgaattgaaattaaatgtatcagaggctgtaaaaacattttgtctcgacgttttcggcattttgttttcatttaaacaaatatatttggccattaattgataactgaatttcgaaaatggtccccgaaacgtgtgacggaaggcacttttagccatcccgctgcgtggtagatgataaaaaaaaaaccgaattaaattacccaaaagaggcaaaatattaattgttttttaaataagatagcccgaaaagactggcgccacgagaaagcccacacggcattaacttaattgttggcaacataattggttagatacgactatctgcagccaggggtcatggtgataactcttatttcccatcgaaatgaagatgcaatttgttgctggtaataagcccacgccggcgtgatacaactggattgacttcccgatctgcagatacccttggtaccccccccccccccatttgccctaggtttcttttagcacctggcctgccaaccctaggaccgcaacgatcatcgtgtggatgctcaaactggaccctagacttgcctggctgctccgacatttgcataaagtacagtgagcaaaaaaaaaaaaactaagaatcttagttaaataaactactaatagttagacactagaataggctatgatctattcgttttacttctttagtgtttattaatttctagatttaagaacctaacttgatcttagtgtagcgactaggcttatggcattgatcattagactattttttaatagagagatactggaaaaataaggttgggggggaaaatgtcaggattccgagtggggatggaccccaaaccgaaagcagcatccaatagagtcaagtcaaccagttttgtattttactgccgccacaaaagcggtttggtcagctgttcaaactgctaccaacaaccagccgcctgcccactcccccaaatagaggcgagagtcctcccgactacccaccacccccaatcccccccgttcgtttgttcgaatcggcaaaagtttcacctgctcgcagttgcagcttgcgtgcgttcgagtcgagtgtttgttggcattagccatggctaaaataagcggaccaagtacagactgatgatatacacccccccccttaaagtttgctgttgctgcaccagttgcagccacacaattttcacactccttcagagcgttgctgcggctacctaaacaaccgaacctaacgcaattaaaatatataactaaatggatttcaacaggctaaaatataaatatatattaggggtgaggagggggtgtgtgtggggggggggaggccaaagaaaggtgcattgacaaacaaatttatgtggagagccacaaatcttgcgggtttcaaataaacaaaactaaatgcttaaccctcgaataaattaacttccgatttaaggcgcaccatatacaaagtcaagtacagtgcgcggcatgactgtgtgtctgttattgctaagtaattgaggcagagttctaaataaagctagatgaatttcaaagatcttcaataatattctttcctttacgctaaaatttccattttaaattatatgaatatacttgaatataagccaaattatagataaaaccctaaccaactgagaagatttctttctccataccgcactgtacctacttatataaatatattcccgcttctatatacaaattgtagtgccagtcaccgaattctcgcacaaattccgattcaaattcaattcagatccgattcagtgcgaagcgattcgaattcgattgtgggtgttatggtcagcatcaggcggcgaggatttcgaatgcaggcgaacaacgaaaacactcaataaaatccgttgataaattgcgccgggcatcaaaggtaacccactgtgcgaatggcgctacaactaaccgctcattctcgcatcccaaatcccagccactgtgccacttgcagcaatcttctatggaaatttatcgattgtttttgtttagagaattttcggttggaatagacacaaaagcgccagtgccgacattgttcagagatataaagttgatcgcggaaggggcaaagtgttgggaatctacatgggatcttacttatggaccaccattcgaatagactttgattagatgcggccagtgcacaaatcagaaaatcttcttcatcgaaagttatgggatgataggcgaaataaagctgtacaattttggcagttacataaattcatctgagaaataattcaagttagaaaataaatttatagaacaattaattgatatacctagaccaaaaattgctctattaaaggcctaatttcacttccgacttagatagatcggcttttaataaaaaaaaaaccgttccacttgataaactttgccacttcatggctctatcataaaaaaaacccagttaataggatcgtatctgccaatggacttagtttaaagttccattattcgggctaagagtagcgcaacgaaacggcttttaattcaaatgacaattgcagaaaacacattaagacacaaaaaacccattaggcattatgtgagccgctagaagagtgaaaactttaatttaaaatgctgaacaaattatgacatggcagaaaatagggactactacactaccaatgggcaatgggccaattcacatatatggcggctctttgttttaggcagcttgcttctttttcggccaattgaagcgttaaattatcaattggccaaaggggttagcagcagcagcgttaaattggccaagagaatgactataaaatgtgagcgggcgatatggatagctagagagcccaggtggacacgcttgaattgatgatcatcgggcttcgatcgcccggatcgatagaaccaaaacgcacttcttctgctggaaaactttgcaacgcggtccgggggcaggcaactggaaaattgtgcagacacaatcattatgacaaggcaggtgttcccaatcgacagcgccccctatcccgactccccctctcccactcctctgctcgtgctgctgccaaaaagatatttatatggatcgagatcctgtatgattcaatttttcatcgattgcattatcaattgctccagtacggctgttcgttcggttggctggttggtaaatcataaaatgcaattgaagctgtcccaagaacgggtttccattgccgcaatttgttgccccaacatccacacatctaatctggatgcgagtggtgcatctgtgtgggtcagttattggttgttggttggtagttgtgcgtggacaggttgccttttgttgcattaattgattcatatttgttagtcgcgtcttgcagcatttcctaatgggatttcggtttccttttctccactgatatatgtatttttgctccatatttggcatttatgattaattgagttgcgaccaaaatgggcataagtggatttcaaaaattcgctttttattcatttggctaaattagaaaataatttgcttgtggcacgcgctaaagtttctatttaatccgatagactttaaaggcaatgctaaaaattgtgcagattttttgttgtagccggtcattaaataaaattcgtattttatatccaaggctacatttagtctgtcatttttaattcgtttgttattattatggctgatatattaagcattagaaactagatcctgacatggattttttttaagatactcgaaaaaataatatataaataatatacatatataagcattgaaaaatatatttcgttatatttatctaattaagtattccccatggtatgcaattgttttttgtgtattcagtttccaattggcgcttaaaagtaggcaatattttaatacactcttagctagctactgtccgccaggtgtcgctactaagccatgtagaaatcatgtataaaacaaaaaaatacgttttgataaactaattaaactattcccgcttttaaaataaaacaaacaaaagtcaattagttaagtcaaaatacgcaaatgtttattatacttaaaaaccatttatttaaatgtatatgttcatatttatgcagcacatagtgtatttgataaggaactgatattccatttattccaatagttttacgacacaagcaaatcccaaaatagaaattattaaacagaaagctgataagaaaagaatttattttgctgtgctgctttttctctaatgaaatgttcaatttaatatatcagtctggcaaatacccttacctaatagttaatttaatgcaaccaatttgtgtaagtttacattcccctatcatcttgttaccttggtaaccaacaattgagaagtgcttcttgtgtctttttagtttccgatacttcaaggtgtaggctaagtgcattataatattagagtgtctgctacaccaccctcccctttttgccctttgccgcccaaaaacacccaccttcaccgataacgagcacttcttatcagccagccacaaatatttgttcttcgtccaactcattggttatttcttgagctccaagttgtttggagcattggaaagtgagttttgcgtttggtaaagttcaaattgctgaaggtcgcacgcgtgagagggttgcctgataagttttgtcaccctgattattgtgctgggtcagttgtttatggctatattaactcttctgctgctgcttctttttttatgctcgccctttctctgcggcattacaacatttcggagcgtgctgattagccatggactgggctttatagcggctcggaaaatcccaagaagcaacaactacaactattacaataaatgctgctaatttgtccatgggatgcactcaatttagacacatccgttctacacagccagaaaaaaatgggtacatttatgtacatacatatgtgtgtaaatagaaagagaggaacgcgcttttgttttgataacattgttttcgccgtgaatgaatgggtatggaaatagaaacgttgagggaacgtgattagataaagtctctatgtcttttgtaagctatttacatatttgaatatatacacagagagaaattaggcacatgtacatgtactagacttaatttacaacttgaattgtaaaattgtaattttttcgtattaccatactaataaatggcataattttaacactcagcctaactttattcataattttgcattcataaatcagcaataagttcgaatactaattacccaagcattagctgcataaaattgaaaaaaaaatatggaaatatcattggtgctaaaacgaatgccataatgcaccgaattataccgtcataaaggcctcaattcaaatgaatcaaaaaagttctcgcgcgattaattccaggcgaaacaacaacaaaaatcaacgtcgggctatcaaaatttatgaatgaataaagcagaatcaggcgaaaacccgacaaaaggcaagacagaggaaaataaaaaaaaaaagtattaataaaaaggcaagtaaaataagcaaacaaaacgaaaatcacaaatagtaagtgagtacaaagtggcgtgcatatgaaatataaagcaggcgatatagcccactacaaacgcacaaatccacacacactcacacacacacatgtacatatatgtatgtatgtacctctgaatatgaatgaatgaaaaattgtagaagcagcacaaccgcaacaccaacaacataagttgttaacgcagcagttccacgaactaaaaaaacaaaaaaccaaaaccccaaaaaaaaaacaccaacgacaaccacagaagacgggaaaaaagatctgtgaacaagaaatttgaaaggtaacaaaaaactgaaattaaaacaaaaacttaaaatcagaaacacgagcaagtgtgtgttggcaactcgttttccagttttccatttttccacatgcagcagctgcccacaaattgtgcgtggagtgttggcgaagaggaggggagtggagtggagtgttggagtggggtctggaagggggtggtgcctggaatggtgggaagggggggagttcaaattatgaataaataagtagttggtccaagagcaaacagctaaaaatcaaagcaaatacacaaaaacaatgaaaacaaaactgggatggcgaagaacattttgtagttgaagttaagatacccttgctggtattaaaacatttaacaaaatagtagattggcaattagatttttcgaaaaacaaaggcttttgttcaatacgaatttggtttaaacattcttaaaagtatagttaaggttagttttcaagattttttagaatttcagcgacttggttgcaaaatcccaactaaaccataataccctacactacactgcagggtataaaaaggcaacgacgactgcagttggatttcgagccaaagtcgacgcgcccacgggcagcgacagaagaagaagaagatgagaagctggagcagcgataaaagaggagccccaaagacaaagccggagaacaagaagaagagtaagagccggtttgcaggaacaagcctagaagaagaggaagaaggaagaggagcactggtggagtggaggaggggagggggcgacggggcaatgcaggcacacgcaaaaaaggaaggaaacaaacatcaagccccaatgacagaggaagcaaccacaacaacaacaaatggccgtggaagaaggggagacagcggcaacaagatccactcgtcgctggctcttatccccactcccattcccaattccatttccattcccccattcatcaactgcattttaattcttttttggttgtctttgcgttttgtttttttttcttcgttttattattcgagaaccaactagttttgttgttttttgctgcctggcgagtatgaatgaaaacgaacgtgtttcttggagagcgggagccccaatttgagagcgggagagcgctggggagcagcggcgccggcagcgacgtcgacagcgcggggatgaatgaaatgagcagcaaaatgaatgaaagttgtggggctcgcgcagtcaacgtcgctgccagcgtcaacgttaggctctcccgatctctcactctcccactctccttgtgaagagaatttgtatattttttctactttttatacaaatcatagcgcacatatttaataagcgaaaatataatttgctttatttattgtttcgtttggttcatttcgtttcgttttgtttcttgttattttcaaagtttatgattaatgagagatgattacggcgtgtgagtgtgcgtgcgtgagtgtacttttgtatctgtgtgcgcgtataattaaaataagggcagccttttgcatacacttgcaaaaaaaggattttttttatttctgctaagaaaaaattgtttttgcactgttttagtcattccaattgcaggagtccgaaatggttttaaacgtacaatatgattacgttattatatttttaataaacgatttcccaaggttttatgcattttaagtacatttagatttcagggcgacccttatgccaagtgtatctttcgtgcgcataatgtaaactaaatttacgtgcctggctcccgatcttttctgcttcttctggcccgcgatgttccccttttttatgtgccatccccattttccattcagcatctgcgcagttgtcgccgtttttgcatgttttttcccccccgtttttttcgcctttctgtttctgttttagtttttgtgattttatatttattttttgtttctgttgccattttatggccgcgatcttctagcgacgagcgaaaagttcaggctgccagttgttttcgctaagggattcgcctgggtcccacatacatatgtacatttgtatgtgtgtatgaattgtaaatatgtctaaatacatgtaccgagatgtagggctgtatgtgccactatatataggcccaatggggtggaccttcccagaaacttaaatttaactgccaaattaattacccaaaatattacgtctgtttagccaagtagtaccacactgcgtatgagcaatgctttttcgaaacttttcccacgctgccagtcaaactgcttattcaattcagtacgctaatttaatactttatataaatttattttttatttaaatttattttttatttaaatttatagcatcaacttagccgtgccaccactgcgtatgagtgataatttaaaagaccatcttacacatttacgatccccattcttacagcgaactgaggtccacccttccgtacactacacatttgtatatttagttgggcactgactttagtcttgggtttgcgttgacattgaaattgtttgcgctttgttgatctctacgcagcgataagacataaatacataaatactttttacgttttcgggttccttttctttcggtaactgcctcgatttttgggccacggcaaaaaagaaacaccaagaagatttgtattatttgtttttataaacattgaacggctctcaaatcgttttaaacccaacgatttggacagatggcagtgcattgagatatttttaaaagactaaaatggctcatctttgcagcaaaatccgattcgaaattaaagtattatagaacattgcttgaaaatagtttttaatctttgaaaatttacaaaaatatatgcttttaatattgattaaatatcccagtgaatcttaatcaaataaatgcatatatttaacttgggcttaagtttcgtcatcgaactccaaactgacattatcgtcataccccaaaaagctaagtactatccgaaaaaaaaacccgagaaattcccattattaacacatattctgtacattgttctcgcttcgcaaacaacggggcaaaagatgcataacaaattaccataaaacgttgtccgatacatgaaatctctttttgccccgagactgtgtgtgaaataatagataaagtatactagacacatgccataggaatagcaacaacaacgacaatgatattttgtcacattacgtatacgaagagtttggcatagtgagtgagtgagtgaatgactgacatattgcctgattgacagcggcagcagcagcagcagcagcggcggagggaaaaaaggtagcgctgcacattttcagatatatttattttgagagtatttcaaatgcaaatgtattccgcgcgcaaagatcttcgcttcgttttccatttgttggagcatttaaaggagcaactctgagtgcatgaatgggtgaatgaaaaagtgagggagtgactgactgaatgaatatgtgtccgcaagttaacttggcacttcgccggagggatttgtctggggattggggatcggggtcggggatcggggagtgggagttcaggaacagggggctgggcccaccggaaacaaacgacgtgacttttcactgaaatattataccaactatgcgaatgcttgggaattatgtttgtttcatccactacattataataatcgcagacgatacccccgccccaaaaaaataaatggaaatatcttcctttttcttttcattcgagctaggttttttttttgttaccagtaacacgcttttgtgcgcttatcttatcgccaaattatttggcccgctctttcgttcactctcagtgtgttttcgccattttatcgctcggttcaaaaggcaaaaaaataataataaagtcgcaaaagcaactgaacatttattgatcggttgtgacgactgccacatatccttctgcattcgttttgtaaacaatttaataagcttctaatgctattgttctccttcttgtgaagttgaagtttaaagtaaatacaccgtaataattattgcatttaataagctatgaagactccagtcagaattcccaataattgcgtttctcttgaatatctgccttcacatataaacaaagctaatctatctgactaatatacataagatatacaaacagcacgtacatatgtgagtcgagataggaacataacgctccgcaactatataattgttgaacatttgctcatcaacaacattttgctcttcaattattttcatttcttggaaatctgttatcaaaagctcgccagacctcgaaatgccattcaacaaacaaaatataaagtgaaggagcaagaaaaacgagccatagaggccatatgaaaccgatataggaaatgggttagcacttggccaaagtaaatataatataaaatattgaaacacttatgatgggtttttactcacctaatgatgcctcatgatctgaaatatccgacaaactgcacagatccttgcatccatggatcggctcctccttgatgaaaatatttttcgactgcaagcaagatgaaatttgtattattagtttagggttttaactaacatctcaaggctgattcatttgctgactaatttgttttaagatacaagtagaacattattgtgtcatattagaagtcaattccaatgtttgcattccattcgcattacttttctgagctaatttaaatttaaatgcagtaagaatctgctgctttgattgacattggttcttaattagaaggcaataaattaggcatgatcaatccatcagctttgtttgttttcactggccaaaacaccaattcccccgctgacatttgcatgtttttttttatctttccccaagaggtgtgctccacctgccacccccatttgcagcacaatgagcaacagtcaacacaagaggcatccatgattgtgtgttgtacatatttataaacaagccacttttacccaattacaattacaaaatgcgtgtgtgtgtgtgtgcgagtgcaacgtaaaactgtggctcgacgggcattataatcagagatacaatagcgcagagtcgtggcatagattgctacggcaattgacagtggctggctgcggcggactgccccaatgttgtcccatgggtccggatcggatcgtgttgaacgcgttctaataaattgaattgtacgtttgacttgctcaaacgagggaactttgtctgcgggaatgccattaatgataatggaggtcagagtagtcaaacgaaatgctccgtaaatatcgtaatcaattgctgagcgaataccagctgaattcacatactcaattggaatccaatttttggagctctacgatccacaaggcttcaattactgttcagactgatggaaacccaaaacttggctccttctaaaggccagacacttcggattggattacctggctgcattttccaagcgactgcgcatgcgcatgtcctttttctttttttttgggggggggggagtggtcactggcagggcagcggggtaaggatcagctgggggtcaggctgttggccccgaaagaccggatgaaagtggtcaacggctcggcgggccaacggatatgcttaccgcaggcgatgtgtcaaatgccttcactcggtcgtcaatttcttggggacacaaagaatccaagggagtgggaaaataagagaatgactgctttgcatagccgaagatttggatactcttgttatttgaggaggcagctctattaagacaaagttggttgggcatacaataactgatcctacttaagacgcaaaaaacttaaattacttcaaaataatctataaagaaccagtttaatatgtcatgagtgtgaagggtatctatcacaaaggctattcttatttttaagaacaagctggctgaaataaagggaagccctacgatcttggatcccattgttgcctgtttcactttctttggtcggcttcgcattgaggtccctacattttaaggcgttaccaagcaaatccaaattttgatcaggccttttgtctatgcagatgcgtcataagccaagtggcacgcttatggcttttatggcgaataaacaaaagatggcttacacaaaagataccaatggaatgcacacgaatttggcacacccttactttggttatataccgtatgatcagattattccataaaatatacttaattgcaaagtctcatccgaaaaagcagggtgtttttttttaaattaaagcccagcaacaaagcataatacataataattgagttttgtttgctctaccaaatttagaatgcgttctacgtgttctgcattagcaatgggtatcactctgtcattggggctcccactgcagtgcctgtcaaactggcatagaaaacgatggacagcctatcatcgatcacttgatcagcaaattcacttattcgtagttatatatagaaattatagatttatgcagccatcgatcaacgacgtgcaatgactgctacctagttttgaataagccaagtgttgagcttatgcctaaactaagttaagcggcttctagtgatcattaagatgacctagattaagtatttgaaatataattataattaaagcaatcataaactgtgaaagttttttactcccacttgttggtcgccatgaaaattgctcagataacaaagtaatttaatacgtttgggaaattccttaactcacctcaactaggctggacagaaaggtgactttgcggttcttcttgagcctcatggtgctaacttggcccgaatggttgccgctgttgccgatgccgttcaattggctaagtatcgacggactgccgaccgaattgaggtggctgctggccggcgacttgaacaggtgtccgttgatggcgttcagttgaaagagctcgtgggccgccttatccaggaaatgcgaggccgtggaggcgaccgccgacgaggaaccaatggccgctgaggagggcaaagcgggcggcagcataaatttcgtggcagacagatctgttttacaaatcgccaattccatattgcgcaggcatctgcaaaagagatagaatcgaattaataaagcaaacaattagctggctggccggccaaataaacaaatcgctgcaattattgctgcgtctgggcgtgagatgttttaattatcgctcaattattggcttattacccccgcgcaacgctttattagacctcgttggcacctcccactctggcgttcgcacctcattcttggctcaatccagctctattgactgtagaaattatgacactttttttcttaacaacccaaccaaccaaccaaccaacaaacgaggcaacatcaaaagtgtccgccacctttaagagagaccacaacaaaaggagccgaccgtgcacagtttgcatatgagcacgcttttattttgtttacacagcatccatcatatggggcgtatgggataggatataccaggtcccaaagccaagtcaaagggtttcaattttctaaatatatatttctaatgggtttcgtttcgtttcgttctctttggagttctcaaatatttgccctagccaagcagcggttgatgatcacgaagctatggatacgaggctagtttcaaagaaaacacgaaaagttactttgaagtgtcgccacaaagagattgggcaggaagatcacacggatttcatgcggttcttcccctgaatatttcccaattacattgacattggtttccatgtgcccatgtctttatagcttgaactatattcgatagtttcttaaattgcatgtagcattaaaagaaattacttgaatgcaaaccatattcaaatccgaagcgtaaaacaataaatcttagaaaatgttatcaccggaagtgggttagataagccgcagagaaaaaaaaagaagagcagttccagaaatcttaaacgtctcttcccatgagggcttttcacaattgcccagccagaagccactataaataacgcagacttgcgataatgtcaagaaattacgcattaaaacatatgatatttatgtacattaaatgcactttcaatgataaaagctgtttagtggtaaatgtttaaactaaaaagggcgattatccaatggcatgaaataaactcaacttaaaacttgaaattcatgagtacatatgcacctagctacacaaatccgaactaattattgtaattttaatctatggcaaagctatagctaataagattttaattttatatagtatagtactacgacttttatcgcaaaagattgattcgcttcttgatacacaaatgctattcttggctacggtaaacgcccccaagtcaccatatacatatatatacatatactgtatatgtatctcaagctacatctgaggagtatctttgagcactggctgcctaattagatacgttatgcaaatgtgtagatactgtcgacactgtcgtcgcatcggtgacgattccaaccaagtccgtctccctcgtttgcgttctttggcactcggtgtatgtgtggccaacagttatctacccgtcttatcagccgtatatgtacgtacacatacatatgtaaatcgttggtatatatgcacatacatatatgtatgtacaagtgggtatgggttgaagcaattcacgctgatctaactgaaccaaaaataacgaatggaaaaggggaaagaacggatatatatttaactttcaaagactctcagtggatttttcaaatgatatggcggttatatcgcatttgatttgatttctttgagtaatgaaatgaataataaaatggttttgatttgtataaaggaataccccgttgcctagggcaatatcgtcaggaaaaactgttgcataaatttcagctcgagctgttgcgaaatcaatttcgatttgatttgctgattttcgtccgatcaactgaaacgcccagctggtccagttatgtattcacgttcacaagaaccagattataagcacatacaagaatatatcaatgtataaatacacatatatatcaatgtttataaattgagcgcactaaaaacgaatttaagttaatcaacatttaaatggataataaaatcagcgaatgcagtccacaaaaagttgatttatttcgcgcctcctagtttttctgccgccccaagtgcaatcaattcaatgtagaacagcaataacagaaaccacagcagcattactaaatctgcacacaatctatatgcattttcagctgtggatatatatatatatagatctcgactgcatatgattttgaatatgccagcagtgctgagtgcacttttcacacgaaaataattcattgacgcataaaagtggccaagataattggcaacttttggcaagtccaattgatttttggctttggcaaaaggcaaatgcgaatatttcagttcctagagtcactcgaaaaatgttggcaataaaaagttagctaacataattgtgaatgaaattagtttattttccgaagacaaggaaaataagcgatcgtcgcagcaattacaataatcgtaaaagcacatactacgtagattaactaagtaaataagccagtgcgaataacacttgtgcctccaagtggcagagattaatttgggtttatttagtcaattaattaaaagtgacttgacaattgtccttatcgattcgcgaattccacagttttttttttgaaaccaatcaatcattcatatgaaaataaattcctcaaatgcagataagtccagagggaaaatcgaggaacaaatgcgtaagtttgaaagtggcacatttttcaaaaaccgccttcaaatcgcagcatttcgagcaccaaaaatcattcggcagggtgccaaaaacgagtcgcaatcgctaaaactatctgaacaaaaaaccttatcgccccgacacgtagataaccgaaccgaaaaaaaaaaataaaataaaataaaatattatatatacgtatgtatgagggagagcgagggcgacaacaaaaaaccacacgaatcgaattgaaacgaaaatcggagcatatgttttccctggaaaagagcaaaattttttgggttggcccatagtaagtggaccaaacgagtggaagatgtctggcagtccgagtttttgatgtctggaggagagtctgggcgcagcagatgcttaaagaacagattgtaaacgaatatgatcttttgatatggtgcgcactcctcggccagacgacaacgacagcaacaactaaaacaccagcagcggcaacaaataggggtgcaatttttcgatgtgtacgtaacggtagaatacacatttagtcgctgctcttttctttcccagcgcctggcccttttttcctcgcgctgaatgtaaagaagggatctccgatccgctgatgatcctcgggatgcctgcctgtgtacacatgtgttgttctatctgtcgcagaacagtccgaactgcatgtgtgtgcggaatatctatgtgtgcggagtatctgtgtgtgtggcatatctgtgcgagtgtgtcgtcttgtcttgtcatgggatcgatcttgatctcggcctgtctgcagcaggttgatacttttagcatcggtccgggcacagaatccgagtttaacgtggcatggggcaacgaaccagcccgtcgaacatccactgaactgtaattgtctgtgggtatttatggaaaaggatcttgaactggtctttcatttcggaccagacgctcgaggagggaaagggagaggagcggttggcggtagctgggctcaattatgatccgacgatcgtcacacatcaaattatcgattatggcaataatttcttatcattcccttgtgtattttgctcgcaaattggttttttttaaatagcccaagggatattaaacatgtctttagagtagttcaatgatcgtaactccttaaattatcgttttttggctttaagactgcgataaggacgtaaatcaagttttatcatagaaataataacaattgatctaagcaaaatcttattgtaaaattaatcattttaatggtaacatttttataaaatatgatatcggttaagcctttaactatcctttgatcttttttgtattaataattactttaatttacatcccaaattgtaagatccttttaaaaaccctttcaggtaacccaaagtgcagaacaggaaagccccaattatacatactttaaaaccgaaaggtcaaaagagtagcactccggtatcagttttattgatacttaattgtctaatgcgatcgctgtgctagattcttgaccctaaccaaaaaccgttcacacattctcgattaccaaaccccttggattgatggcccgaaacgcgatcgtggggcaggcgaagctcatttgccgcaccggaagctgtaaaaggaacagtagtaatttcgagcgtgtttcccacaagggttgtggaagtgccccacacacacacactcacgcacactggcggctaactagcttggctatgatgccgagtagaaaaccaattcaaattctgttggcctggccaacaacgagtttatagaggcagcaatcctgaatcgaggcgagatcgcgagatcggcggatctaccgagcggtagccaaaccagttttctcctagattcattcaagaaaacaggcaacaccaacacaaaaagggtttacatgcactcaaaagaaactctctaaatttcatatttttaagataaatatgatttaaaagttatatttcaaaactatatatcaacagcaattaagagatatatggtttattatttgttttcaattgttttgtcttttaattttcgctggatttttgtttcgagtgtagggaaaataacaaaaactaatacttgaactactgtttttcaacacttcacttttcttaccggtgcggggtaataaaatagcgccccttcgtgaacaagaaggcgggggctactgggctcttgatttttggtttgtgggttctggattctaaagaccgtctttcggttggctttttattagggtatccaaattaattacagcttcaaattaggcgcacaatcttgatggactccgcagcaccgatgactatctcttgctcgttctctctctctatcacgctgtatagatgtgtatgttttaaccctccggtgggatcagcaggttgattagggggagagagagagggattacgtgccgggcacaaagacaaacgaaaaaccgaaaggaacaactcgagaagaaatcggggatcggtttagctcggcttataagacgcgaaaagaaacaaaccgaaaaaaggccgacggatcgctggcaaacacacacacgcgcgcgcacactcacactcaggcactctcacgcgatgtttgaggagatttttgtggttttatgatgaatttcgtatatagaaattggtttcctgtgtttctgaaccgcgtttttttttctgttgctgtttgccttcctttttttgatgtatattgcgcgcgcagatctttagatgttttgctattgcactcattcacttacacactgggtttttgcttggcttgcaaagtgttttgcatttgttatttatttgttatttgattcgtataattcattcaaatcgaatttaccgtagcgcaagtgcacgcttcccgaaagaaagacaaaaacagactgaccgactggcaacaggcggcagcgacgccgacgttggcgcagacgcagcgttgacgccaacgccgacgcaccttctctctccgtttctctctctctttctctccgctgctaagattaatatttttttgtgttgctctggcaagtgataacaaaaatggcaaataatatgaaaatcgagagttatatcaatctgacttataaacattattcgctattttacttgatcgctggaatgaaaacgaaaaggcgtgggtgatcctcaatctcgctatctctttcgcactcgcactagagcgtgcatcatgagcgcaagaaaaaaatggaaatcagaattacatatttcgagcagcaaaaacaaagtgtttgcagcgacaaaaaaatagcaacaatttataaaaaaaatctgcttgctcagaactcagtgtaagtgcgaatatgcgagagagtgtgtgggtgcgtgtatgtgtgtgtgtgtgtgtgtgcgggcgatcgtttttggcaagcatttaaacagtgcccaaaatcactagtatatttaaaatatttagtatgcaaagggggcggaataataaagacaaatattttaaaatttggcagtctcagtctttcaattgtgtacactgatataaaaatttatttattttgattctggattttatacaaatctatatttttgacaaataaagtaaattggtcaaaatatcagttccagcttatttaaaaggaaaattatactagtttctttgttataataattaataaaatatttatttaatatgaaataatacctatatgaaaattttgatgtgagattaaattatcaacttattattatcattattaaagtttgcacacaatgtgggaaagctgcagcttgggaaaatact

SEQ ID NO: 24974 - DNA, 2823 bp, DROSOPHILA
aagccaagcaaaaacccagtgtgtaagtgaatgagtgcaatagcaaaacatctaaagatctgcgcgcgcaatatacatcaaaaaaaggaaggcaaacagcaacagaaaaaaaaacgcggttcagaaacacaggaaaccaatttctatatacgaaattcatcataaaaccacaaaaatctcctcaaacatcgcgtgagagtgcctgagtgtgagtgtgcgcgcgcgtgtgtgtgtttgccagcgatccgtcggccttttttcggtttgtttcttttcgcgtcttataagccgagctaaaccgatccccgatttcttctcgagttgttcctttcggtttttcgtttgtctttgtgcccggcacgtaatccctctctctctccccctaatcaacctgctgatcccaccggagggttaaaacatacacatctatacagcgtgatagagagagagaacgagcaagagatagtcatcggtgctgcggagtccatcaagattgtgcgcctaatttgaagctgtaattaatttggataccctaataaaaagccaaccgaaagacggtctttagaatccagaacccacaaaccaaaaatcaagagcccagtagcccccgccttcttgttcacgaaggggcgctattttattaccccgcaccgatgcctgcgcaatatggaattggcgatttgtaaaacagatctgtctgccacgaaatttatgctgccgcccgctttgccctcctcagcggccattggttcctcgtcggcggtcgcctccacggcctcgcatttcctggataaggcggcccacgagctctttcaactgaacgccatcaacggacacctgttcaagtcgccggccagcagccacctcaattcggtcggcagtccgtcgatacttagccaattgaacggcatcggcaacagcggcaaccattcgggccaagttagcaccatgaggctcaagaagaaccgcaaagtcacctttctgtccagcctagttgagtcgaaaaatattttcatcaaggaggagccgatccatggatgcaaggatctgtgcagtttgtcggatatttcagatcatgaggcatcattagaagttcccaccgccttgccacccctcacgccgggcaccaatcgcaaggtcaacgaggtactgaaggcatcctttgcctcctgggaaaaggaggtccaaaaatgcaacataaccaaagatccgcgtgaatggacggaggagcatgtcatctactggctcaattgggctaaaaatgagttctcattggtctccatgaacctggaccccttctacaagatgaagggacgcgccatggtggatctgggcaaggagaagttcctggccatcacgccgcccttcaccggcgacatactgtgggagcacttggacatcctgcaaaaagattgcgagaaaccaaatgaggatattgtgcacggcaattcctttgagtcggccaccacggcctcggtctgtggatcggaccaccaggtggccaattaccccaacgagacgcacgccaacagcaacaacagcagcataaacagccgcctgtccatggattatgtgacgtcggcggggaatagtgataataaaaacttccaccgcgccacgccccactcccacaatggctacaacaccagcaacacacacgaccgcatcaacaacagcacgcccccgcagcagcagcaatcgcagcagccgactgtcaatggcagcggtagcgccagcagcaacaacaataactccatgctaccgcccgctgtacagcaaagcaacaacgaaaataacaacaccagcagcagcaacacaaacaacagcagcaacaacaacaacaacagcggtggcagcaacaattcgaatgcgggcagcaataacaacaataataacaacaataatattaactttatggcagcggcggcgatcttccaacatcacctcaaagaggagccgggcacccagaatggtaatatcggtggctatggtggtggcagtaatagccagaacgatcccacggatctcagtagttatggattgcccgcccacctggccgcttacggtggtgggagtggcagtgggccaaccggcggcaggagctccggtggcggtggcgatgaaagcgattatcacagcacgatctcggcgcaggatcaccagagtcagcaatcgagtggaggaaatggcagtggaggagccagcggtggaagcaccggaaacagcaacggttacttggacagcagctcggagttctatggcagttacgcgggcaggaatcgattccacgatggttatccaccggaatttacgccctatgatgctcaatccttccagtcgatgggcccccagcccacggccatggatcagtggggagcagcccatgcccaccagcatccggcagcgtatatgagcaccttgggtctggataagggcctgctgggtggctatacgacgcagggcggagtgccgtgcttcacgggatcgggtcccattcaactgtggcaattcctgctcgaattgctgctggacaagacgtgtcagagtttcatttcgtggaccggcgatggctgggagttcaagctaacagatcctgatgaggtggctcgtcgttggggaattcgcaaaaacaaaccgaagatgaactacgagaagctgagtcgcggtctgcgctactattatgacaaaaacatcatccacaagacggcaggcaaacgatatgtctaccgctttgtctgtgatctccagaatctagttgggcacacacccgaggagctggtggccaagtatgatcttaagattgagaaaaaagatgtggattag

SEQ ID NO: 24975 - protein, 718 aa, DROSOPHILA
MELAICKTDLSATKFMLPPALPSSAAIGSSSAVASTASHFLDKAAHELFQLNAINGHLFKSPASSHLNSVGSPSILSQLNGIGNSGNHSGQVSTMRLKKNRKVTFLSSLVESKNIFIKEEPIHGCKDLCSLSDISDHEASLEVPTALPPLTPGTNRKVNEVLKASFASWEKEVQKCNITKDPREWTEEHVIYWLNWAKNEFSLVSMNLDPFYKMKGRAMVDLGKEKFLAITPPFTGDILWEHLDILQKDCEKPNEDIVHGNSFESATTASVCGSDHQVANYPNETHANSNNSSINSRLSMDYVTSAGNSDNKNFHRATPHSHNGYNTSNTHDRINNSTPPQQQQSQQPTVNGSGSASSNNNNSMLPPAVQQSNNENNNTSSSNTNNSSNNNNNSGGSNNSNAGSNNNNNNNNNINFMAAAAIFQHHLKEEPGTQNGNIGGYGGGSNSQNDPTDLSSYGLPAHLAAYGGGSGSGPTGGRSSGGGGDESDYHSTISAQDHQSQQSSGGNGSGGASGGSTGNSNGYLDSSSEFYGSYAGRNRFHDGYPPEFTPYDAQSFQSMGPQPTAMDQWGAAHAHQHPAAYMSTLGLDKGLLGGYTTQGGVPCFTGSGPIQLWQFLLELLLDKTCQSFISWTGDGWEFKLTDPDEVARRWGIRKNKPKMNYEKLSRGLRYYYDKNIIHKTAGKRYVYRFVCDLQNLVGHTPEELVAKYDLKIEKKDVD

SEQ ID NO: 24976 - DNA, 6950 bp, DROSOPHILA
atgaatgtgtgccggactgctccgcatcttcgccagacaactgccgtaatggcttctgtcgcagtcctggcgtttgcgagtgcttcgcagagtttgtccgtaacgaacatggtgcctgtattcacacctgtccgattgcctgtcagcatggcagatgttatttaaatggcacctgtgtctgccatcagaactttgtcctggatcaggagacccggcagttctgccggccgaagtgttcgcagtcatgtggcacccatgaggagtgtgtggcgcccggccagtgcgactgctcacccggctaccggagaacgccggacttgggatgccaaccggtttgtgctccggactgcggatttggcaagtgcgtggcgcccaaccagtgcgagtgcttcgccgggttcattaaacggcccaattggaatgtatgcgaagctgagtgctacctgtaagagtatcgatatatctttatctaaagtatcttaaatttgtccgccaatttaagccatttgcttatcgcttccaggaactgcgagaatgggctctgtgagtcgcggtacaagtgtcactgccgcgaaggatatcgctacgacgtgaacaccaccagctgtttgccggagtgcagcgacaactgtggccaaggaaatggggtgtgcattgcgcccggagtgtgccgctgcttccgaggatacgaggtccacggtgccgagtgtcggccaaagtgtgagaggtctgttacccggagcaaaagctgtgttcaccttcatgaagttccgcttattcagcagattctgcggcaaatacgggcgttgtgtggctcccgaaatctgcggctgtggtgagggtcaacagcattgccggaacggaagctgtgacgatatcgagcactgcagttgcccatcgggggaaacccacttcatcgatcgctgtttgaaggcggaccgcctcagtcagcatctcaacactagcgaaaagagaaagcacttcaatcgccaacttgcttatgagtttaatgccctgatagggcgtctatttaatttctgatccaagacgaaacaataaagtgcgaaagtctaagttagacggcctggcaggtctggcgtcccttgatgccgctcttgatgaatcccggcctgcagatgcagaagtttggggcactgcagtaaccgttctggcatccctgcgggcagtgtggctggcagatgttccgctggtgctcgtccctcacatatccggtcttgcagtcgcactggttgttgcccacacagacgccgttcaagcacggaaggtcacacttcggcagacactcggccgacttccggtcccactcgaaaccggaagcgcactcacagatgtccggtccaatgcagcgtccgttcttgcagggtctgaaatagggaaataattaaattatctaaactatacatcgcaagcagatttcattgttttttaaaggccacacttacatggagcaaatgggttcgcagcgtccttggagctttaggtagcctgcgttgcagttgcagtgtcctggagccgtgcacttgccattctcgcaactgtcgcacactggttcgcaggatccatcggcggccaggcggtatccgtcgaggcaggcgcacttgttgggcgccacacagcgtccaaaggagcagccgggcttgcattccggctggcagtacttacgagtctccggctcaagcgagtatccctcgcggcacttgcactcattccgctcgtcgcacactccgttgccgcagcccaggggacaggtggagatgcacttgccctcggcggtgcgaacgtggccgggtatgcagacacaggtattcggagcagtgcatattccattccggcagtcatccgcgcagatcggctcacagcggcggtagatgtgcggatttcgctcatagccatcgcagcagacttggatgcgactcatgtccggagtggtgccattgccaacgaactgatcccgcgaattgcggagcagtgacgcggttctggatataaacaaggaaaacattaggtttacttaaacaacttaaaatcatgaatgcaatgacatatatttttcctagggaaactaataaaacagataatcaacatgtctaaataataccttagtaaagatgtgtgtcaaaattgaaaaataattttgtcctttaaagttttaaactacatattgtccaagagaatgcaaatgaaactagtcaattcaactaaatttaaaaacttttcgcttatctactgactttccgctcgttgcatattaaattcattcacattattagcttggcacacatatactcgtgaaatcaaggcgcattttaattatcaggccagcggaggaagttgaggtcgttagttcactatttttatggcttgccttgttttcgaatgccttccgaattgggcgatagctttaagtggaattataaaagtgttttcctctcgattgttagtattttttgtccgaaattaacccatcacttacggaacttccttgtagcacacaccactggccatggcagatctggttttgttgatgaacagggccgtttcatccaggacctggacacgatgagcgggcggagtcaccggctgcacgtagtgtccataaaggggcggcaatgtgaccggttgaaagacctcggcgcgcacaaatccagcggatccctgttccacatggttctgctggttccaggcgtagttgctctggttttgagtgctccaaccgtagctgctctggttgtagctcctccatcccgactcactgctattgccggcaagctgcaggtttcccgatggcggctgccgtgtcttgatgccagccgtcttgaattgtccctgacccagggaacagatggccagcagaacgcccagagtcaccagctggcacgatgatgacctcatggtgatgtcacttgattacggatttcgtacgtatggaaattgattatgcgcccacgtccacgtccgctggcgactgtagttgcacatcgactaatcggctcccgatgcgaagctccggatctctgagccgccattcgcctccggcaacctcttgtcccccttctaatcagcacctcgccaatgtacccatcaatgtggcaaacggagcgaaggtttgctctcagtagcttcgggcaaagcaaatcgatcattgccataaattgtgagtcgtaaacaaaactcattgcttttgggtaattccaagaaaagtttgcgtacaacgatgacttcaggtatagagattatttcttgatgaaatatcagatttaaaggcacagaacataaaaatgatgaacctttaaaacttatgaaggttttttcaaaaaaaaaatttaacgtttctatgtaatcatgaatggtcgtaaaaaacaggttaataatatttcaaatagtagaagtattgatcaaataatgataaagtaagcaactcaaaaaatattgtaattgatattatttatttttgttattccaagacaaaacgacaccttttgttactccgatagtaacccggagcacactcgcactcctcgggcgccaggcacaatccattggagcagtcctccgagcaaatgggctcgcacttcaggttctggcttgttcccttattcacataaccatcgcagcagtaggagaactgacgatttctggagttgggattgatggtttccacgctgggagtgggaattgatcttgaaattcggtcaggcgtgcggaatggtttacctacgtgagcgtcctgtaacagatgccggatcccctctcggccagagcctcttttcgccactgcgtaacaggatccaccgaccagaattgtgcggcagtgcgcgtgggcagctcgatccccagaccgcagataaggagtccaatcagcgtggatgtcaagtgcatttcgctcggattcagctgaaggcgaggtcgtatcaaaatgcgagcgcaatgctcgccagtgtctcggagctactaaattgtcgtctgtgtcaagcgcggcatttaagtgtacggagatagaaatgttctatattcctaggaagataattatgtgttcagtacccggtattcgtggggtatgttgactatgcagaaaataagtgatataccaaataataaatacctattcaaatgaaacaactttcgagagggtaccaaatcttcgacgtacgtttacaatttaagctagacttgcttcaaaaaagcgaaatcccaagagatgaagccacaagatatttcagacacccctgataagaacacaacgtcttgggaaatgcatgaatatttattagagactgctcagtgatgctggaaaagtgagagctccgaactcacaaccaccacatatcgctgagtgtggtcaagttgaagtgcctgcccagcagaagattgaattcctggatgagcgatgcgttcaccttgacgggattcatagaggcgtatgtggtgaccgtgtccggcgacatgcagcgatcgatgaatcgcgtcatgcccacctggcagcggcatcttcccatggcgttgcacaatccgtactcgcaacgctggtaggtgcgttccggacccgggactatggcgcatccgcacacattcggtgcgatgcatttgccgtaaaaaccacatccacccacgcagaccgcctcgcatcgctcccgattccggacgtagcccttgaagcagcggcagttgcccggcgagatgcacaccccattatcgcagttgtccccgcaatccggcagacaggtcgtcgtattcttatcgtatcgatatccgttctgacacacgcacgtcgttttgtttgcacagaagccattctcgcaggtcctgaaagaaatttattaaattattaaatgtaaaaggagaggcgtctagttctaacactcacatatagcaatcgccttcgcaggtgatgccgttcttgcgtttttggaatccggggaagcactcgcattcgttgggccgcacgcagtgaccgtatccgcagtccggaatacaaatcggttggcatcccagggcggcggactccctcagtcctcgggtatatccctcggcgcaggagcacttgcccggctccaagcagacctcgttgtggccacaggtggcgttgcactgcggctggcagaatttgcgcgatccgtccagctcgtatcccttatcgcactggcaggtgccgttcaagtaacagcgaccatgcggacagcccaacggacaggtgggcacacaattgttgcggtagttgagcacaaagtccgtgaagcacacgcatttgccgcccgccacacagaagccgttctcctggcaccgctcaccgcaatccggaacgcactggctccagtcatattcatagcggcgccagcccttgcaacaaacctcgatcacgttcatgtagggattggtggagctgttgcccacaatcttcacctccttgtcgtactgaaagaacacggccctggagattggattggtgtatacaatgcatgtgtgcttttgagatatatcagtaaaattaaaagttataaaccatacgagaacttgtgctggttatgggcaaggtctaaaagagcccaaggatttaatgggcttagattgtcaccggcacacacttacggcacttcctgtcggcacttgtccggatgttcccctctccggggcagcgacaaaccgttgggtattatatagggtttccgtgtggtggtcgaggacgagaggcgtcgctgtagagcctcgtgctcacgcagcagttcccgctggcgttgctccgcgcgcaggcgcagctgctcgtccttttgctgctgcagctgttgctcgtgaagttgcagctccaggccgtgcagcacgcagaggaacaggaccaggagcaccgagtggaggcacagagatcgcagtattgttgacatctcagtgctgggcgcggattcctttgtggcgcgctaccgaaacgctcaagtcgctattgtttactgctccggagacgacgcagttgggccagcctctaatcacagccggaggcaatgataagagggcttcagcgcttaattcggatctggagggggagatccagggctcgcaatgccaatgtatgtcaagtaagaacgagctaaagatcgtcttaagttttatgttctttcattacgaattgtaatttcccggataaatagtgatgggatgcaaataaaatatttcagtaaccaaaagtatcttttgggtatgtaaattagcatattcaaatatattttattttattttatttatatttaaatatgctttgggctcgttcaaaataaaattagaaaaaatattttagaaaattatccaactgaggtataaacaagtcgcaacacttaaaaatttcgacttacatgtattcataataataaactctcataaacaaactgaaccaaattcctctcatcttagcctatgcatcgaatatagctgcttttctgataagacaaaaaaaattaattctgtttcagtggcgaaaattagtacaattctagctggcaaattgtgaacacctagaaacttgaaataaggagtgctcaagatgtggttgcgagacttgcgcattcgtctaagttttttccacctgatggtgtgtctgcccagtatttacacaaatgtgccaagctattcggatcggtacaacagaaggcctgtgtcccaggatccaggaatgggaacctatggccgcgggtacatggaaaaccggcagttgtcctataatcgacctggaccagccaacttccaagatcccagaaatgtggagttgcagccgaaacgacgagagtatctcattcgatcacatgaaacgcaatccgatagggggcaacacaaatgccgcatttgggtgccgtaagtatgtcagatacacagaaaacaacgttgaagtatatatacattaacaaaatttttttattttaacaatgtatatatatatatgtatgttt

SEQ ID NO: 24977 - DNA, 3236 bp, DROSOPHILA
cgacttgagcgtttcggtagcgcgccacaaaggaatccgcgcccagcactgagatgtcaacaatactgcgatctctgtgcctccactcggtgctcctggtcctgttcctctgcgtgctgcacggcctggagctgcaacttcacgagcaacagctgcagcagcaaaaggacgagcagctgcgcctgcgcgcggagcaacgccagcgggaactgctgcgtgagcacgaggctctacagcgacgcctctcgtcctcgaccaccacacggaaaccctatataatacccaacggtttgtcgctgccccggagaggggaacatccggacaagtgccgacaggaagtgccggccgtgttctttcagtacgacaaggaggtgaagattgtgggcaacagctccaccaatccctacatgaacgtgatcgaggtttgttgcaagggctggcgccgctatgaatatgactggagccagtgcgttccggattgcggtgagcggtgccaggagaacggcttctgtgtggcgggcggcaaatgcgtgtgcttcacggactttgtgctcaactaccgcaacaattgtgtgcccacctgtccgttgggctgtccgcatggtcgctgttacttgaacggcacctgccagtgcgataagggatacgagctggacggatcgcgcaaattctgccagccgcagtgcaacgccacctgtggccacaacgaggtctgcttggagccgggcaagtgctcctgcgccgagggatatacccgaggactgagggagtccgccgccctgggatgccaaccgatttgtattccggactgcggatacggtcactgcgtgcggcccaacgaatgcgagtgcttccccggattccaaaaacgcaagaacggcatcacctgcgaaggcgattgctatatgacctgcgagaatggcttctgtgcaaacaaaacgacgtgcgtgtgtcagaacggatatcgatacgataagaatacgacgacctgtctgccggattgcggggacaactgcgataatggggtgtgcatctcgccgggcaactgccgctgcttcaagggctacgtccggaatcgggagcgatgcgaggcggtctgcgtgggtggatgtggtttttacggcaaatgcatcgcaccgaatgtgtgcggatgcgccatagtcccgggtccggaacgcacctaccagcgttgcgagtacggattgtgcaacgccatgggaagatgccgctgccaggtgggcatgacgcgattcatcgatcgctgcatgtcgccggacacggtcaccacatacgcctctatgaatcccgtcaaggtgaacgcatcgctcatccaggaattcaatcttctgctgggcaggcacttcaacttgaccacactcagcgatatgtggtggttgtatttattatttggtatatcacttattttctgcatagtcaacataccccacgaataccggctgaatccgagcgaaatgcacttgacatccacgctgattggactccttatctgcggtctggggatcgagctgcccacgcgcactgccgcacaattctggtcggtggatcctgttacgcagtggcgaaaagaggctctggccgagaggggatccggcatctgttacaggacgctcaccgtggaaaccatcaatcccaactccagaaatcgtcagttctcctactgctgcgatggttatgtgaataagggaacaagccagaacctgaagtgcgagcccatttgctcggaggactgctccaatggattgtgcctggcgcccgaggagtgcgagtgtgctccgggttactatcggaaagggggacaagaggttgccggaggcgaatggcggctcagagatccggagcttcgcatcgggagccgattagtcgatgtgcaactacagtcgccagcggacgtggacctggtgactctgggcgttctgctggccatctgttccctgggtcagggacaattcaagacggctggcatcaagacacggcagccgccatcgggaaacctgcagcttgccggcaatagcagtgagtcgggatggaggagctacaaccagagcagctacggttggagcactcaaaaccagagcaactacgcctggaaccagcagaaccatgtggaacagggatccgctggatttgtgcgcgccgaggtctttcaaccggtcacattgccgcccctttatggacactacgtgcagccggtgactccgcccgctcatcgtgtccaggtcctggatgaaacggccctgttcatcaacaaaaccagatctgccatggccagtggtgtgtgctacaaggaagttccaaccgcgtcactgctccgcaattcgcgggatcagttcgttggcaatggcaccactccggacatgagtcgcatccaagtctgctgcgatggctatgagcgaaatccgcacatctaccgccgctgtgagccgatctgcgcggatgactgccggaatggaatatgcactgctccgaatacctgtgtctgcatacccggccacgttcgcaccgccgagggcaagtgcatctccacctgtcccctgggctgcggcaacggagtgtgcgacgagcggaatgagtgcaagtgccgcgagggatactcgcttgagccggagactcgtaagtactgccagccggaatgcaagcccggctgctcctttggacgctgtgtggcgcccaacaagtgcgcctgcctcgacggataccgcctggccgccgatggatcctgcgaaccagtgtgcgacagttgcgagaatggcaagtgcacggctccaggacactgcaactgcaacgcaggctacctaaagctccaaggacgctgcgaacccatttgctccataccctgcaagaacggacgctgcattggaccggacatctgtgagtgcgcttccggtttcgagtgggaccggaagtcggccgagtgtctgccgaagtgtgaccttccgtgcttgaacggcgtctgtgtgggcaacaaccagtgcgactgcaagaccggatatgtgagggacgagcaccagcggaacatctgccagccacactgcccgcagggatgccagaacggttactgcagtgccccaaacttctgcatctgcaggccgggattcatcaagagcggcatcaagggacgccagacctgccaggccgtctaacttagactttcgcactttattgtttcgtcttggatcagaaattaaatagacgccctatcagggcattaaactcat

SEQ ID NO: 24978 - protein, 1035 aa, DROSOPHILA
MSTILRSLCLHSVLLVLFLCVLHGLELQLHEQQLQQQKDEQLRLRAEQRQRELLREHEALQRRLSSSTTTRKPYIIPNGLSLPRRGEHPDKCRQEVPAVFFQYDKEVKIVGNSSTNPYMNVIEVCCKGWRRYEYDWSQCVPDCGERCQENGFCVAGGKCVCFTDFVLNYRNNCVPTCPLGCPHGRCYLNGTCQCDKGYELDGSRKFCQPQCNATCGHNEVCLEPGKCSCAEGYTRGLRESAALGCQPICIPDCGYGHCVRPNECECFPGFQKRKNGITCEGDCYMTCENGFCANKTTCVCQNGYRYDKNTTTCLPDCGDNCDNGVCISPGNCRCFKGYVRNRERCEAVCVGGCGFYGKCIAPNVCGCAIVPGPERTYQRCEYGLCNAMGRCRCQVGMTRFIDRCMSPDTVTTYASMNPVKVNASLIQEFNLLLGRHFNLTTLSDMWWLYLLFGISLIFCIVNIPHEYRLNPSEMHLTSTLIGLLICGLGIELPTRTAAQFWSVDPVTQWRKEALAERGSGICYRTLTVETINPNSRNRQFSYCCDGYVNKGTSQNLKCEPICSEDCSNGLCLAPEECECAPGYYRKGGQEVAGGEWRLRDPELRIGSRLVDVQLQSPADVDLVTLGVLLAICSLGQGQFKTAGIKTRQPPSGNLQLAGNSSESGWRSYNQSSYGWSTQNQSNYAWNQQNHVEQGSAGFVRAEVFQPVTLPPLYGHYVQPVTPPAHRVQVLDETALFINKTRSAMASGVCYKEVPTASLLRNSRDQFVGNGTTPDMSRIQVCCDGYERNPHIYRRCEPICADDCRNGICTAPNTCVCIPGHVRTAEGKCISTCPLGCGNGVCDERNECKCREGYSLEPETRKYCQPECKPGCSFGRCVAPNKCACLDGYRLAADGSCEPVCDSCENGKCTAPGHCNCNAGYLKLQGRCEPICSIPCKNGRCIGPDICECASGFEWDRKSAECLPKCDLPCLNGVCVGNNQCDCKTGYVRDEHQRNICQPHCPQGCQNGYCSAPNFCICRPGFIKSGIKGRQTCQAV

SEQ ID NO: 24979 - DNA, 6344 bp, DROSOPHILA
attgaacttttagcgaatcaaagtttagttacatatttaaaaggcactcaagaaaaataatgtgttgctgattatttacgaatgagatttttatttatgtatcttatagaatttgatgcttcctcagcgagatttgtaatccaattaggccaaggccttgatattttagacaaaattcagcaacaatggctgcttaaatatttctgtaaactgcgtactattgtgtgtgtgtggctacatgtgccgtctaaaattagcatatgaagctataaatggggatccataaacaatagaaaggctgtgcattgagcttctagtaaattaaatcgattacacgatatcagcatatcaatggcaatttttactacaaattgataattccattaaggggggtgttcgtttggctgaacataaataacctacctggaattcttgttcgattgttcgcggtgtttatgcaaacacaaaggcgtgttgtctgtttggtttgtttgtaaatagccaagtaatagtcggccctaaaaacaacaacaacaacggcagtcagttgaaatgccgctggcggtagtgaaaaacaaatttcctctcttatctcaaatggcttgcgactgcccattaaagcgattgcaattagccccaaacgaatttttctgttgatctaccctttcgcagagtgggtccattaatttcgttctcaggatgactcacgttcgagtccattattttgcgatttaagtgtacaatatttaataattacgcgattatttggtgaaagttcatggctgtcttttggtttctttctcattttttcgtagttatctatatctaaatggcattttaattgcgaattaatctacgaatgtatatgctacctatttgtaatatcattccatttgcttacattcagatacttatctttattgagttgcttttgtgagcggtattaccatttatttgcaatcttaaagatagcaccattcataagtagctgtaaacattgttatcgtatattttttgaatatttatcagccaaaagctgatatcgcagacaggtaactcgaaactttagcacctgccctccaatttcgaattgaacaatctcatctcaacttctgacctcttatctgtcggcggtttagcctgttgtctttattgctttttcgctttgggcaacgaattgttttcttgttttcttttaattgtcgaataatattgactggcggacttttgagcaaactgtttgccactgtcatccgcatatcgcattttttttcgtgtttttcgaaacgccgtttgatatggcttatgtctgtgtcattcggaagtggaaattgtttgcgtcgatacgctcgagagcatgacatggagatgccattggggccacaaatacatgtgaaagctcacacaaagatgccggctatacactggagaaaattaccttgccgagctaatattacatagtcagaaatcaaattgtatgttgtttatacagtcagaaaaaacgcttattattggaaactacaatgcgtatataggtatttcttttaaacactgtatcgtcttgcaaacttgtaaaaaatcttttaaataaatagtttaagttcatatagtttttaactgcagatttgtaagaattacacttttttaaagttcaataaattttacatatcatatgtagtgcccgtttttcccagtgtacaagagcggattttcaaatatcagcgacacatgtgcaaccggcagagtggaaggcatgcgtgtccgtcgtctgcccctgccacattgccactccccctttggtcgcccccgtttacccgcgaagtacgcgtttatttttaaagcaaattgcattaaaaatacctcgcactttgctagcgttttgctatttcaattgcaattgcacaattgcaccttgttcttgcaatagcaattgcgctaacttattttcgttctcgattgacagcggaaagtgcaacaaataaagtgcgctcagtcggaagagctttggcgttttttaaattaactcataatatgtccaaatttggctgtcgcatcgaatgattcacgaattcgtgatgggtgtatatgaacttatcattccacagcaggcgtctcgcattcgatacagtgggttgaaaaaactgtaaaaaaaaccattcaagatcaagagctactcttaccaaataaaagggaaaagatacttaaaatcttaagttcacttatgtaagatcggattcacacctcaaatttatccattgaaatttgtgataaaccgttaaagcgtgatatttccgctattttccaatacaatacccataaaatgtgtcaacagtgaattcaaatttggaaatttaagtatgtcgattgcgccttggtgtgggtttgtcaataaatttgtgactacgttgctggaataattatttgcgaaataagacataccgttcgttcgatacatttatagtttattgagatttactattcgttctggctcgctatcccattgccaacgactttgccactaatcttggccatttcccagaagtaatcggccacatcgctcacgaacttggtggatatattctgcagcttctggccggtcaggagtgtcttatattgcaagtcggtgagtcctgtctcggattgccgattaatcagcagtggagagtccttgaactgcaaaagggatattaacagtttgtttatttgatgaataccaatgtaggtatctattacctcttcgaagatattctgccacagctcatcctttcggtccagttcctgctcatcaatggcttggctcaggcgcgttatataaagactgatatcttggaatcgcttggtctggggattcagagcggccttcacctcggagaaataggcgatttgtgatcggaacaacgagttcagcaggtggactgtctcctccttggcctgtctctccaactccctttgcactggatcatcggagtttaggagttgtggatttgtgggcttggcagccactattaatagctgttcaattaaagacagtttttttttttagtattttaataaatttggagaacttaacgcattcctaacctgggctactaaaagtaaaggaatatatttcagcatcgcgtcttattgataaaaaatcgaaagcctcctcactcaatgaatggtgttttcaaactaattggtgggagcagcaggcatgttttgattagcagtgggatgttcgaatctctcgggtgcctgataagctcccaagggtttctcctgctaggaattttgttttgctctttcccgatttcgcagatgataataagcttttcccaacaaatttaggaattcgatgtcatctgaattgcgtttcagctaaagttagtgaaacacgtttttagattcggagagcatattagccattgatctatctttattcgctgtcaaggtctgtctagctgtctgggtggtatggcgctcgcatgttttttgttatcaacaaacataggaataaccttgacaagggtatggtaagaagaaacatacataggtttgcgtacacaaaacaattaatttgggaactccgttgcaatatgttctcatatattatttaattttattaaatacctatttttacagacgccgaaagtttttctatatttgtatgctttgtacagacaagttgtttattacctattttactgttcattcataactattcaaattatttgacatacatacttttatgtattggcgcaggtatagtagttcttaactacttgtaatgtattctgcaaactactgatatttttaataattatgctagcaatgctaaaacgctaaaataagattggacacttattttttacaaactctacgcactcactttacatttgacatttttaagttatacatttttttaccttacacgctactagaaagtatgcagtggaatttaaacacctcattgctcaaatagctcagccaaaaataagccgatggcaaatataaaggtctaccgcaaaaaagtaggcaacacaattgagctatatttggattgatctaaaaaaaggaatttttattaaatgtggcgtatcacgaaacggtaaaaagttgggccaatctgataaaatgtaacttgtaaagttcacttcaagcattataattcccttcaaaaagactcctgaagatgatcttcttgacaatataacttgtaactccaaatcaagaatttatactaaacagaacttcttgagtaaaatttcctttgttttgaaaacaatactaattgtacacaagcattgaaccaattgaaatatgttgataaattagagtaaaagtagagttataaaaaactacagagctagagggcctaatcatttttagcaaaggaaatgctattataagtctaatctgtgagattagattaagcaaattgcgtgttttccctgccctggtgggcagtgaaataaaccaatccgcacatggtttatggcccgcacgtttttgaccaccgaaaattggattatgcacttgttttggataatatgtagagtttatttggcctaattagtttcctcccgtaataatcgcaatgatatcactcagagttcggtctccgatcagatcattgcaaatgggagtagcctgttcgctgacccaggcggcaacaaagtcggtgttttcattaatcgtcagggttacgaactcctcgatgatctcgttcagtttgcgattgaagattcggtacttggacaggttctcgatctgtgagttgacattgccgacggaggggtaaatcaggacatccttcacacgaagctgggaagtgaacacgcccagggagtagctaattctaccctgaatgttcagatcctcgagagcaaagaaggcgccaccgttgcgcttgatgcgatagccactgcccatgtccatctcgtaatcggtggtgaagttaaggctggcaaagttgatgttgaaggtcaagcgactcctgatcacgtccatgttcatggtgataatctcgtactgatcgagcccctgaagttcaaagttctcgactccaaaggtgccactgaattctcccgagttgatttcgaacgacctctgcgccgccttcatgggtgccataacggggattccaaatctcgggctaccattttgcaggacgaccctgaatgcctccaatccgtccacaattacgctggagaaagagcgtccttgggctgaaaattaactatgattattaaattttccctaaaattttcttcatattctcacctgacaaaggttcggcaacttcggcaccttgacagctggccagggccacgataagcgcaatcaggaatgcagacttcattcttagcacagaacactagttaacccttttggcaatcaaaatccactagtcgaagcttgccaaatccattcctcttatataggaaaatgaccattgagataatctatcggtacacagcacaaaaatatcagtgtctagattaaaaaattttaatattaggaaaacttctatgtacagtgaataaacagtgaatgctttcttggcttatatttacaaaaacatggttgaaatatggaacaatttgttatttattcttaaataattagtgtttataaaggtttaaagaaatattaggggcattcctctcatatcaaaattattgtttattgacacaaaatggtgaggtattgagtacagtgctctaagatattccctttgatataaaaatcatattctgaaaatcgctatatcttattatattattttgtatgaatctacattttttttctgtgcatgtgaagtagctttattaatcggcaaataatttggcaaagtgttttatgacagataggacacaacttgagattagaccgtctttgaaatataatgaaagctgatggatgttgtaaatattaagctttttaaaacatcgtttaaatttcccaatgcaatgaacaaaaaaaaacccaccgaaagccagtcccgcaagaaaagagccaggtgacgaattcttgattcataaacggttgtttaatgaccgatgatttgtttaccactcgaactcggggggaatgcaggcctccttctctccaccctcaccatcaccaccggcaccggagatgatctcggcgatgctgatgtcgtccagaacgctgttgacggcgggcagggcaatactctcgatggtatcggcaatcagatcttcgttctcattgatggccagctccacggcctcggccaagtactcattcatcttctcgttgatgctgccatcgcccaggatgccctcgatctcggaatcaacctcacccaagtgggtgcggacctccaatgacttcag

SEQ ID NO: 24980 - DNA, 1236 bp, DROSOPHILA
atgaagtctgcattcctgattgcgcttatcgtggccctggccagctgtcaaggtgccgaagttgccgaacctttgtcaggacgctctttctccagcgtaattgtggacggattggaggcattcagggtcgtcctgcaaaatggtagcccgagatttggaatccccgttatggcacccatgaaggcggcgcagaggtcgttcgaaatcaactcgggagaattcagtggcacctttggagtcgagaactttgaacttcaggggctcgatcagtacgagattatcaccatgaacatggacgtgatcaggagtcgcttgaccttcaacatcaactttgccagccttaacttcaccaccgattacgagatggacatgggcagtggctatcgcatcaagcgcaacggtggcgccttctttgctctcgaggatctgaacattcagggtagaattagctactccctgggcgtgttcacttcccagcttcgtgtgaaggatgtcctgatttacccctccgtcggcaatgtcaactcacagatcgagaacctgtccaagtaccgaatcttcaatcgcaaactgaacgagatcatcgaggagttcgtaaccctgacgattaatgaaaacaccgactttgttgccgcctggggaggctttcgattttttatcaataagacgcgatgctgaaatatattcctttacttttagtagcccagctattaatagtggctgccaagcccacaaatccacaactcctaaactccgatgatccagtgcaaagggagttggagagacaggccaaggaggagacagtccacctgctgaactcgttgttccgatcacaaatcgcctatttctccgaggtgaaggccgctctgaatccccagaccaagcgattccaagatatcagtctttatataacgcgcctgagccaagccattgatgagcaggaactggaccgaaaggatgagctgtggcagaatatcttcgaagagttcaaggactctccactgctgattaatcggcaatccgagacaggactcaccgacttgcaatataagacactcctgaccggccagaagctgcagaatatatccaccaagttcgtgagcgatgtggccgattacttctgggaaatggccaagattagtggcaaagtcgttggcaatgggatagcgagccagaacgaatagtaaatctcaataaactataaatgtatcgaacgaacgaaaaaatatacgataa

SEQ ID NO: 24981 - protein, 225 aa, DROSOPHILA
MKSAFLIALIVALASCQGAEVAEPLSGRSFSSVIVDGLEAFRVVLQNGSPRFGIPVMAPMKAAQRSFEINSGEFSGTFGVENFELQGLDQYEIITMNMDVIRSRLTFNINFASLNFTTDYEMDMGSGYRIKRNGGAFFALEDLNIQGRISYSLGVFTSQLRVKDVLIYPSVGNVNSQIENLSKYRIFNRKLNEIIEEFVTLTINENTDFVAAWGGFRFFINKTRC

SEQ ID NO: 24982 - DNA, 4026 bp, DROSOPHILA
attagtgaaatttattttaaaagtattttttcatttctatttgggaaattatacatagaaccatgtgtatgtacagatataatttccgaatccgaaccttcttaccaaacgcagattactcgacaatgcatctaaatatatgtatagttaatgatatattatttatcgattgtgctcattggcactactctcgtacatattagtagaatattcatcgattgtcaagtggctgttactttcgatcatacccgagtccatattgctatagtccttggacgctttacttaaaccatcactaccgcaatagggaagacaaccaattctgcctaaatcatttggattattggaatctagaggattatcagcacccggtggcaaactagtgcaatgttgcgtacaattgtcgcagggattcttatcagtgggcacaccattgccggattggcatgaatttggggaggaggacggttcatatttccggggtctccctctcgacaagtgccgccttttgacaaactcattatcgtcgaccatccaaaacgagccaaagtcatcttcataacgtacaaagcacttgtgtaaggaaaggttcgtacgaatcgcattctttatgattggttggacaaaacaagagccccatcaagagtcagaaacaggaaattgcattatcgtgaaaggaagaaaaagttcattgagatattaaggttagttcatttgtcttcggtcttcttattttcatttttcataacacgcgaaatcctggataatcttcatcagctaaattccagacagacagacagacagatcgatgagcagacggacatcattttgggtttctaccactaagagattagaatcactgtttacaatttgcgctgtaaaaagatcgtataatgtcatattatatcatttcgatataggagcatgcatgcaatggcatatgtatatttactaacagagcaaaacggaaggagtttggagcaaagtgagtagaattaaactatttgagacccacatacccaatgttcatggctacaaaatagttagtgtccggcgaattggtagcaccggttagattgttaccaatgccagcagtgcgctgcggtcgtcttttgtaaaactcaatctcatcgacagtccaaactgctcctttcacattctcaacccgcataaagcacttatgaagggacagattgtgccggactgcgttctaatgatatatattatcagttagcataggccaaacttaatttgattattttaagacatataaaaaggaaatggaataaaacaggatctgacctgtgtagcttaccttgttatatatcacttgtatttagctctattatactcttaaatattggcaaagtagtggacaatgtggaaaaggtagtatatagtatatatacagcggacaagctaggaacgccaatcggacaaacgagagttatacggacggacaaatggtcatatcagatcatagatatcatatcatatagcataaatactcaaattaaagttatgttgcataatatatagataatatggaggaaagaagatttacatatatggggcattttaccttccacgtagctgcgttgcgccggaagtagcaaaatgtgttttggaaccagttgtagatttcgtttagggttaactgcttgtcaggggagtcaattatagcctataaataaaatatatataaaaaaaataaattaatgttatattaggaaattggtttttaaaattacctgtcttatgagggaagcataagtaaaaggcggtcgtacatcagcattcttataaaactctctgtttcgatggatttctgcaaatttaaattcttattatatgtcttccagaagcacaagacgaatagtcatcaagacgatcagtctacataatttacttaccctgttgcacatcaagacctgctctttcaagcatatagggtaatcctatatccaaaaaccattattatttttatacagtaatagtaaatttttcccaaacttacccccatttatggaaaatgtatttttgtcgtggtttctctttttgatcgagcacaagttggtggaattaaccattggaagattcagaggactcggtgaatttgtttgtcggatgggtcggcctatgctatttacggtaagcggactccggcaaaactttccctctcttccgggcacgtccttatatttataacttttcattataccaatacttactcacataaaaagggacttaccttcctgtcgattttggtgggagacaaaagctgcttggacaaatacaagtgatgcatcattgcctgcaagcgatctcgttctttttgcaggtgggattccagctgggagacaacttgcatttgaacccgtgcctgtgctgttgatcgatcgtccaaaccatgttccgtattcagatgcctagttagataacataccctatataattatttcatacctctaattgtactccacctacttgacaaacgatgtgatgtcttccaaatccatttcgcaaccaggccaacggcatatgccatgagcaaataacggatgatagtacttccgcatggcgaactcatcgtgcatatagctgaaatcattgttgcacacctcattatccttcgaccgcaagaatctctctgcatcggagaacatgagcttctcctgctcggatatgaactcgggcacattgtagaaacccagatcgggaacgggagccatcatatgctgaccctgtatatgcatgtgtggattggattcgtgctgctgggccgccgttgaggattcatcgatgctcgaggccggtgagctgcacttaactacatgtgaggcaaaggtgatcgagttattgagaaagccagtcggcggaaaacaattgttcttaacagcatctgagcatatgtctggtatggaaatttggtgtctcgacttcactgatatctccttctgaatcgaactcttaaagtccgattccttggcatcctcggaatactcgtcgtcatgtatccgatgcatgtttttaaaactgaaatttataatcattaccattgatcctttacccaagagatgggcatatgcaaatacacagaaataatctctttttcgtctgtcattaggagtcatttcaataaaactatctttactcatatgccgccattcctgtaaaactccgaatcagagtgatagtttaaggatttctatttattacgccctatttaatttcagcttaattttcccgcactatcattgagatgatactttccccaaaagttatgaatatttaacaacttggcgcatataagatttaacccctactaaaggcccagtgctaaatgaattcagtgtaaattaaattaaacattctttaaatgtttgatttaattttaaatatgttacaaataaaatgccacgtcatccggtgcagttaatctgtaaatataaaggttattcatagaaagcatttatcatatttaggcgtataacaagtttaagatctcacaaggggattgcataggtggcaaggaaaccagacacatcttattttgctaaaaagaaacatatacaacatacataacataagaaacatacagacggaacggtcggacaaacggaaggacatacaaacggacggacaaacggacggacaaacggacggacaaacggacggacaaacggacggacaaacggacggacaaacggacatacaaacggaaggacatacaaacggacggacaaacggatataaaaacggacggacgttttggctataggatgaacttaaatggaagagtatatgagttttgcagataggaccatcttacgattgttttaatcaaattcctgtaatgaaaaattatatagccacctaaaataagaataaatgtaaatggtgaaatatgtaagtattaaatgttttataggaaaagaagaaagatataaaagagaagagagaggtatggttttcatcacattcgaagatcctgaaaaaatagtattatattcgatatacataagc

SEQ ID NO: 24983 - DNA, 1074 bp, DROSOPHILA
atgcatcggatacatgacgacgagtattccgaggatgccaaggaatcggactttaagagttcgattcagaaggagatatcagtgaagtcgagacaccaaatttccataccagacatatgctcagatgctgttaagaacaattgttttccgccgactggctttctcaataactcgatcacctttgcctcacatgtagttaagtgcagctcaccggcctcgagcatcgatgaatcctcaacggcggcccagcagcacgaatccaatccacacatgcatatacagggtcagcatatgatggctcccgttcccgatctgggtttctacaatgtgcccgagttcatatccgagcaggagaagctcatgttctccgatgcagagagattcttgcggtcgaaggataatgaggtgtgcaacaatgatttcagctatatgcacgatgagttcgccatgcggaagtactatcatccgttatttgctcatggcatatgccgttggcctggttgcgaaatggatttggaagacatcacatcgtttgtcaagcatctgaatacggaacatggtttggacgatcgatcaacagcacaggcacgggttcaaatgcaagttgtctcccagctggaatcccacctgcaaaaagaacgagatcgcttgcaggcaatgatgcatcacttgtatttgtccaagcagcttttgtctcccaccaaaatcgacaggaaggattaccctatatgcttgaaagagcaggtcttgatgtgcaacagggctataattgactcccctgacaagcagttaaccctaaacgaaatctacaactggttccaaaacacattttgctacttccggcgcaacgcagctacgtggaagaacgcagtccggcacaatctgtcccttcataagtgctttatgcgggttgagaatgtgaaaggagcagtttggactgtcgatgagattgagttttacaaaagacgaccgcagcgcactgctggcattggtaacaatctaaccggtgctaccaattcgccggacactaactattttgtagccatgaacattgggtatgtgggtctcaaatag

SEQ ID NO: 24984 - protein, 357 aa, DROSOPHILA
MHRIHDDEYSEDAKESDFKSSIQKEISVKSRHQISIPDICSDAVKNNCFPPTGFLNNSITFASHVVKCSSPASSIDESSTAAQQHESNPHMHIQGQHMMAPVPDLGFYNVPEFISEQEKLMFSDAERFLRSKDNEVCNNDFSYMHDEFAMRKYYHPLFAHGICRWPGCEMDLEDITSFVKHLNTEHGLDDRSTAQARVQMQVVSQLESHLQKERDRLQAMMHHLYLSKQLLSPTKIDRKDYPICLKEQVLMCNRAIIDSPDKQLTLNEIYNWFQNTFCYFRRNAATWKNAVRHNLSLHKCFMRVENVKGAVWTVDEIEFYKRRPQRTAGIGNNLTGATNSPDTNYFVAMNIGYVGLK

SEQ ID NO: 24985 - DNA, 5308 bp, DROSOPHILA
acacgaggaatacaagaatctggtggactacatgctcggcagcttcatggaggagatgcagatatcaccggagcagttcgaaatggcctgtctggagggtaggcagcagggtcagggcgagaatccctttcatttccaccaggtgcttttccagcaggtatgtgcggtcgcacgatctcacacagtcgtgtctccaagatgtcatctttcagatatgggccgccaacgatctgaagatattcatacggatgatgacgcaacgcaacgtggagcttcagctgcaggccctggatctcatagagaaaaatcaattagcccctggtggcgtcgaggagggggatgaccgcagtgcggacgctagctcggatccagggtgggtaatgatgtcttatgcaattgtaggcactttgccaaccaaattgtacacgggttttggtaattagtaatcaatacttcttgttttttggtcattattctatatcgcatatatatattatatatgaacattatactttgaacagggataccgcctccgaggtggaacaaatgatagccaagacggtgtctgacgaactggagagccccgaagcggccctaactccagagcaggagcccaatctggagctggttaacgacaagttccagcgcctgaatctgttcttcgagcaggaggatcgtgtggaccccagtgatgttgtctcgcggcaggagtacctgcgccaacagcgtgacaagattgtggagataaagaagcagacgcgtgcaaagcaactgcaagagaccatgtcccgcggtactccacatgcaccggaaggagcacgtcccagctccgcgttggtggcccaacagctgctcgagaatggcggccagactaaggagctctccatgccggcaccactagaagctgaggagaacgctgccctgcagctcagacgcaatcttgccaagcgcttgcgcagcgaagtggttgagcagaagtgaaagaaaggacgcacttttttccctactattcccatttattgcagatactcagccaggattaacaacgtgcattaggtattgtggcatgcagactagtttggttggttgatgcacggtgtgtgtcgtatgttgtacttgtaacgccacccctcatccatgtccacaaacagccaatccatagattgattgtttgtgggcatggtcgagcggatctatcaatttccattacgctattcctcaaaataaacatattgctagtgaagtgtttctcaaaaaacggtgtgaattgctcttctatgtgggtatgcgatcgcgcaaatacgacatgatggcgtcagtgcccttcatcaggatttggtggcggggctgtcgaaatggattgcccaccagctccaagtgactgcaatatacagagaaaataagtttggctccaaacaatatatatccccagcaaggatcttacgttatgtttgtcaggttccccaaaattggtggcactgtctcgatgtcgttattgcgcaaatccaatgtgctcaaacgtcgcatgttctgcagacccgatacatttaacatttttatgtggttctcactggcaatgaggatctccaggccttgcagctcgtacacacagttgggaatacacggaaagctgaaaataaacaagtgggaagtttaaataaagctacatagtttagaaaagatatttcccaatacccaccgattgtttgcaatgtttagttcacgcagtgtattcaagacaccaaactccgtgggcaggtcattcaacagattgttggacaaattcaagaaagatatacgtgtaaactgggagatgaactgtggcacatagccgatgacattgttggataaaactagttccgtaactaaatctttcatgtgctgcagtctaaaaaaccaatcagttataaatcattgcatccattaaaactttaaacttacccattgggcaaagtgctcagctggttgcgcgcaaagtccaccacatgcacaccctcatccctggcgatctggaacacctggtcaggcactgacgtgagctcctccagattgacagctaatgtacgtgtatgtcgtagtttgtatctgcaaagtggagtagagataaaagttagttacaaggcttccatggcagaagtagatgacatgtgtgtaaattttggaacttgatgatacactacacccaacgtggatggacagctgagcgagaggatggatcttgctcataggagaactgctgttgctgctgctgttggtacataaagtatcctggatagggatactccattcgctgctgctgctgttgcacaaaaagtgatctcaagctgccattctgatgttgctgttggtagttttcgggctcatatatgcgcccttgggtctggcgatcatattcctgacagtttctgagcggctcatacacacaaaactgctgctgcatttgctgctgctgacatggatatgaacaaggacattggaatccgttctgctgttgctggtggtgaaagctacagcggcggagatcaatgtgccgtcctcgctgaaagaaaagctcttgatacatacctatccggaaagtttccgggtatatcaccatcgtccatttggccaccacgcaaacgggtaacactgatgcccgctgacgtggaagcgtcgtcgacgccacctccctcctccttggccttcgccacagctctatcgtgcagagtctttaagatcctcgttgttccacactgtaggatgtcgcgtctgattgtctttatgggatttccctccacctgcaggctaatcagatgagccaaggaggacaatgtgactggcagcacgctgatcgtattattggacacatcgagacggtttagattgcgcagcaggcacagctcgtcgggcagctccgtgatcttattgtcccgcaaatccagtatcttcaggtgtggcaagttactacacatagcttttggtatgatctggaatggaagataattattataattgggatttcatttcaattaagatttcagtaaggattaccttgatgaaattattgctggcatgtagctcgttcaaggcctcgtttccctcgaactcgggcagttccagtatgtcgttatgctgcagataaaggcaatccagctttctcaaaaggcccatatcctccggcaagctggtcagatcattatgcatcagatcaatcttttgcaaagctaataacgtaattgttcgatatggattagcaaataattgtggtgggccagcacttacagcgcatgttaacaagatcgggcggcagttccttgatgtgattatagggcaacaagagcgcagttagacgcaccaggaacccaatgccaccgggcagggattgaatattgttatgcccaccgtcctttcgttacaaatggattagcaagcagtttgttaagggagattatacatattggatgggattagtcagataagacgccaaaaccacatataaaaataatactcaataacttaagttaaatgatttcatataaatcgtctatatagttaggaatctacactagctcctatatccgccacccaactcaccaaaaactcaagcatgtgaaggtcactgatgtccggattaagttcgacgaactcgttgtacgagatgttgaggtgccgcagctccggtagactgtacatcgcacgcggcagctggctgagtttgttgtggctcacattaaggcgcactagcttttccagcttgccgatctccggtggtaactccaccaaagcattatcgtgcagctaatatgtggattttaaattaaaaagcctaatagtaattgtaatttcataccgtaagcacggtaagtgattgcagattctcgatctttggcgatatgtgcgttaaggtgtttgagctcaggtccaggttgttcaatggcacttggttccaccaggcatcctcctctttaatcgttagctgctctagatttacggccttgctgtccgcatccgcctcgttaatgtcgtacagtcgcttgggcactgcaatgatataatgtcgaatcaattagagtacgtttatcctgaaaattcactacactacagtcttcagcgcgggttggaggttcggaatcgtccagttccagctcatcgtccggatcctcgctttccagctcgtccgccgaggaggccatctggaattcgcgaatctggtagtagcgacgcctccgcggataaggaccgcacatgcagaacgaagtgagctgtttcctggaggacgcaatcttgggagatgcttcggtagagtcacacaaccgatggcgctcagctcagtgggtagactgaatcaagcgatgactgatctggggacgcacccctggagcacctttatggatcattacgagccccgcatactggtcagtgaagcggcaaatatgcttcgctccatttttgggattctccagggtcaagttcgagatcgaaatcgcttttgcctcacatgaactggaaccacaaggcgctgctgtcaacgaggccggggctccattgatcactgaccggctgacttgtttttggtgggaccatggacttccaacgacgcagctgctcctgggtcaccactgcttgcaaacccgccaatgtatgtagctacttttaagtggatgatacagtcacaacaactgtgttactcgaatcaacagactatatatttcttctattactcttcaaaaagaacgttaatgatatttgaatcataaatgtaacgtattactgaagttcgagtttcagtgctgcgaccatatcaccaattcttccctttgaacttacctctggccaatgctttgttggaaagattcagggtgcccgatttacgcgccagcttccatagttcttgggtgagcacctggtcgtcctcgtgagtgctcctctcgtgaaaaatcgggcgaaaggcacagtttgtcctgggcgagtggaccactgaggcttggcgcggactttgtgcgctgcgaggaatccggctggtggaggggttactccgtcctcggccggttttgtcactcatgtcgcttggacagccgtagtgggtgaagcaggaatggccaaagtcgaagtcgccgccaaatgcggatgcctggtcacattcctgggcaccgcggaatgagccaagttctacgttgcttaagctggcagggatgacaggataaatgaggtcagtgggacgctaaaaagcggccgaatcacaggtgaattcggttttgtccagattttgcgtcgttttattttggctcactgtcagcagtcagctgttcgtcgctcgcttttcaacact

SEQ ID NO: 24986 - DNA, 2220 bp, DROSOPHILA
agctgagcgccatcggttgtgtgactctaccgaagcatctcccaagattgcgtcctccaggaaacagctcacttcgttctgcatgtgcggtccttatccgcggaggcgtcgctactaccagattcgcgaattccagatggcctcctcggcggacgagctggaaagcgaggatccggacgatgagctggaactggacgattccgaacctccaacccgcgctgaagacttgcccaagcgactgtacgacattaacgaggcggatgcggacagcaaggccgtaaatctagagcagctaacgattaaagaggaggatgcctggtggaaccaagtgccattgaacaacctggacctgagctcaaacaccttaacgcacatatcgccaaagatcgagaatctgcaatcacttaccgtgcttacgctgcacgataatgctttggtggagttaccaccggagatcggcaagctggaaaagctagtgcgccttaatgtgagccacaacaaactcagccagctgccgcgtgcgatgtacagtctaccggagctgcggcacctcaacatctcgtacaacgagttcgtcgaacttaatccggacatcagtgaccttcacatgcttgagtttttggacggtgggcataacaatattcaatccctgcccggtggcattgggttcctggtgcgtctaactgcgctcttgttgccctataatcacatcaaggaactgccgcccgatcttgttaacatgcgctctttgcaaaagattgatctgatgcataatgatctgaccagcttgccggaggatatgggccttttgagaaagctggattgcctttatctgcagcataacgacatactggaactgcccgagttcgagggaaacgaggccttgaacgagctacatgccagcaataatttcatcaagatcataccaaaagctatgtgtagtaacttgccacacctgaagatactggatttgcgggacaataagatcacggagctgcccgacgagctgtgcctgctgcgcaatctaaaccgtctcgatgtgtccaataatacgatcagcgtgctgccagtcacattgtcctccttggctcatctgattagcctgcaggtggagggaaatcccataaagacaatcagacgcgacatcctacagtgtggaacaacgaggatcttaaagactctgcacgatagagctgtggcgaaggccaaggaggagggaggtggcgtcgacgacgcttccacgtcagcgggcatcagtgttacccgtttgcgtggtggccaaatggacgatggtgatatacccggaaactttccggatagatacaaactacgacatacacgtacattagctgtcaatctggaggagctcacgtcagtgcctgaccaggtgttccagatcgccagggatgagggtgtgcatgtggtggactttgcgcgcaaccagctgagcactttgcccaatggactgcagcacatgaaagatttagttacggaactagttttatccaacaatgtcatcggctatgtgccacagttcatctcccagtttacacgtatatctttcttgaatttgtccaacaatctgttgaatgacctgcccacggagtttggtgtcttgaatacactgcgtgaactaaacattgcaaacaatcgctttccgtgtattcccaactgtgtgtacgagctgcaaggcctggagatcctcattgccagtgagaaccacataaaaatgttaaatgtatcgggtctgcagaacatgcgacgtttgagcacattggatttgcgcaataacgacatcgagacagtgccaccaattttggggaacctgacaaacataactcacttggagctggtgggcaatccatttcgacagccccgccaccaaatcctgatgaagggcactgacgccatcatgtcgtatttgcgcgatcgcatacccacatagaagagcaattcacaccgttttttgagaaacacttcactagcaatatgtttattttgaggaatagcgtaatggaaattgatagatccgctcgaccatgcccacaaacaatcaatctatggattggctgtttgtggacatggatgaggggtggcgttacaagtacaacatacgacacacaccgtgcatcaaccaaccaaactagtctgcatgccacaatacctaatgcacgttgttaatcctggctgagtatctgcaataaatgggaatagtaggga

SEQ ID NO: 24987 - protein, 620 aa, DROSOPHILA
MCGPYPRRRRYYQIREFQMASSADELESEDPDDELELDDSEPPTRAEDLPKRLYDINEADADSKAVNLEQLTIKEEDAWWNQVPLNNLDLSSNTLTHISPKIENLQSLTVLTLHDNALVELPPEIGKLEKLVRLNVSHNKLSQLPRAMYSLPELRHLNISYNEFVELNPDISDLHMLEFLDGGHNNIQSLPGGIGFLVRLTALLLPYNHIKELPPDLVNMRSLQKIDLMHNDLTSLPEDMGLLRKLDCLYLQHNDILELPEFEGNEALNELHASNNFIKIIPKAMCSNLPHLKILDLRDNKITELPDELCLLRNLNRLDVSNNTISVLPVTLSSLAHLISLQVEGNPIKTIRRDILQCGTTRILKTLHDRAVAKAKEEGGGVDDASTSAGISVTRLRGGQMDDGDIPGNFPDRYKLRHTRTLAVNLEELTSVPDQVFQIARDEGVHVVDFARNQLSTLPNGLQHMKDLVTELVLSNNVIGYVPQFISQFTRISFLNLSNNLLNDLPTEFGVLNTLRELNIANNRFPCIPNCVYELQGLEILIASENHIKMLNVSGLQNMRRLSTLDLRNNDIETVPPILGNLTNITHLELVGNPFRQPRHQILMKGTDAIMSYLRDRIPT

SEQ ID NO: 24988 - DNA, 7967 bp, DROSOPHILA
aatcacatttgagtaaaaattgtaaattgtacagtaataatgaattcaggatttcagtgtgaggcgttggcagtgataaatttgtagcatacttttcaacgctagatgttgtgaaggatttgagccatgtaaaaatgttggctagaaagcacagaaccgactgtttgagttccacggtattttacaatgttattctttcgataagatcgtaccaaaactgtcctaacaaaaacaccaccaacgcccaaagcaacatgcacatatgtacatacatatatatgtatttactgcgttctcatatgaaacctgttgatccaaagttatgcttaggtaaaggggagctagaggggactataacaataactccgacgattaattggcaaaaggtaaagacaacgctttgacccatttcgcagaaagagcagacacacatatcatgacgctcatattcgagagtgctgatcgatcaagctcgtgtaattaaccgaattcctcataaaatatcttttcggccagatctttgacgtttcggccgcgttaaccagttattcgcttggggaagcgaatgcaaatgattgcttatttgtttgtgttccatcagcgaatcaatccaaaaacaaaattcggaaagaaaagaaacttccgcaaccaatttatgcgaacttatttatgcgtgccaaccacccatgcggtgtctgtaaatttcccaaacataagccgttgttctagaaattgtatttacatatatcacaagaaaagatattgatggctattgataaggggataagtactacatttagaatgtacatttatattatatatatataaatatagaaattgaaatgatatcttgtagtcttgtagtccgtgtggaatacacgtgtaagatacatctaagttacgattagcccgatttgtccagacgatccactacatattggccaagaactaaaccagaaccttcgtatcttctcccttcccttttcatcccccaggaattatgacactgagccgtggcccgtacagcgagctcgataaaatgagcctttttcaagacctcaaactcaaacggcgcaaaatcgattcgcgatgcagcagtgacggcgagtccatagcggacacgtccacctcgtcgccggacctgctggcgcccatgtcgccgaagctctgcgacagcggctcggcgggggcgtcgctgggggcatcgctgcccctgccgctggccctgcccctgccaatggccctgccactgcccatgtcgctgcccctgcccctcacggcggcatcttcggcggtcaccgtttcgctggcagcggtcgtggccgcggtggccgagacgggtggcgcgggcgcgggaggagctgggacagcagtaacagcgtcgggagcaggaccatgcgtctccacgtcgtctacgacggcagcggcagccacatcctcgacctcctcgctctcgtcctcctcctcttcgtcatcctccacgtcctccagcacttcctccgcctcgccgacagctggagcctcctccacggccacctgccccgccagcagcagcagcagcagtggaaacggaagtgggggcaaaagtggtagcatcaagcaggagcacacggagatacactcgtcgagcagtgcgatttcggcggccgccgcctcaacggtgatgtcaccgccgcccgctgaggcgacgagatccagtccagccacgcccgagggaggcggaccagctggcgacggaagtggagcaacgggaggcggaaacacgagcggcggatcaacggctggagtggccattaatgaacaccaaaacaatggcaatggcagcggcgggagcagtcgagcctctcccgattcgctggaagagaagccctctaccacaacgaccacaggtcgtccaacgctcacgcccacgaatggggtgctgtcctccgcctcggcgggcacggggatttccacaggaagcagcgccaagctgagcgaggctggtatgagtgtgatacggtccgtgaaggaggagcgcttgctcaacgtatccagcaagatgctggtgttccatcagcagcgggagcaagagaccaaagcagtggcggctgcagcagcagcagcagcggcgggccatgtgacggttctagtgacgccatcgcgcatcaaatcggagccaccgccgccggcttcaccctcctctacatccagcacacaaagggaaagggaacgggaacgcgatcgagagagggatcgcgaaagggaacgcgagcgggaccgggaccgggaacgggaacgggaacagtccatcagctcctcgcagcagcacctaagtcgggtctccgccagtccacccactcagctgtcccacggcagcctgggacccaacattgtgcagacgcaccatcttcaccagcaactcacacagccgctgacgctgcgcaagagcagcccgcccacagagcacctgctcagtcagtccatgcaacatctcacacagcagcaggcgatccacctgcatcacctacttggccagcagcagcagcagcagcaggcgtcgcatccccagcagcaacagcagcagcaacactcgccccactccctggtgcgggtgaaaaaggaaccgaatgttggtcagcggcacttatcgccgcatcaccaacaacagtcgccactcctgcagcaccaccaacagcagcagcagcagcaacaacaacagcaacagcatctgcatcagcaacagcaacagcagcagcatcaccagcagcagccccaggcactggccctgatgcatccggcttccctggcgctaaggaacagcaatcgggatgcggccattctgtttcgggtgaagagcgaagtgcaccagcaggtggccgccgggctgccgcatctgatgcagtccgctggtggggcagcggccgccgccgcagcagctgtggccgctcagcgaatggtatgcttcagcaatgccaggatcaatggcgttaagccggaggtgattggaggaccgctgggcaacctgcggcccgtgggcgtcggtggcggaaacggaagtggctccgtgcagtgcccctcgccgcatccatcctcctcgtcgtcatcctcgcagctgtcgccgcagacgccctcccagacgccgccccgaggcacgcccaccgtcataatgggcgagagctgcggggtgcgcaccatggtctggggctacgagcctccgccaccctcggcgggccagtcccacggccagcacccgcaacagcaacagcagtcgccccaccaccagccgcaacaacaacagcagcagcaacaacagcagtcgcagcagcaacagcaacagcagcagcaacagtcgctgggccagcagcagcactgcctctcctcgccgtcggcgggatcgctgacgccctcctcttcgtccggcggtggttcggtatctggcggcggagtgggcggaccactcacaccctcctcggtggcgccgcagaataacgaggaggccgcccaactcctgctctccctgggacagacacgcatccaggacatgagatcacgggccacaccccttccgcacaccgcacgcccttaatatggagcggctgtgggcgggagactactcgcaattgccgcccggccagctgcaggctctgaatctcagtgcccaacagcagcagtggggcagcagcaactccacgggtcttggtggcgtaggcggcggcatgggcggacgcaacctggaggcgccgcacgagccgaccgacgaggacgaacagccgctcgtttgcatgatctgcgaggacaaggccaccggcctgcactacggcatcatcacctgcgaggggtaagtacgtgctaggcattaagtcagctttccacttctaagcgtttctaaatcttggacatggtaagcaagataagccaaagctccgtcaacatcaatgctaccactttgccccgcatggctaataatcttggaattctcccgacaggtgcaagggcttcttcaagcggacggtgcagaaccgacgagtctacacctgcgtggcggacggcacctgcgagataaccaaagcacagcgcaaccgttgtcagtattgtcgatttaagaagtgcatcgagcagggcatggtgctgcaaggtgagtacttagtcccctggcaggacctcaaggatgcctaaacaggaaaccgttccatttcctttcagccgttcgcgaggatcgcatgccgggcggtcgcaacagtggcgccgtctacaatttgtacaaggtgaagtacaagaagcacaagaagaccaatcagaagcagcagcagcaggccgcccagcagcagcagcagcaggcggcggcgcagcagcagcaccagcaacagcagcagcatcaacagcaccagcaacatcagcaacagcagttgcactcgccgctccaccatcaccaccaccagggccaccagtcgcaccacgcgcagcagcagcaccacccacagctgtcgccgcaccacctgctgtcgccgcagcagcagcaacttgccgccgcggtggcagcagctgcgcagcaccaacagcaacagcaacaacagcagcaacagcagcagcaggccaagctgatgggcggcgtggtggacatgaagcccatgttcctcggccccgctttgaagccggagttgctgcaagcaccccccatgcacagtccggcccagcaacaacaacagcagcagcagcagcagcagcaacagcaggcctcgccgcatctctcgcttagctcaccgcaccagcagcagcagcagcagcagggacagcaccaaaaccaccaccagcaacaaggtgggggtggcggaggagctggtggaggagctcaactgccgccgcacctggtgaacggaacgatactgaagacggccctaaccaatcccagcgagattgtacatctgcgccaccgcctcgactcggcggtcagttcgtccaaggaccgacagatctcgtacgagcacgccttaggcatgatccagacactgatcgactgcgacgcgatggaggacatagccacactgccgcacttcagcgagttccttgaggacaagtcggagattagcgagaaactgtgcaacatcggcgattccatagtccacaagctggtgtcgtggacaaaaaagttgcccttctacctggagatcccggtggagatacataccaaactactgacggacaagtggcacgagatccttatcctgaccacggccgcctaccaggcgttgcatggcaagcggcgtggcgagggaggaggcagcaggcatggttcgccggcgtcaacgccactgagcacgcccactggtacgccgttgagcacaccgataccctcgcccgcccagccactgcacaaggacgacccggagtttgtcagcgaggtgaactcgcacctgagcacactgcaaacctgcttgaccacgctaatgggccagccgatagcgatggagcagctgaagctggacgtcgggcacatggtggacaagatgacccagatcaccatcatgttccggcgaatcaagctcaagatggaggagtacgtctgcctgaaggtttacatactgctaaacaaaggtacgtggttcgatttgcaaaacccattcatacagtgctcatgttaccttctcgttcgttttgtaaatccagcagaagtggaactggagagcatccaggagcggtacgtccaggtgctgcgctcctacctgcaaaactcctcgccgcagaatccgcaggcgaggctcagtgaactgctctcccacataccagaggtaagtgcccactaactatgtatatgtacttcttggcgattcccatttccgacaaagccatcaccatctgtcctgtgattcatcgctctcccctatccccttgcagatccaggctgcggctagcctgctgctcgagagcaagatgttctatgtgcccttcgtgctcaactcggcgagcataaggtagcagatgcttgagcacggactgctgcccaccgccaaccatcagtcggcgccaccacctggtcctgatacgatcccggagcggcagcagcaacagcaacaggagcggcgtcgaagcaggcagcagcagcaccagttgctgcgcaacctgcccaagatcaagatcgagatcggttcccagcgcgatccggaggaagaggagtcggagcaagagctagagcaggagccggagcaagagcaggatgtgcagtcccgaccctcagccgcatccacgtccattttgaagacttcactgctgagcggagcggcggcgacgttggccaccttgacggcggcagccgagcaaatagcccgctcctcggccagctgcgacactgccagggattattcccaaagcagcaacagcagcagcaatagcaacgctgccacaggagcaacaggaactatggccagcggcaggacaggcagcagcaacagtttagaagagagcaaaagacttgagcatcaacaacaacaacaacaacagcagcaacaaccacaacagcatcagcagcaacaatatacatcaatactacacacggccttaatgtcacagcgttccatgccaccagcgacatcagctacatcagcagcagcggcggtcacatcgacgccgacaacggcagcaacaacatcgcctacgcctgcgcatgtgctgaaaacagcggtgaccttagccagtctaagtgagatagccacagcacgtcagcagcagcaggagcagcagcagcaacagcagcagcagcagcagcagcaacaattgctggcgatgcaacagcaacagcaacagctaacgaaactgcccagaaggataatcaactttggcagcaatcacactgccaacactgccaccaaagcattgggagcgggatcagaagcaggagcaggagcaggagtgggcatggccacagcaacggcaacagcaacagttggacgcaatcgccaactgggcctgagtcagggtcaagtggtgaatggtaagcagaaagaattgtgagccttgtgtttgcgataacgtttgtgtacccctcgttaacgctgccagtcaggacagcacgcctgctcaatggcaactgttgcggccgattgcaggcgacagcaggaacaggggccagcaggggcaccaacactgccggcagcaacacggtcaacatgcagacccagaccgacgatgagttgctgccgctgttagccatgctcccacaagacgctcccacaacaacaggagcagcagcaggagcagcagtatcattatcattattagccacagccacagccacaaccacatcttcatcatcatcatcatcatcatcattatcatcatcatcgacgatttcattagcaacacgtgcagcagcagtaatgcagcagcagcaacaatggactgccgtgtcgacgacgccagcaacaggagtgatgatgacgacgacgacgacacaatcacaatcacaagcaacattagcaccacaacaacagcaactatcactgccacaacaaaagcaacaatttaatacgagaataaacagaaaaacaacaattacaacagccaccacaacagcaccaacagcaacaacagcaacaacaacaacaacacgaaacagcaacatcaacttcaacagcaacaataactatatgaataacaataatataaacgccgccactgccagagcctctgccttcgcctccgcctctgccatggccacggccacgcccacaggcacacccactgccacgggcccgcgccagagaccggccccgcaaccgcccccgcccccgcgcacgcccacagccacctcagcttctgttactgtagttgtgttcaaaacaatgttacctgatgactgaattattttagaatcgtacacatagagcatgttttattatgattaccactatgattaccacttacgatttacgattacgattatgattacgattatgagtatgtctggatatcattacctattaactattcat

SEQ ID NO: 24989 - DNA, 5049 bp, DROSOPHILA
atgacactgagccgtggcccgtacagcgagctcgataaaatgagcctttttcaagacctcaaactcaaacggcgcaaaatcgattcgcgatgcagcagtgacggcgagtccatagcggacacgtccacctcgtcgccggacctgctggcgcccatgtcgccgaagctctgcgacagcggctcggcgggggcgtcgctgggggcatcgctgcccctgccgctggccctgcccctgccaatggccctgccactgcccatgtcgctgcccctgcccctcacggcggcatcttcggcggtcaccgtttcgctggcagcggtcgtggccgcggtggccgagacgggtggcgcgggcgcgggaggagctgggacagcagtaacagcgtcgggagcaggaccatgcgtctccacgtcgtctacgacggcagcggcagccacatcctcgacctcctcgctctcgtcctcctcctcttcgtcatcctccacgtcctccagcacttcctccgcctcgccgacagctggagcctcctccacggccacctgccccgccagcagcagcagcagcagtggaaacggaagtgggggcaaaagtggtagcatcaagcaggagcacacggagatacactcgtcgagcagtgcgatttcggcggccgccgcctcaacggtgatgtcaccgccgcccgctgaggcgacgagatccagtccagccacgcccgagggaggcggaccagctggcgacggaagtggagcaacgggaggcggaaacacgagcggcggatcaacggctggagtggccattaatgaacaccaaaacaatggcaatggcagcggcgggagcagtcgagcctctcccgattcgctggaagagaagccctctaccacaacgaccacaggtcgtccaacgctcacgcccacgaatggggtgctgtcctccgcctcggcgggcacggggatttccacaggaagcagcgccaagctgagcgaggctggtatgagtgtgatacggtccgtgaaggaggagcgcttgctcaacgtatccagcaagatgctggtgttccatcagcagcgggagcaagagaccaaagcagtggcggctgcagcagcagcagcagcggcgggccatgtgacggttctagtgacgccatcgcgcatcaaatcggagccaccgccgccggcttcaccctcctctacatccagcacacaaagggaaagggaacgggaacgcgatcgagagagggatcgcgaaagggaacgcgagcgggaccgggaccgggaacgggaacgggaacagtccatcagctcctcgcagcagcacctaagtcgggtctccgccagtccacccactcagctgtcccacggcagcctgggacccaacattgtgcagacgcaccatcttcaccagcaactcacacagccgctgacgctgcgcaagagcagcccgcccacagagcacctgctcagtcagtccatgcaacatctcacacagcagcaggcgatccacctgcatcacctacttggccagcagcagcagcagcagcaggcgtcgcatccccagcagcaacagcagcagcaacactcgccccactccctggtgcgggtgaaaaaggaaccgaatgttggtcagcggcacttatcgccgcatcaccaacaacagtcgccactcctgcagcaccaccaacagcagcagcagcagcaacaacaacagcaacagcatctgcatcagcaacagcaacagcagcagcatcaccagcagcagccccaggcactggccctgatgcatccggcttccctggcgctaaggaacagcaatcgggatgcggccattctgtttcgggtgaagagcgaagtgcaccagcaggtggccgccgggctgccgcatctgatgcagtccgctggtggggcagcggccgccgccgcagcagctgtggccgctcagcgaatggtatgcttcagcaatgccaggatcaatggcgttaagccggaggtgattggaggaccgctgggcaacctgcggcccgtgggcgtcggtggcggaaacggaagtggctccgtgcagtgcccctcgccgcatccatcctcctcgtcgtcatcctcgcagctgtcgccgcagacgccctcccagacgccgccccgaggcacgcccaccgtcataatgggcgagagctgcggggtgcgcaccatggtctggggctacgagcctccgccaccctcggcgggccagtcccacggccagcacccgcaacagcaacagcagtcgccccaccaccagccgcaacaacaacagcagcagcaacaacagcagtcgcagcagcaacagcaacagcagcagcaacagtcgctgggccagcagcagcactgcctctcctcgccgtcggcgggatcgctgacgccctcctcttcgtccggcggtggttcggtatctggcggcggagtgggcggaccactcacaccctcctcgctgcaggctctgaatctcagtgcccaacagcagcagtggggcagcagcaactccacgggtcttggtggcgtaggcggcggcatgggcggacgcaacctggaggcgccgcacgagccgaccgacgaggacgaacagccgctcgtttgcatgatctgcgaggacaaggccaccggcctgcactacggcatcatcacctgcgaggggtgcaagggcttcttcaagcggacggtgcagaaccgacgagtctacacctgcgtggcggacggcacctgcgagataaccaaagcacagcgcaaccgttgtcagtattgtcgatttaagaagtgcatcgagcagggcatggtgctgcaagccgttcgcgaggatcgcatgccgggcggtcgcaacagtggcgccgtctacaatttgtacaaggccaagctgatgggcggcgtggtggacatgaagcccatgttcctcggccccgctttgaagccggagttgctgcaagcaccccccatgcacagtccggcccagcaacaacaacagcagcagcagcagcagcagcaacagcaggcctcgccgcatctctcgcttagctcaccgcaccagcagcagcagcagcagcagggacagcaccaaaaccaccaccagcaacaaggtgggggtggcggaggagctggtggaggagctcaactgccgccgcacctggtgaacggaacgatactgaagacggccctaaccaatcccagcgagattgtacatctgcgccaccgcctcgactcggcggtcagttcgtccaaggaccgacagatctcgtacgagcacgccttaggcatgatccagacactgatcgactgcgacgcgatggaggacatagccacactgccgcacttcagcgagttccttgaggacaagtcggagattagcgagaaactgtgcaacatcggcgattccatagtccacaagctggtgtcgtggacaaaaaagttgcccttctacctggagatcccggtggagatacataccaaactactgacggacaagtggcacgagatccttatcctgaccacggccgcctaccaggcgttgcatggcaagcggcgtggcgagggaggaggcagcaggcatggttcgccggcgtcaacgccactgagcacgcccactggtacgccgttgagcacaccgataccctcgcccgcccagccactgcacaaggacgacccggagtttgtcagcgaggtgaactcgcacctgagcacactgcaaacctgcttgaccacgctaatgggccagccgatagcgatggagcagctgaagctggacgtcgggcacatggtggacaagatgacccagatcaccatcatgttccggcgaatcaagctcaagatggaggagtacgtctgcctgaaggtttacatactgctaaacaaaggtacgtggttcgatttgcaaaacccattcatacagtgctcatgttaccttctcgttcgttttgtaaatccagcagaagtggaactggagagcatccaggagcggtacgtccaggtgctgcgctcctacctgcaaaactcctcgccgcagaatccgcaggcgaggctcagtgaactgctctcccacataccagagatccaggctgcggctagcctgctgctcgagagcaagatgttctatgtgcccttcgtgctcaactcggcgagcataagcggcgtcgaagcaggcagcagcagcaccagttgctgcgcaacctgcccaagatcaagatcgagatcggttcccagcgcgatccggaggaagaggagtcggagcaagagctagagcaggagccggagcaagagcaggatgtgcagtcccgaccctcagccgcatccacgtccattttgaagacttcactgctgagcggagcggcggcgacgttggccaccttgacggcggcagccgagcaaatagcccgctcctcggccagctgcgacactgccagggattattcccaaagcagcaacagcagcagcaatagcaacgctgccacaggagcaacaggaactatggccagcggcaggacaggcagcagcaacagtttagaagagagcaaaagacttgagcatcaacaacaacaacaacaacagcagcaacaaccacaacagcatcagcagcaacaatatacatcaatactacacacggccttaatgtcacagcgttccatgccaccagcgacatcagctacatcagcagcagcggcggtcacatcgacgccgacaacggcagcaacaacatcgcctacgcctgcgcatgtgctgaaaacagcggtgaccttagccagtctaagtgagatagccacagcacgtcagcagcagcaggagcagcagcagcaacagcagcagcagcagcagcagcaacaattgctggcgatgcaacagcaacagcaacagctaacgaaactgcccagaaggataatcaactttggcagcaatcacactgccaacactgccaccaaagcattgggagcgggatcagaagcaggagcaggagcaggagtgggcatggccacagcaacggcaacagcaacagttggacgcaatcgccaactgggcctgagtcagggtcaagtggtgaatg

SEQ ID NO: 24990 - protein, 1416 aa, DROSOPHILA
MTLSRGPYSELDKMSLFQDLKLKRRKIDSRCSSDGESIADTSTSSPDLLAPMSPKLCDSGSAGASLGASLPLPLALPLPMALPLPMSLPLPLTAASSAVTVSLAAVVAAVAETGGAGAGGAGTAVTASGAGPCVSTSSTTAAAATSSTSSLSSSSSSSSSTSSSTSSASPTAGASSTATCPASSSSSSGNGSGGKSGSIKQEHTEIHSSSSAISAAAASTVMSPPPAEATRSSPATPEGGGPAGDGSGATGGGNTSGGSTAGVAINEHQNNGNGSGGSSRASPDSLEEKPSTTTTTGRPTLTPTNGVLSSASAGTGISTGSSAKLSEAGMSVIRSVKEERLLNVSSKMLVFHQQREQETKAVAAAAAAAAAGHVTVLVTPSRIKSEPPPPASPSSTSSTQRERERERDRERDRERERERDRDREREREQSISSSQQHLSRVSASPPTQLSHGSLGPNIVQTHHLHQQLTQPLTLRKSSPPTEHLLSQSMQHLTQQQAIHLHHLLGQQQQQQQASHPQQQQQQQHSPHSLVRVKKEPNVGQRHLSPHHQQQSPLLQHHQQQQQQQQQQQQHLHQQQQQQQHHQQQPQALALMHPASLALRNSNRDAAILFRVKSEVHQQVAAGLPHLMQSAGGAAAAAAAAVAAQRMVCFSNARINGVKPEVIGGPLGNLRPVGVGGGNGSGSVQCPSPHPSSSSSSSQLSPQTPSQTPPRGTPTVIMGESCGVRTMVWGYEPPPPSAGQSHGQHPQQQQQSPHHQPQQQQQQQQQQSQQQQQQQQQQSLGQQQHCLSSPSAGSLTPSSSSGGGSVSGGGVGGPLTPSSLQALNLSAQQQQWGSSNSTGLGGVGGGMGGRNLEAPHEPTDEDEQPLVCMICEDKATGLHYGIITCEGCKGFFKRTVQNRRVYTCVADGTCEITKAQRNRCQYCRFKKCIEQGMVLQAVREDRMPGGRNSGAVYNLYKAKLMGGVVDMKPMFLGPALKPELLQAPPMHSPAQQQQQQQQQQQQQQASPHLSLSSPHQQQQQQQGQHQNHHQQQGGGGGGAGGGAQLPPHLVNGTILKTALTNPSEIVHLRHRLDSAVSSSKDRQISYEHALGMIQTLIDCDAMEDIATLPHFSEFLEDKSEISEKLCNIGDSIVHKLVSWTKKLPFYLEIPVEIHTKLLTDKWHEILILTTAAYQALHGKRRGEGGGSRHGSPASTPLSTPTGTPLSTPIPSPAQPLHKDDPEFVSEVNSHLSTLQTCLTTLMGQPIAMEQLKLDVGHMVDKMTQITIMFRRIKLKMEEYVCLKVYILLNKGTWFDLQNPFIQCSCYLLVRFVNPAEVELESIQERYVQVLRSYLQNSSPQNPQARLSELLSHIPEIQAAASLLLESKMFYVPFVLNSASISGVEAGSSSTSCCATCPRSRSRSVPSAIRRKRSRSKS

SEQ ID NO: 24991 - DNA, 4063 bp, DROSOPHILA
agttcctctcccggcatcccgtctcgtctccagagacgatgagtcatctgttgattagacgctcttgcagcggtgtgattatactttctaagtgtctcatgctttgcagttggaattaccatctacgtacgctaccgtcaggtgctgcagctttatgaacaccatccggatttggacgggtcggtgctgcgccagaaccgactagccttgtggttcggactggtgtcctgcctgggcattagcttcgtgggcaactttcaggagacgaacgtgcggattgtccacttcatcggagccttctgctgcttcggctgcggcaccttgtacttttggatgcaggcgctcatctcgtatctgatcttccccatgtcgggtacccgcattaacgctcacttgcggctgggcatgtccgttgtctgcacgatcctgttcatcctgctggcggtcaccggcgtgatgtcgcacatcctcttcaaaggacagaatcctcgaaagtggtgagtctgcagactgtcttttctatcagggagatacttacgattgacctctcgactcgtcattttaggtatccctcggacggcggctggtacttccacgtggtcagctctatttcagagtgggtcatcgccaccgtcttcagcttctttatcctctccttcacgaatgagttccgcgacgtgtcgctgtcgcatccccagattgccctgatgtcctattcgaccaccatctagagcttaccttcatagatcagaagatcagatagtagagatcagcgtctgaagtaggcagcggttccttcaccttcaacattttaagtacaatctaaggtggcaagagcacgggcctcgaggacgatgtgctgagcggctgatgtgcactgcggcctctcgcctgcctttcctctctttccggtgctctttctctgtcggattgctgtgatatgtgcaaagtgtttcccaaagactgggatcgggtagttcgaagtgacagaatgctttttgattgaagagttacatttattgtttacccgcgttcgttttttcaatacacattagcattactaaatcggtagaaataatctgtaaatttgtaaaataaagagcaattaaatataagggagtgtttgtctcgcttgtctatcaatcactagcgcttgcgatccctggagcgatcgccatcccgatgcttgtgcccccctcggctgccgtggttcccgttgcctccaccgccgccaccacctcctcctccgcttcttccgtctccaccaccaccgctgttccgacgcgacgaggaggaggagtaccgactgtgcttgccggaattggagacggagttgcgatacttgtcgccatcacctagattattgctactgcctgggtttccagaccgatctttcttggagtagtattcagagcgttctcgcgaggatttcctgaaaggaataagtgctaataagtccacccagttcctaaaccgttagagtacatacgacttcctgtgcttgctgtgcggcgaattggagcgcgtgggcgacctcgagtagtgacgtgactttttcttatgcttcggcggcgaacgggagcgcgagcgggaggatcgactgcggtgggtcttcttagtgcgctcgcgactaggcgacctggacctgggtgatcgggagcgaggtgtccgcgaatgggtgcgcgtcctggatcgcgagcgtgacctcgaatccttttgcggcgacttttccgatggcaagggcagtgggatagcacgctggatgaagccaccccacgcattgtgcgagccattgttccgatccacggtgattacagccggcggtgtgtttgcctccttcgttttgttgcgcgcatcaatgtaccgctttttcagctcgtccacggccgcctccagtttctccaccaccggcttggaacgcatgtacagctccatcacacggtagcagatatccgtaatgtccgccatgggcacccgaaaaatgccgaaccacggcgggctgttgggcagaggtatgttgagcttgcgggcactcaggtagatgcaggcgcatgcaatcgcctctggtgtgtagcgcataaaaacgtccgtcctcagcgagtcattcatgaagttccaggagagctgcatcagcttctcgtgcttctcgtactgaagcacctgcagatacatcacgatcagcttgtgcggatgcttcacgtgtacacagaagcccagttccttgaggacgcgccgctcggccttgatcacctgcatcttgaggttcgtgtagtaaggatctagcaccatgggcgagatttccctacggaacaatataagcaataagtgtttattgggtgttagatgcttggattgtcaggagaagcacttacttttgggcccgcacttgcttgatgtgatggaacacattgatcacgtctctaatgcggcgcggcgcctcctcgatcttggacgccaggcacacgcagctcatggccacagtctccatgttgtgccgcacaaagctcttcgagtagaagaagcgctggaacagcacctggccggtggccatggcaacctgcggcaagcgcagcaaaattccggctgtctgaataagctcgcagcccagtatgcgcaggtccttctccgtctcatggtccagtccatcctggctggatggcgtcacatcgattttgccctccggaatgaggctgttctccagcgtcagcacgatgcggttaaagagccgaggatagataggcttgttggcgtccgcctgagccgctgccacgccccctgcatcgccgccagctgcatccgcccccggggccgctccactgctgctgttgttgttcgaaatgttgacgctgttcgaatggaacgaagtcaccgtggtcaggacattggtgatcgtctccaccgtcagcgctgtcaccgtcgtgtggaccacagtcgagccggccccacgggtggccattcgtgcgcggttaacccaggaaagcgtttatttaagtgttttaattttttaattttccctttttttttgtaaatttagccgataacaggcgtgcttttatactaaatcgttatcgtcggccctgccaccgaattgatgtcaataatttcctaaattataccacaagcgtttagaaatcccatatggtttgtgtctaaataaggggtggtgggtgcatcgactacaccagcgttgccatattttgtaacagacaaatgtactaaatatcacctaaaacggtatttggtggtcttccgtttatggtcacaccactctcagtcgaaattagttgtgaaggtaagcggttcgctggctggtcgcagaaacgcaaattgtagaaagaaaacattataatcagccgcgtctaagtgcaagtgtgatttatttcttttttgtttggtgtttagtgtgctcgtgagcagatcagtggatcaaacaaacagccagaaaatcgagcgctgggcaagcggaataaatccaattggaattgtccgaaccgcagttttacggagtcgagtgttccgtgtttcgtattccggggcattttccccgccgaaagccccgctcaaccccccaagcaaacagccgaattaggggttgcaaagtttttgcagccagcccggaaaagtcagaggaacttgttttctaagggaagaaaagggaagcacgcaagcgacgactgcccccaaagaccaaacggaatcggagtctgaatcggaatcggaaggggactccgccgaatccttgagagaatcttttgcgcgtgccatgcgtgacctcggcaccaaaatggccgagctaaaattcgaggctccattggcaaagttcgaggaaacggacgagtggggcggctgcgacttcatctcgagtcagaatgccataaacgacacgctcaacctgaatctgaaggactcctccgccggcggcaagccggatgccaccaagctgcggctcctagaggatgctgtacgcgatgcgcacgtgagcaagaacggaggaggagtagtgggaggaggagctggctccattagccccaattgcaacacgctccagggtgggtcgcttatt

SEQ ID NO: 24992 - DNA, 1936 bp, DROSOPHILA
atttagtataaaagcacgcctgttatcggctaaatttacaaaaaaaaagggaaaattaaaaaattaaaacacttaaataaacgctttcctgggttaaccgcgcacgaatggccacccgtggggccggctcgactgtggtccacacgacggtgacagcgctgacggtggagacgatcaccaatgtcctgaccacggtgacttcgttccattcgaacagcgtcaacatttcgaacaacaacagcagcagtggagcggccccgggggcggatgcagctggcggcgatgcagggggcgtggcagcggctcaggcggacgccaacaagcctatctatcctcggctctttaaccgcatcgtgctgacgctggagaacagcctcattccggagggcaaaatcgatgtgacgccatccagccaggatggactggaccatgagacggagaaggacctgcgcatactgggctgcgagcttattcagacagccggaattttgctgcgcttgccgcaggttgccatggccaccggccaggtgctgttccagcgcttcttctactcgaagagctttgtgcggcacaacatggagactgtggccatgagctgcgtgtgcctggcgtccaagatcgaggaggcgccgcgccgcattagagacgtgatcaatgtgttccatcacatcaagcaagtgcgggcccaaaaggaaatctcgcccatggtgctagatccttactacacgaacctcaagatgcaggtgatcaaggccgagcggcgcgtcctcaaggaactgggcttctgtgtacacgtgaagcatccgcacaagctgatcgtgatgtatctgcaggtgcttcagtacgagaagcacgagaagctgatgcagctctcctggaacttcatgaatgactcgctgaggacggacgtttttatgcgctacacaccagaggcgattgcatgcgcctgcatctacctgagtgcccgcaagctcaacatacctctgcccaacagcccgccgtggttcggcatttttcgggtgcccatggcggacattacggatatctgctaccgtgtgatggagctgtacatgcgttccaagccggtggtggagaaactggaggcggccgtggacgagctgaaaaagcggtacattgatgcgcgcaacaaaacgaaggaggcaaacacaccgccggctgtaatcaccgtggatcggaacaatggctcgcacaatgcgtggggtggcttcatccagcgtgctatcccactgcccttgccatcggaaaagtcgccgcaaaaggattcgaggtcacgctcgcgatccaggacgcgcacccattcgcggacacctcgctcccgatcacccaggtccaggtcgcctagtcgcgagcgcactaagaagacccaccgcagtcgatcctcccgctcgcgctcccgttcgccgccgaagcataagaaaaagtcacgtcactactcgaggtcgcccacgcgctccaattcgccgcacagcaagcacaggaagtcgaaatcctcgcgagaacgctctgaatactactccaagaaagatcggtctggaaacccaggcagtagcaataatctaggtgatggcgacaagtatcgcaactccgtctccaattccggcaagcacagtcggtactcctcctcctcgtcgcgtcggaacagcggtggtggtggagacggaagaagcggaggaggaggtggtggcggcggtggaggcaacgggaaccacggcagccgaggggggcacaagcatcgggatggcgatcgctccagggatcgcaagcgctagtgattgatagacaagcgagacaaacactcccttatatttaattgctctttattttacaaatttacagattatttctaccgatttagtaatgctaatgtgtattgaaaaaacgaacgcgggtaaacaataaatgtaactcttcaatc

SEQ ID NO: 24993 - protein, 560 aa, DROSOPHILA
MATRGAGSTVVHTTVTALTVETITNVLTTVTSFHSNSVNISNNNSSSGAAPGADAAGGDAGGVAAAQADANKPIYPRLFNRIVLTLENSLIPEGKIDVTPSSQDGLDHETEKDLRILGCELIQTAGILLRLPQVAMATGQVLFQRFFYSKSFVRHNMETVAMSCVCLASKIEEAPRRIRDVINVFHHIKQVRAQKEISPMVLDPYYTNLKMQVIKAERRVLKELGFCVHVKHPHKLIVMYLQVLQYEKHEKLMQLSWNFMNDSLRTDVFMRYTPEAIACACIYLSARKLNIPLPNSPPWFGIFRVPMADITDICYRVMELYMRSKPVVEKLEAAVDELKKRYIDARNKTKEANTPPAVITVDRNNGSHNAWGGFIQRAIPLPLPSEKSPQKDSRSRSRSRTRTHSRTPRSRSPRSRSPSRERTKKTHRSRSSRSRSRSPPKHKKKSRHYSRSPTRSNSPHSKHRKSKSSRERSEYYSKKDRSGNPGSSNNLGDGDKYRNSVSNSGKHSRYSSSSSRRNSGGGGDGRSGGGGGGGGGGNGNHGSRGGHKHRDGDRSRDRKR

SEQ ID NO: 24994 - DNA, 3061 bp, DROSOPHILA
gctttcagcgttttttgcagtgatatttagccaattttattaccacaactacataaagccaggaaagaagtcagcgaaacaaaacaaaaattaactaaatttaaactaaatcatgagtacaaagcctaaagattcgtgaagcaacaatagccacagcctatttttgaatatttcatatatgattttatggggtaaatgaattaaaaaacatttgttttcttggcgtcaaactatttttgaaggcagtctcaccagtgtcatgcaaagggtagttataaaaatagctaaaaatcgaatgcataaaggggaaacgcaggcatgcgactgctaagggaagtgcatgcacaatgcacgtttaatgtcatttaaaacggcaattactcagcacgctcggtggctcggccagttggaggccccattccaggggccaaggaaggacgaaggacgaaggactaaggacgaaggacccgaaaagctagtgcccaaccaggaaccactgcacttgactgcggcttcgctttaatgttgccgcatggccgcaattattcagctggcactttgactctgattcgccgcatgcgattcctatgcaaattcggccggccacgggtgacccttccggtgccataaatcgccggtgctgggccaggctcgttcctaatattctaattaaatgcagcatggaatgtccagagacgtgctcggtccaagttctgcggagcatgcagatcacgtgccaaggggaatcccctcgattcgacgatggaaaccacgagtagtcgagatgtggccgatgggatttattccggacggagtctaactccttgaccttttcgactgcatttgaattaactgtcgatgcatttgaattcatctattattcaaacggcgcatatgcaaattgtcgagtacactcagagaaaccaatgatgtatcactttataattcaaatttaatttaagaagccaatgtattgtaaaagtaataataaaatatttgttgattacaaatacattcttattaaataatacaaaaaaaaaacaggatcaaaggtgggaattttataacaaaaattgtatgaaagttggaaagacactcttcattcctatgcaccccaatagttatgtacatacgaattaccagtttttgatcacagtgtagcaggtgcattcagttgaccttgcccttggacttgacctctttcggccgaatgtaggtctttatgtagaacttggtgaacatcagaaacatgaaggcgctggccgaacttatgacatagatgacaccccgcgacgccgagcagtttggctggaaataggtgtacatgcagtgcaggaacatcaggaggaactgcaccagctggcccagggtaaggtacttcttccaccagaggctctcctgcacattctggctctgcgacgaggcgtagtagtagccgtacatgacgatgtgcaccagaacattgaacatgcagatcaggaagacatggccaccaaaaccgtagaatcggatcagcatgtgcgaggtgaagaccatgaagacgtgatggaacacatggaggaacgtgatctggcgctgcttcttgcgcagcacaaagaatatggtgtccatcaggtcgagcaccttgttcagatggtacatgtacgacagtgtcctttccgtggactttagctcatgatcctgcggcaggacttgcatgcagctcaggttgtacggcttctgcacgaataacagatggatgccctgggtaatatggagcaatccattgaaaacgattaaaaaactgtgtatatcgatatccttcgacttacgtacccacacaaaaatcaccgaattgaacaggacttgtccgatgttgtagaacttgagcacacctcgcagctggagtgcctcatgcttgtccatcagcttcctgcccagcttgagcacaaacaatagatacaccgtgatgatgatcaccgaggtgcggatactgcccgccagcggcagctggacaggatcggcgaagggcttatcgaacacctcgaacattttcgcgcacgacttaacgagtgacttgacttttaccttctgtgatttctttctttcacgatagccactatactattacctatttgctaattacattagtgcaaatttccggtatgtttaacccactatcaaccttcaacttgaatacttaaagctttgcaaatcgaactaaatacaatataagtaacagttcaactacgtttttattttcaacattttattaatcagcagtgccattatttacaaaattactccttttgacattattgtcaatacaacaaaaaaagtgttctacatttataaaatactggcgagacccaattaaaggggtattttgcatatttaatagcattaagcagtcgagtggatagagagttctagaaaccaacaaatatctcccattgctttatgtaaaatatatatctatgtataatatacgatatatacaatgatataaaacaaatgaatttgttgtatcaaaagcatttattaatgacattgattaatgtaaggaacagtgatattaaatcttaattagttttgctcatcggcccaccgccgatttcgttttcttgggaagaatgtaggtgcgaacgtagaagttactaaatagaattataaatactacagatatcagtgagccccaagttgccgataatcgtgatgtttgacaatcagtttgccggaggatatagacgctgtgcgagaatataataacaaattggacaagctgaacgactgtgatgtatttcttccaccagagatcgccacccgagttccgattgagggacgactggtagtagtaggtgtacatcatggtgtgcaccaccacgttgaaggtgatcaagaagaatccatggccgccgtatccataataatacatgtacaagaagcctatgtacaccatgtatacgtggtggaaaacgtgcaggaacgatatctggcgatacttctttctgaatataaagaacacagtctccagcagatccatgagcttgttgaagaagtaggagtaactgagccaacgctc

SEQ ID NO: 24995 - DNA, 989 bp, DROSOPHILA
gtcaagtcactcgttaagtcgtgcgcgaaaatgttcgaggtgttcgataagcccttcgccgatcctgtccagctgccgctggcgggcagtatccgcacctcggtgatcatcatcacggtgtatctattgtttgtgctcaagctgggcaggaagctgatggacaagcatgaggcactccagctgcgaggtgtgctcaagttctacaacatcggacaagtcctgttcaattcggtgatttttgtgtggggcatccatctgttattcgtgcagaagccgtacaacctgagctgcatgcaagtcctgccgcaggatcatgagctaaagtccacggaaaggacactgtcgtacatgtaccatctgaacaaggtgctcgacctgatggacaccatattctttgtgctgcgcaagaagcagcgccagatcacgttcctccatgtgttccatcacgtcttcatggtcttcacctcgcacatgctgatccgattctacggttttggtggccatgtcttcctgatctgcatgttcaatgttctggtgcacatcgtcatgtacggctactactacgcctcgtcgcagagccagaatgtgcaggagagcctctggtggaagaagtaccttaccctgggccagctggtgcagttcctcctgatgttcctgcactgcatgtacacctatttccagccaaactgctcggcgtcgcggggtgtcatctatgtcataagttcggccagcgccttcatgtttctgatgttcaccaagttctacataaagacctacattcggccgaaagaggtcaagtccaagggcaaggtcaactgaatgcacctgctacactgtgatcaaaaactggtaattcgtatgtacataactattggggtgcataggaatgaagagtgtctttccaactttcatacaatttttgttataaaattcccacctttgatcctgttttttttttgtattatttaataagaatgtatttgtaatca

SEQ ID NO: 24996 - protein, 262 aa, DROSOPHILA
MFEVFDKPFADPVQLPLAGSIRTSVIIITVYLLFVLKLGRKLMDKHEALQLRGVLKFYNIGQVLFNSVIFVWGIHLLFVQKPYNLSCMQVLPQDHELKSTERTLSYMYHLNKVLDLMDTIFFVLRKKQRQITFLHVFHHVFMVFTSHMLIRFYGFGGHVFLICMFNVLVHIVMYGYYYASSQSQNVQESLWWKKYLTLGQLVQFLLMFLHCMYTYFQPNCSASRGVIYVISSASAFMFLMFTKFYIKTYIRPKEVKSKGKVN

SEQ ID NO: 24997 - DNA, 2846 bp, DROSOPHILA
tagaggcaacataaaaatatagactgtgttccatacttaccacatcctttgcttccagggtcttcactttttgttcgtcctgaaggcctacgacctgcgatgcatcaccaaactgccgctggatcacgagctgaagagccgagaaagatggttgacctactcgtacttcttcaacaagttcatggatctgctggagactgtgttctttgtgctgcgcaagaaggatcgccagatatccttcctgcacgtcttccaccacctggtgatgtcctttggcggatacctgcacattaccttcaacggctatggaggcactctgttcccattatgcctgctcaatgtggcggtccatgtgatcatgtacgcctactactacctgtcctccgtcagcaaggatgtgcagacgagtcggtggaagaagtacatcaccattgtccagctggtccagttcatcctggtgctggcgaactttagctacaccctgatgcagcccgattgcaatgcctcccgaactgtgatatatactggcatgttcatttccacgaccttcatcctgatgtttgccaacttctacattcacaactacatactgaatggaagcaaacagaagagcgcgttgaaatccgattgaggccgcaaatcctttgaatgacggtgactgtgtgtttcgcgataccgactaactaataaacttgcattggagcactcagcaccaagactctactgggcaccgtattcacagctatctcagcactagccctggccaagttactcgctagtcttttaatatcttgaagtcacttagcatatccacgagttgtggtacttgaaaatcaaagcgtggatagaacgcttcccgaattcccatttaaaatgcacactacggcatacgaatgtaaatgctccatttaaagaaacattgtaacaatttgtgccacttaaggtcgagagcctaatttcgagtttggattagtcactatcaatcgcacaactcgattagattcgccatgttcgctccgatagatcctgtaaagatacccgttgtaagcaatccatggataaccatgggcacattgattggctatctgctgtttgtgctcaagctgggccccaaaatcatggagcaccgaaagcccttccatttgaatggcgtcatcaggatctacaacatattccagatcctttacaatggtctaatactcgttttagtaagtatttgaactggggcttctggacatctgcaggttctgatgggaggatgctacttttacagggagttcacttcctgtttgtcctgaaagcctaccaaatcagttgcattgttagcctgccgatggatcacaaatataaggatagagagcgtttgatttgcactttgtacctggtgaacaaattcgtagaccttgtggaaaccattttctttgtgctccgcaaaaaggacagacagatatccttcctgcacgtcttccatcattttgcgatggcattttttggatatctctactactgcttccacggatacggtggcgttgcctttccacagtgcctgctaaacaccgccgtccacgtgattatgtacgcctactactatctatcctcgatcagcaaggaggtgcagagaagtctctggtggaagaaatacatcacaattgctcagctggtccagttcgccattattctgctccactgtaccatcacgctggcacagcccaactgcgcggtcaacagacccttgacctacggatgcggatcgctttcagcgttttttgcagtgatatttagccaattttattaccacaactacataaagccaggaaagaagtcagcgaaacaaaacaaaaattaactaaatttaaactaaatcatgagtacaaagcctaaagattcgtgaagcaacaatagccacagcctatttttgaatatttcatatatgattttatggggtaaatgaattaaaaaacatttgttttcttggcgtcaaactatttttgaaggcagtctcaccagtgtcatgcaaagggtagttataaaaatagctaaaaatcgaatgcataaaggggaaacgcaggcatgcgactgctaagggaagtgcatgcacaatgcacgtttaatgtcatttaaaacggcaattactcagcacgctcggtggctcggccagttggaggccccattccaggggccaaggaaggacgaaggacgaaggactaaggacgaaggacccgaaaagctagtgcccaaccaggaaccactgcacttgactgcggcttcgctttaatgttgccgcatggccgcaattattcagctggcactttgactctgattcgccgcatgcgattcctatgcaaattcggccggccacgggtgacccttccggtgccataaatcgccggtgctgggccaggctcgttcctaatattctaattaaatgcagcatggaatgtccagagacgtgctcggtccaagttctgcggagcatgcagatcacgtgccaaggggaatcccctcgattcgacgatggaaaccacgagtagtcgagatgtggccgatgggatttattccggacggagtctaactccttgaccttttcgactgcatttgaattaactgtcgatgcatttgaattcatctattattcaaacggcgcatatgcaaattgtcgagtacactcagagaaaccaatgatgtatcactttataattcaaatttaatttaagaagccaatgtattgtaaaagtaataataaaatatttgttgattacaaatacattcttattaaataatacaaaaaaaaaacaggatcaaaggtgggaattttataacaaaaattgtatgaaagttggaaagac

SEQ ID NO: 24998 - DNA, 781 bp, DROSOPHILA
attcgccatgttcgctccgatagatcctgtaaagatacccgttgtaagcaatccatggataaccatgggcacattgattggctatctgctgtttgtgctcaagctgggccccaaaatcatggagcaccgaaagcccttccatttgaatggcgtcatcaggatctacaacatattccagatcctttacaatggtctaatactcgttttaggagttcacttcctgtttgtcctgaaagcctaccaaatcagttgcattgttagcctgccgatggatcacaaatataaggatagagagcgtttgatttgcactttgtacctggtgaacaaattcgtagaccttgtggaaaccattttctttgtgctccgcaaaaaggacagacagatatccttcctgcacgtcttccatcattttgcgatggcattttttggatatctctactactgcttccacggatacggtggcgttgcctttccacagtgcctgctaaacaccgccgtccacgtgattatgtacgcctactactatctatcctcgatcagcaaggaggtgcagagaagtctctggtggaagaaatacatcacaattgctcagctggtccagttcgccattattctgctccactgtaccatcacgctggcacagcccaactgcgcggtcaacagacccttgacctacggatgcggatcgctttcagcgttttttgcagtgatatttagccaattttattaccacaactacataaagccaggaaagaagtcagcgaaacaaaacaaaaattaa

SEQ ID NO: 24999 - protein, 257 aa, DROSOPHILA
MFAPIDPVKIPVVSNPWITMGTLIGYLLFVLKLGPKIMEHRKPFHLNGVIRIYNIFQILYNGLILVLGVHFLFVLKAYQISCIVSLPMDHKYKDRERLICTLYLVNKFVDLVETIFFVLRKKDRQISFLHVFHHFAMAFFGYLYYCFHGYGGVAFPQCLLNTAVHVIMYAYYYLSSISKEVQRSLWWKKYITIAQLVQFAIILLHCTITLAQPNCAVNRPLTYGCGSLSAFFAVIFSQFYYHNYIKPGKKSAKQNKN

SEQ ID NO: 25000 - DNA, 2335 bp, DROSOPHILA
aagacatctccatctgataacaaagcgttcagcttctcgtcttctgcagctttcggagcagtgcccttttcaagctccacctctaggacatcgtcttttttatcaacaattttgtgttcttcgatttccgttaagctaatacgcttgtgaccttttaatgtattctcaattttgtattcttctgctggtcgacttattgactcctcgacgtcctgatctacctccatgccaggaggttcttgctcattttccttattggtcttttcatctttttcaggaaaactttcggatgtgggactgctgatgctgctatcagtcatttcctcggcctctttagccgcagcttcattgacagcatctggttttggcggatctttctcactttcgttggcggaggagaatttgacaggactctctattagctcaacactgctgtccgaatccacagctaccaaaaccgggctgcttgcaatggctttcgtgttctctcccttgcggtcctccgattcgtcggccaactttccaggttcatcaggggccttacctccatatgggcactgcttcctggttgaaccggtggcggcgattgcttcactgtgtgtcagttcctcaatttccacatcctttgcggcttgttctgcaggagactccaagctattttctcctttgcgcaccggcaacccgtaacttttttccctcgacgccggtgtttcttggacatcctccactgtgcttccactgctctctaagcagtccacggctgttggctgcccagacatagttttaatgagtttacttaactttacacattaatgcaaatttgcgagacaagcgataacattgtataaaatttcgctcgtaatttgccagccctagattttagtggcagaaagaagaagagtgtctattcacacaaaagaaaaagaacggaaattcaaaatgttcgctgctgcaatggatttaattttttatttcggtcttcgggagtgggtcctgttcattaggcctcgacgacctttgggtggtagccggtttcatcggcggtgtagaccactttgacggtcttgccgttgggggccacgtactcgtactccccggaaaccacccagttgtcgtgctccttcaaggctccagtttgcacggcgcgaatatggttggatagctcataagcgtagttaaagtccagcaagttaacctcggagtcgctctttacaacatcagcctcctcgttggcgaagaccacggccaaaaggcaggcaagaacgatctaaaagacaaatcgttgttcagaggtccccaaaatctaatttcgatgccacttaccacaaacttcatggttggaaaggggatgtgtgtgctgatagatagcgataaaattttgactgctggttgccgaaaattgcgcttttatatgtagctctccactgacattttaccggccggaatcaccaactgcataaattttcttcataactggctcccagcggtcgtttgtcttaattaaacaaaagacatagatgcagtcattctgcaggcattaattatcgccccactcggcatatcatattcggggggttatctttggagatctgtgcggaagattcccaaaacaaccacgttcatcaattgtcagcaccgcacgattaatttttagctgataagagctaaccggttccttcgatgctaacgccgattagcattattttcgcataactccattagcagtctgattttgctcccgcagttgcaaccggtttctaacaagctgcgattgcaatatggcctgggatttgaatttcttggcgcgcaattagccagtgctggaaaatgtctgggaccgcacagatttgccattcagagggaatcccacgtggtggtgtctgcgtatcggtgtgcactgcaatctcccccagaaatatcacgatggccagtgattctggcagcgattatgaggtggaggctttcttcaatcccaagcgagttcaacgcacagtcaacgacgacagtgcggatctattgggaaacttcgatgaccagaagcgaagggagatcttcgagggcacgtatgtggacaaggaggacggacggaatcccagtgacccggaggatagtaagagcgaggatgaggccaagtccgacgacgaggcagccgctgagggcagtgctgcttccggagccgaggaagaggaatctgcggaaaatgggcagataaccagtgaccagctgagttcactgcttcgaggagcctccaaaaccaacagacacgtcctgtacgtgacgaacctgaacttcgaaaccacaaaggacgacctggagctgcacttctctgcggcag

SEQ ID NO: 25001 - DNA, 279 bp, DROSOPHILA
atgaagtttgtgatcgttcttgcctgccttttggccgtggtcttcgccaacgaggaggctgatgttgtaaagagcgactccgaggttaacttgctggactttaactacgcttatgagctatccaaccatattcgcgccgtgcaaactggagccttgaaggagcacgacaactgggtggtttccggggagtacgagtacgtggcccccaacggcaagaccgtcaaagtggtctacaccgccgatgaaaccggctaccacccaaaggtcgtcgaggcctaa

SEQ ID NO: 25002 - protein, 92 aa, DROSOPHILA
MKFVIVLACLLAVVFANEEADVVKSDSEVNLLDFNYAYELSNHIRAVQTGALKEHDNWVVSGEYEYVAPNGKTVKVVYTADETGYHPKVVEA

SEQ ID NO: 25003 - DNA, 6735 bp, DROSOPHILA
tgacagttgcaatttgtttattcgcaattattagaattaacaatgcatcgatgattgatgcgaaattagcgctgtgcaaacattaacggcacgcagtcatggcaacgcgatattcgagtacgctaaacagcaattagtacgaatgaaatttgatagctcaatagttggcagtcgagcttattaaataattaagcaccgattgccggcaatttatcacaaatgagttgtacgccaaactggggggaaaaaaaagaccactcttccctgcaaccgacccatcatcatcccatcgtataaatctctggaaatacgatcccttgacaggcagctacaattacatccgacaatcgcccgagtatcgataaattaatcaacatccagaagtgttttgcccctctaactaccagctgccattaaatcgcccgttgctattttaagaagcatttcgaatttcttttcctggccaacacggtctgctattaatgttttactggccaatggcatggtcagcggcacagaaaattagcccaaaacgcatatgccataaatcctgaacccggactgagagccagacaaccgctcaaactatgaaacgaaactttattgacccacaaataacgtgcagataattacaaaaacaaaggcaactgcccccaggaaaacaaatgtgtccgttgtgggggatggaaaaaatagagaaaatgtacagcaaaatacagtacaatagaactcgacttggaaatatccaataaatataagtataggtattaagataagtattagtataagtagataagtaagtactatttagattttgaatataataaacacgtttttaagtgtgcttttaagtttgcatgtactaatgatcctgaaaccccgagtgacttgaacatatagccagtcagaccaacgcacccttgatttccgagggtatagggtgtggaaaaaaagcaaaataccatggcaaagtggaaaaactacttacaagtatgttaacatgcgcaattgttgccgttgtccagctccagacctccgggcaaactcgagccaagatggaggagcagcagcagaagcaacaatgccacggaaatcttttcttttccggccacagttttcccgcaccaccagtgcgccactgtgggtttttcccaaagatgctcaagtttatttgttgtggtcatggcagaaagtaatccaaaagataaaatacaataaaataaagggccaaggcggtgagttatgtccgaacttgttgttggcctgcattgagcagtgggcaggtcggatagacaatacaataccttaaagcaacccatacccccatgtgttgtcgtccgtcgagccagtgtgcataatttatatggcgagcttcacatgtttttggctaaattatttccctgactccaaagcacgtgctgctccacggtctccaccggacccaccggacccaccggccttcgggtcaaccgtttgggccataaatttagacgcctgccctgcgacacgctctatgacattattgaacttgaaagggatgcggctgggcagcaaaacaataagcggaaagcggaagactaggtgcagtatcagaggccaagacacacaaaagccactgaattgaccttgtaaactccggttaactgaaaaattgtgtgcatgtgtgctatttgtgctactacagcttaccattgaaccaaagatacttaagaaacgaaattttattacttagaatatttatttcgtatattaatggctataattatgggaatttcttgggaaatttcgctcgaaaatattatcaaataagtcagtcgcatggcctgtggtactgaacaaatctcacaagtatttcagttgcttggcagccgtcagtcggaataatgaatttcgcatcttgtcttgctgtgttatcatggatgctggctaatcagggatcggcacagcttcttgaccagaactgtgccgaagtttcacgtctttctaatgatataatatttagtagaccgtggatggcactggtcttattgcccaataaaacctgcagtggcgccctgattcacaaatgtttgtatataaatgtagatgaaatttaatattttattacaatttagaataccattttagactttgtgataacatcagcaagctgtgttttcaatcaagagagagcgtaagttcattttaattttatacttttatcatacataagctctttcccttcaacagcatcgtccgcttggggcagttgagcattaaacaagagcatattgttagttatagcagtgatgattaccatgtgcaaagtgcctacattcataggttctatgagaaaagcaatttcgagcatgacatagctttgctggaacttcagaacgatgtgctctacaaggcccacatacgtccaatttgcctttggttagacaaatctgatatcgacacacaaatgtttaaaagatatgaaacattccgctggggcatagatgagaagtacatattgcctgcggccaagacaagcaaaataaaacacatcagccaagtcaagtgcgaaaatgccttcaaattgtatccgcagaattcgcatatctgtgctggctataagaacaaaagcaagtgcgtggaaacaggaagtcccttgtttaaaaagatacgctattacacaaaaattcgttacactctattcggaattcagagttatggcgaatcgaggacgtgtttatataccgatgtgacgaaatacattgactggattatgggagtcattcaaaatgttaatgtgatagtgtcgaatggggaaaatagctacgcttaagattctttaataaactgattcaaaatgcaatgacatacataacgttttagtggcacatttatggtagcgtgttttagaatttacataaatcgaaagcgaaggcaatctgcatttcgagaacaatacaacattactgataagctttgactttccgtctctatgtttgtacattagattgtacatacattgtacactgagattgcttcagtgcttacgaatcagttcgtttgttaagatgactgcgggatcattgtgttttctgttcactttggtgctagcacatcaaggatcggcctatttcttagacttcgaatgcgttaaccacaagccgcatcaggatgtttttaaagaaacaccttggatggcatttattgcatctcccacaaaaaactgtagcggaacgcttatcaataaacgtttgtacactgcgtgaattttcaaaaaaaaaacaaaaaaaaaacatattaagggtgtcctttgtttcagaatatgtcataacaactgctagttgcgttttcgatcaaagcgaaaggtaagcaagtggaaacctcgaaaagcagcccaattatactaagcccaaataccttctgcagcaccgtttttttgggaaggtttgacaatataccacaaaatcgaaatagatacgtcaagcattccgtccaaagcgtctacactcacaaactgtataataaacagactttcgagcacgatatagctctactcttgttagatgatcctgtgacttttaaaatgagcatacagccaatatgcatttggttgggtgagataaccaacttgaaccatttggaatccaaccgatggggcttatccgaaaaaatgattttccaaagaatcaacaccgttaaaattctgaaaattaaaaagtgccgcgattcatttggaataactctgaaaaaatcgcagatatgcgctggctttcaaaacggtaacatctgtacggagacaggaagttcgttggttaagcagatacattactcgggtaaactttggaacacattaatcggaattcagagctatggcgtttcggaaaggtgtatatataataaaatcgcacactatattgactggattgtgggagtcgtgctgaatgtagatgttatactcctcaattctagcgattctggaagcgatcctagactagattagtaaactatttgtaatccatataatatcatagatatacctaccgcttttgtacaagttttatggctgaaattatatagcgtatttttaagcatcaccttggcacattttatgagacaagcgagcacatacttttgggccagcaggcaatcttattgcctttaaggccaaaactgctgctgccttgttgctatttttgctacttatgttgttgtggctgcaattgctttgggaccatttagcatttttcaagtaaccacatggggctaagaccgacagcggatagggcacgaaccttaatagccacaaagaggtggcaaacggagatgccggtcggtgctgaagtattacgaaactctaaacaggcgcaaaagtttcgccaaagaaaatgctcttaatttgatttcttcaacgcccctggagtgcagtattgcgggcaggcgtctaaatgtgcgtgtattttataaatatatatccctacacatagaacggtatataaagcagggcccgacttagggcagacaaggtctcataaaaaggcttgggcacaaaagtttttaataaagtttttacaccctagctacgagcataaaggcggccagtaaaccaggggggttgggtaaaatggaaataattgaggcaatttgttacgcaggaaataaaggtaagggcaccggtacgggcgatgcaagcttggtttccccatcttcatcctcctgccagatgtaaagccttgaaataaccaaataatcgctctgatcctgcccacaaagatgtcaactttctacgtggaacttcttgaaccagcaacgctggcgatgcttgaagtttcgaggtcgcaaagtgcgcgcacatagcaatatgcagcgttcccactgcagtttgaatttcatttcaaaacaatttgtaacagtctcctccatatcttttatatagacacactcgcacgcaggctcgcggcaatcgaagtttggtttggcagctaagcaaatttgttgcaagtctgccattgccactgccgcgtcagcagtgcaaggatacgcctcctgaattctgcatcctgcatcccattcgatcagatccgcttacgatgcactgtagaaaaagtgcaaagcaaaaatataaataataattgcaattactatttagtaacttatgtggcacttgtagatcaacaagaagttcttggccaattgaactgcactttgtaataatgttcctttttcatttcaagaattcaagaaattttctttgagtgtactatgcgtgtgcatgtcaatagttttgcgcgttcgctgacgctcctcgctgcctttttctttttgatgaattgacaggcaatgctatttgtcagcagtcaatgtgtttgttacattttattgccagctggttgctgctgatgtagctgatgttgctgctgttgctactgttgccgctactgttgctgctgctgatgctgatgttgctgctgttgctgttgctgctgcattgttaatgtcaggcgttagggcatacgctaaacatggggagcaagttatttgtctgcattttatatgcaatttctctatgcatctcgccgttcgacagacggcctgacaggacaaaaggacgaaaaggacgaccaggcgaactggaagcggcaacaccagcaaattgtgttgtattgtactcgcatgcatccgacagtcgacagctgagaggcgatggctgtaactacagcaatagcttcttcgatttgcatggtcgctgtttgaaatagattacgcatccggcgtgccaattgccccttgaactttgagcagcaggtcagcgctcaaagggtacgtaccgcctttcattgattgaatgcaatcaaagctttattaatatttctcgatttccgtagcctggcaagtctgttgccccttgcaacgattttattaaaattcattgcaagcaagcagctcagattgggtggaattcaatgaggtaagtcccctgctgaatccgtttccttgatacaagcctatcttaatttaatccaaacaattttcaccccttccgtcggacgctgatttcttttcatctcaaagcttcaggatttggatggaagttaatatttagctgcaaatgaaatatcatttggcacaactcaactaacgccaatcctttgaacccttaatgcaattctgcctccatccctttcacgtaaaagttcaccaatctttttataaaactgcatagaagaaaataatttccttgtataggaacttctgaaaaagcggcataaacagcttaaaggtcactgggcgtggaaaattcaacatgcacacccaatacacctgctgacgtcagtatagtcgcccccaaaaatagctgagaaatcagcgactgtctggtttcgcatgtggtttccggttaaaatgttttttttttcgcattactgttgcgttttataaataagtgcatgtcaacataaattaaaatactcccggttgattaataatgcacaaggaaatgtcacaaagaaatatgattgtactacggctccctcagagaaattcctctactacttcagcagctcactcagaaaggacctgaaccaatcagcatcaaggcaaatgtaacaaggcttctaaaaaagaccaaagccgagacttgaacactcttaaaattgattaacaaattttgttgtctgatttttacatattggcaaaaggattaagtaacttaagaatctagaaaatctttcttaaatattattttggaaagtatatatt

SEQ ID NO: 25004 - DNA, 1308 bp, DROSOPHILA
atgcgcaattgttgccgttgtccagctccagacctccgggcaaactcgagccaagatggaggagcagcagcagaagcaacaatgccacggaaatcttttcttttccggccacagttttcccgcaccaccagtgcgccactgtgggtttttcccaaagatgctcaagtttatttgttgtggtcatggcagaaagtaatccaaaagataaaatacaataaaataaagggccaaggcgcacgtgctgctccacggtctccaccggacccaccggacccaccggccttcgggtcaaccgtttgggccataaatttagacgcctgccctgcgacacgctctatgacattattgaacttgaaagggatgcggctgggcagcaaaacaataagcggaaagcggaagactaggttctatgagaaaagcaatttcgagcatgacatagctttgctggaacttcagaacgatgtgctctacaaggcccacatacgtccaatttgcctttggttagacaaatctgatatcgacacacaaatgtttaaaagatatgaaacattccgctggggcatagatgagaagtacatattgcctgcggccaagacaagcaaaataaaacacatcagccaagtcaagtgcgaaaatgccttcaaattgtatccgcagaattcgcatatctgtgctggctataagaacaaaagcaagtttgacaatataccacaaaatcgaaatagatacgtcaagcattccgtccaaagcgtctacactcacaaactgtataataaacagactttcgagcacgatatagctctactcttgttagatgatcctgtgacttttaaaatgagcatacagccaatatgcatttggttgggtgagataaccaacttgaaccatttggaatccaaccgatggggcttatccgaaaaaatgattttccaaagaatcaacaccgttaaaattctgaaaattaaaaagtgccgcgattcatttggaataactctgaaaaaatcgcagatatgcgctggctttcaaaacggtaacatctgtacggagacaggaagttcgttggttaagcagatacattactcgggtaaactttggaacacattaatcggaattcagagctatggcgtttcggaaagacggcctgacaggacaaaaggacgaaaaggacgaccaggcgaactggaagcggcaacaccagcaaattgtgttgtattgtactcgcatgcatccgacagtcgacagctgagaggcgatggctgtaactacagcaatagcttcttcgatttgcatggtcgctgtttgaaatag

SEQ ID NO: 25005 - protein, 435 aa, DROSOPHILA
MRNCCRCPAPDLRANSSQDGGAAAEATMPRKSFLFRPQFSRTTSAPLWVFPKDAQVYLLWSWQKVIQKIKYNKIKGQGARAAPRSPPDPPDPPAFGSTVWAINLDACPATRSMTLLNLKGMRLGSKTISGKRKTRFYEKSNFEHDIALLELQNDVLYKAHIRPICLWLDKSDIDTQMFKRYETFRWGIDEKYILPAAKTSKIKHISQVKCENAFKLYPQNSHICAGYKNKSKFDNIPQNRNRYVKHSVQSVYTHKLYNKQTFEHDIALLLLDDPVTFKMSIQPICIWLGEITNLNHLESNRWGLSEKMIFQRINTVKILKIKKCRDSFGITLKKSQICAGFQNGNICTETGSSLVKQIHYSGKLWNTLIGIQSYGVSERRPDRTKGRKGRPGELEAATPANCVVLYSHASDSRQLRGDGCNYSNSFFDLHGRCLK

SEQ ID NO: 25006 - DNA, 3482 bp, DROSOPHILA
ttagtgaaatcgttgattaagcttttttattggttcgtctagagaccagggtctctaaattgtctccctccttcgtgtactctccttgacaagagtccccaaatgttttcgataatattgatgtcaggggagtaaggcggccactcgagcaatttgactttctgatctttaatccacttaatccagccgagcggtttcgtaaatcgctttacggttaaatctttttcacggcgcactttacaaaaaaactcataccgaatgcctttaattatagaatgcaatgcagaatttaactcttttcaatcacacggtcaatcgagaagtgaattcaaaagtttaaatcctgttcagttgggttaaaaaaaatgaagattttttgtttttgaaaaaataatcggagatccctttatggagatacaacgtttcgaaaattggaaaaagtcaaagctatttagttgagtggcactgtatatatagtgtttaaattacacttttcaacgaattacttattttgaagaacattgccatcagttttcatgcaaaaattgttggacattatacaaaatctttgcgtgaagttgcatgtcttttttcaaagtcgcccgctacatagtataatgtaattattcattgatattttataataataataatgatatgtagtacatatatgtttataataaatttgtttttttacgttacatttttattctttaaacatatgccgggatttaccaaatgcatgacgaacctctttacgaaatatcatcaataaaacggtacaaaagaaatgtttaaaccaggactttcgcaattatctttttctttttcaattaagtctatatgccaataaaatgttgatagttcaaagccaatttgccccagaagattgttttcggctctagtcctcgtggactagtaattggctaatttactttcataaaagtcaatagtgttccactttctttttgtgtttaaataagtccagtaaaaaattcttaaaacccaaagacacaagatcggtttaatttttttaacgttaagaaacagaataatagcgaggtcagacactgatcgtgcgaaagatattaaagccactgtgggctgtagaaagtagaacgcccggcagttgagggtgccagtgtagctctttaatctccttttgtccctggtgaataaaaagcaattgcggtggcaacttgtttaggacatcttcgttttgcgccgggtccaccgcctgatcgatgtccttctctacagccaaatcccacaaagcaatttggtcatcgtcaccgcctgacgccagtacggtagcctctgcgggactccattcgacagtagtgatgtggtccgtgtggtgcttaaaagtggcaatcggctttttgctctgaaactgacgtaggtcccagatgtggaggtagccgtcgtcgccgccactggcgataaaaggctcgttgcgattccacgaaatcacgtttacgtcgctctggtgtgcgtcctcgcatgtcagcatacatgctttctgaggcgaggcgcggcagtcccaaattcggatggttttgtccaccgaacaggacgcgagaacgctacgttcgtttggactccattgcagatcttcaactgactgtgagtggcccgctaggggacgttgatcaactttccatgtgccgtcttctaccggagtccacacgtgtatgtctcgccggcagtcccctgtcgccagtacaccatctgcactgggactccagtcgatggcgaagccctcctgctgatggccaccaaaagtaaacactggacgcgcttcgctttgctcgtactgcttggccaactgagcgttctccacggcctgcaatggctgagttaggtcccaaatgttcacacgaccaagttcgctccaggaggcagcgtagaccgaattgcccaatcggcgggcacggacgcgattaacgcacccttggtgcttgacaagggcgcatgtcatctgcggctttttgagctcctccctgtcagtcacgtcgtcttggtcgtcttctagctcctcgtcttcgtcgccgtcattgtcctgcgtcttgtgcaggttgctcattttcatcacaataaggttgttgacatgggcgcgggaagcttgcgtgccggccacaatataagccgtcatcgggaacgactgccgtccgctgcccaactcgtcgggaatgacatcaaagctcaggcagggagctcccgtagaagcttggtgcagcatcacgtacgcactctcatcgcagaccagctcctcatcgtctgcgagtttggttccgggcaagtagacctctttgggggctttgggctcagcggtatcgtcttctgcgtcactaccactgtcagagctcatgtcgctctcggcgtcttcgggctccaccacttccatactaatgttttcatttccatcatccatagctttctactgggctttggattcacgaaactagcctgttaaatttagcacgtgcggctttgaaataaagagtggctgatagtaattcagttttagtgtgaccgcaggaacattgatcatttataccatccggatctggaaaatactatttcttaccattcatttatttaaaagtgtaataagctgtaccataaaaattaatatttttctctaattaattcgcttttaacagaaatattcgaagcttttcgtgtttgtatttttcacttttcctttaattaaatgtttgagaaatagaatacaaatacgacatgacattataacagaaatgtgggaaatctgtttaaatgatggcacgcagaatttgtatttttaagtgacacaattatcaaatacccgtcacacatctaaaaaatataatatatatttggtcagatatgggtgatgttcttattctatatatgtatgtttgatgctagctcgatgttggttacttaagctttggttctccataggacaactattcaattttttgggtcacactggtgctttgcatctgtgtgttttagcaggatgatttttttttaaataggccagtcatttggctgagttttggggtaaatttgcctttttagttgcgattcttattatatcgatatctggtagatgaatggtctatgtgcgaaactatcatcacgctaaccttagtccttcattcttatttttattggcaacaacaaatatgaaaaaataaaaaaaattactttagtaaacttccagttcatttgggaaggggtttcctactttctaattttaagttctttttcggacatgctgacactatacataaaatggtactttacgaagcctatttattgaaataacgaaatgatatattttcaattttatttaggtttattaggtttattttcacccttagaccatattctaattcactgaaatgtagatttgaaaattaagtttacaataccgttttcatttaatttcttatcgttgccatatcgcgtattatcgatatattgtaata

SEQ ID NO: 25007 - DNA, 1482 bp, DROSOPHILA
ctaaatttaacaggctagtttcgtgaatccaaagcccagtagaaagctatggatgatggaaatgaaaacattagtatggaagtggtggagcccgaagacgccgagagcgacatgagctctgacagtggtagtgacgcagaagacgataccgctgagcccaaagcccccaaagaggtctacttgcccggaaccaaactcgcagacgatgaggagctggtctgcgatgagagtgcgtacgtgatgctgcaccaagcttctacgggagctccctgcctgagctttgatgtcattcccgacgagttgggcagcggacggcagtcgttcccgatgacggcttatattgtggccggcacgcaagcttcccgcgcccatgtcaacaaccttattgtgatgaaaatgagcaacctgcacaagacgcaggacaatgacggcgacgaagacgaggagctagaagacgaccaagacgacgtgactgacagggaggagctcaaaaagccgcagatgacatgcgcccttgtcaagcaccaagggtgcgttaatcgcgtccgtgcccgccgattgggcaattcggtctacgctgcctcctggagcgaacttggtcgtgtgaacatttgggacctaactcagccattgcaggccgtggagaacgctcagttggccaagcagtacgagcaaagcgaagcgcgtccagtgtttacttttggtggccatcagcaggagggcttcgccatcgactggagtcccagtgcagatggtgtactggcgacaggggactgccggcgagacatacacgtgtggactccggtagaagacggcacatggaaagttgatcaacgtcccctagcgggccactcacagtcagttgaagatctgcaatggagtccaaacgaacgtagcgttctcgcgtcctgttcggtggacaaaaccatccgaatttgggactgccgcgcctcgcctcagaaagcatgtatgctgacatgcgaggacgcacaccagagcgacgtaaacgtgatttcgtggaatcgcaacgagccttttatcgccagtggcggcgacgacggctacctccacatctgggacctacgtcagtttcagagcaaaaagccgattgccacttttaagcaccacacggaccacatcactactgtcgaatggagtcccgcagaggctaccgtactggcgtcaggcggtgacgatgaccaaattgctttgtgggatttggctgtagagaaggacatcgatcaggcggtggacccggcgcaaaacgaagatgtcctaaacaagttgccaccgcaattgctttttattcaccagggacaaaaggagattaaagagctacactggcaccctcaactgccgggcgttctactttctacagcccacagtggctttaatatctttcgcacgatcagtgtctgacctcgctattattctgtttcttaacgttaaaaaaattaaaccgatcttgtgtctttgggtttt

SEQ ID NO: 25008 - protein, 447 aa, DROSOPHILA
MEVVEPEDAESDMSSDSGSDAEDDTAEPKAPKEVYLPGTKLADDEELVCDESAYVMLHQASTGAPCLSFDVIPDELGSGRQSFPMTAYIVAGTQASRAHVNNLIVMKMSNLHKTQDNDGDEDEELEDDQDDVTDREELKKPQMTCALVKHQGCVNRVRARRLGNSVYAASWSELGRVNIWDLTQPLQAVENAQLAKQYEQSEARPVFTFGGHQQEGFAIDWSPSADGVLATGDCRRDIHVWTPVEDGTWKVDQRPLAGHSQSVEDLQWSPNERSVLASCSVDKTIRIWDCRASPQKACMLTCEDAHQSDVNVISWNRNEPFIASGGDDGYLHIWDLRQFQSKKPIATFKHHTDHITTVEWSPAEATVLASGGDDDQIALWDLAVEKDIDQAVDPAQNEDVLNKLPPQLLFIHQGQKEIKELHWHPQLPGVLLSTAHSGFNIFRTISV

SEQ ID NO: 25009 - DNA, 2627 bp, DROSOPHILA
ccgagtggtcatcgaacccgaactataaacgtgatggcatctttttgatccagcacgctcctcattttccgggggcaagaaagttcgccagggaatttagaacgtgcaatacgcacatcccagcccattccccgtgctcaactcgattcaacctcttccagttggacaagatcgattaaacacaatcaggggattcattaaaaccactattcagtgaatcgaagacttcggaacattctctacttttaggggatatcatccgatataggtacataaaacgtcggattcctactagatctaactttaaaatcaaacctatatatcatatatataccatatcaattggtatggaaaagaaagaaaagactgctgatccattgggaaattcaatgagtgcccgaaaaagatgatttccctactccttcttgttgcctactaacaatgttgacacagaggctaccgtaaagtggagaccccgacttcactgtatcactcagtcttatataatcgagacccgagatcgccactttacccgctaattagcccaccaaccaggttgcccagcaatgagcttcgtgatgtaagagactgctcagtgggctgatgggttggtgggctttagacggttttgtgtggacggacagatagacgggccaagacggagtgtctggccacgctaataatgcgattatgtgtcgacttaataacaccgttagacttgagtaccacgatcattcatctcacaccccgattacctccataaccgaagctttgaaaacgggcccatgatttgtggtctttttactttttgtgtttttttttttgtgggccactgaaaagcgttaatatttgattaactactcgtttgtttttacctccgaaattgggggaaaaattgtatataaccgatacaatttaaacggtttgatagatataagtaaatgaaaagatttcgaagaaattgcgaaaaacatttccctgacttgtagtaataaaagtactataccaaaaggattcgatgtagatacaacaaaattcctgaaaatgttacctcattggagttcatggtctcgaatcgcgccaggatctccttgaccgagatctttgactccgttggctcctcaagaatggtctccatgcgactgacggatccactactggcattgctgacccgccgcgtcttatttccacctgggataagcatggccgtagatgccaacggattgtttccgccttgaaaggcaatcaaattggaggtggtgatgggagaaggagcagaagcaggagcaggaccaggagctggagcagaggctggtacagaagccggagctggtgagcagctggaactggaggtgggatgtgactccatgtggggcatatcctgctcctcgttgttgttattgtcatctctttggctcatttgcatcttgaagttgagctgctcctccagacagcactgctcgcacagactgccggcggaggagttggatgtgagggtggcggtggtgcagcacttgtacacgatgtcctcctcaacgctccaggcattgtcgttggccattccgagatctccgccagatccggatccacatagatccccgccagcctcgtgcattcccatcgaggcgcagcactgttcattcagctcccgaatactctcgttggtcagctggtcgagatcactgcgtcggatgtgctgctgttgctgctgctgctgatgatgctggtggagcgactgcatctgcatttgggcatggtgcacctgggccgctgttgtgcccgtaatgtgcgctatttccgcatcatccgagtccgtatagagcatctcatgctcctcatccgtcagattgttcagggagtccaaggaggcgcatttgcactcctgttcgccatcatcttgagctcctcgatccctatccctatctctatccctctctcgattcgggtcctgatcctgctgctgaccctgctgttgcagcaacttaaagttgttaaccttgtcgtggtgcattttgctaataagcgactccaccttgttgacaatgctgctaaacttgtggggcacactcccgccaccggagttcagttgcaccgcctggcaggatgaggatttgctggcccgcacgctctgtgacatccttggcaaacgcttggctccgtgctccgaagttcaggatcaggtggcgactacagtcacgaccattgccataaggccgccgtctcagtgaaagttaatgcattgcgatggacggcctgcaggctctatattgcaccatggcgaatgctcaaatatattgtttgcacagcggttcggttcgtgcaaacaaacaaaaaaaaaaaaaaacaagaaaaacagaaacagcaacaaaaagtcgtggaaaacgcggacgtcgaacggcgaaaaatgaaaagcgaaccgcagcggccagagtttcccgcacaatgagtgttgaatggaatggattcgatggtcgaacacacacatcaagccatacgtatacgcgatttttcctgctattggttgtagttcatattattattttgtttttgtatttatttctatttgtattttcttattcgatgtgtggaaattggcaatgcagttaaatgcgtgccgtatttgttac

SEQ ID NO: 25010 - DNA, 1137 bp, DROSOPHILA
atgtcacagagcgtgcgggccagcaaatcctcatcctgccaggcggtgcaactgaactccggtggcgggagtgtgccccacaagtttagcagcattgtcaacaaggtggagtcgcttattagcaaaatgcaccacgacaaggttaacaactttaagttgctgcaacagcagggtcagcagcaggatcaggacccgaatcgagagagggatagagatagggatagggatcgaggagctcaagatgatggcgaacaggagtgcaaatgcgcctccttggactccctgaacaatctgacggatgaggagcatgagatgctctatacggactcggatgatgcggaaatagcgcacattacgggcacaacagcggcccaggtgcaccatgcccaaatgcagatgcagtcgctccaccagcatcatcagcagcagcagcaacagcagcacatccgacgcagtgatctcgaccagctgaccaacgagagtattcgggagctgaatgaacagtgctgcgcctcgatgggaatgcacgaggctggcggggatctatgtggatccggatctggcggagatctcggaatggccaacgacaatgcctggagcgttgaggaggacatcgtgtacaagtgctgcaccaccgccaccctcacatccaactcctccgccggcagtctgtgcgagcagtgctgtctggaggagcagctcaacttcaagatgcaaatgagccaaagagatgacaataacaacaacgaggagcaggatatgccccacatggagtcacatcccacctccagttccagctgctcaccagctccggcttctgtaccagcctctgctccagctcctggtcctgctcctgcttctgctccttctcccatcaccacctccaatttgattgcctttcaaggcggaaacaatccgttggcatctacggccatgcttatcccaggtggaaataagacgcggcgggtcagcaatgccagtagtggatccgtcagtcgcatggagaccattcttgaggagccaacggagtcaaagatctcggtcaaggagatcctggcgcgattcgagaccatgaactccaatgaggtaacattttcaggaattttgttgtatctacatcgaatccttttggtatag

SEQ ID NO: 25011 - protein, 378 aa, DROSOPHILA
MSQSVRASKSSSCQAVQLNSGGGSVPHKFSSIVNKVESLISKMHHDKVNNFKLLQQQGQQQDQDPNRERDRDRDRDRGAQDDGEQECKCASLDSLNNLTDEEHEMLYTDSDDAEIAHITGTTAAQVHHAQMQMQSLHQHHQQQQQQQHIRRSDLDQLTNESIRELNEQCCASMGMHEAGGDLCGSGSGGDLGMANDNAWSVEEDIVYKCCTTATLTSNSSAGSLCEQCCLEEQLNFKMQMSQRDDNNNNEEQDMPHMESHPTSSSSCSPAPASVPASAPAPGPAPASAPSPITTSNLIAFQGGNNPLASTAMLIPGGNKTRRVSNASSGSVSRMETILEEPTESKISVKEILARFETMNSNEVTFSGILLYLHRILLV

SEQ ID NO: 25012 - DNA, 3323 bp, DROSOPHILA
aacgaaatgaaatgaaacaaattacaaaataacaaccactatcacatactcttcgctatcgctttgcgacttcgtatctttgcggctgcgttttttcttcttggccttgcgcacgacctttgcttcagcctcactttcctcgctgtttgaatcttcggtggccgtggagcgcctcttgtgcttcttctcctttttggctatgtgacgagaagcatgtcaagtataatggatatgcgaaaatggattacagtcgtaccctttgtctgtctaactagttcaccgcagttggcaatggctgcatcctgcagcgggcgtgagttccgatcgacaggcaagccctccaattggcgcaccaactcctgaccggatataacttggccgaatacaacatggatactgcaacgagaaaatatgacgctattaatctgttgatctacttaacgtgttcaaagctaacttacttgtccaaatgtggcgcaggctgtgttgtactacaatgagaaacagaagaagagaaaaatattctttacactttggctaactggttgttgggctgcagtaggcagttgtagttgaaatcggtgttgttgttgttgtttcagttgttgttgttgttattgttgtcggttgtggcggagacaatgtcatgtgcaacaaagtttaaaggtttctaggtgtgtaggcagaggtggcacacaggattttggcaagccaccaaccgcaagagccgctgccgctggccatggccagcacattgtcatctggcagatccatcgtgaggatccagcccaagattcccgcaaagatccacaaggagccgacagcgagagagagagagattgagacacacactgagacccaggcccagggaccaaagaccatggagctgaaagacctgcatcgtctttcgcttggtttttggacccacagaccaaatgcactagggatgctgggatggcggtgcatcggccgatggaggacagattgcgatgcatctgtccgctggtcagtgggacgctagctcacactttaacgcccacgggctaaggctaaatggcaatagattaatgaacaacaacagtggtttaagtatagatcaaaaagaagacgaagagagtttagctgtaatatcggtgcctgaaacagaactgaaactaaatttacggccacgttagtccggaccagccggttacggtcctccgtcgagagcacttacataaagaactgcgagccatttgtgttcttgccccggttggccatcgacagcaggaagggacgatcgtgcttcttttcgaagctctcatctggaaagaggaatcggattgtttaaaccaaattcactttaaatgttactttaaagcccaagagagatgagcaactcaagttatcttctagataactttttaatgcgcatgtaattggatttcccaaagccgcttctatttgcatatttgtcccattttccacccaaacgtataattagcaatatgtagatgtatgatgtgcaccattcccttatctttctaatggaaatatttgccaaaatgtaaatttaaattgagtcgcttgagtaaacatttatttttgacatttaaatggggcatttgtacactttggctggcatatcaaaagcgttttaatttttttcgacaaagattaaacttaagtagattattgtagtgcagtttagatgtaattggctggaagtttttaaatctccaaatgtgggtgtctgtatttacagtgtttttattacatttctccccctactgactctttattaattgcactttaagtaccctgtatattccctttcgttttctgttcttcttatcagataaccactgtattgattttttcccacacaaacagcagcacacacacacaagcgtgtatgtatgcatgcaggcatcgaatcggaagccggaagaactcaccctcgaacgtcccgccgtagatggactcgccgccggtgccgttgcccgcagagaagtcgcccgcctggaccatgaagtccttgaccacccggtggaatatcacacccttgtactgcagcttcttgccggtgattaggccaaatcccttttcgcccgtgcagagtgcgcggaaattttcggccgttttgggcgccacatcgttgaagagctcgaagacaatgcggcccatgcccaggccgcccagggaaatgtcaaagaagcaccgcggtcgcgtggcacccgcgtcgcgtttgtttaccgtcattatatgcgccgatttctgccaataaatgctgtttaatacgtatttcacgccgttttcgagttgcacaatgtcggcgttgccagctctactcagaactagggatgtcaaaaacatacagttagaaatatcgatgtgcaatatgcttagcatattttcgggtatcgatatattaattttaatatatatattttcttaaatttgttaatacatacatatgtacgctcaaataaacggtaaactttgagctatatatagtcaaaatacaccattgattactctcagcaaccaataatcattttatgctttttggtataacttccaaaacctttagaacatgggttgaaaatattatcttcaatgctcatatttttgggaaaaacagaatgtcgtttaaaccaactatgaaatgagatctggcctttatggtcatattatattaagctttttcagacaatttacacagttaacatctttgtatatagctttaaaagtttattatattattcaatacatagtaaaaaaataatttattaaattaccgttccatccctggctgcaatacggtcacacaaagccaatgtttacatggcagctcgcgtgtggctgtagctgtgtgcgtgagcgagagcgcaagagcggcgcgtgtgtgcgtgcgagcgggagagcagggcgaagacgtgttcttttcgccgaaaaagcaaataattgggttggtttatcagagaaaaacaaaaaaaattccagccagtgtcgcgataaaaacacgacaatcgcattgcagccgcctcagaagtgtaagatcagcctcagctgaccggaaagttaacattgcgacgtggaaaaccacgaatcaccagcaaatttcagcaaaagcaatcgcatttcagaatgtgtggcatattcgcgtacctaaactacttgacgcccaagtcgcgacaggaggtcctggatctcctgttgcagggactgaagcggctggagtaccgcggctacgactccacgggcatagccatcgatgcgctgaactctggcgaggcacagtccataatgctggtgaagcgcaccgggaaggtgaaggtgct

SEQ ID NO: 25013 - DNA, 523 bp, DROSOPHILA
tggcaacgccgacattgtgcaactcgaaaacggcgtgaaatacgtattaaacagcatttattggcagaaatcggcgcatataatgacggtaaacaaacgcgacgcgggtgccacgcgaccgcggtgcttctttgacatttccctgggcggcctgggcatgggccgcattgtcttcgagctcttcaacgatgtggcgcccaaaacggccgaaaatttccgcgcactctgcacgggcgaaaagggatttggcctaatcaccggcaagaagctgcagtacaagggtgtgatattccaccgggtggtcaaggacttcatggtccaggcgggcgacttctctgcgggcaacggcaccggcggcgagtccatctacggcgggacgttcgaggatgagagcttcgaaaagaagcacgatcgtcccttcctgctgtcgatggccaaccggggcaagaacacaaatggctcgcagttctttatccttagcccgtgggcgttaaagtgtgagctagcgtcccactgaccagcg

SEQ ID NO: 25014 - protein, 144 aa, DROSOPHILA
MTVNKRDAGATRPRCFFDISLGGLGMGRIVFELFNDVAPKTAENFRALCTGEKGFGLITGKKLQYKGVIFHRVVKDFMVQAGDFSAGNGTGGESIYGGTFEDESFEKKHDRPFLLSMANRGKNTNGSQFFILSPWALKCELASH

SEQ ID NO: 25015 - DNA, 7372 bp, DROSOPHILA
gagtaatttaacacatcatttttctggccagcgtgcattttggaatatgctctgcgagtggagatattccttgaaaagtagctagccgatttttttattgcatattttatatactttctgagtcctataaactttagtcgtacatagatagttagatctcttaaatagttcgatttattaagatttttgcatttgtattttttttggaatttacctataaatagcgaaaaattaaataaataaataagattctcattttccatatttcaccgttctgccatagacgctaatttgacccacatagattttcagtggaaacaagtggaagcaacaaccgattagtgtaaccaaatacctttgcttttatttaggtctagtatttttgtaaggtctgtctacggctttcctttccacaggaaaatatattttcagttttagggaaggggtgctacagtgagcgtctttcgttcccagtgtcgttatttctatagtattgctgagatatatatcagagcagtaaagatatttaaatataagttcttcgaaatgggtggtcacgacaactggaacaatggtcaaaatgaggagcaagatgtaagtagcacacaaaaccgcgactgcacagggaaaaaactcagttcggccataatcccaatatatatatattttggtgatcaacgcgcttttacccatgcggcaactaaagttgatgtgctaaagcatttcgttgcggttttgttacttaagactaagactaacagtagttgtatcttaatagtgctagggagtacgatgctgtcggtattggtttctcttttagctttttagtgcaaaaggcgtgatcaagaatacacatgttacacacattttttaaggcatggtgaaaagaaacagggcagatattgtaaaagtattgtattgacaagggtgtctgtcaacttatcgttatcgttctaggtagtatcgaataggtgctgggtttaatcgggttgtagaaacggtcacactgtattcagttttttcattcgtctcgtgtgtcaggggactttctccatttgcaatagcaaaaaaaatagttagattagaagttgttcaacttttgcattagtaaaatggtgaactcgaaccagaaccagaacggcaactccaatggccatgatgatgtaagtagtggatattaagggtctagaaatttcctgtaagctggtgtctcgccttgccggtcgccattttgaaaattacgcatgtgtctcaagggcggaaagtgaggttatggccattgataaaatcaataatttaggactttcctcaggactccatcaccgagccggagcatatgcgcaagctgttcatcggtggcttggactaccgtaccaccgacgagaacctaaaggctcacttcgagaaatggggcaacatcgtggacgtggtggtcatgaaggatccgcgcacaaagcgttcccgcggattcggattcatcacctattcccactcgagcatgattgatgaggcccaaaagtcgcgtccccacaagatcgacggtcgagtggtggagcccaagcgcgccgttccccgtcaggacattgattccccgaatgccggagccaccgtaaagaaactctttgttggcgccctcaaggacgaccatgatgagcagagcatccgcgactacttccagcactttggcaacatcgtcgacatcaacatagtcattgacaaggagactggcaagaaacgcggattcgccttcgtcgagttcgacgactacgatcccgtggacaaagttgtgtgtaagtacaacgcttttcctaatctagacaatatcaaatatcctttaagaatgatttatctcttcgagagtagactgttaggaaaatcacattgccatgttcttagatttatacaatacagattgaattatctgcacaggaaacgaatattaaccccatttgtgtacgcggcgttcgtgtagaaaaaaagtatgacatgcaaccacccctaatctatatgctcaatcagctctggcacattgtagggcttctcgtaaatgtccatcagcgtcggataaacgaatgcgcactataagcaagaaatttcgataaaattgcaattattacaatatatccacagtcccagctccgcatagcaatgttcgatgtgcttgtgcggcgtttgtgactgtaagaataaattccagccagtattatatcattgttgttggtgctcttcgtgcatcaacgatgaaagagtatatggcacactatagcttgaatctaaaactgtttcctaatatcacagtactgacaaattaactggtttgaaaccatcaccagggtagtttttttttaaacgctgtgagatgaattaaagcgtcggctaagctatgttatgcgaatgtaagcattgcgcctattcagtgtaacacgcagcctcgttacaatagttcaattaattgctattatggaaatcgatacacagtcccagctccgcatagcaatgttcgatgtgctcatgcggcgtttgtgactgtaagataaaagacccagcccatattatatcgtgttgttggcgctgttcgtgcatcaacgatgaaagagtataaggcacaatatcacattgaattaccaactatatgaaaagaatgagtatctaaatgccttcgcttacttgaatatactgacaaatccacagaatggtgaatgttatttagcgtgaatatatctcctaaaattagctacgattccacagtcccagctccgcacagcaatgttcgatgtgctcgtgcggcgtttgtgactgttagaataaattccagccagtattatatcattgttgttggtgctcttcgtgcatcaacgatgaaagagtataaggcacaccttgattatcgaaccgattaaacagaaagtttctagatcagccccttcgtggacgtcacagtactgacaaattgacgggcttgaaaaagtcgcctgtatggtttttatttaaacgctgtgagattaatttaagcgtcggctaagctatgtgatgcgaatgtatattataaatcaattctgtgtaacacgcagcctcgttacaactgcaaatcaaatgcaccgaaatggtgaatgtgtactatccgatatcgatcctaattttagctaaaattccacagtcccagctccgcatagcaatgttcgatgtgctcgtgcggcgtttgtgactgtaagatgaaatcccagccagtattatattgttgttgttggtggtgtttgtgcaccaatgatgaaagagtatatggcacactatcctccggatgcaccacatagggaagttcattttcgaataccactaatagcatgctttccctctttatttttgcagtgcaaaagcagcatcagctgaatggcaaaatggtggacgtaaagaaggccttgcccaagcagaatgaccaacagggaggtggcggaggacgcggtggtccgggtggtcgtgccggtggaaaccgcggaaacatgggcggtggaaactacggcaaccagaatggtggcggcaactgggtaagaacttattgatcgccatcaattcgatttgaggcttattactggttaattggcattgcagaacaacggtggcaacaactggggcaacaaccgcgggggtaacgacaactggggcaacaacagcttcggtggtggcggcggcggcggtggtggttatggcggtggcaacaacagctggggcaataacaatccgtgggacaatggcaatggaggcggcaactttggaggcggcggcaacaattggaacaatggtggcaatgattttggaggctaccagcagaactatggcggcggtccgcagcgaggtggcggcaacttcaacaacaatcgcatgcagccctaccaaggaggtggtggattcaaagcaggtgagcaacagcacgtctgttgatgcattactgataacaactagatagcaagacacagtaccctgacacctaactgttagagcgtcgatagagtttggcagttagcttattaaacgctgtgagatcaactgacgatggccttcgctatgttatgcgtatgtaagataatcccagtacgacgtaacacgcagccacgttacagttttttcatgaacagtcaccaccagtatagaaactagactagaaagacgattggatatgttcctaacgatcctgggttttcttttaggcggtggcaatcaaggcaactatggcggaaacaatcagggcttcaataacggtggcaacaaccgcagatattgagagagattccggacgaggtgagacatccaaataaccactactaacacaaaaatatacatagtccaaggcgaattcaggccataactaaccgcttatctatcccgtatgaccattaatctttcgcttgatttgacaaacatatgttgtgtgtttttttttttttataatagcgcccttatcggcatttttggtagtttataaagcatattgagactaaaaagcaaaacggctgagacagtccgacccaccttactcaacaaacttatatacgtatttacacttttaagtatttagagaacaaaaacccatcaaccaattaagaactccttttcataccaattgttttaaataacgtttctcatttatcgacattttataggtgataaagtaaaagtcgctcagtataatcccaaaattcaaagtcaagtaaacgatacgcaattcaatgatcaatatgatgaagtatgaacgcacgttcatagtcctaagaagttttccgagcaccacaaaccaaacattacagattgattgatcaggatcagtgcagtgcagtgaagtcgtaagaagtttggttcagtcttggattagaacagaaagagagatcagtaccaagcaagaccagaccaatacagagtgcagtgcagtgcagagcagtgtgtgagctaaacagaagaaacacagcaagtggcagtacacgtacacagaaggtgaccaggattccattcaatttgtctttgcaagcgatgataaattgaatgtcaagaggcgcatcgaaaactatccaatacccacagaattgtaatctataatttgcaacccatatgtagcagcccatataagtaacattgtaattagatccacaaagccgacgacaggccaaacatttgtatctccaccacacgagcaaccaaccaaccaacctacttaaaacaaccagtcataaacgaatcagctatgtaaaacttcaaggcggcagccgagagatatgtttctttggttgcagacagctctccagtccatcggctgccggcaacttttgataatcagagcagaaaacacaaaatatataaaaacatgtattacattttacaactttactaggctaagttctcatagaattaaatcgagtagagcgtgcggagcgacttctgcatccatccgcacgctaccctagtcttaataattttactattcaagttctaagcgaacctgaccgtgtgtggaggaatctagatacttagatttttgaataagtgtcgacatggatataacctcttccgctgcttagatgtaaccgatcaacaaacaacctttattgtaatttataccttttagcaagcagtctgtctgaggagtcagcgcaattatacttaacaaaatttacattttaatgtagctaaaaaatacaagatgcaaaaaaaaaaaataagcaagtgtcccgcaattgatgtaaactctgacgaaagaacaaaaagtatatagctaagccaaagcctcgtagttttctatatttctgtagcagcatcagcaaaaggatctcgatcagaatgagagtgtattgcagaggtaacaaggtgcagcaagtctgaccaggtccaaaagccagccaagaatatgtactttactatagcatttgttgtgggcgggccattaacgtcgttcgagagttctcctttcactcgcttaacaggaatcattttccccttttatttgatttgccccccgcctgctgtaccatgtcatttacaaccatgtatattattgtaatttctgttgccagttggctgcgaaaagtatgcgaagcgctgaaagactgccgccgcgctactgaatgcagccacggaaggtgcccgcgtttgctagcaactccggtcgctgggtttcggttccctctgggtaagtaatcctccgcagatcccaaatccggaaaaagttgtaactttcaggtggtctgaatcggctcgtcgcacctgaggatggaatggatgttgaacggtttcccctctgcaccatcgtaaatatacgacttttatttattacttcattttattttcattattactatctttgaataaagaaatttcagaataccaaacaaaatgattttcgtttcattttgaattaaaatttcaccagtgggggaaaataacggtatttgaacaataatggcgttgcgaatgtaacgtgattggcgtaaaatcgcaaattccgttttatatagttgaatgattttcaaagcattcattttgttgcatttaatgttaaattttaattagtccactgaaaataataaatcatgataaatgagcactgtgtctgtcactttgttgttggtttgagtcttctctaagtggtgaataagttttctgcgatatatttaagcggtcgcaatacggtcatactaattgcatttcttttaggcagggggcgttaacttgcgaattaatgactataactaactaaaacaccgactaaggacctctgaaatggactctactgccactcgcacgctgccctttgtgtacaagtataaaaatcataaaggccaagactgcgaatcccggctggacatcacttttccctttgaccaggaaaatctggaggagtgtatcacccagctgatggctcccaaccagatggaccctatgatgcggtacctggacgagaatatcagtgagtatcagtatgtgcggatggagtaccagctttagtcttgctattccaattagaactcgaacgggagctgcagaaattcgtggatacggagcagcaaaatttcctggacgaccaagccgaaaagctactcaaacaggcggccaacgaggagatggacatcgaggccattgtgcgggacacagagaggctgtacaaggaggaactactgcaatttgccgatcgtgtgggtcccagcgatgctgacatattcgcccagagcttccatcgcctggtgcactcttcgtccctggaggacatactcaagcgagagcgtgcatatgccaaggtggtgtccgacatgaccgatcttatggacagcgaggtggagacgttgaacaactctcagcagcaggaaatggatagccagataaatcagttgga

SEQ ID NO: 25016 - DNA, 1526 bp, DROSOPHILA
gtcacactgtattcagttttttcattcgtctcgtgtgtcaggggactttctccatttgcaatagcaaaaaaaatagttagattagaagttgttcaacttttgcattagtaaaatggtgaactcgaaccagaaccagaacggcaactccaatggccatgatgatgactttcctcaggactccatcaccgagccggagcatatgcgcaagctgttcatcggtggcttggactaccgtaccaccgacgagaacctaaaggctcacttcgagaaatggggcaacatcgtggacgtggtggtcatgaaggatccgcgcacaaagcgttcccgcggattcggattcatcacctattcccactcgagcatgattgatgaggcccaaaagtcgcgtccccacaagatcgacggtcgagtggtggagcccaagcgcgccgttccccgtcaggacattgattccccgaatgccggagccaccgtaaagaaactctttgttggcgccctcaaggacgaccatgatgagcagagcatccgcgactacttccagcactttggcaacatcgtcgacatcaacatagtcattgacaaggagactggcaagaaacgcggattcgccttcgtcgagttcgacgactacgatcccgtggacaaagttgtgttgcaaaagcagcatcagctgaatggcaaaatggtggacgtaaagaaggccttgcccaagcagaatgaccaacagggaggtggcggaggacgcggtggtccgggtggtcgtgccggtggaaaccgcggaaacatgggcggtggaaactacggcaaccagaatggtggcggcaactggaacaacggtggcaacaactggggcaacaaccgcgggggtaacgacaactggggcaacaacagcttcggtggtggcggcggcggcggtggtggttatggcggtggcaacaacagctggggcaataacaatccgtgggacaatggcaatggaggcggcaactttggaggcggcggcaacaattggaacaatggtggcaatgattttggaggctaccagcagaactatggcggcggtccgcagcgaggtggcggcaacttcaacaacaatcgcatgcagccctaccaaggaggtggtggattcaaagcaggcggtggcaatcaaggcaactatggcggaaacaatcagggcttcaataacggtggcaacaaccgcagatattgattggctgcgaaaagtatgcgaagcgctgaaagactgccgccgcgctactgaatgcagccacggaaggtgcccgcgtttgctagcaactccggtcgctgggtttcggttccctctgggtaagtaatcctccgcagatcccaaatccggaaaaagttgtaactttcaggtggtctgaatcggctcgtcgcacctgaggatggaatggatgttgaacggtttcccctctgcaccatcgtaaatatacgacttttatttattacttcattttattttcattattactatctttgaataaagaaatttcagaataccaaac

SEQ ID NO: 25017 - protein, 365 aa, DROSOPHILA
MVNSNQNQNGNSNGHDDDFPQDSITEPEHMRKLFIGGLDYRTTDENLKAHFEKWGNIVDVVVMKDPRTKRSRGFGFITYSHSSMIDEAQKSRPHKIDGRVVEPKRAVPRQDIDSPNAGATVKKLFVGALKDDHDEQSIRDYFQHFGNIVDINIVIDKETGKKRGFAFVEFDDYDPVDKVVLQKQHQLNGKMVDVKKALPKQNDQQGGGGGRGGPGGRAGGNRGNMGGGNYGNQNGGGNWNNGGNNWGNNRGGNDNWGNNSFGGGGGGGGGYGGGNNSWGNNNPWDNGNGGGNFGGGGNNWNNGGNDFGGYQQNYGGGPQRGGGNFNNNRMQPYQGGGGFKAGGGNQGNYGGNNQGFNNGGNNRRY

SEQ ID NO: 25018 - DNA, 4227 bp, DROSOPHILA
tattttcagctagcttcttgcatctaatctttcccgacttggcggccaagacagccttcgaattgttctactcgcgcgtgggacagcacacctcggttggtggctactggaacgatccgcagaggcaggatctctacctgaagtacagcgaattcctgccactgatcaataatgagaagaagacctccaactccacatcttttaagatgggaatggtgcgtctaaataagttggtaatgatcggcggacccaacgacgatgtgattactccgtggcaatcgaggtatggtttacttagtcggatattatcaaaggtgaaataaccacaaatcgtatatatttcctcagccactttggttactttgacgagaatatggatgtgattccatttattaggcgaccgattttcaccagcgactccattggcatcaggacgcttcaggaggccggcaagcttatcattgtggtcaaaccccatgttcatcatcttgcctggcacacgcgaagggatgtcatccacgaagtgatatttccatatctggactgaataagaaaccaaaactactgaactatactgagcgatcaaacggctgtgatcggaaaggcggacaaaggctcactctcatcaataagcattaatgtgaagttgctgcctgggtaattaggctacaaacatgatcttttattggtaactaagctatatatttttaaaacagcctgcgtattgcagcagagatttttacaaaaactcataaactacttataaatagccaaataaagtgaaactagaaatttttaaattgcaatttcaatgatatatatttggatattaaaatgaatcgttaaagtttatatttcatgtcgtcaaatttgtttgttgaatttaaatacttaaatctcccgcgcatttttagttactgatagataacaataagcgataactttacttatcgcttaatgaagaatcgatatttaatcgatacatccgcggtctatgtgatggcgaaatagggcgtaatatcttattttgtgaatttttaagttgcccagttaaccatgaatggcaccacgacagcagagcaggatgctgacaacgtgattcgcatcctggtggctaccgacaaccacctgggctatggcgaaaaagacgcggtgcgcggcgaggacagtttcacggccttcgaggagatcctggaactggcggtgtccgaggatgtggacatgattctgctgggaggtgacctcttccacgacgccgtgcccagccagaatgcgttgcacaagtaggatttgcatggcattgttcactctattctcattttgattcctcatcagatgcattgagctcctgcggcgctacacattcggtgatcgtcctgtttccctggagattctcagcgaccaggggcaatgcttccacaatgccgttaaccagtcggtgaattacgaggatcccaatctgaacattgccattccagtattctctattcatggcaatcacgacgatcccagtggcttcggtcgtttaagttctctggatttgctgagcacctcgggactggttaactattttggtcggtggaccgatctaacccaggtggagatcagccccgtcctgatgcgcaagggagagagccaattggctttgtacggacttagccacatccacgacggccgactggcaaggcttatcaaggattttaaggtgaagtttaactgtcccgagaacgttgctaatggcgaagacggtaatgagtccaaagaggaggaggattggttccatctgttagtggtacatcagaaccgcgccgatcggggaccaaagaactatctacctgaggacctgttgccatcgtttttgcatctggtgatttggggtcacgaacacgattgccgcatcgagccagaggagaatgccaaaaagcgcttctatgtctctcagccgggctcttcggtgcccacctccttgtccgagggtgaggccaagaaaaagcacgtcggcctgctcgagatctacaagggaaaattcaagcttaagccgcttccgctggagactgtgcggcctttcgtctatgaatccgtcgtactggccgaccatgccgacgaattaggccttgtcgaaggtgatgcctctaccaaggtttttaaattcgcccaggaacgagtggaggcaatgatcgagcgggcggtagcccaacacaccggtcatcctaagcagccaacgctaccgctcattcggttgcgtctcctctacacagatgagtcctgcatgtttaatgcgattcggtttggagagatgttgagcactcgggtggccaacgttcaggatgtggtgcagttcagtaaggtggttaagcgtaccaaaacggaggctgtcaatctggacaaagaggcattgcgacgtgcactggtcaggaaagaattattattaaaaatttagaatggttttcataggaatacgctttttaggaagcggataatgccactcgcgtggaggagttagtggatcgatatttcgaagaggccaagtcgaataagcctctcaagttattccactcaaaggctcttgcagagatgacctatcgactgttggagcaaagggatgccgatgcagctgaaaatattgtcaagttagttgcaatcgagtagcaaataactacacgcatcctaaccaacttcctttaggttctacaaggaaaaggcagttgatcacttgatggaagcaatgcccaacgacgagaacatcgatgaggagcttgaaagatttagggcgcttcacaagcatggggatctactgaaaatgcttgacacacagggcttgaaggtgaagaaagaagaaaagtccatgtctgtgttgggtagcgaagtgaacgtctccactgcccccgcgacgggacgaggagctgctaggggtcgtggaactgcacgaactcgtgcaggtgccacagctgccacacgtggaaagggccagctagatgtgacagtcagtagtacggtatgagatgttagcctttagataaatctgaacattttatattatcttctttttgtatccaaaatagcgaacttccggcaggcaacaaacgctccttagtagccttatgggctctcgtaatactgccagctatgttatatcggatgattccgattgatttgaattccggagaccttgtttaccacgaagtttaataaacagcagttttcctttttacaatctctaggagtacatttcgatatcgtttattttttgggcttcattctcagggttcgcgcaactgcataatatgtattttagcctacaacttaggagctacattaaggtgaacggctgctgtcggactccaattggtccgactggatgtttggatagtttctttggtagtctagctgcatcaagactccggcgccgaaaaacggcggagatttctccagacaccgctatcgccactgcgcgcacacgcgttactgctgatggtattcatagtagtagcgatacggatccaccgaggagctgccaccggcggcggtcacgcccacgccaccggcgcctgccgcagcactcgtcttggacaccggccggatcacgtaggtgttgcgtctgcaggggagcacataaaggtaaagtgaatgttaaaccaattctttatggaaatgtaatgttttgcaaaggaaaatatgcaatatttgacggaaatactatcccatatttaaatcctttttgatttaattactggacctgtttacgaagactacagcttaaggcttacctgttatgttcaccggcgtgcacctggaagctggtctcctcgctgtggtcgtgcgagaagagcttcttgagcgcaatgatcccggcaatggtcagggccaccttgctgatgaccagagccttgccggcgatcgcggccagagccttcagacccaatggaccagcgatgcccatggcggtgaggagggcggccaccacgtacttgatgtgacccccctccttgtgtttctttttcttgtggccatgctcgcgacccacactatcctcaccgccgcctacgtccatgtcgattttgagcgtgtgcgtccgcatcagcttgtccgccttggagagaagggctcgatcgatgggtgacaggttgccaaattgacgggcatccgtcagggagcccaatatgctctccgtttcgctctggttttgcttctccagcgccagaccgtccactatcttgattgagtcct

SEQ ID NO: 25019 - DNA, 1994 bp, DROSOPHILA
tggcgaaatagggcgtaatatcttattttgtgaatttttaagttgcccagttaaccatgaatggcaccacgacagcagagcaggatgctgacaacgtgattcgcatcctggtggctaccgacaaccacctgggctatggcgaaaaagacgcggtgcgcggcgaggacagtttcacggccttcgaggagatcctggaactggcggtgtccgaggatgtggacatgattctgctgggaggtgacctcttccacgacgccgtgcccagccagaatgcgttgcacaaatgcattgagctcctgcggcgctacacattcggtgatcgtcctgtttccctggagattctcagcgaccaggggcaatgcttccacaatgccgttaaccagtcggtgaattacgaggatcccaatctgaacattgccattccagtattctctattcatggcaatcacgacgatcccagtggcttcggtcgtttaagttctctggatttgctgagcacctcgggactggttaactattttggtcggtggaccgatctaacccaggtggagatcagccccgtcctgatgcgcaagggagagagccaattggctttgtacggacttagccacatccacgacggccgactggcaaggcttatcaaggattttaaggtgaagtttaactgtcccgagaacgttgctaatggcgaagacggtaatgagtccaaagaggaggaggattggttccatctgttagtggtacatcagaaccgcgccgatcggggaccaaagaactatctacctgaggacctgttgccatcgtttttgcatctggtgatttggggtcacgaacacgattgccgcatcgagccagaggagaatgccaaaaagcgcttctatgtctctcagccgggctcttcggtgcccacctccttgtccgagggtgaggccaagaaaaagcacgtcggcctgctcgagatctacaagggaaaattcaagcttaagccgcttccgctggagactgtgcggcctttcgtctatgaatccgtcgtactggccgaccatgccgacgaattaggccttgtcgaaggtgatgcctctaccaaggtttttaaattcgcccaggaacgagtggaggcaatgatcgagcgggcggtagcccaacacaccggtcatcctaagcagccaacgctaccgctcattcggttgcgtctcctctacacagatgagtcctgcatgtttaatgcgattcggtttggagagatgttgagcactcgggtggccaacgttcaggatgtggtgcagttcagtaaggtggttaagcgtaccaaaacggaggctgtcaatctggacaaagaggcattgcgacgtgcactggaagcggataatgccactcgcgtggaggagttagtggatcgatatttcgaagaggccaagtcgaataagcctctcaagttattccactcaaaggctcttgcagagatgacctatcgactgttggagcaaagggatgccgatgcagctgaaaatattgtcaagttctacaaggaaaaggcagttgatcacttgatggaagcaatgcccaacgacgagaacatcgatgaggagcttgaaagatttagggcgcttcacaagcatggggatctactgaaaatgcttgacacacagggcttgaaggtgaagaaagaagaaaagtccatgtctgtgttgggtagcgaagtgaacgtctccactgcccccgcgacgggacgaggagctgctaggggtcgtggaactgcacgaactcgtgcaggtgccacagctgccacacgtggaaagggccagctagatgtgacagtcagtagtacgcgaacttccggcaggcaacaaacgctccttagtagccttatgggctctcgtaatactgccagctatgttatatcggatgattccgattgatttgaattccggagaccttgtttaccacgaagtttaataaacagcagttttcctttttacaatctctaggagtac

SEQ ID NO: 25020 - protein, 620 aa, DROSOPHILA
MNGTTTAEQDADNVIRILVATDNHLGYGEKDAVRGEDSFTAFEEILELAVSEDVDMILLGGDLFHDAVPSQNALHKCIELLRRYTFGDRPVSLEILSDQGQCFHNAVNQSVNYEDPNLNIAIPVFSIHGNHDDPSGFGRLSSLDLLSTSGLVNYFGRWTDLTQVEISPVLMRKGESQLALYGLSHIHDGRLARLIKDFKVKFNCPENVANGEDGNESKEEEDWFHLLVVHQNRADRGPKNYLPEDLLPSFLHLVIWGHEHDCRIEPEENAKKRFYVSQPGSSVPTSLSEGEAKKKHVGLLEIYKGKFKLKPLPLETVRPFVYESVVLADHADELGLVEGDASTKVFKFAQERVEAMIERAVAQHTGHPKQPTLPLIRLRLLYTDESCMFNAIRFGEMLSTRVANVQDVVQFSKVVKRTKTEAVNLDKEALRRALEADNATRVEELVDRYFEEAKSNKPLKLFHSKALAEMTYRLLEQRDADAAENIVKFYKEKAVDHLMEAMPNDENIDEELERFRALHKHGDLLKMLDTQGLKVKKEEKSMSVLGSEVNVSTAPATGRGAARGRGTARTRAGATAATRGKGQLDVTVSSTRTSGRQQTLLSSLMGSRNTASYVISDDSD

SEQ ID NO: 25021 - DNA, 10587 bp, DROSOPHILA
ttgtttgtgacttctggctcgctgacagtaaataaagcccataaataaaaacacccacccacgagatcgacaggaagggctaaccagagcgccggctggatttaaaaacaaaaagcgccgtccgcagccagtcaagattcagattcattcataccccagcgcttagaacaccaccaggccacagctcccgtccgagagatatagccactaagagagagcggaagaatcgaatcgcaaagagaggagccgcgctgagacaacgtcaagaatccgatttcgattccgattgcgatttcgaatccgaggcaaaaagcttcagactcggcagcaggcgcttcattctcgagttgtgatccaacgggttagcagctcagctcgcaagcagtcgccgttcgtcgtcgagcggcaagcagttcgtttcatttctactgggcgccagtacaagttccatcgagtgtttttgttattcgaaggcaaagcgcgaaaattatgccttcagccacatttgtcctggagcatttgatggcggcacaatcgcgactcgacgagcaggccgcatccccagcagaggtcaaacccaccagcaccatcaacagcagcagcaccaccgtggccaaggccatcaatgtcaagtcgtacgaaaagaagctgttgctggctctcaagaagattgtgcaataataaacgaatgcggggtaaacagcactctatttgacaaactgtagacatttcccctaatcgagctgactaagatcaataaaaagcaaacagagaagcacaacaaacagcggcaaaaaacaaaaaccaagaattctagtttttgtgctttcagtgtgtgttcgtgtgtgtgggcaagttgttacataaaacaaaaacaataacaaaataaaaaaaaaataataaaaaaacaccccagccgagacgcatttttccgcagtggaatactactatctaagcttctttttgttttggtgtgtgcgagaaaacgagtgtgaagaaaatgctgttcaacaaatgtctggaaaagttgtccagctcgctgggcaatgtggtcaatcacaagctgcaagagaaacaagtctacaacaacaacaatatcaacaataacaataacaatacgctaaacaacaacaatgcctacaacaatcagcgaaactttgagtacgaaagagccatacaggcgcactacggaagcaagggaagacgctcggaggagcgcgaaaggagcggcaagttcaaggccagcaagggtcggaaagcaaaggtcaccccaccaacggagacacccgaggcccaggagccggcctgcaagaactgtatgacccacgacgagctggcccagatcataaagggcgtggccaagggcgctgacgcgcaacgtaatcgagacaaccgactgcagcgcagacgtcgtcctctctccgcccaaccctccgccgctgcctccgcctccacatcgacggaatctctgcaccgtcttacacccagcccgcaggcttcctacccggccacgcccacctcctggacagccacaccgccccagttcccagccgccttcggcggcgccagctgctccaacagcacactgtccctcttggccaccatgcgcgtccagctccatggttacacgtaagttcaggtcgcccaaaaaaaacgacagcagtccagtccagagtgttagaaaaagagcagcgttctgctaatttggggcgcgtgcgaaattaggcactaattgttattggagtgcgagtaatgaagttgtcaggctgccaactaaacgataccccgtagcaggtgaaatggtattttgagctaccatcgcatcgtagtatgtcgccccgcctgtcagtcacatgtcgcggagtagcagatgattcgcgggaaatctggagacaatctgctgcccatcaacattaaccctaataaggcaggcaatcacaggcagttgacgccgcaacaaagcaaaaaaaaaaaaaaatcagcgcagcacatactgtcatgtgttcagaattgccacgcaaaatgagtaaatatttacgcaaagcattcgactcgaaaacaagcaatcgtaaattgacgttctaatatgaatgaatttccgactgtcaaatgccgaagtgaagtgaagggagtggaatggcaaatggcagggggcccagctcagatcgccactcaaatatggtcacatatcaacatatcaaccccccccacacaattggcccgttgtcaagttgtgtttcgatattggttctttcatttagagctgaagattgagttattggttaggcactggctaaattacgcacttgtagaaccgggagagttcggcgaattgcccactgcagacatcgtatcttggcccactgccagatcggaattatctcttcactcgcgcccggaatgtttacccatgtcccgctgttgcgctgtccgtcgtccacattccccaaagattccatcccactccgtgtctgatcttggtgtttatctgcccggctgtgccatgtgccgtccgattgtttgtgtgggctggccccatcttggcgatctcgattcgcacagtacacccagaaaacaatcgcatatgtatctgctggactattattatgtcccataaattatctttgacttttagttgagctcggattggtagtgcagtcggtttcggttgttgcttatttatttattttgatttttatcgcaacggattcataatcgctgaacgtgttgattggctcgttaacttgatctttgtttttctaatttatgctcagcttttataggtatcctgctttagggcgatcttttcgtcgttatcctaaaacgcacatcatgccaaatgatctgaagatgatgtgccaatagctttgacagcttaagctgcgtgatttccggatttcacttgtcacactcactaggtcaacaatggggcaccgccgtcctctgccctccgccttgtagaactattaaccttccgatggtttttcttctcgccataaggctgattaacgatttatgaaattacatttcccgtaatggatttcgagcgctgccttctgttttgcatatttccgtttatttgtccgttgcacaaccgtgagctgtggctactgatcaaataaaagcgtttaatttgtgcaaattcataacgtcggccgactacaagatgctctcagtggaaaggcccaattatgggggggagggctttgttctggggttgtaactccatggaaattttacaattctatcccagactctccccaactagtacttttccccgtccagttctccaacttgacatatcgtttatatgcttattttaacagtttgaactgttcaaaaaatattatgttttgaatagactgtactactacttcacacactgcttgcgagtgggcggttagggtaggggcaagcagctcattcgataattcaataagtatcttgccgacttttgagttaattaattgaaggcctcgttcccctgcttccgcgctccacctcgtaaccccaataccagtcgtttcgctgccgcctttccaggtgcgttgccacacgaaaagcaaaataaacctgtgacaaacgaaacgactaaaacactgagggggggatttgtatatgtattcggatattgtgtacgaatacgctgcacatattcgtgtgtgcatgtaaatctgtttgttgaccttagcggcgctttcatgaatggcgcgcagcttcctccgtatggtaaatacaaatacgccacattcgcattcgctgctgtaagtgtaactgtaaatgatgcaaaaaggtgcaaaattttcactgacgtactcgggtgatggtaattccatctgcttgtatttttaacccccagtctgcccgatttaaatcgctgagtgagagcgcaacagaagtaatttgtgttgctttgtattatcgtcacagtgctaaatttaaagataaacaccgaaatatgggtggagacggagacacagtttggcagcaccgcagttcggcagaatgacacaaaggatatcagcgatatgatcgatgtgggctgcgataattgctaagttcaactcgattgcacggggtcagacggcagagggcgatgcgtccacgaatccgaatcattttaactacggcgatcgcaaacaagcgatcggccaacaatacgcaaatgtgctaatagatgtggtccgaaaactgtgaattgtcttatgcaaataactcgggaacctttccatacgcaaatcgtgtgtgtgtgtgtgtgttgaatcatccgaaagaatgcgcagttcgtatttacgaatatcggaaatcggaatcatttttccagaaattctaacttttgcctaaatgaagatagagtaaaaactgaggttgggatgctatcgatttggtgcaagcagtgcacagtttccgtctacgtgaaagcaagcagtgcatatagacctgcttgtaatagatttataacttccgttttgctaaaaataaacccatcaaactcattcttatcactcgcaaccgatcggcttcgcatttggccaccttgaatctgtaacaagctagcaaagcagagcgaacgagcgagtgagcgagagggccaatgtggagagtgagagatggtgagcgagacgggcgggacagcatgaaatgcccgacagtttgtggctctaatgtaatgttaattgtttccacatggacttctattaatagccaggccagcacacggaagatgaattgatttggctgactaaaaagcaaatcaatatgcacagaaagcatttttattcaatatcgccggtacgaaaactctacgatatgtgccgtcaacatggctaaatagtgtttacttcgcttcgtcgaactaaaagacgtgatttcttccagcggagaatttaccaattatcatttgaaaattacatatgcattgttttctgtgtagcggctcctagcacttgccgcatacattatacatgagttttgagtattagttttagttcccacaccccgatacaccgaaaatccccccaaaattctcgccacatcgatgacatattttatgatatctatgaccccaggcactaaattgaaaccggcttaaggacaactcaatgttgtcaattgtttctagatttttgctcgaattccgtatttttgcgtttggttcgctcaatggcgacgaactcgaaagcgggctaagagatggacagcacaacagcagcacgcggtctataatgacattcagagcaagttgttttgggctagtgttatttatgcaaatcagtaggagggaggcaaagcagatccaatgaacccattgtgtgtaggccaacggcggacatcggtgtggacatcgaagtgatagaaagagatgatttagtttcgttcgacagaaacagaaacagaaacagaaacaccaaactcaactagtgctccgcttagtcgagctctatttgagtctaagccgactttagccgcctttttctgtgtcacatgggcaaaaatgcgcttccaactgcaattgccatggcgatgacaatctcaagtctgtcaagccaactaagctgagcaggccagacgggtagacttataagtcccggcccccagtagctggcttcgactcaacttgcgcttttccacacggcgtatgcgtgttttcgccactattgccgttgttattgcatttgtcgccttgcatttgactgttttcttcgaacttttgctggtgtgtgctttagcacatattgtacatatacgtacagtaaaccctcctcgcagtgggccctaaaaagctctaagctatgtttacacgtttagttctagtcgtcaagacctgggaatgattgcctttggtttttgccagatgttgggtttacttactaatcctattcaaatgaaaagactgcggccgttcatagagttccacccactgagtaaagaccgtacccatattcgattcgtattgcgctgtttgttgctgcttttgctgttggtattgcggttgctgctgttgttgctggctctagtattttgcgcttttgtgcgcttctcgtatagtttgtaattgcattttgagcgctcacgtagtcgccagtcgagcactcagtcagtcagtcagtcaatcgctcagttcgttcagtggatgcgccatcgatcggtacatatgaatacatatctacgaataacagtcgaactaatttagtcatatatcctaataaccatccacctctttctctccgcagatggtttcatggcaatctttccggaaaggaagcggaaaaattgatcctggagcggggcaagaatggttcgtttctcgtccgtgaatctcagagcaagcctggcgacttcgtcctttccgtgcgcacggacgacaaagtaacgcatgtcatgattcgatggcaggtatgttgaatacgtaaccccaactaaccagattttgtagccgccccttgccccgcgcccctcgcagggtgcaaaatgcaaatgcaaatcgatggcagtgcagcaacaaagtcgcactggccataaagttcctcatagcgcgaccttggctctacagtcgagtcgtatgtacatatgtatgtgcacataaactctacagttgagcctaactaacaacgatgcttgctcgagcggagtggcaagaatattataaaatcaattgacaataatatatttaaactctttcatcttgaacgcatttggctatccgtaattatccgttaacattatcgaaggcctactgtataaactccgaaacatgcctgctttgccttggcgcgggcaaactgcttgcgccaggagcttcaaccaggtcaagcagtgcagcagttccagtttcagcgtaattcccctaaaacaatttttccactattactataactttagccgtgagcgcggtttctgcggtttgcggctgcaattatgccatttacatgtctagctggcctttttcccatttgacattgaagtcacgttttcgattttattagctaatctctcgacgctccatcgaactcggagatagagactctccaccacgtgtccccccattagaatgccacgataacaatagagtgatttcctgattgcaggacaagaagtacgacgtcggcggcggggaatcctttggcaccttgtcggaactgatcgatcactacaagcgtaatcccatggtggagacgtgcggaaccgtggtgcatctgcgacagccattcaacgccacacgaatcacggcggccggcatcaatgcccgggtggaacagctggtcaaggtgagttccctctctctgatagcagtgattctggagcgcactaatcccgaggtggctttcgattccagggaggtttctgggaggaattcgaatcgctgcaacaggacagtcgggacacattctcgcgcaacgagggctacaaacaggagaaccgcctcaagaatcgctaccgcaacatattgccatgtgagtatagaaatccactaagatccgttaggactcccaaaatcctgacggtttaaaacagttatttctaactaactaactaacattaactaacaaatttctaacctatttccctgtccgctttccagacgaccacacgcgcgtcaagctgctggacgtggagcatagcgtggccggagccgagtacatcaatgccaactacatacggctgcccaccgacggcgacctgtacaacatgagcagctcgtcggagagcctgaacagctcggtgccctcgtgccccgcctgcacggctgcccagacacagcggaactgctccaactgccagctgcaaaacaagacgtgcgtgcagtgcgccgtgaagagcgccattctgccgtatagcaactgtgccacctgcagccgcaagtcagactccctgagcaagcacaagcggagcgaatcctcggcctcttcatcgccctcctccggctctgggtccggaccaggatcgtcgggcaccagcggagtgagcagcgtcaatggacccggcacacccaccaatctcacgagcggcacagccggatgtctggtcggcctgctgaagagacactcgaacgactcgtccggagctgtttctatatcgatggccgaacgggaacgcgagagggagcgcgagatgtttaagacctacatcgccacccagggctgtctgctcacccagcaagtgaacacggtgacggacttctggaacatggtctggcaggagaacacgcgggtgatcgtcatgaccaccaaggagtacgagcgcggcaaagaaaagtgcgcccgctactggccggacgagggtagatcggagcagttcggccacgcgcggatacagtgcgtctcggagaactcgaccagtgactatacgctgcgcgagttcctcgtctcgtggcgggatcagccggcgcgccggatctttcactaccatttccaggtgtggccggatcacggagtgcccgccgatccgggctgtgtgctcaacttcctgcaagatgtcaacacgcgtcagagtcacctggctcaagcgggcgagaagccggtaagtttgacttcgatcatatttgggacatcattggctctaaccaaatacttctatatatttattgattgttcgcagggtccgatctgcgtgcactgctctgcgggcatcggtcgcactggcacctttattgtgatcgatatgattctcgatcagattgtgcgcaatggtaagtttgaacggttaaatgtggtcaagaattgataactgagaaagaagacaattcaagccacatagatcttgaaccttattaaagctcttttccctatgtgtttcctcacaggattggatactgaaatcgacatccagcgcaccattcagatggtccgatcgcagcgttccggtcttgtgcaaaccgaggcgcaatacaagttcgtctactatgcggtgcagcactatatacagaccctgatcgcccggaaacgagctgaggagcagagcctgcaggttggccgcgagtacaccaatataaagtgagtggattacgagagactccgtaagagtgtccgtctaatggcaaccttatcccaccatccaggtacacgggcgaaattggaaacgattcacaaagatctccattaccaccagcaatttctagcataagtttagttccgagtaagacgccactgacgccgacatcggcggatttgggcactgggatgggcctaagcatgggcgtgggcatgggcgtcggcaacaagcacgcatcgaagcagcagccgccgttgccggtggtcaactgcaacaataataacaacggcattggcaatagcggctgcagcaacggcggcgggagcagcaccaccagcagcagcaacggcagcagcaacggtaacatcaacgccctactgggcggcatcggcttggggctgggcggcaatatgcgcaagtcgaacttttacagcgactcgctgaagcagcaacagcagcgcgaggagcaggctccggcgggagcaggtaagatgcagcagccggcgccgccgctgcgaccgcgtcctggaatactcaagttgctcaccagtcccgtcatctttcagcaaaattcaaaaacattcccaaagacatgatcggcttgcgaccgccaagccatgcgcctgcgttgccgccgccaccgacaccgccgcgcaaaacatgacaaatgaatttctaagtcgcgacgcccccttgacacgcccccttgacacgcccccctgacacccacctccctccacacgcacacagaccacatatggttttcattttaaatgtcacccagccgccgccccaaacccaaaacccaatccctcgactatgttttactgttgtaccacgttctacgttttttttttttttttataattgtaatctatatacttttttgtaattgtgtgtaatgtaatgtttagttttatgttattgtctcgctttatgttgtaagtgttccctgcacacgaaaagcagtaaccccaccaccaccccaaaacccaaaacccagcatatttatgtagtagtattgtaagaatccccgaaccggtagttgaggatacaatctgggcggaactgcagcagatccgccaaaaaacaaaaacacatttttaagcagaatcgcagcaacaaaatataacacccgttccctgttccaaaccgcttgaatttggtggaatcggccttgatagtatttcactttcttgaaaatattcgctttagataagaaaattgacttgtgacaaatatttacatgtattgcgctggttacaaaccacaaaagttgcttaactttaaattttacgaatcgacatttatgatatttcgcatgcttgaaaatagttgtagtttcctatttgggaatcattgaaaaatccatttataaagcgaaatccagttctggcacgttcaatttgaatcggttaatttctaatctagttggcgaaaaagtgaagaaaagtgaagtccacctcctccaaattcaacttgaaacggaaacgggttaccggttggagtgcaaataaagtttttagtgtagtaagtgttgacaaaatcgatagagaagaaattagaggagtaactgaggcagtaagcacgtaacga

SEQ ID NO: 25022 - DNA, 2838 bp, DROSOPHILA
atgctgttcaacaaatgtctggaaaagttgtccagctcgctgggcaatgtggtcaatcacaagctgcaagagaaacaagtctacaacaacaacaatatcaacaataacaataacaatacgctaaacaacaacaatgcctacaacaatcagcgaaactttgagtacgaaagagccatacaggcgcactacggaagcaagggaagacgctcggaggagcgcgaaaggagcggcaagttcaaggccagcaagggtcggaaagcaaaggtcaccccaccaacggagacacccgaggcccaggagccggcctgcaagaactgtatgacccacgacgagctggcccagatcataaagggcgtggccaagggcgctgacgcgcaacgtaatcgagacaaccgactgcagcgcagacgtcgtcctctctccgcccaaccctccgccgctgcctccgcctccacatcgacggaatctctgcaccgtcttacacccagcccgcaggcttcctacccggccacgcccacctcctggacagccacaccgccccagttcccagccgccttcggcggcgccagctgctccaacagcacactgtccctcttggccaccatgcgcgtccagctccatggttacacatggtttcatggcaatctttccggaaaggaagcggaaaaattgatcctggagcggggcaagaatggttcgtttctcgtccgtgaatctcagagcaagcctggcgacttcgtcctttccgtgcgcacggacgacaaagtaacgcatgtcatgattcgatggcaggacaagaagtacgacgtcggcggcggggaatcctttggcaccttgtcggaactgatcgatcactacaagcgtaatcccatggtggagacgtgcggaaccgtggtgcatctgcgacagccattcaacgccacacgaatcacggcggccggcatcaatgcccgggtggaacagctggtcaagggaggtttctgggaggaattcgaatcgctgcaacaggacagtcgggacacattctcgcgcaacgagggctacaaacaggagaaccgcctcaagaatcgctaccgcaacatattgccatacgaccacacgcgcgtcaagctgctggacgtggagcatagcgtggccggagccgagtacatcaatgccaactacatacggctgcccaccgacggcgacctgtacaacatgagcagctcgtcggagagcctgaacagctcggtgccctcgtgccccgcctgcacggctgcccagacacagcggaactgctccaactgccagctgcaaaacaagacgtgcgtgcagtgcgccgtgaagagcgccattctgccgtatagcaactgtgccacctgcagccgcaagtcagactccctgagcaagcacaagcggagcgaatcctcggcctcttcatcgccctcctccggctctgggtccggaccaggatcgtcgggcaccagcggagtgagcagcgtcaatggacccggcacacccaccaatctcacgagcggcacagccggatgtctggtcggcctgctgaagagacactcgaacgactcgtccggagctgtttctatatcgatggccgaacgggaacgcgagagggagcgcgagatgtttaagacctacatcgccacccagggctgtctgctcacccagcaagtgaacacggtgacggacttctggaacatggtctggcaggagaacacgcgggtgatcgtcatgaccaccaaggagtacgagcgcggcaaagaaaagtgcgcccgctactggccggacgagggtagatcggagcagttcggccacgcgcggatacagtgcgtctcggagaactcgaccagtgactatacgctgcgcgagttcctcgtctcgtggcgggatcagccggcgcgccggatctttcactaccatttccaggtgtggccggatcacggagtgcccgccgatccgggctgtgtgctcaacttcctgcaagatgtcaacacgcgtcagagtcacctggctcaagcgggcgagaagccgggtccgatctgcgtgcactgctctgcgggcatcggtcgcactggcacctttattgtgatcgatatgattctcgatcagattgtgcgcaatggattggatactgaaatcgacatccagcgcaccattcagatggtccgatcgcagcgttccggtcttgtgcaaaccgaggcgcaatacaagttcgtctactatgcggtgcagcactatatacagaccctgatcgcccggaaacgagctgaggagcagagcctgcaggttggccgcgagtacaccaatataaagtacacgggcgaaattggaaacgattcacaaagatctccattaccaccagcaatttctagcataagtttagttccgagtaagacgccactgacgccgacatcggcggatttgggcactgggatgggcctaagcatgggcgtgggcatgggcgtcggcaacaagcacgcatcgaagcagcagccgccgttgccggtggtcaactgcaacaataataacaacggcattggcaatagcggctgcagcaacggcggcgggagcagcaccaccagcagcagcaacggcagcagcaacggtaacatcaacgccctactgggcggcatcggcttggggctgggcggcaatatgcgcaagtcgaacttttacagcgactcgctgaagcagcaacagcagcgcgaggagcaggctccggcgggagcaggtaagatgcagcagccggcgccgccgctgcgaccgcgtcctggaatactcaagttgctcaccagtcccgtcatctttcagcaaaattcaaaaacattcccaaagacatga

SEQ ID NO: 25023 - protein, 945 aa, DROSOPHILA
MLFNKCLEKLSSSLGNVVNHKLQEKQVYNNNNINNNNNNTLNNNNAYNNQRNFEYERAIQAHYGSKGRRSEERERSGKFKASKGRKAKVTPPTETPEAQEPACKNCMTHDELAQIIKGVAKGADAQRNRDNRLQRRRRPLSAQPSAAASASTSTESLHRLTPSPQASYPATPTSWTATPPQFPAAFGGASCSNSTLSLLATMRVQLHGYTWFHGNLSGKEAEKLILERGKNGSFLVRESQSKPGDFVLSVRTDDKVTHVMIRWQDKKYDVGGGESFGTLSELIDHYKRNPMVETCGTVVHLRQPFNATRITAAGINARVEQLVKGGFWEEFESLQQDSRDTFSRNEGYKQENRLKNRYRNILPYDHTRVKLLDVEHSVAGAEYINANYIRLPTDGDLYNMSSSSESLNSSVPSCPACTAAQTQRNCSNCQLQNKTCVQCAVKSAILPYSNCATCSRKSDSLSKHKRSESSASSSPSSGSGSGPGSSGTSGVSSVNGPGTPTNLTSGTAGCLVGLLKRHSNDSSGAVSISMAEREREREREMFKTYIATQGCLLTQQVNTVTDFWNMVWQENTRVIVMTTKEYERGKEKCARYWPDEGRSEQFGHARIQCVSENSTSDYTLREFLVSWRDQPARRIFHYHFQVWPDHGVPADPGCVLNFLQDVNTRQSHLAQAGEKPGPICVHCSAGIGRTGTFIVIDMILDQIVRNGLDTEIDIQRTIQMVRSQRSGLVQTEAQYKFVYYAVQHYIQTLIARKRAEEQSLQVGREYTNIKYTGEIGNDSQRSPLPPAISSISLVPSKTPLTPTSADLGTGMGLSMGVGMGVGNKHASKQQPPLPVVNCNNNNNGIGNSGCSNGGGSSTTSSSNGSSNGNINALLGGIGLGLGGNMRKSNFYSDSLKQQQQREEQAPAGAGKMQQPAPPLRPRPGILKLLTSPVIFQQNSKTFPKT

SEQ ID NO: 25024 - DNA, 2469 bp, DROSOPHILA
cgatgtgctttccatatctagataatgattgcgaaaagcagtttggaaaaaatattatatattgattgtttgtataagtaagttttatttatttcatcaaaaaattctaagcatatatattgagagcatcgaagtatttatttaattgcagtaaagacggattttttatagatgtcgattaaatgtttcgaatctgatcttggtattttattgtgcaagggctcgccggacattctcgcaggacaacgtgttacatcgctcaagggtcactgcacaaagataacatatgtataaaatatattttttaaaaagtgtttatatatacttacatatacaattagcttttgcgagttcgcatcgggagatttcacgccaatttctttgtgttcgccgacagttctcattgaaaatattcgaaatatcgttgtttctgccatttctcacgacccttgactcacatctggcgacaatccgtctacaaatatctctatcactttgggcctgaacgataacgaaaaggcaaataaaagctaaataaaagaataaaacatatatttgataatataagtatttggattgtgaaattcaatttacaaatccttaccaataaacagagtaatcttggacatcgtgaattccgtactaaaaatcgtttacgaactgttttccttgagcccaaacatgagcttttataaagtgtagcccgctttaacgaaaaacacccggcttttaatttttgatgtacttttttactgacatccaggaagcaaaataaaaggcttattcaacttaacaaaaacttgtcctagtttgaatacatttcctaaaacttttgcaccctttactaaaggtttttatttctggtttgccatatttttaaaacatctgtcatttctgagacatattgtttatggtatttatataaagtccagttggatcggaaacttctgtagtgagccaactgataagttcccatagtgagagagtttaaactacaataatgcgcctgaaaacagttttaaccatctttttcggtaagttaaagctggaaataattatgatatcatatttagaacttaaacatttggttcttagccatatcgctgactctggttgctggtcaagatcgggactgtgatgaattggcaaggagatgtgaatcctgtgtgaggcgtctaaataatacaatcgatcgcgatttacccctcttcaatagagagtgcagacaaaggaccgaattatcttggcgctggaggaacgtcggacgctgtgagctctccaagctaaattgcttgggtaagttttgcacacaaaacttatatgaatttgtatctttaataaacgttttttatgctataggttggcaatcacccatgaactgtgaagacattgctatgagggctggtatggaacgcaggcgtacttaatagttatccactaatgcataaatgaaatgattaaaaaaaaaataaaaagagcatcgaagtaaaaaactaagttattttatttgtcatacaattcaaatttcttcgcgccacttatgcatcgcatatcgcactatccgatcttcaatttcatgttcaacgtgtggctcatactgaccgtaatctgtgtcttgctgattttctggatttcgttagataaacgtagaacatttaaaatttgctggactttcgatatatcattcatactaccttcaagattatccattccagtggtataatgatcaacgtacgattcgacataattatcagttgtagcatcttcttgaggacctgggtggttagtactgtcatggttttcattgtgataatcatacgacattgtcatctcattatcactacttgccacatcctcatctggccgtgttaggtgatcatctaagggctcttctggattgaaatattctgcatattctggttgtccaaagtctttgcataacaaatgttaagcacccgaaataatttacgaatattcagttgacttaccaactagcagtagaacgcaaaataaattaaaatttataataaatcccatgttctccttgtcgctcagatacttataatactgatggatggcagtaaaaaacattgcatttaccatttcgagcttttaatatttaaacagcatgtttcttattaagtattcatatgtatgatgtttacctggatctatttgcttaccgaaaattatatttacgatatcaaagctcttaatacccgggccaattgtcaataattaaaataaattacaatttttgtatttattcgactggtcaagaaaacttagaaaggtcattatccccatccttttttttgtcgaaattcctatgaaatacctcgattagtagacagtggaagctctttaaagaatttcagaaagcttctggccattctccagcaccagaacttcaccacgggcccagggagaattcaccacgaccgatcaactttagctaaacctctcact

SEQ ID NO: 25025 - DNA, 345 bp, DROSOPHILA
atgcgcctgaaaacagttttaaccatctttttcgccatatcgctgactctggttgctggtcaagatcgggactgtgatgaattggcaaggagatgtgaatcctgtgtgaggcgtctaaataatacaatcgatcgcgatttacccctcttcaatagagagtgcagacaaaggaccgaattatcttggcgctggaggaacgtcggacgctgtgagctctccaagctaaattgcttgggttggcaatcacccatgaactgtgaagacattgctatgagggctggtatggaacgcaggcgtacttaatagttatccactaatgcataaatgaaatgattaaaaaaaaaa

SEQ ID NO: 25026 - protein, 100 aa, DROSOPHILA
MRLKTVLTIFFAISLTLVAGQDRDCDELARRCESCVRRLNNTIDRDLPLFNRECRQRTELSWRWRNVGRCELSKLNCLGWQSPMNCEDIAMRAGMERRRT

SEQ ID NO: 25027 - DNA, 4253 bp, DROSOPHILA
ttgcgctacttcggcggcttctctatcttatcatggaatgaaacaattttctattttttattcatgactatagtatagacagatttcggttctctttcggccattatgtgccaaaatgaaactttacttttagcagtaggaattgggagtctgcaaggtgagatgatgaccttatatagaggaatttgccatctgtttgtctctatcccagtttcctctcgcacacaaaaagcaacgaaaccgagaagggcggtgctgcacatgcgtgtgggataacggggcacaggacacgaaggtgatgttgatgatgacgaatctttctagtccttgcccgaaaaatcaatacccacatgctgggcatgggcccatgagccgaaaacaaccctcggaaacgccttaaaacccgagcagctgcaacatcagaattgttgtgcccaagtatggctctcaatatctctctctctcgctttcgacccgaccggcttacaaatgtgtatttctatatttatatatacactttatatacatagaatccggtatgacggtgtcatttcgctaaacgagtgtcaaccacgcatttcctccaataccagtgtagcgacttatttcggttaattgtttttatttgtttacgcgacataaacaacgaccatcgcaaaaagttcaggtgacgtaatgccctgaaaaacagacgatttatgcgccagatggtcggtagttggagcactgagctgcagttttaacctctcagcaaacagacaacgccaacgcctctctccaactggtacccactgctcctcccactcctcctccgtttccctcttgcagagacgagagtgggtcgcgagacccgaacaaccggtgatgtaagccgcatcggaagcaggggggctttttggggtggcagagcccggctctgaggtcgccggcattgcgtgggggcagcacgtagacatatagacagacagacagatagtagttatacagctcagttccagcccacgcccgaagattcgagtaagatcggtcggcggaacgcaatgacagctgcgcctcgagatccgaaacgaaaacccacgccagatgacgttatcgttggtgtggcgatggtgctgctggtcgtggtggtggaaacgcaccaaaaatggcagcgaataagttatgttaatcggagctcggcccatacacagagtttatgatggcgtacatgggtggcctaaaccacgtagccgagcccagacatgtgtatgtacatcggctgcttcttgtgcccatttattccaatcaataaagagttatatatagactgactttccataacccatcacacattttgttcgagaaggtttctgtatcgaagttatctgtataagttaagagaaaaacaagaaaataagattgcctttcacatgcatcaactttcactgggtatggaagaaaaattttaagcaaattacttgcagaattggaaatgagtttcagtgattagtaaaagttttcttcaactgcagtactcttgtgcaaataaaagttaccgttgcttaagcataaacttcttttgtgatttatgtgaagcagtcaaataaatactagctgtatatatgtatgcagcagatggtctaggctttgagtaattttactaccattgattttctgtgatgactcattggccaagtcattcatacattttcttaagactgagttagaaaacaccccctagtaatcgattttcctgctgactcatgttcacaagaaatgctgtacagcacctgcaagtcctaatcgcactaatcccaaattctttacttccatttctcatttgcagttctgggagatcatctccgatgagcatggcatcgatgccaccggcgcctaccacggtgacagcgacctgcagctggagcgcatcaatgtgtactacaatgaggcgtccggtggcaagtacgtgccccgcgctgtccttgtcgatctggagcccggcaccatggactctgtgcgatcgggacctttcggccagatcttcaggcccgacaactttgtgttcggccagtcgggtgccggcaacaactgggccaagggtcattacacagagggtgctgagctggtggactcagtgctcgatgttgtccgcaaggaggccgaatcctgcgactgcctgcaaggcttccaactcacacactcccttggcggcggcactggctccggtatgggaaccctgctgatttccaagatccgcgaggagtaccccgacaggatcatgaacacatactcggttgtgccgtcgcccaaggtgtcggacaccgttgtggagccctacaacgccaccctgtcggtgcaccagctggtcgagaacacggacgagacctactgcatcgacaacgaggctctctacgatatctgcttccgcaccctcaagctgacgacacccacatacggtgacctgaaccatcttgtctccctgaccatgtccggcgtaaccacctgcctccgattccccggccaactgaacgctgatctccgcaagctggccgtcaacatggtgcccttcccacgtcttcacttcttcatgcccggcttcgctcccctgacctcccgaggatcccagcagtaccgcgccctcaccgtgcccgagctgacccagcagatgttcgatgccaagaacatgatggccgcctgcgacccacgccacggacgctaccttaccgtcgccgccatcttccgtggacgcatgtccatgaaggaggtcgacgagcagatgctgaacatccagaacaagaacagctcctacttcgtcgaatggatccccaacaacgtgaagaccgccgtgtgcgacatcccgccccgtggtctgaagatgtccgccaccttcatcggcaactccactgccatccaggagctgttcaagcgcatctccgagcagttcaccgctatgttcaggcgcaaggctttcttgcattggtacaccggcgagggcatggacgagatggagttcaccgaggccgagagcaacatgaacgatctggtgtccgagtaccagcagtaccaggaggccaccgccgacgaggacgccgagttcgaggaggagcaggaggctgaggtcgacgagaactaaattcgaatcggaaatcaatcgaattctcgatcaatgttttgcgaaaaaaaatgaaacgagaacaaatgaattcagttgtaaaagatttgttctcttaacaacgtaatcaataaagtcggatccaattttgttcacaagtctaaacaattatggtttttgttggggtttcttataattaataagagagatatcaatcattttacgaggattatgagactgcgttttgtagtccaagaaagctgattaatgtttagagtgttggtataaatgttaataggctcattaatgtaggttttgacaaaagcgaggtatttgtacattttctcattgtattatttggattcacaaatttatgtttatttaatcgggtttctcccagctaaaaacaatagaaatcttttcaccggctgtgtttgttttggacatggttatgttgtgatgattgataatttcattcacattagtttatttatagaccttttttatttattgacaatgatttgccctacctacctcaactttcgagcaaatgctgcataaacaaaagtaattcgcccttgaagaggacatgacatgatattttcagcgtaggaagtgggcctacgtaccattgtggttcagacggccttgtatgcaataaatctaattaatatatatatatatatatattatggtagtcttaacgctacggtttcccacacgcgattttcatgaagctggagtgtaagttttttgtttttattcaaaacttaaaaatccactttgcatgtgtcataaataatgagtcatgaatcatacccttaattcactttaataagcataattagttcgttgaaatatctctattaactacttctgcggagtagataaacgtgatttgctgttttaatgcgcatatgtattaacaacatattaaatgcacaattaaactgtggtcataataaattattaatatttagcagtgattaaaattcattcttaaaaagaatattggctaatttaatagttgtatggttcttatcttaaaattacaagtttttgatctaaatatattattattaatatataaaataggaattaaaacataattttgcaataaaatatttaaaaatcgataatttatcgattgacaacactgcgc

SEQ ID NO: 25028 - DNA, 1673 bp, DROSOPHILA
cacgcccgaagattcgagtaagatcggtcggcggaacgcaatgacagctgcgcctcgagatccgaaacgaaaacccacgccagatgacgttatcgttggtgtggcgatggtgctgctggtcgtggtggtggaaacgcaccaaaaatggcagcgaataagttatgttaatcggagctcggcccatacacagagtttatgatggcgtacatgggtggcctaaaccacgtagccgagcccagacatgtttctgggagatcatctccgatgagcatggcatcgatgccaccggcgcctaccacggtgacagcgacctgcagctggagcgcatcaatgtgtactacaatgaggcgtccggtggcaagtacgtgccccgcgctgtccttgtcgatctggagcccggcaccatggactctgtgcgatcgggacctttcggccagatcttcaggcccgacaactttgtgttcggccagtcgggtgccggcaacaactgggccaagggtcattacacagagggtgctgagctggtggactcagtgctcgatgttgtccgcaaggaggccgaatcctgcgactgcctgcaaggcttccaactcacacactcccttggcggcggcactggctccggtatgggaaccctgctgatttccaagatccgcgaggagtaccccgacaggatcatgaacacatactcggttgtgccgtcgcccaaggtgtcggacaccgttgtggagccctacaacgccaccctgtcggtgcaccagctggtcgagaacacggacgagacctactgcatcgacaacgaggctctctacgatatctgcttccgcaccctcaagctgacgacacccacatacggtgacctgaaccatcttgtctccctgaccatgtccggcgtaaccacctgcctccgattccccggccaactgaacgctgatctccgcaagctggccgtcaacatggtgcccttcccacgtcttcacttcttcatgcccggcttcgctcccctgacctcccgaggatcccagcagtaccgcgccctcaccgtgcccgagctgacccagcagatgttcgatgccaagaacatgatggccgcctgcgacccacgccacggacgctaccttaccgtcgccgccatcttccgtggacgcatgtccatgaaggaggtcgacgagcagatgctgaacatccagaacaagaacagctcctacttcgtcgaatggatccccaacaacgtgaagaccgccgtgtgcgacatcccgccccgtggtctgaagatgtccgccaccttcatcggcaactccactgccatccaggagctgttcaagcgcatctccgagcagttcaccgctatgttcaggcgcaaggctttcttgcattggtacaccggcgagggcatggacgagatggagttcaccgaggccgagagcaacatgaacgatctggtgtccgagtaccagcagtaccaggaggccaccgccgacgaggacgccgagttcgaggaggagcaggaggctgaggtcgacgagaactaaattcgaatcggaaatcaatcgaattctcgatcaatgttttgcgaaaaaaaatgaaacgagaacaaatgaattcagttgtaaaagatttgttctcttaacaacgtaatcaataaagtcggatccaattttgttcacaagtct

SEQ ID NO: 25029 - protein, 456 aa, DROSOPHILA
MLIGARPIHRVYDGVHGWPKPRSRAQTCFWEIISDEHGIDATGAYHGDSDLQLERINVYYNEASGGKYVPRAVLVDLEPGTMDSVRSGPFGQIFRPDNFVFGQSGAGNNWAKGHYTEGAELVDSVLDVVRKEAESCDCLQGFQLTHSLGGGTGSGMGTLLISKIREEYPDRIMNTYSVVPSPKVSDTVVEPYNATLSVHQLVENTDETYCIDNEALYDICFRTLKLTTPTYGDLNHLVSLTMSGVTTCLRFPGQLNADLRKLAVNMVPFPRLHFFMPGFAPLTSRGSQQYRALTVPELTQQMFDAKNMMAACDPRHGRYLTVAAIFRGRMSMKEVDEQMLNIQNKNSSYFVEWIPNNVKTAVCDIPPRGLKMSATFIGNSTAIQELFKRISEQFTAMFRRKAFLHWYTGEGMDEMEFTEAESNMNDLVSEYQQYQEATADEDAEFEEEQEAEVDEN

SEQ ID NO: 25030 - DNA, 5256 bp, DROSOPHILA
cgcccgattgcaaagtggctgctagcacgggggacaatccttcggcgctgtctggaatgttggtgggcagcagctggcttaccatttccatgggcacaagtgacaccctaatgatgagcttgaaggagccgctaaactgggaggagggtcatatactctgccatccaactgaaacggaagaattcatgggccttctatggtaaattattcctgggacattatatcttaaaattagtttatttaaatgtctttttcagttttagaaatgcttcattggtccgtgaggaaatgaacaagaagacaaccggcggcgattgggataaattcaatgagtatctcgactccacgccccgtggaaactttgggaacatggccgtgcactttaacgacatggaaatcattcccaaggcgcagggtattctgcgatggaacagggaaatggatcccagttccccggacgcggctaggggtgtaatcaagtaagtctgattgaaaatttagctgttttaggtccgacatgaaagcaatgactcataatcagttaacagacatctgtaaatagttatttttagaaatgactttttaccaacatgatcatgttttttgtcgtttatactttttcttaatgcctatttcccttctactgaattctttaaaatgtataaaatattcctgacctctttcgctttatagattcagctcgccccaaatcgaaattcgagccctagttgaaggtcagatgctgcatcaccgggctgtggctgaagaccttggctacaaattcggacccgagacacaaatccttgtcacaggaggcgcatctgttaacaaatcaatcctgcaaacaattgccgatgtgttcaatgctcccgtccatatccaggttagttcataccaactgtttctcaagtgcaagcaatttaagcaacatgtttcttgcaggatgaaggatttgaggctgccctactgggagccgcttatcgatccgcctacgctctgtaccttcaagaggcaggtgatggggtgacgcctctctgttaccgagattatatcctaagtctgacaagtaacaaactgagccttgtatgcgaaccacacaaggacagcgaggaaatctacgctccaatgctacaacgatatcgcgaaatggcgcgcgtcctgtccaatcctaacacataaactctccgaaagcccaacgtaacattccagtttatactccgtacattcacaaactgattccttcttaaacgtctcctgtaattgacagaacttaagtgcaattaacaaattctgtgattgacgatttattacaaatttatgcgaaaccatatacaaataaatttttatatatggcccactccttattgtgtctggtatgcctttaatctttgatccgcctactttttgcgtccaccacgctccttgacctgtaaatgcaccgtggttccgtttaccagattgtaaaaagccatggtattgctgtctttgaagaacattccctgaaggatagatgttattgaaataatagttttcgaaacattagttgtatttcttacctcataaaatatcttctgcttggccggtggcatgccagtttcgtcctgcagcttcgtcttcagattggcaatgggttcagaaagtgccatggtcacggctatcatctgtccattaagcttccactctgatttgtcggaattgggtaccaaaacctgaatggtcacagggctctgaaataatttaagatgggttatataccaatagatagccagatatcaaaatcaaacttaccttgtgggtggcaataaagtctgcttctggaatcaggttgtcctcgcttcgaatctttttagaaggcggctcctcctccattatatcaacaggtggagcaggtgcaatttgctgagggattccaccaggctgcatgttcatgtagcctccaccaccagctccaaaaggcggctctgcaaaataaaaacgctaagccctcgacgagatttgcatactatttgttacttacgcatcatggttggacgcagttgcatcagctgcatcaccggttgaggctgctgcggcgggtgatggtggtgcgactggtgaggtggcgcctgctgatgcggtggatggtgatgatgaggattatgatgcccgtggtgaccacctccgccaccttggtggtgttgactctggctggagtgactgtgctgcgacttggttgacggctgcggcggagctgaaagcgtcgccttgttgcccaccggtttggggccgattttctccttctcctcgtcgggcagcagtcccttaaccttgtggatttgatgaatttgttcctccagagtgatatttgcacgtgctgctctcgtggccgcctccacgctggacgtgtgtccgtcccaggtgacgcgatcgtccttcttcgtctcctcttcgccgagcttcttaccaatgacggtctcctcgtcgcccacaccaaagatatccgtacgacgctcagccagttgcttgagactcgcctcgatggcagtgcccgcggcgaacacattgtcttgattgattttctccacagtatgcttgtctcgctgttccacccagcgtggatccaatagaccgatgcgcatgtgctccgagaccttggaagccggtattttctctcctgtaatcggcgagatgagatactcatccgtaggcattggcgcctgcttcggttgcgttgccttaggatcgtatttcttgaccaccactttgtcgtgggtgggcggcagcattggcgcaacagatggctgcaacttagtggttggagtgtcctcatcactagaggcttcgtccatgtcttgcacctgggtgttgtctctcttggggccagtcggctggccatacgacgatacgttcttcatttgtatacccacacggttctccatttgcgagagtttcagaccgctgtccaataggttgttagcctgggagtcgccctcgtcgtccgactcgatctgcatttctgtatcgccctcttcgtccattagacgctcttccattagcacacgggctcctacctcgtcgggattcgtgggtggcgggaagttgcccgattcgaatggctgatagtccaccgtctccaccaccacaaagtcatgccaatcgatttgggcataggccacgcgctccctttcgatcttctcctcctcacggcggcgttgtgcttcttggtgacgctgccagttggcccgatatttaacctgctccagcacctggttcatgctgctcctgcccggtgcgctctcggaacgcagtttgcccagcaaatcctttggaggtatcaagaccttggtatactgctccagcaacttggtaaagtactggaagagcgagtgctggggtcgcaggaagtcaaactgaaagttacgctgctcccggctcataagattggtcagaaactgtcggccgttacgggccacaaattgagcagttagcttcacaatgtccctgaaaagatatgcaagacaataagacagcgattggaacttcctggcgagtggacacttacaaatccagcgccgaaatggagggcggatcggctatgaactcgaattcaggtggaggttcctttggtacgaactgctgctccaccacttgcttgagaagctcttgctggcgctgttgggcggcactggtcaccgccagctgcttcatgctggcaagggcagtgataccggcatctgaaacggtctcatgtattaagaggaagtattaatgggaagtgaacgaaaacataccattgccctcgcggaactcgttgaccttgtgtctgtagtatgcgtggtagggatctccgccatttaagaagttaaactttggattgcccagctcattttggcggatgcgcgcctcgaattccggtccattgcgagccacaaaactggcggtcttgtcaacgatatctaatagttaaagctttgataactgagtatgggaaacgctaaatgtgtattaaatgaatgtattttgagtaaaaaatggctaaattgagaaaaaagtttgttttctttttggcaaaggatgcttctaacttccggcggcggatagataatcccaatgattggacccgacatcgacttgggctgatcattgccgaactgctcctcgttggcttccgcgtctaaagttgccatggctggtgaaatcgtcctcttttattgataaaatctgattgctttttgagaaatgagaaaacgcttgtttagccgaaaattagaggtggaaggaatagggatggaacaatcgttggactgttgccaccgccatcgatagttttcttacattcatgtagtaatgttagggtgactcaataaacgaactagtttcaagccggaactagtgaaccactggctcagcctatcgattaatttggcgctggatttaaacaatctgtcggacaaaccatcaactcaggcgttaataatggcttataaaatctttacatatatatcagtagatggacggacaaaggcgtgggcagaactgaaccccacggatgaggtctttatttgcatattatgttagtgttggtacggctttgtacgggtggcttgattcaccaagccaaaacaaaaataacatttgtttacgtttgtacgactttattcattcgctgagagagtctgctgccagcacgatagccagatgatgatgatgatgattatccagatgatgaggttcccttgtgcgtgataacgacccgactcattctcattctcatcgactcgattctgtcgagatttgcccccaagctcagtagtctacgaatcgctgagccgtcgacacggtttaattggactgaaagcgcggattaggtccgatagagtcgcagttcggatcacttccttatcacaagctagcgacgtgacttaaatcccattgacgtgcgggtattttgtgaatcacaaccggtggctgaaaaatccgagttctagaacaaagacactgcaatgggtggaattcagtacatctgcctgctggctttcataataggagcatcattattgacaacaatcgatgctaattgtgagtccgctagcagtatttaaattaaactctgtgtttatagagacattttggtgtcaagtatctcattctcgtgctaatttcttttaagagagcacagtcttcttcgtgtagaaaagtagaccaaatagagggaaacctattaattttatagcttgttattcggtttattatgataataaaaactttattgaagta

SEQ ID NO: 25031 - DNA, 2842 bp, DROSOPHILA
tccacctctaattttcggctaaacaagcgttttctcatttctcaaaaagcaatcagattttatcaataaaagaggacgatttcaccagccatggcaactttagacgcggaagccaacgaggagcagttcggcaatgatcagcccaagtcgatgtcgggtccaatcattgggattatctatccgccgccggaagttagaaatatcgttgacaagaccgccagttttgtggctcgcaatggaccggaattcgaggcgcgcatccgccaaaatgagctgggcaatccaaagtttaacttcttaaatggcggagatccctaccacgcatactacagacacaaggtcaacgagttccgcgagggcaatgatgccggtatcactgcccttgccagcatgaagcagctggcggtgaccagtgccgcccaacagcgccagcaagagcttctcaagcaagtggtggagcagcagttcgtaccaaaggaacctccacctgaattcgagttcatagccgatccgccctccatttcggcgctggatttggacattgtgaagctaactgctcaatttgtggcccgtaacggccgacagtttctgaccaatcttatgagccgggagcagcgtaactttcagtttgacttcctgcgaccccagcactcgctcttccagtactttaccaagttgctggagcagtataccaaggtcttgatacctccaaaggatttgctgggcaaactgcgttccgagagcgcaccgggcaggagcagcatgaaccaggtgctggagcaggttaaatatcgggccaactggcagcgtcaccaagaagcacaacgccgccgtgaggaggagaagatcgaaagggagcgcgtggcctatgcccaaatcgattggcatgactttgtggtggtggagacggtggactatcagccattcgaatcgggcaacttcccgccacccacgaatcccgacgaggtaggagcccgtgtgctaatggaagagcgtctaatggacgaagagggcgatacagaaatgcagatcgagtcggacgacgagggcgactcccaggctaacaacctattggacagcggtctgaaactctcgcaaatggagaaccgtgtgggtatacaaatgaagaacgtatcgtcgtatggccagccgactggccccaagagagacaacacccaggtgcaagacatggacgaagcctctagtgatgaggacactccaaccactaagttgcagccatctgttgcgccaatgctgccgcccacccacgacaaagtggtggtcaagaaatacgatcctaaggcaacgcaaccgaagcaggcgccaatgcctacggatgagtatctcatctcgccgattacaggagagaaaataccggcttccaaggtctcggagcacatgcgcatcggtctattggatccacgctgggtggaacagcgagacaagcatactgtggagaaaatcaatcaagacaatgtgttcgccgcgggcactgccatcgaggcgagtctcaagcaactggctgagcgtcgtacggatatctttggtgtgggcgacgaggagaccgtcattggtaagaagctcggcgaagaggagacgaagaaggacgatcgcgtcacctgggacggacacacgtccagcgtggaggcggccacgagagcagcacgtgcaaatatcactctggaggaacaaattcatcaaatccacaaggttaagggactgctgcccgacgaggagaaggagaaaatcggccccaaaccggtgggcaacaaggcgacgctttcagctccgccgcagccgtcaaccaagtcgcagcacagtcactccagccagagtcaacaccaccaaggtggcggaggtggtcaccacgggcatcataatcctcatcatcaccatccaccgcatcagcaggcgccacctcaccagtcgcaccaccatcacccgccgcagcagcctcaaccggtgatgcagctgatgcaactgcgtccaaccatgatgcagccgccttttggagctggtggtggaggctacatgaacatgcagcctggtggaatccctcagcaaattgcacctgctccacctgttgatataatggaggaggagccgccttctaaaaagattcgaagcgaggacaacctgattccagaagcagactttattgccacccacaagagccctgtgaccattcaggttttggtacccaattccgacaaatcagagtggaagcttaatggacagatgatagccgtgaccatggcactttctgaacccattgccaatctgaagacgaagctgcaggacgaaactggcatgccaccggccaagcagaagatattttatgagggaatgttcttcaaagacagcaataccatggctttttacaatctggtaaacggaaccacggtgcatttacaggtcaaggagcgtggtggacgcaaaaagtaggcggatcaaagattaaaggcataccagacacaataaggagtgggccatatataaaaatttatttgtatatggtttcgcataaatttgtaataaatcgtcaatcacagaatttgttaattgcacttaagttctgtcaattacaggagacgtttaagaaggaatcagtttgtgaatgtacggagtataaactggaatgttacgttgggctttcggagagtttatgtgttaggattggacaggacgcgcgccatttcgcgatatcgttgtagcattggagcgtagatttcctcgctgtccttgtgtggttcgcatacaaggctcagtttgttacttgtcagacttaggatataatctcggtaacagagaggcgtcaccccatcacctgcctcttgaaggt

SEQ ID NO: 25032 - protein, 784 aa, DROSOPHILA
MATLDAEANEEQFGNDQPKSMSGPIIGIIYPPPEVRNIVDKTASFVARNGPEFEARIRQNELGNPKFNFLNGGDPYHAYYRHKVNEFREGNDAGITALASMKQLAVTSAAQQRQQELLKQVVEQQFVPKEPPPEFEFIADPPSISALDLDIVKLTAQFVARNGRQFLTNLMSREQRNFQFDFLRPQHSLFQYFTKLLEQYTKVLIPPKDLLGKLRSESAPGRSSMNQVLEQVKYRANWQRHQEAQRRREEEKIERERVAYAQIDWHDFVVVETVDYQPFESGNFPPPTNPDEVGARVLMEERLMDEEGDTEMQIESDDEGDSQANNLLDSGLKLSQMENRVGIQMKNVSSYGQPTGPKRDNTQVQDMDEASSDEDTPTTKLQPSVAPMLPPTHDKVVVKKYDPKATQPKQAPMPTDEYLISPITGEKIPASKVSEHMRIGLLDPRWVEQRDKHTVEKINQDNVFAAGTAIEASLKQLAERRTDIFGVGDEETVIGKKLGEEETKKDDRVTWDGHTSSVEAATRAARANITLEEQIHQIHKVKGLLPDEEKEKIGPKPVGNKATLSAPPQPSTKSQHSHSSQSQHHQGGGGGHHGHHNPHHHHPPHQQAPPHQSHHHHPPQQPQPVMQLMQLRPTMMQPPFGAGGGGYMNMQPGGIPQQIAPAPPVDIMEEEPPSKKIRSEDNLIPEADFIATHKSPVTIQVLVPNSDKSEWKLNGQMIAVTMALSEPIANLKTKLQDETGMPPAKQKIFYEGMFFKDSNTMAFYNLVNGTTVHLQVKERGGRKK

SEQ ID NO: 25033 - DNA, 1934 bp, DROSOPHILA
tgcttcccaattttttttatctaactcgacacattatttatttcggttccgcggactacctgattggtccaccgatacttagtacagtagacaacatagcagacgacagcaagaatagaagaatagaggtgcattatcagctatcgttagaaaaacccagcacaatgtctaggtttattgagacgtcacaattctccagaagaattcgcaatcttaacaagccagataattgtcacagaaccataagtaataagattgtagaacatggcactagaatcccacaaaaagaaccagaaatggttatgaccttcgtgcgaggtgtactacgacttgcctcgtctactggaaatcaaagagccagtcgaaccagaattcaaagcctttaacctgctcttcgcaacacttcatttataaaaagacaaccaccaattccacccccaagaattcgaaattaccaatttgatcagcaaccaccggcctctaccaggaaaaattatcataacttcggttttcaccttgcacagcctgcagctgcctgcatttttaataaaggcaataggtatatgatatgatttttaacattattttatttagaataacaagatgcgtaacaacggacatgcattggttttccactatgctgccactttttttggtgacggtcaaaattgctctcactccgctcgcttaaaacgattaagtgaacatgacattgtgtacaagataccattgtttggctcatactgtatattttaaaaaaggaattgtaatctgcaacaccaaattatgcgtacacttaaaaacactgaagtgaacctcctgtgagcggttcttactcctgagtacaattttgagatgacataatcaaacaattcaataaatatagttttttcgtgtaactcagtgatatcaattctccactacaataaatgtttctgtattgtttatttctgttacagatttgctcttcctccaatccctccaactatcgcgccttgctatgtgtcatttaaatcccctgcggtattgtttagccccagtggccacagcatttgctggtgttacaagaacttaccagctggcctattgtcatactgttttggagcgcaacgctcgccgtaaactggctacagtttacggtcatgaaaaatgcatgcccgatgagacgctggaatcgttttttcccttcgatccttatgtacttaagttgtgagtataccctttacaaatctctggattaaaataatattctttttgcatttcaagatcaaaaaaatatattgagactaattatatggtttaccagagcaatgacacggatgagtatgtctatgggtctaacaaatacgggcattctaggaaacgtggtgactctgaaatgctagaggaagacgaattcctaattgtcgacaaacgtccaaagaattttgatctgtctaaaagtcaggaatttgacaaacaatttcatttcggatcttcgccatgattttacgaataagtcgtatttgttcaaaattacttataaaaaagaaattataaatgcaataaattttttactctgggttgcagttaagttttgtttgggatgtcaacattttgttcttcactgtagctgccatagaatcgatggttattttatagcatatcgattggaatacattattttggtgagactgaaacttattgcaatacataatactttaataatatatactgtcgggtctcgaattggctgccaaccaacaattaggcacctcagcgctggtacctttggcttagcgatctacatttgctctacaattaaagtcgcacatcactcgcttccgcatcaatgcagaatctcgtttgaacaaacaagaacataataatttttttttagctcaacatttagtgaccccgacgtgagcaatacatagtgcatgccatcaacatta

SEQ ID NO: 25034 - DNA, 429 bp, DROSOPHILA
atgtgtcatttaaatcccctgcggtattgtttagccccagtggccacagcatttgctggtgttacaagaacttaccagctggcctattgtcatactgttttggagcgcaacgctcgccgtaaactggctacagtttacggtcatgaaaaatgcatgcccgatgagacgctggaatcgttttttcccttcgatccttatgtacttaagttatcaaaaaaatatattgagactaattatatggtttaccagagcaatgacacggatgagtatgtctatgggtctaacaaatacgggcattctaggaaacgtggtgactctgaaatgctagaggaagacgaattcctaattgtcgacaaacgtccaaagaattttgatctgtctaaaagtcaggaatttgacaaacaatttcatttcggatcttcgccatga

SEQ ID NO: 25035 - protein, 142 aa, DROSOPHILA
MCHLNPLRYCLAPVATAFAGVTRTYQLAYCHTVLERNARRKLATVYGHEKCMPDETLESFFPFDPYVLKLSKKYIETNYMVYQSNDTDEYVYGSNKYGHSRKRGDSEMLEEDEFLIVDKRPKNFDLSKSQEFDKQFHFGSSP

SEQ ID NO: 25036 - DNA, 5407 bp, DROSOPHILA
aaaagtgtcgtagacagttatataaattaactgtattagcagaagtgtttatctaatcgcttcacgcattttttttcgagcgccgcccctcttccgcctgcgtgaaagagacgaagcgtgagagagagggagagagcggcaggtggacgtcagaaagcaaagtcacatgctagcagtgctgccaaccctatctttagaaataaagccaaatgttattaatagcttagcaattaaatagctacaaacaattaataaaacctttcaactcttttcaacttttatttttataaaaattgataatagttttggtttttgtatttgaataaattgttcactgctgtatattgaagttttctaagccagtccaagtagttcttaaaactgaatatcaaagataccccaattttgttgaataaggaagacatgtatttgggtgtaatagaagtacactattcaatcttctagaaatctagctaacaactagctaaacgggactatccgtctgcttcgcagctgacttgtcggctatttgccaaatgtaaatgttgtgcgtacattcattttggcaagcgtttagaaagcgccgtcgaaaacctcgaaaggggtaaatgaaaaacaattggccatatatgcatttttggtcatggccaaaacgaaacaaaaagtgttttctaatgagtacaagtgtgtggtacaatacttcctcttatgcaacgaatggcgacattgaattcttgaattctcagcactgataagcggcgatctctcgccctctctcgctcgcacacgtgctgttgccaaccgctagttttttttcggctctctccgaatttcgcatactctgcatatgcatatagagagagaacgctctccccctctctcgctcacgctcatctgttgctgaacttgacgatggcggcgactgcgacgccgacgtaggcagagcaggctagctggcagatttcggcgaaaggaactttcacaagcaattcagttgccgtccggttcagacttctgacttccgaggaataaggataaatttttttcggttttgtgctgtgatatagaaacacaaatacaaattgtacgtatggcaaacaaattggatatcaattatcgaatcgaattgagccatagcccatttaacaaaatacgcgtgtggttcctaatgcttttattattattttttttttttaaatcaaatccaacctgagcattgaaagaaaatctgcctggttatgtaaaacaacaaaagagttgaacttgaatcattcattgaacaattttttttctggtgtgtggtggtggtcttatgcaatcaataacaatgaattaagaataaacttaacactggattgtggatactactacgactgctcagccttcggtggaagctttccacgtgcaactgtagaatttttccagctgaggctattacatcacgagccttttagctctcggctctctgtggctgtggccgaagaaaaagcttcactctctttccagccaatcaaaagtctaacacgattagataacggttgttatttcaaagaaagagaacagaagagaaacgaaacaatggcaaagcacagttctctttgccaagtgtgttacataaaacccttgtcaatgaaatgctgatttaatttcgctaaaatataatttaaaccacacggctaacgcagagcggcggctgctcttgaaagtctaaaattaacaaaacgcgcttcaatggcgaatgccaactgccaaaaaaaaaaaccgtggcctctatagccatcttgctcacacccactcaaatgcccatatatattggctttttccattgaactttttcaattcaattcttttctttttttttgtgtggtgtggcaattatgcaatcccccaatctttactcaatgaaaaccagtagactgccgctctatccaactagaactgcaattgatttatgtcatattctctagataacataaattagataagcacttatgtatttatgtatgccacgtaatgccatgtattttacttagttttcaaagctaactggttagaacttaattttccaacagtacttattttatatcgatttaaaccaccacgtggcaaccagccggccaataaaacttttcaccttttttgcacaaaaccagttttaccggcaactgccaacacgcatactaacacaaacaacaaataattgtaaccaaaacgctgatgtttccataaaccattcaatattaaccccctttagcattaagtttaagttgccatttatactaactgtgcatgtttttatttgtttcatttgtcgctaaaacctttttacttcacccgcaaaaatgttttgtaaccatttgtagtgctgttcaaaaaaaaaagtgcatgtttttcggtttcggtttataactgttcaaaaaaataaaaaaaaagtgcatgtttttcggtttcggtttataatttaatacattgaaaattttcacattttcatttggctttgggctattcttctattgtgcctttttttgcacccgtgtaaacaaagtgaatcgtacatccactatacaaaaataccgtaaacgtatatcgtaaccattatgcaacgcaccatcacccgcatgccatggggaatatatcagcatccataacatcacaaaggtatatcatcatcggtatcaccaagtatcaccatcagcgatgacggaactgtcgagattaatcagagttttggccaattgcacgatgtgtttacagcaaaatgggcaaggatttcgatgctgttggattcgtcaaggatttcgctgccggaggcatctccgcagctgtctccaagactgccgtcgcccccattgagcgtgtgaaactgctcctgcaggttcagcacatctcgaaacaaatcagccccgacaagcagtacaagggcatggttgattgctttatccgcattccaaaggagcagggattctcgtccttctggcgcggcaacttggccaacgtcatcagatacttcccaacccaggctctgaactttgccttcaaggacaagtacaagcaggtgagactttgcagtctgcatgttagcaatgcgagcggaaaacactaacgccccggttgctattatgtgtgtaacttaggtcttcctgggtggcgtggacaagaacacccagttctggcgctacttcgccggcaacttggcctccggtggtgccgctggtgctacctctctgtgctttgtctaccccttggactttgcccgtactcggtatgttggtatatttgcgaaaaacaaaaaaaaaatgtccaataaactaacgtaatgctttcgctacgaatttacagcttggctgctgatactggcaagggtggtcagcgtgaattcaccggtctgggcaactgcttgaccaagatcttcaagagcgacggcatcgttggattgtaccgtggtttcggagtgtccgtgcagggcatcatcatctaccgtgccgcctacttcggcttctacgataccgctcgcggtatgctgcccgaccccaagaacacacccatctacatcagctgggccatcgcccaggttgtgacaaccgtcgctggcatcgtgtcctatcccttcgataccgtgcgtcgtcgcatgatgatgcagtctggtcgcaaggccaccgaggtcatctacaagaacacactgcactgctgggccaccatcgccaagcaggagggcaccggtgccttcttcaagggcgccttctccaacattctcagaggaactggtggcgctttcgtgcttgtgttgtacgatgagatcaagaaggtcttgtaaattaaattattaaattattcaaaacaagcaaaatacaacaacatacaacaacaaaacaaaacaaaagaagtaaaactaaacactaccagctaattatgttagataactgaatgagaaaagctaaaacaacagcaatagcaacagcaaaggcataagctaagtttgatctgcaaccaacacctcttaccacgaacaacggcaagcaataacagcaagaacccttccttcctcaccccgatataattatgaaattatattatttataaaaactgggaactaatttacggaacgatggccagcgtcaatagaacaacaatactacagcaaacagcaatgctcggggcagagagaggatgcgactcagcacatgagactagacccactacactgaaagacgaacgaacatagcgacgatatcgattagtattgttaagtttgggttaggctatatactatagatccagtcatgttgctgggtcgtcccacatctccccagccaaatcagtgttatcgatcggatgcaaagaatcgaaccgaagacctgtagattctttcgcctccgaaacgacaaaccaacaaacaaactcaacttcggttggtttaaaaatatataaaaattgataaaaatagtacaatgttgtgtttttctttctgcgcacgtacatatgtatgtatgtatatcgatctttcatatttcgacttgaacccaattattgcaatgaaagtacatatgtatttgtaattcaaaaattatattagcatacttacacagaccatttgtgcagtcaaccaattggtcgtctcaatttaatcttcggcagttcgaagctaaattattataattattttctgttgttaaaagaggaaaaaaacgtacgctcatcgcttctaaaattgttggtcaaagtaggccacgataaatacatcgaatgtcatttcgaccgactggcacacaacctcgttagccaatctcagttcagatctcaacgttgtaacatcaaaattaaaaattgtaaaaagtgaaagtccgtttttatccttttttaccaaccaactttgaagctaaactaaatcgttttaaaatcattaaacagtaaactaacatgggcgatgaaggcggtggcggtggtcatggcaagggagaccttaagtctttcctcatggacttcatgatgggcggcgtttcagctgccatagccaaaacggcagtggctcctatcgagcgcgtgaagctcattctgcaggtgcaggaggtttccaagcagatcgcggcagatcagcgctacaagggcatagtcgattgcttcattcgcattcccaaggagcagggcttctcgtcgttctggcgcggcaacttggccaacgtaatccgatacttcccaactcaagcccttaactttgccttcaaggatgtgtacaaatcggttagttgtttggacaatccttataataatcatttcacatacgcctataacatataaaacataaaacatactacaggtattcctcgggggcgtggacaagcacaagcagttctggcgccactttgcaggaaacttggcctctggcggtgcagcaggtgccacatctctg

SEQ ID NO: 25037 - DNA, 1581 bp, DROSOPHILA
tccggttcagacttctgacttccgaggaataaggataaatttttttcggttttgtgctgtgatatagaaacacaaatacaaattcaaaatgggcaaggatttcgatgctgttggattcgtcaaggatttcgctgccggaggcatctccgcagctgtctccaagactgccgtcgcccccattgagcgtgtgaaactgctcctgcaggttcagcacatctcgaaacaaatcagccccgacaagcagtacaagggcatggttgattgctttatccgcattccaaaggagcagggattctcgtccttctggcgcggcaacttggccaacgtcatcagatacttcccaacccaggctctgaactttgccttcaaggacaagtacaagcaggtcttcctgggtggcgtggacaagaacacccagttctggcgctacttcgccggcaacttggcctccggtggtgccgctggtgctacctctctgtgctttgtctaccccttggactttgcccgtactcgcttggctgctgatactggcaagggtggtcagcgtgaattcaccggtctgggcaactgcttgaccaagatcttcaagagcgacggcatcgttggattgtaccgtggtttcggagtgtccgtgcagggcatcatcatctaccgtgccgcctacttcggcttctacgataccgctcgcggtatgctgcccgaccccaagaacacacccatctacatcagctgggccatcgcccaggttgtgacaaccgtcgctggcatcgtgtcctatcccttcgataccgtgcgtcgtcgcatgatgatgcagtctggtcgcaaggccaccgaggtcatctacaagaacacactgcactgctgggccaccatcgccaagcaggagggcaccggtgccttcttcaagggcgccttctccaacattctcagaggaactggtggcgctttcgtgcttgtgttgtacgatgagatcaagaaggtcttgtaaattaaattattaaattattcaaaacaagcaaaatacaacaacatacaacaacaaaacaaaacaaaagaagtaaaactaaacactaccagctaattatgttagataactgaatgagaaaagctaaaacaacagcaatagcaacagcaaaggcataagctaagtttgatctgcaaccaacacctcttaccacgaacaacggcaagcaataacagcaagaacccttccttcctcaccccgatataattatgaaattatattatttataaaaactgggaactaatttacggaacgatggccagcgtcaatagaacaacaatactacagcaaacagcaatgctcggggcagagagaggatgcgactcagcacatgagactagacccactacactgaaagacgaacgaacatagcgacgatatcgattagtattgttaagtttgggttaggctatatactatagatccagtcatgttgctgggtcgtcccacatctccccagccaaatcagtgttatcgatcggatgcaaagaatcgaaccgaagacctgtagattctttcgcctccgaaacgacaaaccaacaaacaaactcaacttc

SEQ ID NO: 25038 - protein, 299 aa, DROSOPHILA
MGKDFDAVGFVKDFAAGGISAAVSKTAVAPIERVKLLLQVQHISKQISPDKQYKGMVDCFIRIPKEQGFSSFWRGNLANVIRYFPTQALNFAFKDKYKQVFLGGVDKNTQFWRYFAGNLASGGAAGATSLCFVYPLDFARTRLAADTGKGGQREFTGLGNCLTKIFKSDGIVGLYRGFGVSVQGIIIYRAAYFGFYDTARGMLPDPKNTPIYISWAIAQVVTTVAGIVSYPFDTVRRRMMMQSGRKATEVIYKNTLHCWATIAKQEGTGAFFKGAFSNILRGTGGAFVLVLYDEIKKVL

SEQ ID NO: 25039 - DNA, 4866 bp, DROSOPHILA
tgttttgtgcggctgtattggtgcgttgggttaggtatatctaattaatggcattattttatgtggcctagcccccgaaaaatacgaatattttgagtacaggcggcacaaggaacgcccaaaagtaagcaacgaaattgaaaaggttgatttttaccttgatcgaaggactgttggttaattattccagggaaccaagcctagttgatttcgatttgttttttcgctttaaagttgacaaattgtagtagacgacgtgacggaattaaattcatacaaaaaacggtaacattttacccaaaatcaaattagagaaaaattagaaataacgagtaattaatgaatgacaacagagtgtattatatttttattgtgggacgcaatcgttgcgataagtagacagattatatttggttatttctcctctttaataatgtttatcagcacgtggagttttgttttatttgttgtgttatttgctaaaaaaggaaaactgaaatcattgagagcggagtaaacaattgagcgcgagagcaaaaaacacgcgaataacgcgaccaaaggcgaatgcacaataaatatttattctaccaaaatatgtacgtgaatataatcataatacgaataaccgcacatgtattgttcgatttgtttgtgtgtgggaatgcctttttactacgtaatgtaaaacgtaaagctttttttttgcaaattttaaaacgtatgctgccggcagtttgcaaagagaggaatagagagtgtgcgagagaacggtaaagagtgcccgcgagtgcagtctacacaactaacgggatcaggtgggagagaggcaaaccgaaccgagcacatgtgagtttttaattttatgatttcatttggcacagctattaaacgtttttatagggttttaatgcgctttacagggtttcttccttgatatttctccgattttttaaaatatttgtaagcttgcttccacttcgggtttcgcgttttcaagaccgttttaattccgattgtccgagagatcgaaagcgcgagacccaccgactacaaatacaaatgttgtctgatgactggcgacgcagcgcttggcagaattgaccgtcgtcgccgctgccgccgctgcagagaagaaagaagcagaagaaaagtagaaggaggcggaatgtacgaacaaaaaaatgtaaaaacagaaaaaaatgtatcagcagcggcaacagcagcaacaacaacacaagaaatctcactcagatctatctgcctctctctcgctcccactctgtttgcattacatacatgtgcgacagaacgatgaacgatgatgatgaaccgaattacaaataaaaagaatgatgccaaaagacgacgacaacgccagcgattagcaaaagcaaaagcaaaggagcaaaagcactcacacacacacaaacacacccgacccacccactcacacacacatagcatacatagcggtggcgaaaaaaaatcggtcgcaatcggaaaaaatgcaaaggcagcgacggcggcggcagcagcggcggcagaactctctctgcacataaaaaaaagaaataaagagaagacgaaaaaattaaacataagcaagctcacacacacacacaagctcagaaaagtgctcaagcaggctggaaaaaaatgagaagaaactttgagcctgagcgccaactgacaacaacaacgacagcataaaaaaaactgcgggcaagaaagccgaggaaaaaaattgcggcacatcacgcgcacagtgggacaaaccatgtcttgtgctcaacaaaaagttcatatattcctattttgtgggaatgatggaccctccatacactagtagacagtcttatattttcgagattaaagcaagcctagcatataatacatttataaaacagacaacaagaaaaaaatttacccatgttgcttgactgtttaattgaaatgtaaacgatcaaagtaaataattttggttcatataatccaatgacactattcaaaaatgtacaaatgcactttctaactatggtatcacatgcgaaacgagtgacactggactgaactaaagtgcactgaaaacaatttacattattgatgagtggaacacatttcttaacaaactcgttttgaggaaagcaaaagaacgaggaagtaaaacaagaaatatataaaaaaaatacgaatgagtgcaatttatacatagcgcaacccacagtacatagcacccttagaaaatgaccagcacactgaccatctacagaaaaccccaccccgaaaaaaaatcgctaacacagaaaccgactcaaactcagacttccgactcgcgacgcccattaactggagatgaattcccattctcaggaccccatgatttgtgtttgggtgtcgcgtagacatttctccccattttccccaagaacaccaagccagttgcaaaaacaatgggcaagaatacaaaaaatagaatagtgcggcaattgatggaaggacgtacatgactgttgttgctgtattccagaatgaccataagcgagaacaagcaacatggatgtaaaaatgggtgtggacattgcgcggatgaattggaaattcgaactggtcccatgccgtcctaattggaagctgtttctggaccagtgttaaccaaaagccaaagcaaagccaggaaattgatttttggttttactccttgagtcattctagtaagttccatatctttgaatcggtttaataaataaagtaatacgacgcctcatgtcataagaccccaagtcgatgaatgttcattaatattaatggttcgattagaaaatgcattatacattaaagcacaaagattgaaataaattattttaaattttttagattttcttttagtttggagtattaataaatataacaatgttttcttacatttgaagagaattttatttgaagcaaatcttaaattatctttctgtaaacaactttcgaaaattctttcttttcaatattctaaccatagtcacttttaaacggagatacaactgcgcatacttcgtcccactgtgcggcaaaaacaatgcacgttccatgtgccgcaaaaaaattcgctctctggccgaagtagcagcagcaacagcagcaacagcaaggagtgcgagcacgaagaagagcggcgaagacaagaaacaggacgaaaagttgaacacagggaaaaaaaatcctgatggaactggacagacgcagcgtcgtccgcagagggggtgggccccagaggtggtgggcggtgaggtgcagctgtggggggttaaggctacgacttggactgagaatgaaagtgtatggagctgactctgtgtgtgtgtgtgtgtgagcagcggccattgttgggggcactcacacacacatataaaggcgggcaaaaaattttttctttgcgcttcactcaatttcgattttttttcttttggtccgcttccttcgaaaagttcaaagttgcaagcgcgctctcgctctttcactcagcaaaaaaaaaaacaaaaaaaaaacgtaattctgtttgcaagaaagaatgaaagaaaaaatcggaaaaaatgcaagccaagtgcttcagacagagggaggggaaatgagagcgagagagagagatagggacagtgagcgagtgcgggtggtgttgagccaccccactaactgatgtccaccttattccccgtctctgtcttgtagttgtccgtgtgtctgtccgtttcagctgctcacatagttggccaaagataaaggtgaaggagcgagggggaaggagaagtgcacaccgagaaaaacttgaaagcgaaataaaatccactttgtcttactcggtcaaaaattaacatgaattttaattttaagtcaagagcagaatttgtaaatttttatttttagaataaataagaaattttatattctatattttctaattatttgttgttattgttattcgtttttaaatgatttagtagttacgatatacaaagtttatatgtatgttcatgcaaatacaaatactctccgtgtaccacacatgcaatgaggccaaaagaggaggtggcaccgagtgggtggttgggtgggtgaggcacgacgcattgggaagaccctcaagtgttggcatgcaaaaaaaaaaaaacaaaacaaaaaatacatagcaataaatataaccaaagcacatggcgtggcagacacatgcatttaaaagtgggtgcgggtggggggtggtgggggtgggtgcggtgttatggggggctaaggcaactggcaacactaaatcatctgcgcatgtgtgcgtgtgtgttggctgaccacgtttgctaaaagcattaaagcagcgccagcattaattaacgcttagcgaaaatcgaatctgagcttaaccccaaaaagagcagaagaaaataaaaccaagaaagaagtgtggcaacgccggggtcaaccggcacgtgtgcgagcgagatggcctgcctaggagcgtaagaaaccgcttcttggtgcagctttccttttcttccttttttgggtgagccctgttcgcggcaaaagaagtttcactaattgtttctaaacgcgactgtgatggaattatgtgcaaaaaataccaaacaaatccatttttgttttaagatcgcgagcaaaccaaataaaaaaaaccatttaaaagacattcaataaattttttaaggaatgatacgtattcgtgtaaatgctacttgctaaacaaaaactacacaattatgacaaagaatttgagccatgaacgtaactaaatgtaaagaaagcttaatttctacatttataagaatgtacgtttttctccttagaaattatatttcgttt

SEQ ID NO: 25040 - DNA, 444 bp, DROSOPHILA
accgttttaattccgattgtccgagagatcgaaagcgcgagacccaccgactacaaatacaaatgttgtctgatgactggcgacgcagcgcttggcagaattgaccgtcgtcgccgctgccgccgctgcagagaagaaagaagcagaagaaaagtagaaggaggcggaattgcgagcacgaagaagagcggcgaagacaagaaacaggacgaaaagttgaacacagggaaaaaaaatcctgatggaactggacagacgcagcgtcgtccgcagagggggtgggccccagaggtggtgggcgttgtccgtgtgtctgtccgtttcagctgctcacatagttggccaaagataaaggtgaaggagcgagggggaaggagaagtgcacaccgagaaaaacttgaaagcgaaataaaatccactttgtcttactcggtcaaaaattaa

SEQ ID NO: 25041 - protein, 123 aa, DROSOPHILA
MTGDAALGRIDRRRRCRRCREERSRRKVEGGGIASTKKSGEDKKQDEKLNTGKKNPDGTGQTQRRPQRGWAPEVVGVVRVSVRFSCSHSWPKIKVKERGGRRSAHREKLESEIKSTLSYSVKN

SEQ ID NO: 25042 - DNA, 8685 bp, DROSOPHILA
caaggcagtgcagagcacacatgcaaatttcgcattccacatccacaggaccttctttcaattttctttgtccggttttgcggtcgcttggctttccggcaaatttttatctcaagtttcggggccccgttgacaataaaaatggcaataggatggcggaggccatcgcaaccgcacaaatgtctttcctcctcgccatatcattaattttgcacaaaaggacgaaatgtccttttgccaagtgcagaatcgggcacaggcggcggtatccttcgaacggaccagcaaataaataaggcaaacagccggactttcttgtgcattggcagcttttgcggttggcattgcttcggttttgcacgctaaaaaaataggatttacgaggatctaactattacaggacattaggaattttttgtttgtacaaataataatttaatctttaatgtaagctaaactgtaactatttcttgccattgcatatttaaccattgcttgcaagactccacctatattttctctcggtgtatttgggctttgcgatgaaactgtggttgaggtcaagcaaaaagaagaggctgcaacacgttcgacattttgtggtgctcatgctgcgttgggttttccaaattgaaattgttttgccaaaacagcagccccagaaaagcgactacagccagaggaaaactgattaggatgtatatagatgaaataataaaaaaggaatacaaagagaacccagcaaattcaagtccaaccgcatttcaacttaattaggaatagaaaaaaatgccaattaaaacgccttttgcgcttgaataaaatttcaaatgctaaaccgttacgttgtggtgagttgtgaaccgaagtgttgccaccctgttagaaaaacatcagagactcactgcggtgagctccggcctttgaatttctatcaagttaaaacgaaattatattttatgacaatatttgagttttaggggacacgctacatgccagaatgtccgattcggatacgaatcccacgcaggagccggatcggccagcaccaaacgttggaaaacccgccaaggagcgccaagcaaaaccgccagtacgatatagcaaagcgaagcgccaatttcaatgctgcgtcgccaaggaatgtaagattttagactatagatagtggttatatcaatgtcctcctttttcgccctccctcagactacagtgagtactccaacatggtggacacgctgcacataacgccgcggatgatgatacacaacaagtgctttagggtcaacagtacctacggtctgaccctcaatatcaagaacaccggactggtgagtgagcgaaatcagtgaatccacattgcgattatccatttagactttaatggaactggtctgcagttccctcgcttgatcaatgtaaccaccgacagtccggaggacacttctatttcgataccggaactggacctgcatcgttacttgaacactgacgaatcgctggaagtaaagatctggatcagagcctcctccaaacgggacatcaatcgcagacgccacatcctggtcgagtgcttccatccgaacatcatcttccaagtgcccatagttggtaagctcgtgtggtagcgatgattccaatcccattgccgtactcttcctcagtactggacaagctggaaaatccctcgattagcgacacaatcacctttcccagctgcgtgcccggcaacaagacgcactatgagatgatcatctacaatccaaccaaagatcttgtccgagtgcgatacagaaagtaagttcatgcattcatgtgagacatgtgactagtccagctcaggatcatgttacacccaccgttacagcaccaatcgtggcctgcagatcagtaataacaaggacatcctgccgccgaaggattacggcaagctcctgctggttatacagccgaaaaaactgaacgtctacaggggtttcttcaacatcaagtttggagtgtgtgagtattcccaaatccttccttcacctggctgtgtgctaacatcgcaactgattgcagtgccccccaaaccggtgatgttcttcttcacgcccaagtccatgggtgtacacttgagcatcggcagtgtgctctttggcatgaccaagttttcacgagaagatgtgcgcacggtaaccgtgtgcaatgagacgccccacgaagtctttgtcgctggcaagttctactccgagccgttgatgggtagcgatagccaggacatggatggcactctctccaacaaactgatcgacgatgccgtcagcatgcacagcgtcctgctgtacgacttcgaggagaacacgagtgtccagaacgttcagatcgatgcagatgcggccaagcacttcgactacgaagtgccagccaggattgggtccgcttcgtccgctgaaatccgattgattttccgtccgaactataatcccgaaaatccattttcggacgacgtggagccaccgtacttccagcgcactcgagccaccttttgcttcaccgactcccaggagtgcatcgaatcgcacaacgtcatcctctctggttcaatcggtggcgtcgacatggagttccatccgaaggtgattgacttccggaagatctacctgggcgaagagcactgcgcccagatcaaggtcctcaatgttgatggtgatgctagagctactgggctatgagttttgtccattaatacattaatatgaacctatgtccacagatgtgcccgccaaagttgtgtacacagattgctcggatcccgatgggtccggaattcgcatcacgccagccgaaggattctttctggagccgtgcacacgcggaatcttcaacctgtccttttacacgctgctgccctctcggttcaccaacactttgcgcttcaaggtgcagaatggagcccactacaagatctcactgaagtaactactacaagtgtaatgaaaatgtagcccctaatcacacaaatcttccccagaggcgccggacagccggtgcagctgcgcactttcccccagctggtggagttcggaagcattccgattgcggtgccccagaagcggtacatgctcctcatgaatccgctggcagtgcccattacgctccaggtgaaggcgacggaagatggcgaggaaactccgctagtcctcaacatacgcagcgccacagagatgctgcccgtaactgtgcgggatcccatacggcatctgcagcaggtgcacgaggatctacagtgccagcagctagaggaatctaaagaagtccacctcacgatcaccgagccggaactgttgtctgtgcactcagtgaagtcgaccgattccgtctatagttcggagttcgaggaggaagtgatgggtaagccttgggattgcgattttgatgtgttgcttgctacatacatttcacatagaacccattccgcaaatggccgcccatctgctgaccagcctgaagaagcagaagatcttcgaaaaatcagagaccgatcgccgagtcatccaagaggcgctgatgggtctgctcaactccaagtacttctccgtgttcaccaagcacaacaattacattttcatggactggaacgccgtccccagcgatccacgtgaagtgttctgtgacaatgagataatctacctgcgtccaaacaccgggcgcagcatcaccatccttttggtgcccaacaaggtgggctacttccaccgatcgctgtccgtccggatttgtcctgtcgtcgcaagcccttccttggaatccagcgatgatcaccccattatgaaggctatgatcaagtcggagttcctctgctcgaagctctggtttgagtacaactgcgttgtgcccgatatagtttggtccaacatggttgacctctccagtcgcatcatatacgctggcgaggactacgactttgagatgaacttcaccaaccgatcaaccataggggcctttcttcactttgatgtggttgtaagtcatggataaccctgatgaaatggacattggtcctttgagccgaatgtgaaatgctcatccaaacagctgactaactgcacttttctcttcacagcccaacgacatgacttttcgcgacggcatttggaagttcttcatcgacggcgaatcggaagtcactgccaagtgcgcggtcaccttccgctcgttgggcagcaccaggctatcgggtctggtcagtgtggtgggcgccaaacgaccatacgccttccacctgttcgccaacgttttgccttccgagattcggattacaccgatgtacgtgcaccagcgcctacaggtctacgagaaaagtgtggtccacttctatatcgacaactacactcccacgctcacgaagctcagcatgcggctggtaaggttacttggatatatatacacctcacatctgacttcctttccaatttcgtctgttagaaagatatagaattccagtatctgacgtcgaggggaggagccctggcttccacgggacagagcatgtacaccaccctggtgtcggtgttcaccgatcccgatttgtaccagaacactctgtacatcgaccttcagttcgataatgtgatgatgctgcccatcacctttctggtggagggggtgcccctctactttgagcccgatatccgcaagggattcgatgcgggattgctgtacaccgatactaaggagcagttccaggagagcatttaccaccaccgctttccagtacgagtgatcaacaagggtcgtcgcgcttatcgcgtcctgataatccgactaaattcctatggaccggaggccaatgtgacatcgggctgtgccaccaacgccctaacatcccgattcgacatggaaccgaagaacatctacttgtcgcccagttgcgagagtcaactggacatcctggccagctcgtatgtggagggacacgccaccggcgacttcctgctgcaggtcatcgaccaaaagtacccgcaacgcaagcacatcataaggattaggacttccgccgactttgtggactgtcaactgcattggatcccaaagcaggttagcatttcattaggattcatatatatagtttaatttattattatttataccccaagctaaactttaactacaagcgctgtgagccactgaaggaacgatcctatgtggagacgccagtactgtttaatccctgttcgttgccaatcgctgaggtcacactccaggtgaccggtccattcagaattaaggagttctacgaagacacctacgaaaaagagattaggattagcatgaatgacttggagcgtaaggagatctttgtgattctcaacagaggtggcctgaagaaccaatattgccgccaaatcgaaggaaggatcatggttatggcgctgggaaagcagctcaaatcccttcccctacggctggccataatggtgccggatgtggtgatcctgcaacccgatctcgtcctcttcgatcgcggcgaggcctacgacagcatcatcaatctggtcaaccaaggctgtatgccagccgagttcaagtggaagaggctggagaccaccgaggtgtacataggcgacgaggatgacccgaatggcatagctggtgaaattctctccgagattctgcggatgctggagtacgacttcagctgcgaggaccagccaaatatgacaaagagataccaggagtgtcgctgccagtttcgtcgatttgaggaggagggcgattttattctggatctcctggacgacgtcatcaacgatatggacttgaggcacaagccattgctattcccgccaaaggatcccaccgacgacctggaggacagcgatcagagctcgacaagtgtggtgcgggaaaccatatcggacattcttaatcgcttgcacatcgattccagcgatcagtggtcggagccttcttcggagtattgcttctcgagtcgcttcatctatttctacgagaagagaggcgttgtcgatcacatggatttggagtgcaagctccatctgccgcacatccggcggaaccacgagatgcgggccgtctttgagttggtcatcctgggcggacgtactcagcgattcaccgttacactggtcaatctgccgcagaagataaagttccacaaggagagcatctacatgggcattaaggtgggtatactaactattggaaaccattagaaaagattatgtcaatacatttatctaaatactagccctggtacgagaccttcgataccacgctgcgtgtcaacaacttgagcaggtatccgctccagttggttgtcgtcgaggtgaaggccccgggcagcaaggagcaggcccgcgagaagcgtctggtggacgggtactgcaagctggtgaccagtgatattatgcagctggagccactcggagcgaatcagatacgtgtgaagggcattctcggtttcagcgagagcttccgccattccttcggagcgatgatcaacaacagcgactccagctactttcatctgagggggcagggcgttatgcccatgctggaaatggcttctccactgccttctgcgcctatggatcccttggaggtggaggaggagtaccggatgctgcaaaagatttatcactacgagatatttcgctccatcacggaggtcgatgaagagccgaaacgcgcggatggcgaggaggagaaccaagtggaggaaaaaccatccatcaccgaggatttctctttgctctccgccagcgagtccgaaatgtcctccgagcggaaggaagcgcacgattttcaactcttccgcatggtccacacctacgtgatggtgaacaacaaccaggagctgccccatgccaccgtcctgaggcaactgatcctggcggagcggtacctaaagcgactccgctcaaatcaggagttgtacaagctgcaccagcaggtccatcaaacctaccaaaagatgcacaattcaccgggactcaaacagtcggctatggtgaagcacttcaccgtccaacccattccgtgcgagcagcacggttacgtccttgacctgggttccatggccaggaactccgtgcggcgcttccagctaaagctgcacttcttcggacccggcaaactcattgcagcagcacgcacggccgtcaggattccgggcttatatgtggacttcaatgtcacggatgccaagcagtaagtagtataatctgatgcattttaatttataagaaactcaaataatatcaatatccctaagctccgacaaaaagttctccttctgggctgagaagtgcacggcactggagtattttaagaaaaagtacaggaatatgatggagcgactgatggacgcggagcaggatcccaaggtgaagcacgcccactcctttgacctggacactatggtccagcaccagcgggatctggcgcccaaggaccgacgcctaatcgaggaatactacaacagcctgaaccgttccgtttatccagaccacaagcaccacttcacgctggccaagatcttctcaggctgcttgtccaactattccggagtggacgtgaccatggttgggctctttaagccggagtcgcggttctacaagaaggatcagcacgtggaggactacctcttcatcgatgtaagttacactgacataagctgagctaatccttaaatgctaacacgtatcccacagttgcacatgggaccgactcttcccatcctactgaaggccgtgctcgtatcctagtgaagtccttaagatttgtatgcatttattgtgggtttcattccattcggagtgtatgggggcttcttagtcttatgtgcagtaataaagcttatactccaaagtcctcagcagtacatgttgagctggcggaagaagtagtggaaaatgagcagaacgcagaaggagctggtcacgggcagaccagccgccttgatccatccgaggatgttgaagtcgtccgggtagaactcgaactgctccgtgggtatctcgccgcagttggagatcaccacgggttccacggggaagtcatccgtatcggtttttacctggaacgaaaaatgtgtcagaaaaagtttcttacatttctgtgtggtggctatgcgtttaagccacgattgtggttccggtttgcttgaatactcacatcctcaatggcatagatggtgtccattccctccagcaccttgccgaaaacggtgtgctttccgtccagccacttggcgcccacggtggtcacataaaactggcagccattggtgtccgggccccgattggccatgcccaagtaaccgggtctgttgtgctccaccgccagagccttatcctcgtccggaaagtagtccccatagatgctaatggagccagttccgtcgccgttcacaatgtcgccgccttggacgagaaagcggtccaccacgcgatggaatcgcgagcccacgtagctggtcccgttgatgccgcgcaagcaaatgtgccggaagttggccaccgtcttgggagccagcttcccgaacagtccaaacgtgatcctgcccaccggcttcttgttgtgcttcacatccatgtagatccgagacgtgaccgtgaagctcagaccactggccacggccagaaaggcgctgcacaggattatccgattgagcaatga

SEQ ID NO: 25043 - DNA, 5904 bp, DROSOPHILA
atgtccgattcggatacgaatcccacgcaggagccggatcggccagcaccaaacgttggaaaacccgccaaggagcgccaagcaaaaccgccagtacgatatagcaaagcgaagcgccaatttcaatgctgcgtcgccaaggaatactacagtgagtactccaacatggtggacacgctgcacataacgccgcggatgatgatacacaacaagtgctttagggtcaacagtacctacggtctgaccctcaatatcaagaacaccggactgttccctcgcttgatcaatgtaaccaccgacagtccggaggacacttctatttcgataccggaactggacctgcatcgttacttgaacactgacgaatcgctggaagtaaagatctggatcagagcctcctccaaacgggacatcaatcgcagacgccacatcctggtcgagtgcttccatccgaacatcatcttccaagtgcccatagttgtactggacaagctggaaaatccctcgattagcgacacaatcacctttcccagctgcgtgcccggcaacaagacgcactatgagatgatcatctacaatccaaccaaagatcttgtccgagtgcgatacagaaacaccaatcgtggcctgcagatcagtaataacaaggacatcctgccgccgaaggattacggcaagctcctgctggttatacagccgaaaaaactgaacgtctacaggggtttcttcaacatcaagtttggagtgtgtgagtattcccaaatccttccttcacctggctgtgtgctaacatcgcaactgattgcagtgccccccaaaccggtgatgttcttcttcacgcccaagtccatgggtgtacacttgagcatcggcagtgtgctctttggcatgaccaagttttcacgagaagatgtgcgcacggtaaccgtgtgcaatgagacgccccacgaagtctttgtcgctggcaagttctactccgagccgttgatgggtagcgatagccaggacatggatggcactctctccaacaaactgatcgacgatgccgtcagcatgcacagcgtcctgctgtacgacttcgaggagaacacgagtgtccagaacgttcagatcgatgcagatgcggccaagcacttcgactacgaagtgccagccaggattgggtccgcttcgtccgctgaaatccgattgattttccgtccgaactataatcccgaaaatccattttcggacgacgtggagccaccgtacttccagcgcactcgagccaccttttgcttcaccgactcccaggagtgcatcgaatcgcacaacgtcatcctctctggttcaatcggtggcgtcgacatggagttccatccgaaggtgattgacttccggaagatctacctgggcgaagagcactgcgcccagatcaaggtcctcaatgttgatgatgtgcccgccaaagttgtgtacacagattgctcggatcccgatgggtccggaattcgcatcacgccagccgaaggattctttctggagccgtgcacacgcggaatcttcaacctgtccttttacacgctgctgccctctcggttcaccaacactttgcgcttcaaggtgcagaatggagcccactacaagatctcactgaaaggcgccggacagccggtgcagctgcgcactttcccccagctggtggagttcggaagcattccgattgcggtgccccagaagcggtacatgctcctcatgaatccgctggcagtgcccattacgctccaggtgaaggcgacggaagatggcgaggaaactccgctagtcctcaacatacgcagcgccacagagatgctgcccgtaactgtgcgggatcccatacggcatctgcagcaggtgcacgaggatctacagtgccagcagctagaggaatctaaagaagtccacctcacgatcaccgagccggaactgttgtctgtgcactcagtgaagtcgaccgattccgtctatagttcggagttcgaggaggaagtgatggaacccattccgcaaatggccgcccatctgctgaccagcctgaagaagcagaagatcttcgaaaaatcagagaccgatcgccgagtcatccaagaggcgctgatgggtctgctcaactccaagtacttctccgtgttcaccaagcacaacaattacattttcatggactggaacgccgtccccagcgatccacgtgaagtgttctgtgacaatgagataatctacctgcgtccaaacaccgggcgcagcatcaccatccttttggtgcccaacaaggtgggctacttccaccgatcgctgtccgtccggatttgtcctgtcgtcgcaagcccttccttggaatccagcgatgatcaccccattatgaaggctatgatcaagtcggagttcctctgctcgaagctctggtttgagtacaactgcgttgtgcccgatatagtttggtccaacatggttgacctctccagtcgcatcatatacgctggcgaggactacgactttgagatgaacttcaccaaccgatcaaccataggggcctttcttcactttgatgtggttcccaacgacatgacttttcgcgacggcatttggaagttcttcatcgacggcgaatcggaagtcactgccaagtgcgcggtcaccttccgctcgttgggcagcaccaggctatcgggtctggtcagtgtggtgggcgccaaacgaccatacgccttccacctgttcgccaacgttttgccttccgagattcggattacaccgatgtacgtgcaccagcgcctacaggtctacgagaaaagtgtggtccacttctatatcgacaactacactcccacgctcacgaagctcagcatgcggctgaaagatatagaattccagtatctgacgtcgaggggaggagccctggcttccacgggacagagcatgtacaccaccctggtgtcggtgttcaccgatcccgatttgtaccagaacactctgtacatcgaccttcagttcgataatgtgatgatgctgcccatcacctttctggtggagggggtgcccctctactttgagcccgatatccgcaagggattcgatgcgggattgctgtacaccgatactaaggagcagttccaggagagcatttaccaccaccgctttccagtacgagtgatcaacaagggtcgtcgcgcttatcgcgtcctgataatccgactaaattcctatggaccggaggccaatgtgacatcgggctgtgccaccaacgccctaacatcccgattcgacatggaaccgaagaacatctacttgtcgcccagttgcgagagtcaactggacatcctggccagctcgtatgtggagggacacgccaccggcgacttcctgctgcaggtcatcgaccaaaagtacccgcaacgcaagcacatcataaggattaggacttccgccgactttgtggactgtcaactgcattggatcccaaagcagctaaactttaactacaagcgctgtgagccactgaaggaacgatcctatgtggagacgccagtactgtttaatccctgttcgttgccaatcgctgaggtcacactccaggtgaccggtccattcagaattaaggagttctacgaagacacctacgaaaaagagattaggattagcatgaatgacttggagcgtaaggagatctttgtgattctcaacagaggtggcctgaagaaccaatattgccgccaaatcgaaggaaggatcatggttatggcgctgggaaagcagctcaaatcccttcccctacggctggccataatggtgccggatgtggtgatcctgcaacccgatctcgtcctcttcgatcgcggcgaggcctacgacagcatcatcaatctggtcaaccaaggctgtatgccagccgagttcaagtggaagaggctggagaccaccgaggtgtacataggcgacgaggatgacccgaatggcatagctggtgaaattctctccgagattctgcggatgctggagtacgacttcagctgcgaggaccagccaaatatgacaaagagataccaggagtgtcgctgccagtttcgtcgatttgaggaggagggcgattttattctggatctcctggacgacgtcatcaacgatatggacttgaggcacaagccattgctattcccgccaaaggatcccaccgacgacctggaggacagcgatcagagctcgacaagtgtggtgcgggaaaccatatcggacattcttaatcgcttgcacatcgattccagcgatcagtggtcggagccttcttcggagtattgcttctcgagtcgcttcatctatttctacgagaagagaggcgttgtcgatcacatggatttggagtgcaagctccatctgccgcacatccggcggaaccacgagatgcgggccgtctttgagttggtcatcctgggcggacgtactcagcgattcaccgttacactggtcaatctgccgcagaagataaagttccacaaggagagcatctacatgggcattaagccctggtacgagaccttcgataccacgctgcgtgtcaacaacttgagcaggtatccgctccagttggttgtcgtcgaggtgaaggccccgggcagcaaggagcaggcccgcgagaagcgtctggtggacgggtactgcaagctggtgaccagtgatattatgcagctggagccactcggagcgaatcagatacgtgtgaagggcattctcggtttcagcgagagcttccgccattccttcggagcgatgatcaacaacagcgactccagctactttcatctgagggggcagggcgttatgcccatgctggaaatggcttctccactgccttctgcgcctatggatcccttggaggtggaggaggagtaccggatgctgcaaaagatttatcactacgagatatttcgctccatcacggaggtcgatgaagagccgaaacgcgcggatggcgaggaggagaaccaagtggaggaaaaaccatccatcaccgaggatttctctttgctctccgccagcgagtccgaaatgtcctccgagcggaaggaagcgcacgattttcaactcttccgcatggtccacacctacgtgatggtgaacaacaaccaggagctgccccatgccaccgtcctgaggcaactgatcctggcggagcggtacctaaagcgactccgctcaaatcaggagttgtacaagctgcaccagcaggtccatcaaacctaccaaaagatgcacaattcaccgggactcaaacagtcggctatggtgaagcacttcaccgtccaacccattccgtgcgagcagcacggttacgtccttgacctgggttccatggccaggaactccgtgcggcgcttccagctaaagctgcacttcttcggacccggcaaactcattgcagcagcacgcacggccgtcaggattccgggcttatatgtggacttcaatgtcacggatgccaagcactccgacaaaaagttctccttctgggctgagaagtgcacggcactggagtattttaagaaaaagtacaggaatatgatggagcgactgatggacgcggagcaggatcccaaggtgaagcacgcccactcctttgacctggacactatggtccagcaccagcgggatctggcgcccaaggaccgacgcctaatcgaggaatactacaacagcctgaaccgttccgtttatccagaccacaagcaccacttcacgctggccaagatcttctcaggctgcttgtccaactattccggagtggacgtgaccatggttgggctctttaagccggagtcgcggttctacaagaaggatcagcacgtggaggactacctcttcatcgatgtaagttacactgacataagctga

SEQ ID NO: 25044 - protein, 1967 aa, DROSOPHILA
MSDSDTNPTQEPDRPAPNVGKPAKERQAKPPVRYSKAKRQFQCCVAKEYYSEYSNMVDTLHITPRMMIHNKCFRVNSTYGLTLNIKNTGLFPRLINVTTDSPEDTSISIPELDLHRYLNTDESLEVKIWIRASSKRDINRRRHILVECFHPNIIFQVPIVVLDKLENPSISDTITFPSCVPGNKTHYEMIIYNPTKDLVRVRYRNTNRGLQISNNKDILPPKDYGKLLLVIQPKKLNVYRGFFNIKFGVCEYSQILPSPGCVLTSQLIAVPPKPVMFFFTPKSMGVHLSIGSVLFGMTKFSREDVRTVTVCNETPHEVFVAGKFYSEPLMGSDSQDMDGTLSNKLIDDAVSMHSVLLYDFEENTSVQNVQIDADAAKHFDYEVPARIGSASSAEIRLIFRPNYNPENPFSDDVEPPYFQRTRATFCFTDSQECIESHNVILSGSIGGVDMEFHPKVIDFRKIYLGEEHCAQIKVLNVDDVPAKVVYTDCSDPDGSGIRITPAEGFFLEPCTRGIFNLSFYTLLPSRFTNTLRFKVQNGAHYKISLKGAGQPVQLRTFPQLVEFGSIPIAVPQKRYMLLMNPLAVPITLQVKATEDGEETPLVLNIRSATEMLPVTVRDPIRHLQQVHEDLQCQQLEESKEVHLTITEPELLSVHSVKSTDSVYSSEFEEEVMEPIPQMAAHLLTSLKKQKIFEKSETDRRVIQEALMGLLNSKYFSVFTKHNNYIFMDWNAVPSDPREVFCDNEIIYLRPNTGRSITILLVPNKVGYFHRSLSVRICPVVASPSLESSDDHPIMKAMIKSEFLCSKLWFEYNCVVPDIVWSNMVDLSSRIIYAGEDYDFEMNFTNRSTIGAFLHFDVVPNDMTFRDGIWKFFIDGESEVTAKCAVTFRSLGSTRLSGLVSVVGAKRPYAFHLFANVLPSEIRITPMYVHQRLQVYEKSVVHFYIDNYTPTLTKLSMRLKDIEFQYLTSRGGALASTGQSMYTTLVSVFTDPDLYQNTLYIDLQFDNVMMLPITFLVEGVPLYFEPDIRKGFDAGLLYTDTKEQFQESIYHHRFPVRVINKGRRAYRVLIIRLNSYGPEANVTSGCATNALTSRFDMEPKNIYLSPSCESQLDILASSYVEGHATGDFLLQVIDQKYPQRKHIIRIRTSADFVDCQLHWIPKQLNFNYKRCEPLKERSYVETPVLFNPCSLPIAEVTLQVTGPFRIKEFYEDTYEKEIRISMNDLERKEIFVILNRGGLKNQYCRQIEGRIMVMALGKQLKSLPLRLAIMVPDVVILQPDLVLFDRGEAYDSIINLVNQGCMPAEFKWKRLETTEVYIGDEDDPNGIAGEILSEILRMLEYDFSCEDQPNMTKRYQECRCQFRRFEEEGDFILDLLDDVINDMDLRHKPLLFPPKDPTDDLEDSDQSSTSVVRETISDILNRLHIDSSDQWSEPSSEYCFSSRFIYFYEKRGVVDHMDLECKLHLPHIRRNHEMRAVFELVILGGRTQRFTVTLVNLPQKIKFHKESIYMGIKPWYETFDTTLRVNNLSRYPLQLVVVEVKAPGSKEQAREKRLVDGYCKLVTSDIMQLEPLGANQIRVKGILGFSESFRHSFGAMINNSDSSYFHLRGQGVMPMLEMASPLPSAPMDPLEVEEEYRMLQKIYHYEIFRSITEVDEEPKRADGEEENQVEEKPSITEDFSLLSASESEMSSERKEAHDFQLFRMVHTYVMVNNNQELPHATVLRQLILAERYLKRLRSNQELYKLHQQVHQTYQKMHNSPGLKQSAMVKHFTVQPIPCEQHGYVLDLGSMARNSVRRFQLKLHFFGPGKLIAAARTAVRIPGLYVDFNVTDAKHSDKKFSFWAEKCTALEYFKKKYRNMMERLMDAEQDPKVKHAHSFDLDTMVQHQRDLAPKDRRLIEEYYNSLNRSVYPDHKHHFTLAKIFSGCLSNYSGVDVTMVGLFKPESRFYKKDQHVEDYLFIDVSYTDIS

SEQ ID NO: 25045 - DNA, 6316 bp, DROSOPHILA
gaaagcagctggtggcgacggaatcgccgccgcaatagagaaggagaaggcgcagtagagtgtccagtttgttgctaccaaatgggtagtttccattcaaaacacaacttcctttaagttttccaatagatattctattagggggaaaccgaaaatttcttccttgaaattgtatattatgatgatcaaacgaatttcttcttagagatgttcttctctacataagtcaccattttaattatgtacaaagtggtcttgttacgccttctacccgcttccatccgcacttcttctggggaaggtgatgatattgatatggataaaatctaaaattagatgctaaaaagttactaaagaaattttattatagatatacatatattttaaccaaagcctgtgaaattggagtcaaaagttatagaaatataaaatcccaatatgatcattcaattgaaaactataatataaaaggaaatacactaaatatccctttttgtacgtttactttttttattcgtggcaacggagcttgcaatgtgtacagagaaattcgagatttacacaaaataatttttgcaaaatagaatacttgaaattcgagtgaaaatttaaatttaacaatgtgtgttgtgtacaaaatattggtgcgttgaaatcctctggagatttaaaaactcaattagggtaaaatgttttttaaatgcctattacgattgaaactaactatttccataaaaactaattgatatttttaaatcttaaggggaccagaccaatatttaaatcatttagggagccttttgtttatgtttgtttgtatggttaatattcgataccagctcgaatttgatctaaattcaatgcgtttcgatttcagttgtgttgtcttgagctaacaaatcagtgtcctcagatgtgtgggtagcatggcaagaggtttcctgttgctgatgcgaatatagatgcggatgctgatgctgtggtttgaatcgggtggatatcacgccgaggatggttcatcggtgaccagggacaggcggcgtttaacatcctgcgttgtattgtaggcgccgcaatggacgcactttagtccgatgaaatggaatttggtttttgaagtctgtaatgaattggataaggttataagagcttttcatgaatgttagtattatgtatatctagtcgtaccttgtgacaatcgttgcagaatatgtgcactcgctgattctcgtacttcagtggcaccggcatgcgctccgcctggtcgtccaagtatacccacagcgccgtcatatcgatcagcgaggtctggcaggtgggacaggtgtagtggccggaggccagcagctggtcgaagcacatcttgtgcagcaggtgtccgcagtcgggaatgtggcagggtatgcgcgaagtgtggatgtcgcccaggcacacggggcagtgcgatcgcgagatgttctccacgcactacgggaaaatagacacgttgtcaattagcaaggatttagcaatcagccatgccagtctctggcccaattcgctgtcaattaatgaagtcattgcttcagcacatttgacattcatatccactcaactggatcccagattgcagatcgcagatcatatatcgctacatatagcaattaggcaaccggttttggtaatgaattgacaaaaaaaaaaaaaagttaatgtgtttctttgatttgctttcgaatcgcggaggtcagcattcccacttacaggccaaatcttaatcaagcccaatgaagtgccaaatgtagtaccaactcacccggtggccatcgatcttcagctgaataggtaggcacatgttgcacacctcgcagtggaagaagttctccgcaccgccaatgcgacaaatcccacatccatgacaatggtactgctgcttgtccgcatcatcgaagaggttgcagatcaggcaggtgtactgtaagtacatcaaaatgatattactagtagggttttgctgtgatttttggacacctggatggatatcttaccttaccaaatctcacgccgcaattgaggcactgctcccgcaccgtttgccgcgtattgcactcggagcatattagttcggtgagcgttttgcgatcgaagtgatgcgtctcgttctcgtcgtggcaaaatcggcacttgtagaacttgttgcagcagggggtctgagaaagatatagttgcgtgatcagtatcagatcaaattagtgctgaaaagaaatcgctgctcgaaaaaattccactttaaatggagctgagattgctccccgccacacctgccgatggactacacccctcagtcaaggactacgaaaaacctattatcgagcggcaattagcacgactcctaactccccaaatggagttgctaatttaagaaatctgcctggaaaccgactaaaaaacaaatctactagtgacgtctacatgccaaaggcaataacttagcattatcataaacaaggcacttgaaactgaatcgaattttgtacgaatttcgagtcaaatcagcgggtgaatcccaatccgattgtaaagatgccaaaggtactcgtgtcgtttaattaggtggctgctaattagttcacctgtcgatgcacagctcgaactacatgatatagttctatcagttttgtcttggggataaagtttgaaaataagttaatttatgcccttaattatcttgtgtatcctcgagttcggcttagttacagccaacacccagccatttgtatctgcctccagcctcgcgcacacatctatctccactatctttgagaattatttataacttaacaacagttttttcgtatacaagtatttatttcaactctgctgctgctgcgatgataacactcgaagtacagaaccgaaccggagaagagtcttcgaatccggtttctttgtcattccccccggctttcattgctgtgcttcactaacgatcgtattttaatgatcgtttgcatctgcaattggctaactccagacatctcaaatttatttagccaagacgaaacaaagcttctaacacaaattgatacaagattcgcgggaacaggcgatatccatggggcattgctccacttgggggattgcacatactgctctcagcttatgtccacattcatgtatacatttatttcacgcactgtcgggcgaaaataaatatttgactataaaataacccagctgattcaacactcaatgggcacctcattagtgcacaaaaccctcgcttatccgaatttctcgcggtgcacagacgaaagcaaaaacctctacattcgaattttattaaaatgtgggacagattgaagcgtgtgtacggatttacgtgacattttttggaaagtattgtaaggccatagcgcataatacagaatttttggggaattaataattcatatcgcgaattggctgcttttcaacaacaaataagcgctcactactgttggaattataagtatttaaatatttacatttaactttctttttctttatttaataatccaggtcattcacaaacaaatctatctaatcaagtgcagctgcagtcttctctgcatgagatactttatacatgaaatggttaccactttccccagcactgagttacttttcccaccttcgaacttctgtacttatcaccttacgataattatgtctgctggctctactaattgttaaggtaaagaacctgaatatagccgtgctacgattgctttatatgcacacacaacatttttagatgccccataatttgttatccaaacgcgagcgatcaagacaaacgcattgtttgcccagatgaatggcgaatggaggtgttaactggccagtggccactcgcctcctgctcagttcctgctcagcggagcatgctgaccagttagttttttggatgccggacatcgtcaagctgtccacacaagccaaacacttgccgtgcaaatagcgatgccctccaattgaattcaaaatctagtcagcagacagacacaaaagaatcttcgccaaaggtgtctgtttagagtttagccactttatttgtttaggaacgaataaataaaggttaaatgcgcccattttcaggaaggtagctgtgttggatagacacacacacacacatagatagatagatggataaataggcatacaaatgccatttagaggcgccatcataatcttcttgaaaattttccaaatgggtgaaatgtttaatggctttatcactttgaatttatttcaatgtatttttaggattcattttataaaagtgaaatgactgatccgctttctaatcatgacataggggttccaattgcataattctttatctgatgacccaggaattgaactatacccgtataaaataaaaaaagaactttcaaaattgaagtttgttcttatatcacataagttgactggtttcacatttgaggtttgaataaactaatctcactacaagtaagactgctagatacatggatccgtctagtctttctacgaacatctatctactaatcttaagaatggttatagatactacgatacactaaaaaaggattaaaatttgtattgatatacatatcaaagaagttcaagtgtataacttttataacttttctggggcttttccttttatgtaatgcttggaaaagcatccatagataatatgaatggagttggactgcctgttgcacttaccacgaacatggcccgccgcttgtagtgagcgcatccgaagcgcaatgactccggagttgttggctgcgcaccgcagatgttgctgctgcacttgttgctgttgcagctgccgtcgctgctgctgctgctgctgttgcacgatggctgtgcatgctgctgagcctccgcggcggggttacgtgagcatgctgcaaagcgatggagctggtcctcctccatgggctccgccatgccatcgcaattgagactcggcgtcgatttgcatcttcgcagcttggcgtgcgctggatgatacttgcccgtcatcgttgtgggcgtcacaatcagctggtgttgctggtggagatggggattgggatggggatggggatgggtatgtggctgctgcgctatctgagcaagtggaagcgaagcgggcagagcagcctccgctgaggtcgtcgtggctgacgatgaatttaaattgacttgattgggctcctttgtattggtaactatttgtacatcgatgccgccgctgcccatgtatctgttgtggttttcatttagcgatattcggcgcgttcgctggcggttcttcattttgctgcaggagctaactctatgtatatatagagttatgtatgtacgtctataaaagtgattttccactatgcctcgcagctgcagtagtcgtggttaattgctggccctttcaattgccgccgcgaagcatttaaattactggccgatgctgttgtcgttgtgccacatgtagactttgtatccgcactcaaaaaaccgactgtccggtttcccttttcacgcgatcgcaactaactttcgtttgtccagctcatccttgggtattaatgggctcgcacaggtgacacactcggctgaagcgattgaaaagtgtgggaaagtggtaagtattccattagcaggccatttctcacactccgatcgatcagattagagtctaagccgggttaaccccccacacccccacacaatttttgacacacaaatgaaactaccgaggcggcgtatttgcatttcaatgtttcccagtccccgactgcgaaaggccatctaaactagataacgactatcttgattttcactccgttttcttagccgtcgcgcactgtacacaacgtacaatggggaacaagaagtagtaactttatgtaagaaattatcaaataaaagatcacctatgatgactttcttccatttctgtatagttttggatcagatatggaaacctattaaacccatatcattataaaatgacaattaacctgttaagaacccaaatatgtgcatatgaactactatcttggccgctgctgtttttggatgggaccttgtgccatgtgagcggcagcatataaatcgcttgcttagcctgcaggtcgccaaaaacgttcacagctccacggattgggaatcgcagtgccttggcacacggtgcggatgatgaattaaaatgcgggcagggagcagccagccacacacttgttaacacaatcggcgtgcgactttcgctcatcggttggctgttgctgcaagtcggtgttgcacgtagcaggtgcac

SEQ ID NO: 25046 - DNA, 1491 bp, DROSOPHILA
atgaagaaccgccagcgaacgcgccgaatatcgctaaatgaaaaccacaacagatacatgggcagcggcggcatcgatgtacaaatagttaccaatacaaaggagcccaatcaagtcaatttaaattcatcgtcagccacgacgacctcagcggaggctgctctgcccgcttcgcttccacttgctcagatagcgcagcagccacatacccatccccatccccatcccaatccccatctccaccagcaacaccagctgattgtgacgcccacaacgatgacgggcaagtatcatccagcgcacgccaagctgcgaagatgcaaatcgacgccgagtctcaattgcgatggcatggcggagcccatggaggaggaccagctccatcgctttgcagcatgctcacgtaaccccgccgcggaggctcagcagcatgcacagccatcgtgcaacagcagcagcagcagcagcgacggcagctgcaacagcaacaagtgcagcagcaacatctgcggtgcgcagccaacaactccggagtcattgcgcttcggatgcgctcactacaagcggcgggccatgttcgtgattttgaattcaattggagggcatcgctatttgcacggcaagtgtttggcttgtgtggacagcttgacgatgtccggcatccaaaaaactaactggtcagcatgctccgctgagcaggaactgagcaggaggcgagtggccactggccagttaacacctccattcgccattcatctgggcaaacaatgcaccccctgctgcaacaagttctacaagtgccgattttgccacgacgagaacgagacgcatcacttcgatcgcaaaacgctcaccgaactaatatgctccgagtgcaatacgcggcaaacggtgcgggagcagtgcctcaattgcggcgtgagatttggtaagtacacctgcctgatctgcaacctcttcgatgatgcggacaagcagcagtaccattgtcatggatgtgggatttgtcgcattggcggtgcggagaacttcttccactgcgaggtgtgcaacatgtgcctacctattcagctgaagatcgatggccaccggtgcgtggagaacatctcgcgatcgcactgccccgtgtgcctgggcgacatccacacttcgcgcataccctgccacattcccgactgcggacacctgctgcacaagatgtgcttcgaccagctgctggcctccggccactacacctgtcccacctgccagacctcgctgatcgatatgacggcgctgtgggtatacttggacgaccaggcggagcgcatgccggtgccactgaagtacgagaatcagcgagtgcacatattctgcaacgattgtcacaagacttcaaaaaccaaattccatttcatcggactaaagtgcgtccattgcggcgcctacaatacaacgcaggatgttaaacgccgcctgtccctggtcaccgatgaaccatcctcggcgtga

SEQ ID NO: 25047 - protein, 496 aa, DROSOPHILA
MKNRQRTRRISLNENHNRYMGSGGIDVQIVTNTKEPNQVNLNSSSATTTSAEAALPASLPLAQIAQQPHTHPHPHPNPHLHQQHQLIVTPTTMTGKYHPAHAKLRRCKSTPSLNCDGMAEPMEEDQLHRFAACSRNPAAEAQQHAQPSCNSSSSSSDGSCNSNKCSSNICGAQPTTPESLRFGCAHYKRRAMFVILNSIGGHRYLHGKCLACVDSLTMSGIQKTNWSACSAEQELSRRRVATGQLTPPFAIHLGKQCTPCCNKFYKCRFCHDENETHHFDRKTLTELICSECNTRQTVREQCLNCGVRFGKYTCLICNLFDDADKQQYHCHGCGICRIGGAENFFHCEVCNMCLPIQLKIDGHRCVENISRSHCPVCLGDIHTSRIPCHIPDCGHLLHKMCFDQLLASGHYTCPTCQTSLIDMTALWVYLDDQAERMPVPLKYENQRVHIFCNDCHKTSKTKFHFIGLKCVHCGAYNTTQDVKRRLSLVTDEPSSA

SEQ ID NO: 25048 - DNA, 5059 bp, DROSOPHILA
tagtttcaaatatatacatacatatgtgggtcaatgtagcacctactcaaaaatctatgtatgtacataatataatggtcccacttttcgttgtttattttgtcgatatgttgccatgtatgcgtgcatgtgtgtgctaatttatatcttttaaaacaatatcttccagataaacaacattatttaggctcgaaacaaatttttcaaggctaaactttcctgcaaacatgaataacttttgggggctctaggattttaagctggccaatcggttggcttcttatcaaaaacagtaaacaattggatctcgaagactgaatgcaatagcacaggtttgtactggttatttaaataaggtatatgaaaaactaaaattaacaagagattctctccaaaaacattaaaaatgcatgtcctgcgagttttttacatgtgagggggcggaaaaggcgtggccacaacttgaaacaactgttaacttttgtttttcgataacataacattaaaatgttagcagcaacaagattaacattgatgtttataggaaacctattgtttttttttttagctagaaaagaatgataatatagttactttgatattaacaatattattttcttttttctttaaaaatatgttactaaatttgtttttatcttaatttcagaaagatctgtctggtgtcatcatgttcacgagaaaatacttttttgttaagggttcaaggagttcccaaagctgaatttataaaatgctgaaagaatccttgcacaaaaaggtaacgaacaaataaattatatagttgctatgttgtatcttatagatcgctttttttcagaaccaggttgttattaacgcgctgctaaaaaccgtatatacaggcattagaagcatgaaatttaaagatattacccactgtgcgtgtcctgcatagaagcacctacaccaagtaccgcagacagtttagtatttggcatctgaacctggcactacactcaaaatgggagccaacacgtcgagcagcagctatctcacggcggcctcgtcgggcagcggagccaatagcaatgccagcaactcgaatgggaacctatcggctatgcccccgggcatgggggagattccaggaggtggcggtggatgctcgggtgctttcggaagcagcagtagttgcggccccagtgggaatgcaggtgcagctccgggcattgtcatcagtggcgctcactaccatcgggatcagcgacggaagcgtgccaccggctttgcgacactcaaacgcaagttcatacgacgacggcgctcctcgaaagcctgtgatcacgctcgcgtcctgcgcgactttgtatccgattgggcacccgtggaactggcagctctgtgcgaggagttcgaggcattgtcggctctgagggatttgtcggttagcaaaacgaaaatcgaacacaatccgtgcgcccatgttaatcacttcccttccgttcaattcccattttccaggtgcaagctgaactggcacgaccgccggcggcaacgtttaagcaggacctggctgccatctatgagaagaacttgtgcaccgattgtgatctggtctttcgtggaacgatattctcagtccatcgtgcaatattatcggcacgctgtgtatattttcgggacctgctggcaggatgtcctggtttcggtgcgcgcatatgtctcgaactacccacatcccccattgatgtacaactcttctcgtcgctattgcgctacctatacactggtgatctgtgcccccatgatcctaacattgacattactctattgcggcaattgggcaaggatttcggtacaccgaatccattggagcacgatctgcgctatctgctggaaacaggtgattatgctgacgcagcactcgtcttcacggcagatggcagcaacgactatctacgacaagactcgggaacctcggagtacggcttccggccgaagatcgaactaccttgccataaagcgatattgagcgcgcgatcgccattctttcgcaatctaattgcgcgccggacacggaacatggacgagtatgtggagcgctcgttgcacgtgcccacgcgcatcgttttggacgaaactgttataccaaaaagatatgcacgagtattgctgcaggccatctacttggactcggtggacttgtcattgattttacgtggcgtaggttccggcacctcggccggttcgcttggcgaagtgcacgcactgaccaataccggccgggtgcggccaacgactctggaggaggccatggagttatatcagatcggtcgatttctggagctggatatattggcacagggctgtgaggatttgattctcgaatggctgtccattgaaacgctacccacggtcctcaagtggggctgccagccgcatggctccgcctgggtctttcgccaagcttgtcagtatttacgcgaggaattcgcagctgttagctcctcgccggtgttgcaccaactcgataaatctcagttaatacacattctgcatagtaactttctacaagcatccgaactggaggtactgcaggccgttctcaaatggggcgagcaggagctaattcgccgtatggaggatcgggagcccaacttgctgtcccacacagcccactcggtggcgcgcaagggtgtcaagaaacgcgacctgagtgatatagaattacgagagatactatcggaactgttgccactggtgcgcatggatcacgtcctgccgcctcactgcgaggtcctttgccaggcgatccggcgcggtctcgtcagcacaccaccttcgcatatgatcggcgatgatcgggagaatttacgtatcaatgcctggattcgtggcggcaaaaatcagggcctgtacgttaggccacgcctgttcatgccctatttcgaggaggtgaaggcgctcttggaggatcgtatgtcatcgtcacaccatcaggttgagctaatgcgaatgcgccggtgtcggcatcctcccgatattcccgatacactgtacatggtctcgcatatgaattcaaaggcgaatagtgatcttagcacagtagaaaatcgtagtacggacggaaatgttgatatattagtaggcgccgctgttattccaccaccggacaaccaaacgctgctggccatgcgcaagcgggagcacaagctgcgccaatcgcccatgtgccagcgagcattgctactgccgctctcctcgaagagtgagatcgatcggcagatacggctgcgcgttgttagggaattcaatctgcccgacgaggtgtccgaccttttggaaagtgccctgcaaaccaatccgggcagaaatgagagccacgccgaggagactagtgcatcgacctcgcaaaaagatgactcactgctggaggatgaggatcaaagtccgccaccctcgccggcggccacttgctcagtgtcgcgacacaccaccgttgcatcgtcattcttatcgcccatgggctcatcggtggcgtcttgcggcaccgacgccgctcacccgtgctacagtcgaaatctcaccttcccacgccaccattcgaatggcctgatcggagtggccaatgcgtttgggtccagctctggaccgacgctgcagtgcagctactcgcgactctcctcgtcggtgcatcagcgcaatgacctacccgcccttatcaccgagggcgactttcgattcccgcatggcaatggcctgggattggacatgggcgccgagggcggtgcctgcggcctggacacggccaatagccatctgtccgaaatgatgccggatgtggcgatggccaccgcctcgctgggccagctccacttgacaaataatggagctggatgcgccggcaacattggcgggcgcgcagtgagcagcaataacgacatgtccgagagcttgcagctagatttaggcgatggcccgagtcctcatataattggaagtgctgtcggttcaatgactctacgaaatatacaggttagtaactactctttgcatgtacaaaaaaaattcgaattctaaattggattactttaaagcatcaactgccaacaaacaactatcaccactttatgcagcgttcgaattcgccatttgaaatcctgcggcaaggacaaccatcgccaacatcacatccacaacattccgggacatacaattctggaccaccaaggtttttatagagatttcgagtggcacccgatcacgggcattattttagcatgcctttctgaataaacaaaatccgatacaattaaaactaaaaatctagataaataaaacaaactactaaataaatgtcaaaatgatacccctttccgatgatctatcaatataaattataagttggactaagatgaaaatatacaattttcctccaaaatgttcttataaattggaatttatagttattgaagattctagttggaatccagcgttggctaaatttctactcttgaatgactaagaatcgaaccaatcgattctaattggaaaaacactcaaggttcttaggatagtggattttttctagtttttggttttgcacaacactgaaaagaagaggtaagtttaatgccatatccgattggattttggtgcagagcgtggaaaatggtttcatagttctgaaaatgagcgagaggcaaatagttgaaatttatatgtattattttttaaaggttttttcgaagctggcactggacgtctgaaaagttaaagaagattagattgttttgtagttttttgttattattatactgcaaaatcaatatgacatcatgtccatcatcaaacttgtacttgtccatattaattgtcctgctgacattattgatttgtcgccagcttaaaaaattgcctctttttagctgcaatttggttaggaacccaaaagatggtacacgtgtgtgtctccaacgtgcgattccaattacagatgcattcccagaccaaaatttgttatagattataatcacgtactatccattaaaataggatttttatgcgctgagctaagtcg

SEQ ID NO: 25049 - DNA, 2982 bp, DROSOPHILA
atgggagccaacacgtcgagcagcagctatctcacggcggcctcgtcgggcagcggagccaatagcaatgccagcaactcgaatgggaacctatcggctatgcccccgggcatgggggagattccaggaggtggcggtggatgctcgggtgctttcggaagcagcagtagttgcggccccagtgggaatgcaggtgcagctccgggcattgtcatcagtggcgctcactaccatcgggatcagcgacggaagcgtgccaccggctttgcgacactcaaacgcaagttcatacgacgacggcgctcctcgaaagcctgtgatcacgctcgcgtcctgcgcgactttgtatccgattgggcacccgtggaactggcagctctgtgcgaggagttcgaggcattgtcggctctgagggatttgtcggtgcaagctgaactggcacgaccgccggcggcaacgtttaagcaggacctggctgccatctatgagaagaacttgtgcaccgattgtgatctggtctttcgtggaacgatattctcagtccatcgtgcaatattatcggcacgctgtgtatattttcgggacctgctggcaggatgtcctggtttcggtgcgcgcatatgtctcgaactacccacatcccccattgatgtacaactcttctcgtcgctattgcgctacctatacactggtgatctgtgcccccatgatcctaacattgacattactctattgcggcaattgggcaaggatttcggtacaccgaatccattggagcacgatctgcgctatctgctggaaacaggtgattatgctgacgcagcactcgtcttcacggcagatggcagcaacgactatctacgacaagactcgggaacctcggagtacggcttccggccgaagatcgaactaccttgccataaagcgatattgagcgcgcgatcgccattctttcgcaatctaattgcgcgccggacacggaacatggacgagtatgtggagcgctcgttgcacgtgcccacgcgcatcgttttggacgaaactgttataccaaaaagatatgcacgagtattgctgcaggccatctacttggactcggtggacttgtcattgattttacgtggcgtaggttccggcacctcggccggttcgcttggcgaagtgcacgcactgaccaataccggccgggtgcggccaacgactctggaggaggccatggagttatatcagatcggtcgatttctggagctggatatattggcacagggctgtgaggatttgattctcgaatggctgtccattgaaacgctacccacggtcctcaagtggggctgccagccgcatggctccgcctgggtctttcgccaagcttgtcagtatttacgcgaggaattcgcagctgttagctcctcgccggtgttgcaccaactcgataaatctcagttaatacacattctgcatagtaactttctacaagcatccgaactggaggtactgcaggccgttctcaaatggggcgagcaggagctaattcgccgtatggaggatcgggagcccaacttgctgtcccacacagcccactcggtggcgcgcaagggtgtcaagaaacgcgacctgagtgatatagaattacgagagatactatcggaactgttgccactggtgcgcatggatcacgtcctgccgcctcactgcgaggtcctttgccaggcgatccggcgcggtctcgtcagcacaccaccttcgcatatgatcggcgatgatcgggagaatttacgtatcaatgcctggattcgtggcggcaaaaatcagggcctgtacgttaggccacgcctgttcatgccctatttcgaggaggtgaaggcgctcttggaggatcgtatgtcatcgtcacaccatcaggttgagctaatgcgaatgcgccggtgtcggcatcctcccgatattcccgatacactgtacatggtctcgcatatgaattcaaaggcgaatagtgatcttagcacagtagaaaatcgtagtacggacggaaatgttgatatattagtaggcgccgctgttattccaccaccggacaaccaaacgctgctggccatgcgcaagcgggagcacaagctgcgccaatcgcccatgtgccagcgagcattgctactgccgctctcctcgaagagtgagatcgatcggcagatacggctgcgcgttgttagggaattcaatctgcccgacgaggtgtccgaccttttggaaagtgccctgcaaaccaatccgggcagaaatgagagccacgccgaggagactagtgcatcgacctcgcaaaaagatgactcactgctggaggatgaggatcaaagtccgccaccctcgccggcggccacttgctcagtgtcgcgacacaccaccgttgcatcgtcattcttatcgcccatgggctcatcggtggcgtcttgcggcaccgacgccgctcacccgtgctacagtcgaaatctcaccttcccacgccaccattcgaatggcctgatcggagtggccaatgcgtttgggtccagctctggaccgacgctgcagtgcagctactcgcgactctcctcgtcggtgcatcagcgcaatgacctacccgcccttatcaccgagggcgactttcgattcccgcatggcaatggcctgggattggacatgggcgccgagggcggtgcctgcggcctggacacggccaatagccatctgtccgaaatgatgccggatgtggcgatggccaccgcctcgctgggccagctccacttgacaaataatggagctggatgcgccggcaacattggcgggcgcgcagtgagcagcaataacgacatgtccgagagcttgcagctagatttaggcgatggcccgagtcctcatataattggaagtgctgtcggttcaatgactctacgaaatatacaggttagtaactactctttgcatgtacaaaaaaaattcgaattctaa

SEQ ID NO: 25050 - protein, 993 aa, DROSOPHILA
MGANTSSSSYLTAASSGSGANSNASNSNGNLSAMPPGMGEIPGGGGGCSGAFGSSSSCGPSGNAGAAPGIVISGAHYHRDQRRKRATGFATLKRKFIRRRRSSKACDHARVLRDFVSDWAPVELAALCEEFEALSALRDLSVQAELARPPAATFKQDLAAIYEKNLCTDCDLVFRGTIFSVHRAILSARCVYFRDLLAGCPGFGARICLELPTSPIDVQLFSSLLRYLYTGDLCPHDPNIDITLLRQLGKDFGTPNPLEHDLRYLLETGDYADAALVFTADGSNDYLRQDSGTSEYGFRPKIELPCHKAILSARSPFFRNLIARRTRNMDEYVERSLHVPTRIVLDETVIPKRYARVLLQAIYLDSVDLSLILRGVGSGTSAGSLGEVHALTNTGRVRPTTLEEAMELYQIGRFLELDILAQGCEDLILEWLSIETLPTVLKWGCQPHGSAWVFRQACQYLREEFAAVSSSPVLHQLDKSQLIHILHSNFLQASELEVLQAVLKWGEQELIRRMEDREPNLLSHTAHSVARKGVKKRDLSDIELREILSELLPLVRMDHVLPPHCEVLCQAIRRGLVSTPPSHMIGDDRENLRINAWIRGGKNQGLYVRPRLFMPYFEEVKALLEDRMSSSHHQVELMRMRRCRHPPDIPDTLYMVSHMNSKANSDLSTVENRSTDGNVDILVGAAVIPPPDNQTLLAMRKREHKLRQSPMCQRALLLPLSSKSEIDRQIRLRVVREFNLPDEVSDLLESALQTNPGRNESHAEETSASTSQKDDSLLEDEDQSPPPSPAATCSVSRHTTVASSFLSPMGSSVASCGTDAAHPCYSRNLTFPRHHSNGLIGVANAFGSSSGPTLQCSYSRLSSSVHQRNDLPALITEGDFRFPHGNGLGLDMGAEGGACGLDTANSHLSEMMPDVAMATASLGQLHLTNNGAGCAGNIGGRAVSSNNDMSESLQLDLGDGPSPHIIGSAVGSMTLRNIQVSNYSLHVQKKFEF

SEQ ID NO: 25051 - DNA, 12727 bp, DROSOPHILA
gtctccttacgcaccacttctcgtggcttaacgttcctacgtaggctgccgttcacaatgatattcaccatttgaacggtttttaatatgtacatatatattcattttaattgatgtttatttaaaaactagttgtgttttgcggaaacgtagaacaaacgtaagcttatctgacaaacttgtgacgttgcaatctcactctttttttaattcttctattccataacaaatattgacttatcctaacaaactatttttctggcgtcaggatgagaagaatttactttaaaggacagaagctgcatataagtattacaaatgcctgagtttatcttatattattttacaaaaaacccgagtcagtttgctgacagtctttaatttacgtatccaactaactaaagctagtcgagttttctgatctgtttgaagagttcaaacgagggtgtccataaatatacgactccgacaaagcattcgatgggggtcttcgccgatccggagaaaagttacgtacgttaaaggagtctaacaaaaaaaaaagaattgaaaatattaaatattagtaaatattactgtttacagctggcctagttaaacgcaccaccaaatgtatcgtcttgactgcttcttccagattgttgcatcaactccgtcctcgacttccctttcttgaatgctgtaattagaggttatttatattcactatttaaaaagaaaatatcaaattgtaatttggattctacaggctattataaagagtcactagacacctaataaaaggaattcgggagtgtttctcgcaaaaagtttacgggagcaagtctcttagaaataaaactcgcgatttcatttatttcttttattgtactttccccgatttgcttgttccattgcgcagcgaagaattaaaattttgaggtctctacgattgccgaataagagcgtcggctcagcttaagcttctcgctaaatcaaataccatcacgacttcatcccattacatttttcgaaaagagatagcgcgcaagtgcctagctgtgtcgacgtagccgtcgattttgtgatgtttttgagtagcgatgaattgtcgaactgcaggctttgcattgttatttactactaacataagcaaatggtttagtttgtaacgggcaaaaggaagcgggtcctaccatatatagcaaatatattcttgatcaggatcaatagccgagtcgaactggccatgtccgtctgtccgcatgaacgcctcgatatcacgaactataaaagctagaatgttgagattaagcatgcagcttccagaaaaagccgcagcgaaagtttgtttccaaatgttgccacgcccaccctaacgcccacaagccacccaaaactgttacgcccacacttttgaagaatattttcacatttttgttttctatatttactagtcttgcaaatttctatcgatttgataacaactttttgccgcgccctttcttacgcccacaaaccgcccatttttcctcattatattatccaatatctatcgaaatgaaagaacgaattcggtgccacaatgtgcaagaccaatgtattatattggggtttgtctggatcgactcgactgaagattatgaaagtgttaaaaccgctttttgccaataacaattagacaataattccctttttcgagtaacgtgtatgattattgcatagaaaactggttatcatgaatttaaataattcttaccttcaaaattcacttgcgtgacgccctgagtttgaaagcaagacatgtatactgcaatagaattagaataaaacaattacaaggtttgtataaagaaaattgtcctggctgtaataagtacattaaaaggtgaaaatattaaaatttaaatattaatattattagcttaaagaattacacgtaaaaagacatggggtgaataaaaatgatcggaacttgtaaaaagataaaaaccttgtgtaccaacttaccccatatggaaatgattacaataacagtcgtagtcaggacgaagcccaaattctccagtatccgatacacaagaggaccgccatatcggcggtcagtgcacttcggggccagcatggtattgccgataatgggcacctgtaagaccaaaaaatgggatcaatcaatcaatcaattgcttaaagaaattattgaacttctcgtggtgtattattaaaagaatgaatgaagttaattgtctgtttggaatgccattaaaataaaacaacaaaagaaaaccatgtactcgtaaaatataataaatatgtaggtatgcagaaaagtaaagggaagcgtttccgacgcgtttaaagtataaattcttgatcaagattactagctgagcggtctgaaagtctagacgttcgatgtataagactccgcgcatactagcggatgaaaactgttgaatatttccgatagtttacgacataacaggcaaaacatcataatatatatatattttaaatcattatcccggagcttttatattacatttttggttaactggtttccaataatgttagtgcgtaaaacctgaactaataataaataataatttaagcatttttgtatcattataatttttgataagtgatttcttttgtttcattttctaaataaatgtaacataaaacgattttcataaatgaatttaaatttttcacaaaaatgtattgcaatttattttaaaggttattcgatagatactgccaactaatcaaatataaaaatggaggagttttaaattattgacttttcttctctgtttgagatcttaaggtttttacggagtgacacgtattatcattaaatgtcatcttagcgatatcgggatgtggtcgataaaagaatatctttagatattggtcagacaagtgtgtatcattattgtggtgtttgctgggtatagggtggtgcaggcagatatttaaaagaaacttgggtagtaaaggcattatttcgatctgcataagctcccacaagtaatttacatttcatacgcatctaagcacacttactattacacttactagcacatttactatccgctaatggggataaggactcacctcgatgctttgtttggtgtccggtgaaactactaaaatgtaaaagttttcatccagcggaaggtcatcaaacagttccaaacgatatttgcttaaaccatgtccatgctcgataaagtccacagcaaagtattttgaatccgatggcttcacctttgtaaatattgcacaaggaaagaggaaggaaacaagagcacacacttaagtttaaaatctcgactaaaagatacccgcttctcacactccctgggcgaagaataaaaagtgcacaccagagatctgttaagagctgtaaagagcagatcgggtaaacccaatctttgactcgtattggccatgtataatcggggtgcaaattgtcttttttctctctcgaacaaaacctgcctgcatggctgatctcaactttctagctttatatttctcgaaatcacagcgtttattgcgttcccttttttagattatggacaatggaattaccgaattacccgtgcaaaagaaattataatatctcatttcaaagttgtatctttttgttgatcaaaggtgatagatagattttgtttacaatattgaaattgcatgtgtgtatttatacccttttctcgtagaataatagagtatactagattcgttgaaaagtaagtataagatatatatattcttgatcgggatcaatagccgagtcgatctgttcgtataaacgtctgtccgtataaacgagatctcaggaactataaaagctagaaggttgcgattcagcatacagattctaaagacgcagtttgttgaccaatgttgccacgcctactataacgctcacaaaccgcacaaaactgtcaagcccacatttttgaacaaatttttaactttttctgattatattccccaatatctatcaagatccaagaaaaatgatgaaatttcgagttcgcattcacactaactgagtaacgggtatctgataaacggagaactcgactaaaccgctctctcttgttttattttacacaggattttaaatatgttcacatttaaatgctgaatgcgtgttacaccttgtcaactattaattttggacactgtcataggatatgtccatgtaaactaagtgagtactgacagttaattagaaggcagggaaaaaacgataaaacgcatccaaaataaattggatggttgaaaaaatcaaagattttttttgactgttttgggttgtttgtaggcgaaatcgtttgaaacagtttagcacaggttatgggtaaatttacatgctcaatatcttttatggttttagagatctcgaagttcgatcagacttctaaacaaatctggtatacacacccattaccacagacattagaatatgagtatgcagaacgccgcaagagttaataagaagacttttgagcccaaagccccaccagcgacttacctgaaccttgagcaacgccttgtctagtccgcttatatgaatttcatgtggctttaggtcggtgacacgcactgattcaggaaaaactttgataccgggtactaatttcaatgacattttatcggaaactcctttggccaccactgcctgttcaaaggagaagagtttgtttaatttaatgaacatcttacactgtttgagactgacctccagctccaggtagacgtcgtgtgtcttgacaatacttagcaactcaataaaaccggtgagcaactgtagtcgacaagagtactgcccgatgctaggctcaaacaatgcatcaactttatacatttttagtaaattacgtcccagagcatccttggccgccaggcgacatgtaaagaaattcaccggtacgcttcccaattccctggcacattttgaaacattttgtgcaatctacggaagggaagcatgtatcaggacaagacacagttattttttacaatttccttacaaggttactatacttttcggactgcaaatggttgcgaataactagttgtccccgatattctggtccgctaaatgtgtccactgatttgacaaacaaaatctgtaggaaatattggttgagatgctgacaaaaggtggtaacaatggatgcaataccgtatccgattcgcgaacttccaggtcatactttaaaaatccgccgcgttttgtctcgtcgccattagtgatctcaatcttttctcccggctttagtcgatgacttaacacctgggcaatgcctgtaatggagaggaggatataaactatgtatcttagtgggtaaaataattttggggtgaagatagaaagtgcgagtgcgacgcccacctaacgcccacgcatattaaaaatgttttgatattttttcatttttttatcagtcttgtcctgaaaaacgggtatctgataggtggggaactcaactatagcattcccttttgttttttgatgtagacggcttcgctcattttcgatgttaagaaaagaatacttgtgattttatatatacaatcgatctgagaagttctccctttgaagagttttaaacagaaaggcttaaattttagactcgactagatggatacgaatatacatatatattttataaaatccaaaacatcatagtggcgttatggaaaagcgtcccaaaattgtgatttaaatgcaagggtataccaatgctcactaaaggtgggattaaagtgaatgcaagcagtaaattactcacctgtatgcttattaatgtaaactatctgctcattggagcttcgccaagtcgatgacaacgttaaaggtgaatcgaaacaaattatgtcgccaacagagaaaatagtctgccggttggataaagttttgtcaaagccaaataagttacagacgacggatgttccattaaaacatttataagtaagaaagcaagttccacttatttgggagaataaataccttggtgggaaataaattgtccgactcgacaacagatagctttatgaagtccatggagtgcttgacacccgttgagtcctttagactaatgccaatgacattgttggtctctcgcatcaagttcaactaaacgaaaatgagtgtaacagacaaatataaattacatttgaatgttaaaatgcgaatgtattcgctttaaattaagacacaagtagccgaacctttcattcaaataattaaaacctaaatgaatttacactttttggtctgagataaaaaaaattgggctctctttaactacttggagaaaggaaagtatacaatttgacatggcaatgatggagcgttacaatcatatgacttaattacacttaccgcaaacgttagattattatctatctggacatccacatcatctttgttgccgagttcatatcgtagtccgttgaaatcctcgatgttgtgcgacagctcgttgcctaaattgtcgtgaagcgacactttaaacacaaagttcattccacgcgggattttgtgttcaagctctcttaatttgaggattggcatcagcgttactaaaatgtattgcacatttttaacttcaattcctatgggtagggattggtccgcggtcgtcgcctatattaaaaatactaaattcaagtcctcccgtgtagggttcgaaaagcaggttctcacaattatcagatcacggccaagagagtcctttgtgtgtacaaggccatctggtgttacactgacaatgccattacttcgatcgtccagtttatagaccacattatccatattagatttaagctgaagaatgcttcgcggcgcagccaaaattgaatccattttaatggcatttggtgttaccagctccaatgttttaaaaactgcaatacaatttttaattattatggtagacataggtggccgtttcagcttgaacgtaccttgtaagtccactgtagctggtggcagtattgttccgtctgccaaagtaaccgatgccgtgattgttgcctttccaggattgagggctcttactctaactgatatcaaatccccactctgatactctattcctgcagtagtaaaaaacgtaatttattactatttgttatgtatagaaactatgtatccaattgcagaggttaagttatactaaactctttgcaaaagagattcgttgaaaaatgtgtaacaagcggaaggaagcgcttcacatcatcaaatatcacagtcatagaaactattgtatattccgtatctgtgcctgctttgaaactcattcaggcaggctcatcgaagaatacattgtttttgttatccgtgctcttggtggccatagagctacagtctcttatctctacagcggtatccgaacacgtttatttttaaacaatagataaaagtatactaacctgcagttgtaaatacattaaatatctcaaccacctgtggttggcttactttccaggagattttagtgttttgcaaggtacccaaaatcatgggcgacaaatcagaaagaccccacaaggtagctggcattacggccccactatgaatgcggaccaaaggcgttcgaatctgtactcctttcagagccactacgtgtacctccaccgagtcctgggagaccacctcgtcctttccagtgacagggttttttagaagacatttgcctacgattttggtggtccccagcttatgggccgtaacaacagtagagcttatagctgacgataaaaaacaaaagggattacgtgattttaagatgatacacaaaaaaacttacttgctacttgctccttctccactgagattatcatgttggtatttgggtgcggtcctccatggaagtacacctgtatactgctgcccaccactagagttgagtcgcgcggaaagagacgaattggagcgaaaacttgaatatttagagggtcgcttgccaccttataaatgcccttgccagactgaaataatattttggtttcgccgacttggttgcccgtaattgtgtagcggatctctccgggtcctacattttcctgctcgcctaggcgcacgctcagtatactttggtctgcgacaacctcggataaatcgtacgcactaagtttgctctggtccacaagcaagagattatcattggtatcaaaaagccttacgatagcttcgattctagtagtgcgttctagccggtccatgctaactacctcaatagccccgattccaaccacagagatggataaatggctgggttcgttcattaagcaacggtcggtcaactcaagacgaacatggccaaggcgtagtggcgtcagcactaggattcgggtattttcattgtattcaacttgaacaatacctgcctcggagagctccagctgcaagtagccgctgccctgggcgattggtattcgctcgctatagcccgaggccagaaaaatgctcatgtaatcttttggcaacaacgtactgttaacggcgtgtaacctaatttcattttcaatcagaggagtgtatattaaacccgtctgaggctgtaaaaaaattatcattaaatttttacggattactaacgttgaagaggattacccacatttttgattccaaagggaggacgctccgcgtgaataccgtgttgggcaagtagcttgtcgttatactgggacaccgttcccttaatgcggaagttggtcgccacttcactcaatgtcaagacaagaaggtcgcgactcggcagggtaactccatgattgaactccaattcagaaatctgacggtgcgggataatgttcttctggtatcgctcttcaccagcggaaaactcccagtcaagccctagtgagctgatattcatgagcctacgattatttgaatcgtgtacctcgatttcaatttcaattttattctctggatctttcaggaataataacgaggtgcgcttctccagggggcaggagtcacgcaggttatggcgagcgtagagctttaggaagcgaggacggacgcaatgcacctttgtggtcacctccgattgatataaggcaaagcttgaggtgggaaggctattatgcactcggtaagtgaactgcgtctcgcccagctcacgacacagcacggtgaacgcagttatcaaattttgcgtgtcgaactctaatttagacacttttaatattttttcatcaaaagcggtagattgtatgatttctgctgccaccgtaaaactgcgctgcggcccattagcataaattatattacgggatgacccaacgggaagaacaacctcgttttctattggatttagcacgactaatggctcaaagacatacaaatcaataatgtcgtaaagcactttgtccatatacatataggaaacgcgtagcgaggtggtgcccacagcggtggcccgcaaccgaagcacatgacacgcctcgtgagcagcctccgccccttcattaccctccaactgcagaatgggctggctgaagtctagttggaagtgaagattatcacaacttgtgtagggaacctctgaattatttattcgagcgtatacgcccacatgcacgtgtacgaagtccttcagggcggtctcaaagttgctccgcgtgatctgaaggcgctcaggggggagaaagtagatatgtgccacacgggaaattttctggttcttggatagagccaccttgacggtggtgtgggcggtcagtttaccaccatctttcagtacctcctggttcacgtaagcggatttcacgtcgcggatttcagttgtggcttggccctgggtgtcaatctggatcacctgtggatttccggagaaccaagcgtagttgttatctccgccagatgcatgaaactgcagctttaaaggttttaagctgttaggatcgtatggcaacaccaccttggttggcgctaactgaagctcctcaaatatctgaagctcagcttgtaccgacagctgcaacataaataacaatattataagaacttttaatataacaaatagacttttggactattattttgagttaaccttctataaaaaatgcaaacaatttaaaattctacatatcactgcggttgactttataaaaatagatatttatttgacttatttaatattttatttacttcgttataaaagaggtgggcaaacgaaatgaattatttttagcggtcggcaagcaataaaaacaaattttaattaatggctttttttttgttagataatatttagtttttagaagtggacaaacgcctaattatatgataataccgcgattctttttaatgggttatatctatgcacatattttctagagtaatatatataacaaacattttagttataaacttacgtctttatatgagccatacacctgagtgattccctctttttttgcttgaccgaaaaggcggcttccgttgcgagtacgatcaacaatggcgaaaaaggattcatccacctctgagttgattgaatatttagtgcccattgtgatcttctgaccgtcggcagcaaaaagatccaatgctatagcgtgatgctcgccttgtactgtcacccaattgagatggggcaacagactgatggacaacctattcggatatgccacagtcaatagagcgctgggtcccttttggacctcatcagagtccgccatgttgcggtctcgcagaaagacctgggtgcgacccagagccgctccggtggcactgtttccacgaaggtatgcaatgctggagtcctccacctccaaataatactgattgttgtctataacgtgcagtcggtccatcttcagctgcagaatgcgaaatgagacggagtctccagccattatggtgacttcggaaggctcaattataatgtttgcaagaacgctgatgtacacctcaactggccgcacatgcttgtactcggcctgaggcatggcgatggtcaccttggcggtgccagtattaatgccctcaaggaggatcatgtgccccttcttgccgtcggcttcaaacttttcaatggtgggcggtacagtgtggtacggactgtccgtgaacgtgaggtatcgcattgcggtgggccttttgctaccgggttccaaaatctcccagtcaaactcgattccctccaaggtaaaaaactcgttgccttgttcatcaaaggcgtgcagctcgaacatggcgggcgcctcctccaggtaaagttgtcgagtggcggtgcgcacatttagactagcaatgacatccacaatcacgtcggaacgcagcgtctcgcccgtttgtacttcctcggcgaagacgattgcagtgttcctccgacgatcgtgagtgcggactgtcaccaccgcctggtatgcacattcgctgaagcccttgtaaatgggcatgacagatatcaagtcctggcgtgaggacgacctgcaagttcagcatagtagtagtagtagttctagaagttataaaattatatctgtatgacgccgatttaccatttgtagcagttcggctcgtcgacttccagggtaaagtttattgccttgtcttcgaatattggtagtaacacacgcgggtggttcaacctagctgcctcagaagcatgatttcttaccaaaatcagcaaaatcatgcaaagaatagaatccatcgtgccggcaaacgagccacgcgcggaacgagatgctggatagggatggacaagaatgacaatatcgcaaatatcaactatcgataaattatattatacgggtttcaaaaataccaatatatcacttattatatgtgatgtaaatcataatcagttgtatatctgtacctcaagttaaacgaagacttacatattacgtataacagctttttttataattatatttatttacaaataaaattgggtttttgcttgtaaatatttatcaaataacatcattttcgggataccctgcaactcagtcttaataggaatattattctttttgtattcctaaaataggactcgcttaagcttaattaacatttatttttctgtaatatctaaactaatcctagttaaactggtgacagctttagaaaaatactgttaacacaactcaactctatacagctgcacatgcagttaattgatgtctgtaatcgaaaagcaaaacgtctggcaacatcgggttgacttcaccggcagctgacttctcatgtaaccatttcgttataaacaagcaatttaagtgatccgaaattggggaagtgccatgctagaatttggtcgaacattgctgcgctggagaacgcggcactgcagtcgcagagtctctacgtggacgccgctggctacggcgtttaatgcgccaccggctaggcggatcaacttcacccacgacgatgttgtaagacccaaagtctgtaaaacgcaggacctctgactaggcatacatggcctttttcccgtagggcctctttggcatgcccgaactgcggagttttgagggcttctatctccttcgagacaatgtggaaagccggacgcaggagctgatctccgaggccacctccgatcaacgacgtcgaaagatggtcgacatttttgacgagctttctgactcattgtgcaaggtggcggacctcgcagagtttgttcgtatcgcgcatcctcagagcagatacacccaagcagcagagcaggcctgcataagcatt

SEQ ID NO: 25052 - DNA, 5221 bp, DROSOPHILA
tccagcatctcgttccgcgcgtggctcgtttgccggcacgatggattctattctttgcatgattttgctgattttggtaagaaatcatgcttctgaggcagctaggttgaaccacccgcgtgtgttactaccaatattcgaagacaaggcaataaactttaccctggaagtcgacgagccgaactgctacaaatggtcgtcctcacgccaggacttgatatctgtcatgcccatttacaagggcttcagcgaatgtgcataccaggcggtggtgacagtccgcactcacgatcgtcggaggaacactgcaatcgtcttcgccgaggaagtacaaacgggcgagacgctgcgttccgacgtgattgtggatgtcattgctagtctaaatgtgcgcaccgccactcgacaactttacctggaggaggcgcccgccatgttcgagctgcacgcctttgatgaacaaggcaacgagttttttaccttggagggaatcgagtttgactgggagattttggaacccggtagcaaaaggcccaccgcaatgcgatacctcacgttcacggacagtccgtaccacactgtaccgcccaccattgaaaagtttgaagccgacggcaagaaggggcacatgatcctccttgagggcattaatactggcaccgccaaggtgaccatcgccatgcctcaggccgagtacaagcatgtgcggccagttgaggtgtacatcagcgttcttgcaaacattataattgagccttccgaagtcaccataatggctggagactccgtctcatttcgcattctgcagctgaagatggaccgactgcacgttatagacaacaatcagtattatttggaggtggaggactccagcattgcataccttcgtggaaacagtgccaccggagcggctctgggtcgcacccaggtctttctgcgagaccgcaacatggcggactctgatgaggtccaaaagggacccagcgctctattgactgtggcatatccgaataggttgtccatcagtctgttgccccatctcaattgggtgacagtacaaggcgagcatcacgctatagcattggatctttttgctgccgacggtcagaagatcacaatgggcactaaatattcaatcaactcagaggtggatgaatcctttttcgccattgttgatcgtactcgcaacggaagccgccttttcggtcaagcaaaaaaagagggaatcactcaggtgtatggctcatataaagacctgtcggtacaagctgagcttcagatatttgaggagcttcagttagcgccaaccaaggtggtgttgccatacgatcctaacagcttaaaacctttaaagctgcagtttcatgcatctggcggagataacaactacgcttggttctccggaaatccacaggtgatccagattgacacccagggccaagccacaactgaaatccgcgacgtgaaatccgcttacgtgaaccaggaggtactgaaagatggtggtaaactgaccgcccacaccaccgtcaaggtggctctatccaagaaccagaaaatttcccgtgtggcacatatctactttctcccccctgagcgccttcagatcacgcggagcaactttgagaccgccctgaaggacttcgtacacgtgcatgtgggcgtatacgctcgaataaataattcagaggttccctacacaagttgtgataatcttcacttccaactagacttcagccagcccattctgcagttggagggtaatgaaggggcggaggctgctcacgaggcgtgtcatgtgcttcggttgcgggccaccgctgtgggcaccacctcgctacgcgtttcctatatgtatatggacaaagtgctttacgacattattgatttgtatgtctttgagccattagtcgtgctaaatccaatagaaaacgaggttgttcttcccgttgggtcatcccgtaatataatttatgctaatgggccgcagcgcagttttacggtggcagcagaaatcatacaatctaccgcttttgatgaaaaaatattaaaagtgtctaaattagagttcgacacgcaaaatttgataactgcgttcaccgtgctgtgtcgtgagctgggcgagacgcagttcacttaccgagtgcataatagccttcccacctcaagctttgccttatatcaatcggaggtgaccacaaaggtgcattgcgtccgtcctcgcttcctaaagctctacgctcgccataacctgcgtgactcctgccccctggagaagcgcacctcgttattattcctgaaagatccagagaataaaattgaaattgaaatcgaggtacacgattcaaataatcgtaggctcatgaatatcagctcactagggcttgactgggagttttccgctggtgaagagcgataccagaagaacattatcccgcaccgtcagatttctgaattggagttcaatcatggagttaccctgccgagtcgcgaccttcttgtcttgacattgagtgaagtggcgaccaacttccgcattaagggaacggtgtcccagtataacgacaagctacttgcccaacacggtattcacgcggagcgtcctccctttggaatcaaaaatgtggattacatgagcatttttctggcctcgggctatagcgagcgaataccaatcgcccagggcagcggctacttgcagctggagctctccgaggcaggtattgttcaagttgaatacaatgaaaatacccgaatcctagtgctgacgccactacgccttggccatgttcgtcttgagttgaccgaccgttgcttaatgaacgaacccagccatttatccatctctgtggttggaatcggggctattgaggtagttagcatggaccggctagaacgcactactagaatcgaagctatcgtaaggctttttgataccaatgataatctcttgcttgtggaccagagcaaacttagtgcgtacgatttatccgaggttgtcgcagaccaaagtatactgagcgtgcgcctaggcgagcaggaaaatgtaggacccggagagatccgctacacaattacgggcaaccaagtcggcgaaaccaaaatattatttcagtctggcaagggcatttataaggtggcaagcgaccctctaaatattcaagttttcgctccaattcgtctctttccgcgcgactcaactctagtggtgggcagcagtatacaggtgtacttccatggaggaccgcacccaaataccaacatgataatctcagtggagaaggagcaagtagcaactataagctctactgttgttacggcccataagctggggaccaccaaaatcgtaggcaaatgtcttctaaaaaaccctgtcactggaaaggacgaggtggtctcccaggactcggtggaggtacacgtagtggctctgaaaggagtacagattcgaacgcctttggtccgcattcatagtggggccgtaatgccagctaccttgtggggtctttctgatttgtcgcccatgattttgggtaccttgcaaaacactaaaatctcctggaaagtaagccaaccacaggtggttgagatatttaatgtatttacaactgcaggaatagagtatcagagtggggatttgatatcagttagagtaagagccctcaatcctggaaaggcaacaatcacggcatcggttactttggcagacggaacaatactgccaccagctacagtggacttacaaggaattgaagttaaaaatgtgcaatacattttagtaacgctgatgccaatcctcaaattaagagagcttgaacacaaaatcccgcgtggaatgaactttgtgtttaaagtgtcgcttcacgacaatttaggcaacgagctgtcgcacaacatcgaggatttcaacggactacgatatgaactcggcaacaaagatgatgtggatgtccagatagataataatctaacgtttgcgttgaacttgatgcgagagaccaacaatgtcattggcattagtctaaaggactcaacgggtgtcaagcactccatggacttcataaagctatctgttgtcgagtcggacaatttatttcccaccaagactattttctctgttggcgacataatttgtttcgattcacctttaacgttgtcatcgacttggcgaagctccaatgagcagatagtttacattaataagcatacaggcattgcccaggtgttaagtcatcgactaaagccgggagaaaagattgagatcactaatggcgacgagacaaaacgcggcggatttttaaagtatgacctggaagttcgcgaatcggatacgattttgtttgtcaaatcagtggacacatttagcggaccagaatatcggggacaactagttattcgcaaccatttgcagtccgaaaagtatagtaaccttattgcacaaaatgtttcaaaatgtgccagggaattgggaagcgtaccggtgaatttctttacatgtcgcctggcggccaaggatgctctgggacgtaatttactaaaaatgtataaagttgatgcattgtttgagcctagcatcgggcagtactcttgtcgactacagttgctcaccggttttattgagttgctaagtattgtcaagacacacgacgtctacctggagctggaggcagtggtggccaaaggagtttccgataaaatgtcattgaaattagtacccggtatcaaagtttttcctgaatcagtgcgtgtcaccgacctaaagccacatgaaattcatataagcggactagacaaggcgttgctcaaggttcaggtgaagccatcggattcaaaatactttgctgtggactttatcgagcatggacatggtttaagcaaatatcgtttggaactgtttgatgaccttccgctggatgaaaacttttacattttagtagtttcaccggacaccaaacaaagcatcgaggtgcccattatcggcaataccatgctggccccgaagtgcactgaccgccgatatggcggtcctcttgtgtatcggatactggagaatttgggcttcgtcctgactacgactgttattgtaatcatttccatatgggtaaataacaatgcaaagcctgcagttcgacaattcatcgctactcaaaaacatcacaaaatcgacggctacgtcgacacagctaggcacttgcgcgctatctcttttcgaaaaatgtaa

SEQ ID NO: 25053 - protein, 1664 aa, DROSOPHILA
MPIYKGFSECAYQAVVTVRTHDRRRNTAIVFAEEVQTGETLRSDVIVDVIASLNVRTATRQLYLEEAPAMFELHAFDEQGNEFFTLEGIEFDWEILEPGSKRPTAMRYLTFTDSPYHTVPPTIEKFEADGKKGHMILLEGINTGTAKVTIAMPQAEYKHVRPVEVYISVLANIIIEPSEVTIMAGDSVSFRILQLKMDRLHVIDNNQYYLEVEDSSIAYLRGNSATGAALGRTQVFLRDRNMADSDEVQKGPSALLTVAYPNRLSISLLPHLNWVTVQGEHHAIALDLFAADGQKITMGTKYSINSEVDESFFAIVDRTRNGSRLFGQAKKEGITQVYGSYKDLSVQAELQIFEELQLAPTKVVLPYDPNSLKPLKLQFHASGGDNNYAWFSGNPQVIQIDTQGQATTEIRDVKSAYVNQEVLKDGGKLTAHTTVKVALSKNQKISRVAHIYFLPPERLQITRSNFETALKDFVHVHVGVYARINNSEVPYTSCDNLHFQLDFSQPILQLEGNEGAEAAHEACHVLRLRATAVGTTSLRVSYMYMDKVLYDIIDLYVFEPLVVLNPIENEVVLPVGSSRNIIYANGPQRSFTVAAEIIQSTAFDEKILKVSKLEFDTQNLITAFTVLCRELGETQFTYRVHNSLPTSSFALYQSEVTTKVHCVRPRFLKLYARHNLRDSCPLEKRTSLLFLKDPENKIEIEIEVHDSNNRRLMNISSLGLDWEFSAGEERYQKNIIPHRQISELEFNHGVTLPSRDLLVLTLSEVATNFRIKGTVSQYNDKLLAQHGIHAERPPFGIKNVDYMSIFLASGYSERIPIAQGSGYLQLELSEAGIVQVEYNENTRILVLTPLRLGHVRLELTDRCLMNEPSHLSISVVGIGAIEVVSMDRLERTTRIEAIVRLFDTNDNLLLVDQSKLSAYDLSEVVADQSILSVRLGEQENVGPGEIRYTITGNQVGETKILFQSGKGIYKVASDPLNIQVFAPIRLFPRDSTLVVGSSIQVYFHGGPHPNTNMIISVEKEQVATISSTVVTAHKLGTTKIVGKCLLKNPVTGKDEVVSQDSVEVHVVALKGVQIRTPLVRIHSGAVMPATLWGLSDLSPMILGTLQNTKISWKVSQPQVVEIFNVFTTAGIEYQSGDLISVRVRALNPGKATITASVTLADGTILPPATVDLQGIEVKNVQYILVTLMPILKLRELEHKIPRGMNFVFKVSLHDNLGNELSHNIEDFNGLRYELGNKDDVDVQIDNNLTFALNLMRETNNVIGISLKDSTGVKHSMDFIKLSVVESDNLFPTKTIFSVGDIICFDSPLTLSSTWRSSNEQIVYINKHTGIAQVLSHRLKPGEKIEITNGDETKRGGFLKYDLEVRESDTILFVKSVDTFSGPEYRGQLVIRNHLQSEKYSNLIAQNVSKCARELGSVPVNFFTCRLAAKDALGRNLLKMYKVDALFEPSIGQYSCRLQLLTGFIELLSIVKTHDVYLELEAVVAKGVSDKMSLKLVPGIKVFPESVRVTDLKPHEIHISGLDKALLKVQVKPSDSKYFAVDFIEHGHGLSKYRLELFDDLPLDENFYILVVSPDTKQSIEVPIIGNTMLAPKCTDRRYGGPLVYRILENLGFVLTTTVIVIISIWVNNNAKPAVRQFIATQKHHKIDGYVDTARHLRAISFRKM

SEQ ID NO: 25054 - DNA, 5277 bp, DROSOPHILA
ttgttaattatgcgccaattcctcaggaaatttgtttttctatgtgttaccagatcgcattgacaagaaaatcccaattcttcaaggactattttctaagttcaaaactacagcgcgagattttaaagtagaattctggataattttggaaatatttgcagaaaatcccctcattgaaagaaactttttaagtatttaaatattaccatctgcactatgaaatcatccaaccttcccttttgtagcgcacttcaataaaaaacacagattgtagctttataagtatacgggttttcttcaaacttttcgttttagtaaacgtacatactgtttgttctatttctatcacaatgaatatttgtgtcgcgcgtgttaagtgtgtgatgggcttgtctttgtcagagaattcgatcacgatacaagggatacaatccaattgacttatgctagcatctatgtaactcctcacgacgagcaagtcgccatgcataagttaggtgtacatttttaaccagatttacttttgcttttagaacaaagacagtctttatcaatatccaaagggatctgcagttgcgttcccaaatcctggaactgattgcggtccaatggatgcttgttactccacattttggccatcgatgagcaagtgtgtgcgtaatgttcaaaggagatgattacaatggtaacgtaggggacgataagtatttggaaacgtaaaaaagattctatcatctctatacatgtacatgtggggagcagtgcgtccccaatatgctggtgtacaacaagaaaatgactaaagcacgaagagtgcgcatacaaataataacaaataactatcacacctgatccccccatggatctcaaaccgaaatttgggctcaagactatacaattgcatggaaatgggagcaggtcttcaaacttaagcggcggaactaaaattatatgaatattttgcataggtaaccgctttcgaaccgaatccctcgagaacctagttgaaagtgttgtagcgcaggttgctgtctacatcgcccacattgcctgcaaagctcggactgggcggctggtcctggtccgccatgagatctacgctggactgcgagtgacgccgctgacccggccacgtgcacgcatcgcggatgctatcgattaggcgctgcgggaatgtcttgtactccatgtccaccgattgtgtgtcgccgaagttgaaatcggccacttcaacattgaagctgcaaagcgaaacaattggtagaaagcgtttccattggtaattcgtcagtgcttaccgatttccccgttgaatatagtaggccacgccgaaaacaacaagaatcaccgccaccaaagtgcagcttacgggcacaactacaaccgaaagctgagattgacgctgagctgcatagaaaaattaacaatcaattgtaagtagttaattttaaacgaacttcgatttacccaccttcatacatgtttatggtgacctgattaagtgtttgggagacctcgttgcgtatgaagaacagaatggtcttgctttcactgaagtaacgcatatactcatacgagcacgtctctatcggctcatactgatcgcaggtctcattgcccgtggagttgtaaggagctacatggaaacatgacagtcattataacacgtagccttgagctattgcaatgccactcaccagtgaagactcgagtgcaaagctcaaacggcggcgatcctttgcagttgacattgagtttaagcacctcccagtgttgcaaccaattcttgcccgtggtgccgaaaccggttataggatctaaagggttttcagttttaaatatgaggagaatcgctcataaaaatcattaaataatcgtacccttggatacaacgcgatgctggtagtagccgtatatctgcttggggtcctgggcgacgaactttttgctcacgcaatcgaaaggcggctgcagaccgggcaccagtgtgagcttggacacccttcgcactcccagcggattgaccaaagccacggacacattcccagcggatgacttttgctggtttagcgcactggttaagttcaagcctagaagagcagcgttggcatgcatggcctggattaagtcacgtttggatcgtgccggcggctttggagtcgttgtggtcgttgtacttgtggatgatgttgtggtttttggagtggtcgttgtggcaggtgttgttgaagtggttgttgttgctggagttgtagtggtggtggtagtggtagttgtggttgttgtggtggtggtcgtcgtagttgagggcgtcggctccggcggaagttccagtgaagccaccactaacgcctccatgtcataatattgctcagctttcggatatgtggccacatagtccaacgcactggacatgccgagatatgtgcagttctgaaaccaatacgtcagaatgcgataacccttcgactgcagaaaaagtaggtccgcatcggaaagtgatacgctgtgattcaccgcctcctgggtggacacaaactcatggggtcgcatcacattgttctgaatcagctccaggctgccgccgagcaagctgtccagcttgattcccctcgaggccttagcctccgtcacccaaaaaaatgtgacgaacttctccacttccaccttgatgacatgcgtcgccggttgttcttgcgtgaagaccacagaccaattgctgctaacgctgttcgtttcaatcacctgtgggcacaaagagaagtgtttagtgttatttggtatcacttttaagccactctgcatgcaaattcgttcacaatagcagccaccgtttggcactgatatggccacgtaccaggcacaatcggaaaagctgtcgcttaatagtaattgtgcaaaattaccattcaaatgacgccatttcaattgatggcacagggctgagattagaactggtattcgcatctgtttgtatatgtaagctctagcttagggtgtttaaaatgtgtttttagtcatcgtaaataataaaatatttatgacttctatggaataagaatcattaacattgataatttcatttgataatatttaaagaaacagatacggatcagtataattatgttcaatattacatatgctcatgttagttagttaataagcttatatataaaaatcttaagtttgaatttgaaataaggtttctaaagattttttcttgaaaatgcattttgaataaaaacagttacgtcttttgatctaaagagtaattcttgtttagcaattacgagttgtgatatcgatttagaacaaacttttgtaatggtctattagcaggagcttaaaactttaaatttaaccgaaatcgagaactttcaaaatattttgtaatcagagatatttgcattaatgaaatactgttctgctgcgttgatggcaggcaaaccacctagtactagttctcctgaccattttaatgagccagtttgatgggcgtagatgcgaaccctaggctggtggatttgcttgcactattggcgtttgcattcgcaggcaattagtcgtgtcaccgttttctttgtttgaacacgttctgcagggggagcagttggggaaatggaggtggaatcgttacctttcgatggccagcactgtcggaccatgtgaacctgtagggcctgcctccgtcagccggtttgtcgccatcgaagagctgggcggacacattgatggtggatccgatgagggcctgttcgggagcagtgatgatgacggtgtagcaggtaactgcaatgtcggagggaaatcattaatgaccccgtttctggactaccatatccacactgcaccagccattaaccattaaccactacccactgccaccattagcattatccatacctgtctgcagaagagcgaggaaaaccagtgatgacgctgctggcgacatgttcgtcatgccgattggcatttcccgtccactcggcggcgctggctatggaaaatcacttgggagcacccctgcggcgagtcccctcccttaccattaaatcgcaatccaaaccgagcgacaaacaaaattataacgaacaaaaaacaaacacaaaggggtatcttgctttttgccaacggatacacccactttcatggactattctctacgttgaacacggttaattgctttcgtttgggttacggagcactggactccgtgattgcgtcgaattcgctgcggtgattctattattgcgtttttaatttgttctataatttttgcagcctgcagtgaatgagtgggtaacagtgtgaccaggtggcaagcacaagacaagtaaaataaggccgtactacacttacgtcctacgaaaagcccgccaatcttgaaattcaaattaccatgtttttgtatttaaaaagcggagcttaaaagaaattcaaggaaaatataaacttaatatgtattgatacatatcaatcagtgacttctaaggaaaccaggataatcttagataaaatgttattttgttgtctttatccagcggtgccttcaatacacacttaaaaacacattatatcgacaaaagtttacaattttttgaatacaagtttccggcaaacagctcttttctactttgttaaaatactaagttcgatttattcgttagttgtaaatacataatcattatatgcctgcgtacatatgcgtgtagttgtgtatatgttaatatttgaagtaaacttaatagtacaaatgaaagacaacgagatgagaaagcaataattactttgggataagcgaaccgcacagaattctcaatacattgtgaggcggcggcgccggattctacttcttcttgctcttgccgagggtgagcgtgtggtgggcggtggccaactgctgcttgcgccgctggaagtcaaggtagtcctcctcgagcgccttgcgcgactcttccagcttgcgcttctcctcggcgtgatcccgctttagcttctcgaacttggcgtgcaggtccttctcgctctccttcagctcggcctccttctccttaacgcgctgcacgaacatctgacgaacctcctcctccttggactgcagctcggccaaatggttggagcgctttgcctcgaacgtctgctggaacgagatgggcttgttgtcgctgtccacatcgctgaagcccatttgctccagcctcttctggcgatacagctcgtagtggcgcgtgtgtgtcttttcgcgcatatcctccatgttggtgcgaatgagcatct

SEQ ID NO: 25055 - DNA, 1852 bp, DROSOPHILA
aaaaattatagaacaaattaaaaacgcaataatagaatcaccgcagcgaattcgacgcaatcacggagtccagtgctccgtaacccaaacgaaagcaattaaccgtgttcaacgtagagaatagtccatgaaagtgggtgtatccgttggcaaaaagcaagatacccctttgtgtttgttttttgttcgttataattttgtttgtcgctcggtttggattgcgatttaatggtaagggaggggactcgccgcaggggtgctcccaagtgattttccatagccagcgccgccgagtggacgggaaatgccaatcggcatgacgaacatgtcgccagcagcgtcatcactggttttcctcgctcttctgcagacagttacctgctacaccgtcatcatcactgctcccgaacaggccctcatcggatccaccatcaatgtgtccgcccagctcttcgatggcgacaaaccggctgacggaggcaggccctacaggttcacatggtccgacagtgctggccatcgaaaggtgattgaaacgaacagcgttagcagcaattggtctgtggtcttcacgcaagaacaaccggcgacgcatgtcatcaaggtggaagtggagaagttcgtcacatttttttgggtgacggaggctaaggcctcgaggggaatcaagctggacagcttgctcggcggcagcctggagctgattcagaacaatgtgatgcgaccccatgagtttgtgtccacccaggaggcggtgaatcacagcgtatcactttccgatgcggacctactttttctgcagtcgaagggttatcgcattctgacgtattggtttcagaactgcacatatctcggcatgtccagtgcgttggactatgtggccacatatccgaaagctgagcaatattatgacatggaggctacaacgaccacaacgactccaaagccgccggcacgatccaaacgtgacttaatccaggccatgcatgccaacgctgctcttctaggcttgaacttaaccagtgcgctaaaccagcaaaagtcatccgctgggaatgtgtccgtggctttggtcaatccgctgggagtgcgaagggtgtccaagctcacactggtgcccggtctgcagccgcctttcgattgcgtgagcaaaaagttcgtcgcccaggaccccaagcagatatacggctactaccagcatcgcgttgtatccaaggatcctataaccggtttcggcaccacgggcaagaattggttgcaacactgggaggtgcttaaactcaatgtcaactgcaaaggatcgccgccgtttgagctttgcactcgagtcttcactgctccttacaactccacgggcaatgagacctgcgatcagtatgagccgatagagacgtgctcgtatgagtatatgcgttacttcagtgaaagcaagaccattctgttcttcatacgcaacgaggtctcccaaacacttaatcaggtcaccataaacatgtatgaagctcagcgtcaatctcagctttcggttgtagttgtgcccgtaagctgcactttggtggcggtgattcttgttgttttcggcgtggcctactatattcaacggggaaatcgcttcaatgttgaagtggccgatttcaacttcggcgacacacaatcggtggacatggagtacaagacattcccgcagcgcctaatcgatagcatccgcgatgcgtgcacgtggccgggtcagcggcgtcactcgcagtccagcgtagatctcatggcggaccaggaccagccgcccagtccgagctttgcaggcaatgtgggcgatgtagacagcaacctgcgctacaacactttcaactag

SEQ ID NO: 25056 - protein, 515 aa, DROSOPHILA
MPIGMTNMSPAASSLVFLALLQTVTCYTVIITAPEQALIGSTINVSAQLFDGDKPADGGRPYRFTWSDSAGHRKVIETNSVSSNWSVVFTQEQPATHVIKVEVEKFVTFFWVTEAKASRGIKLDSLLGGSLELIQNNVMRPHEFVSTQEAVNHSVSLSDADLLFLQSKGYRILTYWFQNCTYLGMSSALDYVATYPKAEQYYDMEATTTTTTPKPPARSKRDLIQAMHANAALLGLNLTSALNQQKSSAGNVSVALVNPLGVRRVSKLTLVPGLQPPFDCVSKKFVAQDPKQIYGYYQHRVVSKDPITGFGTTGKNWLQHWEVLKLNVNCKGSPPFELCTRVFTAPYNSTGNETCDQYEPIETCSYEYMRYFSESKTILFFIRNEVSQTLNQVTINMYEAQRQSQLSVVVVPVSCTLVAVILVVFGVAYYIQRGNRFNVEVADFNFGDTQSVDMEYKTFPQRLIDSIRDACTWPGQRRHSQSSVDLMADQDQPPSPSFAGNVGDVDSNLRYNTFN

SEQ ID NO: 25057 - DNA, 10262 bp, DROSOPHILA
cttcgatgctccaaaatccgatcccatcgaggctgccgaggcggaggtccaacgggccatttacgaacatgccacggaagagtggtatcgcccacgtgatgagttcgatttcttggaggactaatcccattagattccctcctgtgaacaattgtacagtagtattaggttttatagaattaagctataatttccaattagtccttacaatacacatttaagaaacttcaaccgatcaagttaataactttcgatcattcttcgatcatatttcacacagaccttcaatctcactttaaacctataagtaatcaataattataaattaaatcataaaagcggcgttatgttaatgtaaatatagtccaacataatgcccgatttacggaaaaactgcagagcgaatgtaccttgaaatacttacgaacgcattgcggccattgagctgcgtacgatggtatttactagagttatgtatttatttattcaaatgatagctataaggataaccataaacgtggccataacataaaccccaaatcttttgatggacccctaaacgaaagcataggcgttctggaaaaatatttattgcaaaaatgtagtctgtatatttagaatgcttatgtataaaatagattttattgtatttaatacgttgatatattactgttgtttactctttatgtacacaagtgtacgatgataaattagatttataaattgtatttattttgtagaaaaggttttctgtttttttttttaagcaatttgaaggcatttaaggcacttcatttcagtttaaccatttaccacttaaggctagtgatagcattttgtctatcacacatttaaataaaatttctagtgttgcttagctagtcgcgtttttaatttcgtagtcgggcaaaggcagttgccagaattagataagttttaagtaaagcttgattttgaagcggttcacgaaggtaattggatagtcgaaactatttaatatacacagttgaaaagttgaaggctttaaagccacgctctattgccatcgagtttatcgaatcgtttgggtaaataataaaaaaatataagatgcctttacttacaattacataataataaattgcatacaaacagacttttggcttagaatgtcgccagagaaggaaatctagttccaaacggtatatataaattagatatataaattgtggaagcattttccatttttgtgattaaagctgaccatattttgccgtcagagcggtcggactaaccgcaaataaagagtaagtctatagacattaattaggtgacagagacaagaaacaggtagaaataccgcgccctaacttccaagttgcaagttgacgccaatcgaatactctgcgttgaacaaaacaaatacaaatatgatactattgatgcgcattgaaaatactaatcgtgagtgtcgcgttgtgtgctaataactaaaactaggatgctccaatgtccaaactgtccgtccaggcggcaatccgatcggatcagccactcgatacgggcacccaaagtagcttgtcctgctccttgtcgacggcatccttaatttgggtgcacatgtgcttgatactgacgccggggattacggctgcaggtaaatgagaaagcaattattcacattgaattgtgattaattaaaataaagttatacctgatatgtattgcttatagtcggtctcgagcttcatggcccgctcgtacatctccttggccgccttggctgagattttgtcggtgccaaagtcgcgaatatctcggatttgtttggcagacttaaagcgcagcaggaggacaattggatagatttgtaggcgctgcagacgctccacggcggaaatggaaacgtcaaggatgcagtggcgtcgatcctgtaagggatatttaatgaagatgtctgaaaatttctggagtttacctacatttttgcaggcattgctaatcgcctcaacggtggtgcattcaaacttgttgcccctccgccgataatccacaaagatgttttcttttagaccctcctccatggcctcctgcgaacagtccatggccgtcacctcgcacagtttgaagaggttggagaagtcaattgtaaggcgaaccatcagacactcggacaacggtccgataatcagcacgggccggcgaatgggtgctaaaagattgtgtttacattaacttacttcttttagttttcataaaaaatgtacgtacaatctaaaagctctacacgctggtagctaagggctccaccatcatcgttgagcagacctaagtctggaaagaagctaagctgtgtgttgctgaaactggcaatctccgtggagtcgcgggacgagctgcgctggtttttcttgcgacgaaaaaatgatcttctggccgaagtgctgccgcgtctggccgttcccgtatcacagtcgaccacctcacccgaacgcagttcctcctccaccctgcaattatatataaatatgtgcaactaattcaaacttaagtaatttgccaacgtacttcatttgactgggtattatgccgcactccttccgatggcccatggcatccagcttccaggctcgccacaagccaaaggtgccattaaaaaccgtattgtccacgtagagcacctcgtccttaacaaagcgcaaatcgtcctcgttcaactcaccagtccggtcaaaccccacgcgaatataaaaggagtcgccaggctcgtctttaatttgctttagggctgtagggaatacattatatcataatcataatcaacgaaagaattcaccacttactgtgtaacttattctgtaccaacatggtgaccgtatccgtaagctttgaaatctcattggccgcctgctcagcggtgactccgctcaaatctacaccattgtattccagtatttgatcgcctttgcgaattccagcatgatcagaaggcgatcccaccgcgacgtcatgcacatatatgccaactttattgcccccaaatagcttgatgcccaggttctttgacttgtccatgtgcagagtcacataccttagagctggaattgaaagtccaagtcatatcatgtgcaaaatacgaaagattgacggctttgttagtagggaagaagctgcgatacataatgtgtttgtgaaactaacgctcatacacttccgttttagaatttacagattttgggagttaaaatatttcgagccattttatctaaaatccttgttctttacggccctgagaatatgtacctgatacagccggaaactcttcctgctgcacggttaccttctccgtcgaaggcacgaattatggggaaatgctactatcccgggagtgtggttagtagtgggtgtagagtggtggctacgtactctctgctggaacggatgcaggtggcggcggcaaggatggcttaggttcctcatcatacaccgttgacgtggctgaggcagtcgttgtggtggtggtggccgccgatgaaggcatgtcctggctgctgctgatatccgactggttctcaaggctatcggtgaagctctggtccttaatcgactgatgcgacagcggagcccttgagccgggtctcgttgaaggagcctgcggctgcatcggcaacgggaaaagcgagttgcgggcaggaggacggggagagttgcgcggagtcggggagcccgaatgattgatgggagattctggttccaaattgtgcgctccctcgtactcaattgaagggaactctgcaaaaaaagtaaacagcacaattagaatgggatgagtatacggactgaccgataaacttactctccggattgtactgaacgagcattgtaaaggagtcgccgcactgccgcagcacattggcagcaatctcctgcgtggccgcccgcatgttaatgccacatacttccaagagttgatcgcccacctggagaccggcacgcatcgccgtgcttttgtcagcgacggttgacacaaatattccgccgccgttgttgttgcactgaatggtgatacctagcgacttgtcgcgcttgtcgatggtgactcttctaaggtctccggggcagagaaaatccgcaggcacattggagttgcgcttgccacttccgccgcctccatggctaaggacttccacatggacctgcggcatgggcgaaccgcggccacttcctcctccaccgcctcctccaactcctatgctcgatccagttccatttcctcctgcaatatttgcaccgtaactgttgtgaatactagagctcatcagtgacataggtgcacgatctgaagacgaggctgacatggatccaccagagactggccccgtgctcgtcacataatgatggtcgatgctgccagagctattcttcaccatactgctgcttttgctagccacactgggattagatggaatccttaatcgctgattgtctttcttgcgcgggaatgttccgccttcatagatagctccgccaactcccgagactccaccgcccacccccatatagggacctatccctagaccgtgcccgtaatccaagtaaggagcatggggatggggatgtggatgtggcattgcgttggtctgcgtgtgatggtgcggatggtagtccagatcagtgggtattccaacgctgtcgtgcggtgccgtcgccgcaggtagctgttgcaactgctgctgaggcggtggtgaaggtagggttaatggactggatctccggttaccccgaccaccgggtccaaaagtggggaagagctgcgtgtgtctatttcccggcatatggttggactgaagaaatccaccatatcctccgtgaacaccggaaccaatgctctcgctatcactcgggtacttcggcacatgccttaccgcctgtggcacatggcgcttggcgtacatcccgtattcgctgatagcgggactcttagcagacagtattgactctatagaattctgcgatttcagggacacaacgtccggcggttgtccaacgggcggcgggtgactgcccctggtcggatgaagcggcatgaacatattggatccggagctgtttttgggcagtggaggcggatggaagacgtcatagacctgctgtttgcgcactggaaactctccggccgccggacccgtaccaccgaccattgatcccgatcctactccaaagcccgccgatgtcgatgaggcgttcattacttgctgctgggcctgctgaccactggtcttgggctgataaaaatctccgctgggcgtgatatttaacgacaggcgatggttactatgcggcctggttccgtagcgctcctgtgaaggcattttaaccctggcattggcgcccatcagaggggctcgctggatcggcttttggttaatctcctcggcagtcacaccgtatagcgaatgcctcggatgtgtgggataactagtgttgggcattccattgggtggtccggggggaaacagtgccgagactcccgagctcaccggattagaattgcggtttggatgcgtctttatagctcctccgttcgatccccgaatgtgggccagtggcttggacatttgcgggggcagcggtggaggcaactgatcctggatcaacgctgctggctgcttttctggcactccaacctcgcccatcagctcgtcatccttgtccacatttatgggaccggctgtaaaaagcgacatcagagcacgcttcttctcattgccgcgcatggtgcccgttgggttttcatgcgagatgttggtccgcggccaggtacccatgctcttggaggcctctttctccttcttggtccgcttcttgcggttgaacagattctccttgctcttctcagagctgttttcactgagcacagaatccaaagcagcgatggcgtcgtcgtgctcctgctcaaagttatcctctggtgtgcctggtttgctgaacttaagctttcggaagaaaaattccgcgaacctggacggatgtttggtggcgctactgggcccacttcctccacctcccccggcacttgagacatgctgcatggagtcaatggaatctgtctgcgccgacgaggtggtcattcccgggggtaactgatcctgtacgtatttaagggcaaacagattgagcccatcgcttcggggatcattcatcaactgcatcacttcctcgattgactgcactgagtccatagacttgttgttaatgcttaacactcggtcgccaacgtccagctctggttcgtagaaggctagcgaattttgctcgatctttgcaatgaacactcccatgtccagttgcaggccatgcgggcaatccctatccctagtctttagctgaacagaataggcgtgccgtttgctgtgacgagttcgggaaacgagcaggagggaacgaggagcacaggcgcggatctcatcaagaaccatccgtttcgacaaagactggcagtccaagttgttcaccttgcagatcacatcgttaatcttgagcttcccgcaggcgggggaactgctggtaacgccacacactaattttcgcttgttgctgtcatccaggatgatgcccaggtcggacgtgtgctcgtagccggacagctctacttccaggagatcctcaccttcgtaactgcttgggcggaaactgcgtcgggatccggaggcgttactgtcaagattttggcgctcttgctgctccatttgttctttcaacaagtcgatctttttctgcgcttcgtccttctgctttttaatcttttcgctatcccggatggccatcagcgagtcggagatggctttatctctctcgtggcgcattttatcacagagcgtcttcaccgaatcccgctcctgcacgatcttctcacgttgcgatatggcccaatcccttacgcgcttcgcttcttcggcatcctggcttgaacgctccacctccgagagggccttttctaagctcttgcgcagcttttccagttccttgctgttctccagctcctttccactcggaaattctttggaccacgagctatcgcgagactttagaagatcgcgctttttaaggtccgcattggccagctgtagaaccttgatttcagccctggcaagctgttcgtcctttttgagcctctcaatttctttgttggccagaaccagatcgtcggacatcttctggtgctcctgcagcacgttgtccttctctgagagcagttgattaagctcctcggtaagggaaagcacattcttactctcctgggagagaagaaccttcagtttctgattttcatcgcctcgctcccggtagtagttgcgatccttttcaagctcgatgtaggacttcttgtacttctccctctccacggcgaccatatttcgctctttcttcagttcggccagcttctcactgcagcttccatcgcatccctgcgtcttgccaaaataataaggattcccactgccgactggcggcacttggctatttccattctgggcctgctggctctgttggttttgggtctccaatagcagacgcttgaaacgggcgctctcctccaccatatcggtgaacttgttacgatcggccacgtaatgctcctggtacagagttaactcggtggctaactcatcgcatcgcctcttggtgttcgcatgctggtggcgtagggtatttagctccaaaagtgcggacttgtactgcgcctgcagtatatcgtaatttgcgccgtttccaccagaaatgcccgacacgcccacaccgctactgacgcccttcgagggcccgttgttgttggacatgttggcagctgtggtgctgccgctggaattggacggcggtcgtagggtattatcatagcccacatactccgagctctcttctaaaattaaagacgctatgggtaggtactttaaatgaatacggcgtcttaccttcctggctactcgtactagtcagcgatagatctccagatgccatcttcgccatcacagcatctttaggtaatacttaacataagggtatgctgatgagtaaaagtacaaaagattaattaggttcgtgctaaagttaaagttaagcgaggttccaggctgtctaactaatttgtttagcgtaatgcattctgctttccaattggggtttggttttttctttgatatggagttcgttcatcttatccgtttatttattaatttttagaaaatttatttttggtttatacaatttttttttaaacatccaaaggtgaggattcaaacttttaccttttaaccttttatctaaaataaactgtaactttttgttaactttactagtaatactattttgaccattgctgtattttttgaagtgtgcgagtaagtatgaaaagcaaggcattggaaaaacgaaactttcacaatttttgtgaaaccgcgattttcacaatcgaacgaatcgaatttaaatacaaccgcaatggggaatgagaaaatgggcgggagtgggcgtgggtaggcagtagggagaatggggataggtggcgaagtgtagaaaaaagggaagttacgcagtttttggtaactcttacaaacggctattgcttgcgaaaatgaaatgtgtggcaattaagcagtcgagttaaagcatcgagactaagctaaagaattaattgaagcagccgagcagaaagcgtaaattaatagcaacatgtatgcacacacacacacacttaccgaaacaccaacacactcgcaggcgggcaaaacaagttggccgaatgaaagagaagaaaagctggcgaacacacaatggtggaaagcactgcgagttatataaaccctttttttccttgattggagtttatcttggcccagcagcacgcctatttgtccaaaaaataggaaaatatagcgtattttcctttacatcgaaaatcttattacgcacactcacacacacgcacgcgaacgcaacagctgaatgggcgcgcgaaagagaggggacgagctccaccccaattccagccctgcgggaaagagagggagagatgcaacaggcggacgttgaacgggacaaccgacgacttttaccgttttcgctcgcgcatccggattccggaagttgagtttcttggatcgttgggcgaaaagtcaacctctacggtgcacgacactcttggaagaacactgcgacgaaagcgatgacgaatggccaacgaaaattgaacgaaatgaaataaaaaaaaacaacacaacttcttcactaaaacgtcaccagtgtgaccgcggagtgaccgataaataatacactctgtctctttagacaatattaaaatcgatagtattgtttaatatcgattcattagcccagctttcttaaaaaacaaataaatcccgaatgtaaaatgtacatataagatcattccttctatatcggaactgccgctcctctttacgaacggctggcagcgctgtatatgtgtactaagtgggagtgtgtacacgctaagttggcgcgcaatcgtgctggaagtgtcttcgcttagcaatgttccaaacccattagaaaacttgggagattttaatcaaatataatgatattattacacaatatttagttcaaaccgttgttgtttattttgttctttgtaatttttaatactttttgcaactgctgcactttgcgcaagttgcacgcactaacaaccttttggaaaatggccaagccagggcgagcaaaatttttattcattaaaagtaaaataatacccaagaagttggtcaatttgcagggcaaaagagatcgaaaaaaggtagtcaacgatgcgagcgccaagaaggttgcaacttccggcgaaagccacataactagtataatgagcatcccgagtcatagtacggattccgatgagcgtatcgcatccaccgcgccaagtgtctggagtacttcagtacccatacccattccttcctcccaacgaggaatgcccaaacagaatgttcgcagatcggtggtctccataagctcgttaccatcgaaaaagtcaagtagcgcagttaaaaggaaattatcttatatagaagaacagccgtttcatttatataagcttaggaaactcgaagccagcgcggaaactcagcttaaaatagttcattcacatccgcacttaactagttctacggacagcgtggaggaggcgaccaatcagagtgatggcgataaaatggactcggaattgggaaataccacggatcacgaag

SEQ ID NO: 25058 - DNA, 6712 bp, DROSOPHILA
aagaagttgtgttgtttttttttatttcatttcgttcaattttcgttggccattcgtcatcgctttcgtcgcagtgttcttccaagagtgtcgtgcaccgtagaggttgacttttcgcccaacgatccaagaaactcaacttccggaatccggatgcgcgagcgaaaacgggctggaattggggtggagctcgtcccctctctttcgcgcgcccattcagctgttgcgttcgcgtgcgtgtgtgtgagtgcgtgctgctgggccaagataaactccaatcaaggaaaaaaagggtttatataactcgcagtgctttccaccattgtgtgttcgccagcttttcttctctttcattcggccaacttgttttgcccgcctgcgagtgtgttggtgtttcgcatacccttatgttaagtattacctaaagatgctgtgatggcgaagatggcatctggagatctatcgctgactagtacgagtagccaggaagaagagagctcggagtatgtgggctatgataataccctacgaccgccgtccaattccagcggcagcaccacagctgccaacatgtccaacaacaacgggccctcgaagggcgtcagtagcggtgtgggcgtgtcgggcatttctggtggaaacggcgcaaattacgatatactgcaggcgcagtacaagtccgcacttttggagctaaataccctacgccaccagcatgcgaacaccaagaggcgatgcgatgagttagccaccgagttaactctgtaccaggagcattacgtggccgatcgtaacaagttcaccgatatggtggaggagagcgcccgtttcaagcgtctgctattggagacccaaaaccaacagagccagcaggcccagaatggaaatagccaagtgccgccagtcggcagtgggaatccttattattttggcaagacgcagggatgcgatggaagctgcagtgagaagctggccgaactgaagaaagagcgaaatatggtcgccgtggagagggagaagtacaagaagtcctacatcgagcttgaaaaggatcgcaactactaccgggagcgaggcgatgaaaatcagaaactgaaggttcttctctcccaggagagtaagaatgtgctttcccttaccgaggagcttaatcaactgctctcagagaaggacaacgtgctgcaggagcaccagaagatgtccgacgatctggttctggccaacaaagaaattgagaggctcaaaaaggacgaacagcttgccagggctgaaatcaaggttctacagctggccaatgcggaccttaaaaagcgcgatcttctaaagtctcgcgatagctcgtggtccaaagaatttccgagtggaaaggagctggagaacagcaaggaactggaaaagctgcgcaagagcttagaaaaggccctctcggaggtggagcgttcaagccaggatgccgaagaagcgaagcgcgtaagggattgggccatatcgcaacgtgagaagatcgtgcaggagcgggattcggtgaagacgctctgtgataaaatgcgccacgagagagataaagccatctccgactcgctgatggccatccgggatagcgaaaagattaaaaagcagaaggacgaagcgcagaaaaagatcgacttgttgaaagaacaaatggagcagcaagagcgccaaaatcttgacagtaacgcctccggatcccgacgcagtttccgcccaagcagttacgaaggtgaggatctcctggaagtagagctgtccggctacgagcacacgtccgacctgggcatcatcctggatgacagcaacaagcgaaaattagtgtgtggcgttaccagcagttcccccgcctgcgggaagctcaagattaacgatgtgatctgcaaggtgaacaacttggactgccagtctttgtcgaaacggatggttcttgatgagatccgcgcctgtgctcctcgttccctcctgctcgtttcccgaactcgtcacagcaaacggcacgcctattctgttcagctaaagactagggatagggattgcccgcatggcctgcaactggacatgggagtgttcattgcaaagatcgagcaaaattcgctagccttctacgaaccagagctggacgttggcgaccgagtgttaagcattaacaacaagtctatggactcagtgcagtcaatcgaggaagtgatgcagttgatgaatgatccccgaagcgatgggctcaatctgtttgcccttaaatacgtacaggatcagttacccccgggaatgaccacctcgtcggcgcagacagattccattgactccatgcagcatgtctcaagtgccgggggaggtggaggaagtgggcccagtagcgccaccaaacatccgtccaggttcgcggaatttttcttccgaaagcttaagttcagcaaaccaggcacaccagaggataactttgagcaggagcacgacgacgccatcgctgctttggattctgtgctcagtgaaaacagctctgagaagagcaaggagaatctgttcaaccgcaagaagcggaccaagaaggagaaagaggcctccaagagcatgggtacctggccgcggaccaacatctcgcatgaaaacccaacgggcaccatgcgcggcaatgagaagaagcgtgctctgatgtcgctttttacagccggtcccataaatgtggacaaggatgacgagctgatgggcgaggttggagtgccagaaaagcagccagcagcgttgatccaggatcagttgcctccaccgctgcccccgcaaatgtccaagccactggcccacattcggggatcgaacggaggagctataaagacgcatccaaaccgcaattctaatccggtgagctcgggagtctcggcactgtttccccccggaccacccaatggaatgcccaacactagttatcccacacatccgaggcattcgctatacggtgtgactgccgaggagattaaccaaaagccgatccagcgagcccctctgatgggcgccaatgccagggttaaaatgccttcacaggagcgctacggaaccaggccgcatagtaaccatcgcctgtcgttaaatatcacgcccagcggagatttttatcagcccaagaccagtggtcagcaggcccagcagcaagtaatgaacgcctcatcgacatcggcgggctttggagtaggatcgggatcaatggtcggtggtacgggtccggcggccggagagtttccagtgcgcaaacagcaggtctatgacgtcttccatccgcctccactgcccaaaaacagctccggatccaatatgttcatgccgcttcatccgaccaggggcagtcacccgccgcccgttggacaaccgccggacgttgtgtccctgaaatcgcagaattctatagagtcaatactgtctgctaagagtcccgctatcagcgaatacgggatgtacgccaagcgccatgtgccacaggcggtaaggcatgtgccgaagtacccgagtgatagcgagagcattggttccggtgttcacggaggatatggtggatttcttcagtccaaccatatgccgggaaatagacacacgcagctcttccccacttttggacccggtggtcggggtaaccggagatccagtccattaaccctaccttcaccaccgcctcagcagcagttgcaacagctacctgcggcgacggcaccgcacgacagcgttggaatacccactgatctggactaccatccgcaccatcacacgcagaccaacgcaatgccacatccacatccccatccccatgctccttacttggattacgggcacggtctagggataggtccctatatgggggtgggcggtggagtctcgggagttggcggagctatctatgaaggcggaacattcccgcgcaagaaagacaatcagcgattaaggattccatctaatcccagtgtggctagcaaaagcagcagtatggtgaagaatagctctggcagcatcgaccatcattatgtgacgagcacggggccagtctctggtggatccatgtcagcctcgtcttcagatcgtgcacctatgtcactgatgagctctagtattcacaacagttacggtgcaaatattgcaggaggaaatggaactggatcgagcataggagttggaggaggcggtggaggaggaagtggccgcggttcgcccatgccgcaggtccatgtggaagtccttagccatggaggcggcggaagtggcaagcgcaactccaatgtgcctgcggattttctctgccccggagaccttagaagagtcaccatcgacaagcgcgacaagtcgctaggtatcaccattcagtgcaacaacaacggcggcggaatatttgtgtcaaccgtcgctgacaaaagcacggcgatgcgtgccggtctccaggtgggcgatcaactcttggaagtatgtggcattaacatgcgggcggccacgcaggagattgctgccaatgtgctgcggcagtgcggcgactcctttacaatgctcgttcagtacaatccggagaagttcccttcaattgagtacgagggagcgcacaatttggaaccagaatctcccatcaatcattcgggctccccgactccgcgcaactctccccgtcctcctgcccgcaactcgcttttcccgttgccgatgcagccgcaggctccttcaacgagacccggctcaagggctccgctgtcgcatcagtcgattaaggaccagagcttcaccgatagccttgagaaccagtcggatatcagcagcagccaggacatgccttcatcggcggccaccaccaccacaacgactgcctcagccacgtcaacggtgtatgatgaggaacctaagccatccttgccgccgccacctgcatccgttccagcagagactctaaggtatgtgactctgcacatggacaagtcaaagaacctgggcatcaagctatttgggggcaataaagttggcatatatgtgcatgacgtcgcggtgggatcgccttctgatcatgctggaattcgcaaaggcgatcaaatactggaatacaatggtgtagatttgagcggagtcaccgctgagcaggcggccaatgagatttcaaagcttacggatacggtcaccatgttggtacagaataagttacacaccctaaagcaaattaaagacgagcctggcgactccttttatattcgcgtggggtttgaccggactggtgagttgaacgaggacgatttgcgctttgttaaggacgaggtgctctacgtggacaatacggtttttaatggcacctttggcttgtggcgagcctggaagctggatgccatgggccatcggaaggagtgcggcataatacccagtcaaatgaaggtggaggaggaactgcgttcgggtgaggtggtcgactgtgatacgggaacggccagacgcggcagcacttcggccagaagatcattttttcgtcgcaagaaaaaccagcgcagctcgtcccgcgactccacggagattgccagtttcagcaacacacagcttagcttctttccagacttaggtctgctcaacgatgatggtggagcccttagctaccagcgtgtagagcttttagattcacccattcgccggcccgtgctgattatcggaccgttgtccgagtgtctgatggttcgccttacaattgacttctccaacctcttcaaactgtgcgaggtgacggccatggactgttcgcaggaggccatggaggagggtctaaaagaaaacatctttgtggattatcggcggaggggcaacaagtttgaatgcaccaccgttgaggcgattagcaatgcctgcaaaaatgatcgacgccactgcatccttgacgtttccatttccgccgtggagcgtctgcagcgcctacaaatctatccaattgtcctcctgctgcgctttaagtctgccaaacaaatccgagatattcgcgactttggcaccgacaaaatctcagccaaggcggccaaggagatgtacgagcgggccatgaagctcgagaccgactataagcaatacatatcagccgtaatccccggcgtcagtatcaagcacatgtgcacccaaattaaggatgccgtcgacaaggagcaggacaagctactttgggtgcccgtatcgagtggctgatccgatcggattgccgcctggacggacagtttggacattggagcatcctagttttagttattagcacacaacgcgacactcacgattagtattttcaatgcgcatcaatagtatcatatttgtatttgttttgttcaacgcagagtattcgattggcgtcaacttgcaacttggaagttagggcgcggtatttctacctgtttcttgtctctgtcacctaattaatgtctatagacttactctttatttgcggttagtccgaccgctctgacggcaaaatatggtcagctttaatcacaaaaatggaaaatgcttccacaatttatatatctaatttatatataccgtttggaactagatttccttctctggcgacattctaagccaaaagtctgtttgtatgcaatttattattatgtaattgtaagtaaaggcatcttatatttttttattatttacccaaacgattcgataaactcgatggcaatagagcgtggctttaaagccttcaacttttcaactgtgt

SEQ ID NO: 25059 - protein, 1916 aa, DROSOPHILA; identical to SEQ ID NO: 14061

SEQ ID NO: 25060 - DNA, 4694 bp, DROSOPHILA
acacgtcaataataatacaccaatacatacaacacatatgagctagcgacacgaacacacacgctcgcgtgtgtcctgagtgtcctgtcgcataataaaacaccgcctggcgatggtagaagttgttgtgttggctggggagcagacttgtaatatcataactcagcattgtttccactcattctttctttttggtctacgctcagaagattttgcaagatgcagcagtatgctaggattgccaggatcgcaaccaactctgcccgggcttgtcaccggcaaagattctacgaacccaatgccgaagtacgctggcagcactccgagcactaaacaggctgagcggagccactagcactcccgatccgatcaggtaagtctaagtccatacagtatatacttgtatatagatacatataaagcgtatcctgatttccccctgccgtaggcgcccatttttattttcccattcactgccaacttatttacgggccgcaattatttccagcattttatttttacgtctctctggcagttgcttttcaatttttcgttgatttgtttgtgctgcgcgtcggcaatcaaagtcccaattgaaacgccaactgaaccgccccatcccgccacgcccccttatctttctgtgcgttccttttagtgtgtatgtgtgtgtttgagtttgtgtttgtatttcgtttgctctttgtttttatcgcactgtgtacaagtgaacgcttccgtttccgctagtcgcgtcacagtccgtttgcccatccgaccgccaggccacccactcttcctatttaaattacatggcaatcggcatgccaaagccattcattcatgagcctggcgggtagcacaaactgagaaaccaagaaaccaagtaaccgagggacccgactatttttacacgcaatttctttggtgggcttgcaggcgggcgctttacttacacaaattaaactcgattcgcagcggcggcaacagcggacgaactatgataacgaggctctacaacaccgaagaggatcccgcctactgctcgttcatctggggctcgaatctcaccagcagcgtcgacgtcctggctgccaatgccacgtccgtcttcagcagcgacctgagggacgacttctatcgggtgagtgcgtttttggccattcaatagtgttggcggttattccgtcccgattgggtgcccattctgtttgggagcagctcgctcgcaccttgggccagttagccccagtcgttcgcctggccttcgcaaaggatgcctgctgcgcagaaaaactgttgcctactttcgggcgccacgggtagtgccattctcgaatgtttttaaccaaacaccatggccaactggaggggagtagctcatttcaggacacagcaggcccagctgcatggcctccgtggccagggcatccagttgccaggttcccttaactctttaaagtcgtgctaaatcttggcaaacaaaattaggtttaaaaataaactctttatgttgacttggctgctataacttttttttaacagagagttgcgaacatcagaaggccacgtcatggcataagccatgaaaaaattaggaaaattcgttcaataccatttaaaaacttaaaatgcttaggctgtataagccttaaaacggtgacaaattcatgtcatgcatcaagaagttaagtatgtagaaagttatgaaaagtcatctaaatttgacatttctgagtaataaatcaatgtttggaatttacatattcataaaaatcttattgagaattggaagagatatacatgtttacagtttacaaagcattttaatggacaaaaatatacaaatgctagaaatatttttagaggatttgttatacaacgaacgtttctcttaatttttcgccaaagactgaaaaatcatctcataacaaagcgcagcgcgttttcttgtcagtttgcgaaggccactaagcccttcatctcactaatgcggggtactaaaagttgacctagctggctgacagacagccaaaagctgctttgttcgcaactctggctcaaggcgagctgctcggcaaatgggcgaatgcaaaaatagaaaacaaagcgtggcacattagggtggcgcacacatgtggcatcaaaggagcaagtgactcaggagccagaagaatgccgcatgcgaggcatgcgtgcgtatatgtatgtgtgagtgtgtttgtgcgcataaaaagtcacaaaataaaagtgtcaagttgactattgaatttttatctgcgccagcccatccgagtgccaacaaagcgagcgaagccacaaagagatgatttacgagctgttcccatttccattcccacacccgcatcccgagcacacaaacaacacacagccgtacttacacccacttgtttactatcctttttaggatgtggaggatccgcggacggaatcgctgagggaatactgctatggcctggtgctgcccatcatctgcgccatgggcatcataggcaacgtgctcaacctggttgtgctcaccaggcgcaacatgcgtggcaccgcctacatttacatgcggggtaagttgaaaagcacacatatagcatacacacatatatgtatgtacatatgcatgtacatccttcagagagtcctcgaccacacccacccacaaaacgggcaagtttctagtgcctattaatccgcaaccgcacacaagccaatattcaaatatttcctaatttgagtcatgggtgcattttcgaactcaatacttgcgaataacaatgtacactttcagctttgagctcgttgcgcaaactggaagtccttttcttacactaattactgccttttatgactgtgaacattcacagaaaatattccacacatcaacatcgaatgtgtaaatcaaaactcactgtcgataaactcagcatcaaccttttgataagcaattaaaaatgttattcattttcaaccaataggtagagaacaaaagatttccatcaaccatatcagcttcgcagctagaaattcaattctgctgttctcacataccctcttgttattatttaaactttctgcatttgattagacgatgaaaacacaattatattttctccaatgtgagtagtatcaatttgggatgttaactcgttcagcagctagctgcataaaatttttgcttggcattcttgattacaatgataagtgatttattgaacaatggccagcacaattgggcgaatatgtccatcaaatctaaacagtatcaatttccaattagtgcaggcccaaaaatccagaataaatccactgccttgcagagttgcaacacagtagcgtcaaatgaatttaggttgcctgttgattaggcctgaggaatccttttcaaaaaaaaaaaaaaaaaaaaaggaaattgaagatcttttcactttgctgggacaatgaagaacaacctaaataccatgctcatttcccatttcgagtatgattggcgataacccatattggatttttgcccaaaaagagacacactcgtacgtcttcgcccacgcaaaccttggatttcctcatcttcattggcattccgggtgatgtggagatggcgatggaaatgggtatggatatggagctgcagatagagatggtgatggaggttagggaattgggctcgactcttgactgattgccaaattgagtttcgctttagaacatatgtatttcgtattccccatcgccatcgtatattggccattgtgcgccagaatttattcattaacctcgccgatttctggcaaaattgaagctgccacaatgcggctaatatatgcgtaccgtcgtattcgcactccctaccgcatttgtattcgtattcgtgtgtttgtgttcgtgtagagcttcattgaaagttatttcattagatgagaccggttaaccccgtggaaatttatgcacagccactaagccccaaccacagcccagcctccaactttctgctgtattagacagcatgtcaactctattaggcactcgtttgctttatggcgctttaattgattaatgagctccacttccgccacttttggggctggcgggaaaaaggcaactttgtcaacgccgccacttgctggtaattttttagcctcgactatcactcatgttgaacctcctgttccgacccctctacccatccaaaaaaaaaaaatagaaaaggaatggatgcaaacaaggaaaacagaaacaggcgactcactttactagtcatggggaaattccacttgagccgaagcgacaaataccctgggtgtaaaggattgaccatacaagttggtgaccccgattgcataagtatattttggtcaagcgaattgttggttgttaataaaggctgttaatttatgttcataatgttgataacttccgctgttctttgaggtgcctcaacagttattgattgtatttaaaaaagtttaatacgggggtgaccccgattaattcgtgtaaaatatctaactatactcgagcaagttgaggtgtactaagtaatggtatttttctcatgttaaaatcggtacactaagcgctaaagacatctgttattatgagtttctggtacctatccaaactggtcttatctggctggatctgagcagtaaatttggtgaccccgatatattccttaaaat

SEQ ID NO: 25061 - DNA, 486 bp, DROSOPHILA
atgataacgaggctctacaacaccgaagaggatcccgcctactgctcgttcatctggggctcgaatctcaccagcagcgtcgacgtcctggctgccaatgccacgtccgtcttcagcagcgacctgagggacgacttctatcgggatgtggaggatccgcggacggaatcgctgagggaatactgctatggcctggtgctgcccatcatctgcgccatgggcatcataggcaacgtgctcaacctggttgtgctcaccaggcgcaacatgcgtggcaccgcctacatttacatgcgggaaaatattccacacatcaacatcgaatgtagacacactcgtacgtcttcgcccacgcaaaccttggatttcctcatcttcattggcattccgggtgatgtggagatggcgatggaaatgggtatggatatggagctgcagatagagatggtgatggaggttagggaattgggctcgactcttgactga

SEQ ID NO: 25062 - protein, 161 aa, DROSOPHILA
MITRLYNTEEDPAYCSFIWGSNLTSSVDVLAANATSVFSSDLRDDFYRDVEDPRTESLREYCYGLVLPIICAMGIIGNVLNLVVLTRRNMRGTAYIYMRENIPHINIECRHTRTSSPTQTLDFLIFIGIPGDVEMAMEMGMDMELQIEMVMEVRELGSTLD

SEQ ID NO: 25063 - DNA, 4684 bp, DROSOPHILA
gaaatgagttttgttttgttttgtttcttccgagtgtttgtgtgtttatgtgtgtggggagggggtgtattctgtgtgcggcgtgttttgagtgagagagatagagagagagcgcgagttgctgcgggtcgacggtcgaagggggtggtggtggagttggtggtggggggcttggtttatacgacaagttttgatttattattaaatttaaatacctatgtatataaattacgtttctgtttattataattattgttgtttccatcttaatcattttgttttctttcgctttttatttttcatattttttttttgttttttgtatgtagtgggcaactgcggcatttgtaaatttctttatatttaaatgttccttttgactgtgtaaaaatatcgatttccatctgatcttgttttgtagttactattcatgtatgcatttgcttttcgttttagttaaattacgttaacgctgcattctgaactctctgttgctgctgattctgctgcttgttcttcggattcttgatcggattcttctgattcttcatcttggcgcgctttctatgctattgaaatgttgtttgtggtgctgcttactgccttctggatcgggatcctatattccgctctgatctgatcggttatgttcatgttatgtcgggttgtgtgtgtctgtgttgtgtgtatgagagtggagtgtgttgggtgttcgcatctcgttatatgttgtatatatatatatatatatgtgtatatatatatatatataatatattatatgtatgtatagttagttgcttaatagtagaatttcttgaatgttgttgtggtaaagtgtaggtaatgttgctctatgtctctatgtcgactcaactgcactacatacatatgtctttccaccggatacgcggcgaaccgaaacgtgccgagccgaaccgatccccgtttctgacccgcatccgcatccgtatccgtatttcgtttcctcacctccgcctcattcgctgcgcagtttctttagatccggtgacttctcccccacgcccacacccactccgccggcgttcttcagctccatatcgcagtgcagggcagtacgcttctgtccaatggctggtgccgagtctgcacccgctgctaccggtgaaaccgcatccaccgccttgttcgccgccagctgctgcagtttactgtccctcacaatgccgttgctgctattgctctcgtcagcctctagctccgcctcattatcctcctcctcgtccagctcatcttcctcctcgtcctccgcctcatcctcatcctcgtcgcccaggacgccgttcccgttaccatttccattggctggtgctgcagtcgctttgctggctggctgtggtgctgctgtaaccgcttcctcttctgccaaaggagcaggctgaccgttgttggtgatcgaattgttagttttgtggggctggctcggcgactgcttttgattctgattctggctcgagtgctgtgtgggagtcaggatgggcaggctgttggtcttgggcggcgcctcctgattgctttcagagtccgaggcgagcggtgttccactcgaaccgatgccaatgccaatgtctagggcgatgggctcaccgtcctctgtggaagtggtggccgttgtctgtgtggtgccatcgttgtcatcgatgatcggctcctgggaggtggaatcgttcgaaacaaagttggagtcaccgtcctgcagggcggcgccaacggcagctgcgttgttcttggcctcgcccgactgtagaggcgtcagagcagccgggttggtgttctcattctctgtctccgattctgtagcagtgttgcgaccgcctgggggatagaaagcattggattagccatcaatggtcaatttgttaactcggcgaactgcggtcagagtaatcaaacaaagaaactctgtgtttgaaattattagacatcctaacacttttgaaaagctgccaacaagtataagctactgataatatgttaaaagttaactattttacagtagtaactttacaattcctcctttttatttaacatgacgccacgagtaacgaataaattgtaaattgtaaattgaccactaggctactacaaacataatgtttaatggaaaattccggataggaaaaatacttggtttctggaaaagaccactcggtttgagtgttttgttgcaagggtgtatactcaagccgcagttatcggatcatcttagctgcttacctgctccttggctttcgtcgtccaaatcaacacccacaccatcgttggtatcgtcgccatcgagcaccttgctgctgttgccgtttgtgctgagtgaaccggtgccagtggaggcgccggatccaggcggcggcatatcgtcgagcatctcgggactgagatcattggccacatagtgtgaccagagggccagctccacgcgatgaggcgaccagtgcggcgtatccccgcccacctccgcattgaggcgctccacggtggcctgaatgtgattgacgaagttgaggtactccttggtggtgtaatcgatgccctcgatctctggtatggccatcaggcactcgtcggccatgaatggtgccgaatcgggagctgcggctgccagcagtgcactggccattgtggtgccaacgcccttgaggttcgataaagctgtgatcgcctgctccagattgggcagcttgcggaaggccttctttgtctcctggatgacggcgcgcggtgtgttgaccttgaccaggtaggatagctgcggatagaatttgccgcgcgactgcttccacttcatcgactggacgagctcatcgtataccatatgcgcgtccttgccgcgtgccttaatcaatttgggcagttcattctgataccactgatccaggcggatcagctcttgcggcttcttgcagcgcttctcggcctttagcttaagaacctggggatagagctggtagcagtactcgaactgtttggtgctcccggtctcgaagaacgagaccgtcgccttgccgttggacatcttctgcggatgcggatgtgtcgttgtcgcctgctaatgattggtggtatcgctgtatctccttatcgtggtatctatcgccttggggcccaggacgttggctgatccgcaagtgaccggctggctatatatgcggcaatatatgtactttggtgtaagctactatacgccaaatcaatttattgcttactgtttagtctcctgcttttcctgtccgttccgagctgctcctgtcaacgtactgctattcgtgcgttgagagttcccggcgagaaagaagcgagtacgtgagagacagagagaatgcgagtgcgagagagggagcacgaagaagcagcaacgcaaaggagagtggatgaaaagagaagaaaagaggcacacaattaggtttacagttacgattacatatgcaagggggatcggtgcggtggcatagggaggtagttcgattgattactgttaatgctgctgctgctgcggccgtgtctctgttgtttgttgtatttactcaatccgataatcgctcactatttgccaaaaatctgctcgcttccgccgccgtttgcacagcacacaaatcgaatttttacagtgctgtcgtcgggttctttttagtccgccatgcactcacacagtcaaactgacaggcacacggatggacacacacacacttactcagcacactcgctctcgcacacccaaagagagccaggcgctcatacacaggcaaaaacacgcacacaacacacacactgacttaaacacgcacacacttatatactgaggcaacaacagcagcagcagaaaatttctttttcatctaggttttcaaaaaaaatacgaacgcgagcattaaataaacgaatgctactatttttcgctgttgttgttgtttgtgcttttttcgtacctcttgtctttttggcaaacggtgagaacagcttttcactagcgcactgcacgcacacagatgagtgggtgaacaacaaataccttttagttagtcgccgccagtcttcctttccgtccacatccaaacaactactccaatgctttgctgtttttctgtgttgcctctgctttgctttgcttcgcttcgcctctgtgcttgtgctgtgctgcgtgcttcgtgctgtgcccgtgctgtgctgcttcttcttcttcctctgctgtttcagtttctgctttctgcctgcaggggcgccgttgacaactgacaaataaaaaggggttactctgttctcgaaatgagcacgccaccgaaggcacaacaaaaaattaaaaaggatcggagcggagcgatgcagctgtgcgatgtgctgctaactcgtgtgacgggaattgggaattgggattgcgaatgggaatgggagggaatacgagaagcgaatatgggaatgacgaacgacgacgaaccgggaacaggagttgtcgttctatctcgcccgcactcggtgcccgaatgtatctgtatctctctggcaccctcggcgttccatttcattttgccggcgacgtccgtgctctctgccgccgctctgccatcgcctctgccgctgcgtttatgcgcagtgcgtcattacacgaatacctgtttaaagcggaggcataaacgcggctttgtcgatc

SEQ ID NO: 25064 - DNA, 2003 bp, DROSOPHILA
gagtgcatggcggactaaaaagaacccgacgacagcactgtaaaaattcgatttgtgtgctgtgcaaacggcggcggaagcgagcagatttttggcaaatagtgagcgattatcggattgagtaaatacaacaaacaacagagacacggccgcagcagcagcagcattaacacagtacgttgacaggagcagctcggaacggacaggaaaagcaggagactaaacaccagccggtcacttgcggatcagccaacgtcctgggccccaaggcgatagataccacgataaggagatacagcgataccaccaatcattagcaggcgacaacgacacatccgcatccgcagaagatgtccaacggcaaggcgacggtctcgttcttcgagaccgggagcaccaaacagttcgagtactgctaccagctctatccccaggttcttaagctaaaggccgagaagcgctgcaagaagccgcaagagctgatccgcctggatcagtggtatcagaatgaactgcccaaattgattaaggcacgcggcaaggacgcgcatatggtatacgatgagctcgtccagtcgatgaagtggaagcagtcgcgcggcaaattctatccgcagctatcctacctggtcaaggtcaacacaccgcgcgccgtcatccaggagacaaagaaggccttccgcaagctgcccaatctggagcaggcgatcacagctttatcgaacctcaagggcgttggcaccacaatggccagtgcactgctggcagccgcagctcccgattcggcaccattcatggccgacgagtgcctgatggccataccagagatcgagggcatcgattacaccaccaaggagtacctcaacttcgtcaatcacattcaggccaccgtggagcgcctcaatgcggaggtgggcggggatacgccgcactggtcgcctcatcgcgtggagctggccctctggtcacactatgtggccaatgatctcagtcccgagatgctcgacgatatgccgccgcctggatccggcgcctccactggcaccggttcactcagcacaaacggcaacagcagcaaggtgctcgatggcgacgataccaacgatggtgtgggtgttgatttggacgacgaaagccaaggagcaggcggtcgcaacactgctacagaatcggagacagagaatgagaacaccaacccggctgctctgacgcctctacagtcgggcgaggccaagaacaacgcagctgccgttggcgccgccctgcaggacggtgactccaactttgtttcgaacgattccacctcccaggagccgatcatcgatgacaacgatggcaccacacagacaacggccaccacttccacagaggacggtgagcccatcgccctagacattggcattggcatcggttcgagtggaacaccgctcgcctcggactctgaaagcaatcaggaggcgccgcccaagaccaacagcctgcccatcctgactcccacacagcactcgagccagaatcagaatcaaaagcagtcgccgagccagccccacaaaactaacaattcgatcaccaacaacggtcagcctgctcctttggcagaagaggaagcggttacagcagcaccacagccagccagcaaagcgactgcagcaccagccaatggaaatggtaacgggaacggcgtcctgggcgacgaggatgaggatgaggcggaggacgaggaggaagatgagctggacgaggaggaggataatgaggcggagctagaggctgacgagagcaatagcagcaacggcattgtgagggacagtaaactgcagcagctggcggcgaacaaggcggtggatgcggtttcaccggtagcagcgggtgcagactcggcaccagccattggacagaagcgtactgccctgcactgcgatatggagctgaagaacgccggcggagtgggtgtgggcgtgggggagaagtcaccggatctaaagaaactgcgcagcgaatga

SEQ ID NO: 25065 - protein, 550 aa, DROSOPHILA; identical to SEQ ID NO: 4137

SEQ ID NO: 25066 - DNA, 3212 bp, DROSOPHILA
aaatatactacaaaattttttttaaacaaattttaaataatttataaaaataacgtttgctagttaaagtaaagaaatgcaacctaccttatttttggccaatgctgttaatttggttattacgtatatgcaatgtatgcttcaacataaagtttaatttttttgtttttagccttgacatatttcattggccgaaagagcattacccaaaagctacatgaaaccataaaaagtattggggaatggtaacagaaaaaactaaattgcaaaaaactcccctttttactgtgttttagagtagcaatgaacaatgtaagcgaactgtttgtattcaaaacttatcgatggcggttataaaacatttgaaaggtaaaagttacaacttttttaacagctacgaaagaatctatccctttttattactcccagcagctgtcgataagagttttaatgccaaataatggcaactaagtcagtgcagttgcataagagatcatgggacaacatttgcacgacttttaactacatttttaatgtccattttgtacgcttagttaccgcacaggatttgtgtgtagaatgatagaaaatggggttcttcaactaaaagtactaaaaaggttataggcaatattatttttggtcacttttttcctactgaaaaaaatgattttactattaaacactattaactttattgtggattgtaatatttaggcaaaatgaaaattttgtaaaattaagcttggtattattttttaaaaattaacatctggtcaattatttacctaatccgtaaatatctaagtgaagaacttgtatttattaatgttattacgccacggctcacacttgctttacacaaataggtgataattgctggaatcaattaaatataattgcggggacaacaattacgtctacccgacttaaatttaattattaaaagggaccagtataaaaggaaaggcggtacataacttgtccaattgtttcaaatatggattcaagaaggaaagtccgaagtgaaaatctttacaaaacctattggctttactggcgacttctgggagtcgagggcgattatccttttcgacggctagtggattttacaatcacgtctttcattacgattttatttcccgtgcatcttatactgggaatgtataaaaagccccagattcaagtcttcaggagtctgcatttcacatcggaatgccttttctgcagctataagtttttctgttttcgttggaaacttaaagaaataaagaccatcgaaggattgctccaggatctcgatagtcgagttgaaagtgaagaagaacgcaactactttaatcaaaatccaagtcgtgtggctcgaatgctttcgaaaagttacttggtagctgctatatcggccataatcactgcaactgtagctggtttatttagtactggtcgaaatttaatgtatctgggttggtttccctacgattttcaagcaaccgccgcaatctattggattagtttttcctatcaggcgattggctctagtctgttgattctggaaaatctggccaacgattcatatccgccgattacattttgtgtggtctctggacatgtgagactattgataatgcgtttaagtcgaattggtcacgatgtaaaattatcaagttcggaaaataccagaaaactcatcgaaggtatccaggatcacaggaaactaatgaagtaagaataaagatttaagaaccgcatgtttgatagctcagagaactgataattaatcaaatgtaacttttccaggataatacgcctacttcgcagcactttacatcttagccaactgggccagttcctttctagtggaatcaacatttccataacactcatcaacatcctgttctttgcggaaaacaactttgcaatgctttattatgcggtgttctttgctgcaatgttaatagaactatttccaagttgttactatggaattctgatgacaatggagtttgataagctaccatatgccatcttctccagcaactggcttaaaatggataaaagatacaatcgatccttgataattctgatgcaactaacactggttccagtgaatataaaagcaggtggtattgttggcatcgatatgagtgcattttttgccacagttcggatggcatattccttttacactttagccttgtcatttcgagtataggaaaatagaagtatagctcaataatttattatttaagatagtagcatttttgataaacaattacttcattttcactaacccatgtgacatgaatccaaaatattagctcacctgctagacagcaactaacacatcagtaaatttataatttataacatgtgcatttattgttcacagacaacacccagatatctaaaaagaaatttaactcttttgcacaggtcctagattaataaaatatgattaaccaaagcaaaaatttgtatttacgctgtcggtcccaaattgttaacttcccacgcagttcttaccaaagaaaaggtgtgaattggtcatagcaaattatagggttatcaaactcgcagtaaattgatgggcgtaacgatgtgggactataatttagccatttagaacgactagtataaaagaggaaatgccgcaggaccttttcaattgtttcaaacatggacttaaaaccgcgagtcattcgaagtgaagatatctacagaacctattggttatattggcatcttttgggcctggaaagcaatttctttctgaatcgcttgttggatttggtgattacaattttcgtaaccatttggtatccaattcacctgattctgggactgtttatggaaagatctttgggggatgtctgcaagggtctaccaattacggcagcatgctttttcgccagctttaaatttatttgttttcgcttcaagctatctgaaattaaagaaatcgaaatattatttaaagagctggatcagcgagctttaagtcgagaggaatgcgagtttttcaatcaaaatacgagacgtgaggcgaatttcatttggaaaagtttcattgtggcctatggactgtcgaatatctcggctattgcatcagttcttttcggcggtggacataagctattatatcccgcctggtttccatacgatgtgcaggccacggaactaatattttggctaagtgtaacataccaaattgc

SEQ ID NO: 25067 - DNA, 1137 bp, DROSOPHILA
atggattcaagaaggaaagtccgaagtgaaaatctttacaaaacctattggctttactggcgacttctgggagtcgagggcgattatccttttcgacggctagtggattttacaatcacgtctttcattacgattttatttcccgtgcatcttatactgggaatgtataaaaagccccagattcaagtcttcaggagtctgcatttcacatcggaatgccttttctgcagctataagtttttctgttttcgttggaaacttaaagaaataaagaccatcgaaggattgctccaggatctcgatagtcgagttgaaagtgaagaagaacgcaactactttaatcaaaatccaagtcgtgtggctcgaatgctttcgaaaagttacttggtagctgctatatcggccataatcactgcaactgtagctggtttatttagtactggtcgaaatttaatgtatctgggttggtttccctacgattttcaagcaaccgccgcaatctattggattagtttttcctatcaggcgattggctctagtctgttgattctggaaaatctggccaacgattcatatccgccgattacattttgtgtggtctctggacatgtgagactattgataatgcgtttaagtcgaattggtcacgatgtaaaattatcaagttcggaaaataccagaaaactcatcgaaggtatccaggatcacaggaaactaatgaagataatacgcctacttcgcagcactttacatcttagccaactgggccagttcctttctagtggaatcaacatttccataacactcatcaacatcctgttctttgcggaaaacaactttgcaatgctttattatgcggtgttctttgctgcaatgttaatagaactatttccaagttgttactatggaattctgatgacaatggagtttgataagctaccatatgccatcttctccagcaactggcttaaaatggataaaagatacaatcgatccttgataattctgatgcaactaacactggttccagtgaatataaaagcaggtggtattgttggcatcgatatgagtgcattttttgccacagttcggatggcatattccttttacactttagccttgtcatttcgagtatag

SEQ ID NO: 25068 - protein, 378 aa, DROSOPHILA
MDSRRKVRSENLYKTYWLYWRLLGVEGDYPFRRLVDFTITSFITILFPVHLILGMYKKPQIQVFRSLHFTSECLFCSYKFFCFRWKLKEIKTIEGLLQDLDSRVESEEERNYFNQNPSRVARMLSKSYLVAAISAIITATVAGLFSTGRNLMYLGWFPYDFQATAAIYWISFSYQAIGSSLLILENLANDSYPPITFCVVSGHVRLLIMRLSRIGHDVKLSSSENTRKLIEGIQDHRKLMKIIRLLRSTLHLSQLGQFLSSGINISITLINILFFAENNFAMLYYAVFFAAMLIELFPSCYYGILMTMEFDKLPYAIFSSNWLKMDKRYNRSLIILMQLTLVPVNIKAGGIVGIDMSAFFATVRMAYSFYTLALSFRV

SEQ ID NO: 25069 - DNA, 4010 bp, DROSOPHILA
tgtaattccctacatcgaatcataaatcaatcgcctgcattgcgtgaaacaaggaagcctcccaaaaacccacatccgttgaccagatatattcacttcctacgaactatctacgcaaaagacaacaaatgagccacagctctcgttactacacatgatgatgaaaaacctgtcggataatgatgaatccgagataatcgataaagtgtgcctggttacaggggaagtccattagggtgaccgttccagcccggaacctcttttacttacttgtggtcagctatcgaatttccccctttttttttgccgcctataccaacgcctggttactttttaagcattttgcaatcggatctcgttcggatggagtagggattacaaaatttcgaattcatgagaccgaagcgcaacaaagacaggcctattttcaatttccgtacgcaatgtttgctggccgttttcataagcgtcaaccgatttgccgcccacttccagcgccccacattggttttggcccagtgggtgacaatttcgtactggcatggcttaaaagtgaatgctgcagtgcagctccaattaatctgcatctgtatctgtgtatcagtgcctcgggaaggtcatttgtaaccttaactaaacaaatttgaaagctggtgcccggcatatcaggtgtggtctggttctggcgatggcccttttatgccctgtcgttataaaatggccagtgggcgttggtggtggcatcagttcgccatcggcagcaaacggaaaacagcagcagtagccaaacaaataagcagcagccaactagtcgtatacttaacgtcagcagccatgaaacgggtaagttttccgtcaaccgctgccggccataaatattcgttgctgttctgccgccatgtaaatccggcaaagtggaagttgggaccataaatcaggataatcaaaaatacaaaacgataagggccacagcgttttaggccaatttaaaagcccagagatgtggcataagccaaatggaaatcaaccgagcttggttggggataaaaccaagtataaaaacgataggataatatattatgttttgcatatatttggataataatttttcctaacatttttaactcaatcatttttcgttcattgtgagaaaagataggcaaaaaaattgagtaaatgaatatttacctaaaatattttctaaaatacacaattcatttaataagttattaagttacagagtaaatgatactaaactttaaatcattcaagattattagatatttcaatgttgattcattttatctaccaccagctatcagtgtattttatactattgttccagacaactgagcttattctttttgtaaacttgacagccaatagagtcagacaaaccaacaaatcccaacaactttttgttcggtaacaagaatcgcctgttgtcgtttttaatttattaccctcgcaactaacaaataaaaagggaaagccattgtggaatgacaaattgatgaggccaacgggtgatttataccggataactatttaattcgaatcctgtgtgaatcctttccaattccagacatacttgttgctctgcctgagtctcctcacctgcaatgtggccaattcggcatacctgcgtccaatcgatcttaaccagctagccaagtcctccaaccttcagcagcagcagcaacagcagctgcgtggcgctttgaaccgagatgataacaacgatgacgatgatgccaccaccttggcacccaattccaacgaggattacgacactcgtccccagtacagttttgcctacgatgtgagggactcgctgactggcgatgacaagcggcaggaggagaagcgcgatggcgacctggtcaagggtcagtactccctgatcgaacccgatggcacccgtcgcattgtggagtacacggccgatgatgtgagtggcttcaatgccattgtgtctaagcagcgtctggatgagcagcagcagcaaaggctctccgcctccacttcgtcccgtttcaacagcctcgaggaactgcagacccgtctcaccgcccaggccattgcggaagcccaatctctggtggaggcccaacaggctagccaactgcagctggaggcgcagaatcgtcgagaatcggaaaaccaggcacgcaaccaagcccaacagctcatggaacagttccaacaacaggtgcaacagcaggagcagcagcgtctgcagcaggaacaacaattgagggatctgcagcgcctgcaggagcaacgagatcgcgaggagcgtgatcgtgagcagcgggagcgggagcagcgtgagcgggaacagcgcgagcgccagcagcgggaacaggaactccgggaacgggagctgcgcgagcgcgaactccgtgatcgtgaactccgtgatcgtgaactccgggatcgggaacagcgtgatcgggagcagcgtgaccgcgaggatcgccgccagcaagcggagcgtcgtcagagtcagaaccagcgattgctcgaccagcagaccctactcctggcccaaagcctgcccagcattcaggccaccgtggtctcccatccacccactttgctcgccacccgcctgcccgtcagcaccaccaccagctcgtcgaggactaccactctgctgaccagggaacgcgatctggaggcctggcgccagttgcccaatgcccgcatcactatcgatcgcagctcccaaccgctgatcctcagtcagccatccagtgccaccgttcaggctcagctgatcagttcgccactgcttttggagtccggaaacctcaacggattgataaccacccggctgaatggcaatgctgcacgagctggagccgccttgagttggtccaatggacgccgcctgctgaacaacgatctctggcagctggacaggctggatgaccgtgcagataatcggcgagaaagcgaggagttgcgttccaacagtgccgaacgtcgctctaagaactggtagacactccggaacatggaaatgattcaacccaatcttcaactgaactcatacgaaactccaaccagcgacctcagcgatctgccaaccggacaacgaatatgtttagaccataagttctagatcgaatcttgtgttcacctagcctagaatcggggattttggtaattctctcagcttttcgacccatctaatgcatacagcaaactctgccaagaatctaacccaagctctaacgctttccattccgctaactttagttgtaagtctaattgtttttgtgttactctatagttagtcaactgcatcaatgtgaaaatgtaaaaaaaataaaccagattattcaaagaaggctgctggacttcaactaagtcggcatgctcttttgcaaaacttaattcgtgtcaacttgccaattaagttcggctaacttaccagcaccagatttgagcgtcgtccacaggtggtggtaaaggattttccgttttggctcttgcactccttctggccaactaaccaaagccagttgaccctaatcgcctttcatggactctgacactttggtcatggatgctgcactttcacacacgagtttcgcccctctctcacttttctgccccacaattcaaccttcatggacacgtgtgcacgccacttggccataaaccctgaagctaagtttccttgggacagccaggcgaatggctacaaattttttaataataaacagcgtggagggaatgctgaaagttttctgctccattccataaagtttgtctcgtgtacacttaaaaataaagttgcactttagtgtttgacttgggaagggaggaaaggttagctttgctgtggctgttaagatgccaaggcaataataaagtggcaagaggtaatgaaaaccagtcggaggtaaatgaaaattgtggtcggatgaaaaccacatcgattgggagattgcggtaaatacttagtaaattcttaagctttcctttgtaaacatttt

SEQ ID NO: 25070 - DNA, 1461 bp, DROSOPHILA
atgtggcataagccaaatggaaatcaaccgagcttgacatacttgttgctctgcctgagtctcctcacctgcaatgtggccaattcggcatacctgcgtccaatcgatcttaaccagctagccaagtcctccaaccttcagcagcagcagcaacagcagctgcgtggcgctttgaaccgagatgataacaacgatgacgatgatgccaccaccttggcacccaattccaacgaggattacgacactcgtccccagtacagttttgcctacgatgtgagggactcgctgactggcgatgacaagcggcaggaggagaagcgcgatggcgacctggtcaagggtcagtactccctgatcgaacccgatggcacccgtcgcattgtggagtacacggccgatgatgtgagtggcttcaatgccattgtgtctaagcagcgtctggatgagcagcagcagcaaaggctctccgcctccacttcgtcccgtttcaacagcctcgaggaactgcagacccgtctcaccgcccaggccattgcggaagcccaatctctggtggaggcccaacaggctagccaactgcagctggaggcgcagaatcgtcgagaatcggaaaaccaggcacgcaaccaagcccaacagctcatggaacagttccaacaacaggtgcaacagcaggagcagcagcgtctgcagcaggaacaacaattgagggatctgcagcgcctgcaggagcaacgagatcgcgaggagcgtgatcgtgagcagcgggagcgggagcagcgtgagcgggaacagcgcgagcgccagcagcgggaacaggaactccgggaacgggagctgcgcgagcgcgaactccgtgatcgtgaactccgtgatcgtgaactccgggatcgggaacagcgtgatcgggagcagcgtgaccgcgaggatcgccgccagcaagcggagcgtcgtcagagtcagaaccagcgattgctcgaccagcagaccctactcctggcccaaagcctgcccagcattcaggccaccgtggtctcccatccacccactttgctcgccacccgcctgcccgtcagcaccaccaccagctcgtcgaggactaccactctgctgaccagggaacgcgatctggaggcctggcgccagttgcccaatgcccgcatcactatcgatcgcagctcccaaccgctgatcctcagtcagccatccagtgccaccgttcaggctcagctgatcagttcgccactgcttttggagtccggaaacctcaacggattgataaccacccggctgaatggcaatgctgcacgagctggagccgccttgagttggtccaatggacgccgcctgctgaacaacgatctctggcagctggacaggctggatgaccgtgcagataatcggcgagaaagcgaggagttgcgttccaacagtgccgaacgtcgctctaagaactggtag

SEQ ID NO: 25071 - protein, 486 aa, DROSOPHILA
MWHKPNGNQPSLTYLLLCLSLLTCNVANSAYLRPIDLNQLAKSSNLQQQQQQQLRGALNRDDNNDDDDATTLAPNSNEDYDTRPQYSFAYDVRDSLTGDDKRQEEKRDGDLVKGQYSLIEPDGTRRIVEYTADDVSGFNAIVSKQRLDEQQQQRLSASTSSRFNSLEELQTRLTAQAIAEAQSLVEAQQASQLQLEAQNRRESENQARNQAQQLMEQFQQQVQQQEQQRLQQEQQLRDLQRLQEQRDREERDREQREREQREREQRERQQREQELRERELRERELRDRELRDRELRDREQRDREQRDREDRRQQAERRQSQNQRLLDQQTLLLAQSLPSIQATVVSHPPTLLATRLPVSTTTSSSRTTTLLTRERDLEAWRQLPNARITIDRSSQPLILSQPSSATVQAQLISSPLLLESGNLNGLITTRLNGNAARAGAALSWSNGRRLLNNDLWQLDRLDDRADNRRESEELRSNSAERRSKNW

SEQ ID NO: 25072 - DNA, 2674 bp, DROSOPHILA
actttggtcatggatgctgcactttcacacacgagtttcgcccctctctcacttttctgccccacaattcaaccttcatggacacgtgtgcacgccacttggccataaaccctgaagctaagtttccttgggacagccaggcgaatggctacaaattttttaataataaacagcgtggagggaatgctgaaagttttctgctccattccataaagtttgtctcgtgtacacttaaaaataaagttgcactttagtgtttgacttgggaagggaggaaaggttagctttgctgtggctgttaagatgccaaggcaataataaagtggcaagaggtaatgaaaaccagtcggaggtaaatgaaaattgtggtcggatgaaaaccacatcgattgggagattgcggtaaatacttagtaaattcttaagctttcctttgtaaacattttgatttaaggtctaaggtgttcataaatctgattatgcaatcatttattataaattgggaaatccagtggattcgttgaattataaacgtttcttctatttgacagctgttaagtccttttgaaggtagattagaaggcagaaataattaaatttcactattttcaccagtttcttaacaaaacaagtaaatacacttaatactgattttaggaaataaatcttgtatacaacttgttaagctttaaaataatgacaagctgcacaactttagcgcctcagcgacatcggttaatgtcaaaatttggtaaattaaataaaaagcccctggtgaagtgacatggtgagctacttgcagctgttgtgcatgacgcaagtgagtcctcgccaggaaatcacttaaaagttcatcaaaagcgcagcccgactggttgccttaagcccttcggcttgacaatgggcttgacatgggcagaaggaaaagcgggaaaagaaaaacaagtgctgaagaactgggaaacagtttgcctgcgctgcgaatgtcaagtccgtggcacacaaacaaagcagcacacaaaaaccgaattcgagctcagagctcaaaaaacgagaaaaaaacgtagctagtaagtgaatcctcttgacttttggacatcattccgaaaaacctctactacttcctgtctccgattttagcaaaaatgttgaccacgatgagaggcagcgcaaagaaacttcccatctggccactgacccattttcgcagattcccgacattgattaaatcccacgcaagttccgaagaaaaatttgagcaaaaagctgaggaagtggacggcgtatccaatatgaagctaccctactttataagcccaaggtgtgttcaaaatcaggatcaactggttgatgggcagacgaaaatgttcacctacaactatcatccgttttccatttacgatttaaatgaagctactcttcgcgccaagcaagcagcagatgagtattcaaagaaaattgatgagttgcaaaagcgtaagattgaatatgtaaacaagtagttggtgacaataatctcattaatagataagcgatgatatcatacaatgaggattgaattatttacttactattaaagatagaaatattcaaaatattaatgtttacagacaacaactaaaaataatttcaaatcaataaactcaccgcagcctagttaggcacacagcaaaactcaccagtttggttggtttctaagctaagcgcctcataggctcgaaccaaaacagtttgacagccactgaatttaaaacctactctttccgttctttttgccttgagtttttaacttcaacttgcaatttgaattgttaataaatttgtatcagaaattcgcataaaatcaatcaacacgcaacaagaactgtggaaggggggcataacggaaactcgaatcgggaacggggttgctgcacaaattcagggacaaaccaaaccagcggcggaataccaaaacaaaaaccgaacattggattctgatttagggatatctacgtagatccgtcttcgaggtcgtcacacattgacgcaatacgatagctgagctatcagagatatcagagatctttggaactgaaaacaaccgggtatctgttttgcattgtgagatctatgaaccgatatcaagagtcattgccatcacgtgtacgccgcttactaattagcactaggaaattccccgaagatcccatagagagagagagtatctgaaaaacagagagaactactatctgaatatctggttctaagggcttctctggctcgttttagatattacttaattacccggtaatcgaaattagcgtatgcttcctattaattgggagtttctagatataggttcttcacaagattctgttgtgataaaatagttattattatatttcgaatataaccccttttgcgtgtgattccttactaattgccaggtgattcacataatgtacttacatattcatatactgggtactaacttttaacagggaataaaagcttgctttaatttaagaggtttgtttgatacgatgcaagttaattttgaaataaaaatatatataatatataatatttttacagcattatattctgataaaatttctatattctttaaatttaacaacaatttaactgtttaaatcaaatgtagaaacagttggttattaaatttaaatac

SEQ ID NO: 25073 - DNA, 604 bp, DROSOPHILA
cacaaacaaagcagcacacaaaaaccgaattcgagctcagagctcaaaaaacgagaaaaaaacgtagctacaaaaatgttgaccacgatgagaggcagcgcaaagaaacttcccatctggccactgacccattttcgcagattcccgacattgattaaatcccacgcaagttccgaagaaaaatttgagcaaaaagctgaggaagtggacggcgtatccaatatgaagctaccctactttataagcccaaggtgtgttcaaaatcaggatcaactggttgatgggcagacgaaaatgttcacctacaactatcatccgttttccatttacgatttaaatgaagctactcttcgcgccaagcaagcagcagatgagtattcaaagaaaattgatgagttgcaaaagcgtaagattgaatatgtaaacaagtagttggtgacaataatctcattaatagataagcgatgatatcatacaatgaggattgaattatttacttactattaaagatagaaatattcaaaatattaatgtttacagacaacaactaaaaataatttcaaatcaataaactcaccgcagcctagttaggcacacagcaaaa

SEQ ID NO: 25074 - protein, 118 aa, DROSOPHILA
MLTTMRGSAKKLPIWPLTHFRRFPTLIKSHASSEEKFEQKAEEVDGVSNMKLPYFISPRCVQNQDQLVDGQTKMFTYNYHPFSIYDLNEATLRAKQAADEYSKKIDELQKRKIEYVNK

SEQ ID NO: 25075 - DNA, 22334 bp, DROSOPHILA
gggcgtggcgagggagtttctgctctcagcagggggcgtgctgggtgcgcaggtagtatgtgtgtgtacgagtgcggctgcgagggtgtgtgtgtgtgtgtttgacaggtgagcaggttggcccgatagactggtttgtcgctgccaaaggcggccactaggtggcgccacaagtaccaactccaaggaggctttaagactccctagaaaggattttcaaattaaaggttccattagaaaatgatagcagacctgtcatatataccacgctatgttgtttgtgtgcgtagcgttttttccttacaagcaagcccaccgattgtaaaacgtaaacaaatcattaagttaattcgtctgttgtccgcaactgttgattacccgtggaaatgcgtgtgccacagtttcgattgatccgaaaataagacccgaaaggagcagcggctaaataagaagacaaattataggttcaacaatcaatttaataattgagacctttgcatttaatcaacattatttaaaacgtcaaaatatttgcactttccacgggcagttccccctggaatttgcatatacacgccgtaagttccccaaatccgtggggacgcggggcgacaggccacgcctcaatctcgatgcgggccctagacctagacaaagttgacgagttgagcggcacaaaaacggggtcccagagcccagccccacccccgtgcacccggaacggggaaatttatagtattggtgcggtttctgcaccaccatacagagacaccaccgagaaaaccggttgcaaaccacccgattggcgacgctcggcgagagtcactgccagcggcttgggcctcagcagccgtcccgctccgacgcacggcgatggatgacatctgcgccgctcgcacaccactgctacagagcggcaaagcggcacggccgcaaagcgacagcgcagcgagtcgaagtctcgcgcaaccgcgccgcgaaaacctcacctagtcgtatacgcactttgttcgtgtgcagtcgtcgccgctgttctcgccgttgaattgccgtcgtcgatccgtcgtagcgttttgcgccttgcgtttctgcgtcgagctaagtgatccgtcgcggactataaagtgatttgtagtgatctgatctgatctgatttgatatgaattgatttgattgattcgcaaaacggagttgaaaatcgtgaaaatctacaaagaatatgcacagccagaaatcgaagtgatacaagaaagcaatttcgagtgagttgagttgctaacaagttgagtgtcagtgctgagaaaagtgcctcctcgccatctgaaaggatttacgcgctcaacagttccgccaaatcaagtcgccgaactgaactgaagccaagacattgtgtcctacaaaaaccttagatacgcaagccacacactcctactgtgcaagtatagctgatcattgccatcggatctctgagaacttccttcccgcgcgcatccccctgaacagccgtcaaaattcttgataaagtggcctcaataggcgccaacacgctcaatttcacggacctagggagcccctacgaggggcctcccagcaccccccagtcgggcatggacgcccccgacgccccgcacacgcccaagtacatggacggcgggaacacggcggccagcgtcacgcccggcattaacatcccgggaaagtccgccttcgtggagctgcagcagcacgccgccgccgggtgagtgtccccaagatcagtggagtggagtcaccgggaggattgcagaaagtgtttcggcgaaaagactcgatcccctccagacttcagccctgccaaaaccaaacctatcggaactcaatctcaatctgtgcggagcagttgacacacccgagaaaaaaggagtttgtggccagggcgttcccaaaactcgaatatgaatctttttaatgaatctaaagagcgctatacgtaccataaaaccatttggtctttaaaatcatttcattcatttcaagggaaaaagttagttggcataggactacaagctgcataattgcataaatagataatatagtacattgacattacaataaacaaattcaatttttaataataaataacagttggtaaaagcaagcagttaaataaagtcaggttaactcaagagtatattgtctaagtagttcatataactttttagggtcttaattactgattacattacaatagccaatagtcttatttcgatcgatacataaattttactattaaaaaacttgtataattattagttgtcttaaaaaatgaaagcaaccaattgtagatttatgaattcgtcaatgtaatccaaagttaaaaattattttgacttccataaaaatgtacttctaaagtaacaaatgtagtataaattcgaaatcacaattttaaatttcaatttgccaattcgccatttagccttctctaggccctcagccaaatcgactaagactgaatcgatgaaagttgccgtcagctttccatctttatgatactattttcgggatcgatttcgcgttggggtctcgctatactattagttttgattaagaaaatcacttcagctgcactttccggcttacagttcatgctggtgcctggctggccggcagcggaagccaaaaataaattcaattaagtgtagtttactcccggtccgtgttctaaataagcgtctgatccggagggttctgttcctatccaacaacacgttcctcatggggtagcaataagtcgggctcggtggtctgtttactgttaccgctcactcggcgaactgtttgcagccgcaaattgttttcccaacgcacgattcgatttttcattatacatattttattgcattcttggttttgagccttgcggtttccactgctctgtcatttgtgcgtgttgggctcttgggctgggacgggacttggaatgcttggctgcgccgaccagccctcgggagttgttcctggccacgacttttctccgtccccggagtggctgccatgttgttcgctgttcgctgtccgctgtccgttgtccgttctccgttgtccgttggccgctgtccgttgcggtttctgctgctttcggcccgcttccgtttccgtgtttgaggggccaggagagcattgaatatttcatgcagttcgctcggaacataatgcatgggaacttgctcaactgtttcgcccgcaaagtgttaacaaaatatttaccgcgagcgagcgggactgcaaacggaactgcggaccaaaccgaaactaaaacacagcgactctgacactcgtattgatttttctttgatatattaagccgcatccagttcgggctttggataggttttggttttgtttttggtttcggttctggtttttgtaaatgaagtcatggcaaaaatttccttcctctccgccagcctaattttttgttgtgagagaaaaagttttggtttcgacgcttcttgcattaaacatgaaacattttgggcccacttttagatattttcccgaccgaacgctcgtcctatgctcggcgacgtttgaatttaatagtgaatagtgaaaagtgtagacaaaacacgcaagtaggaaaagttttgtccccggcacgattcattcacattcacagccggtgtacgccacttccattacttccactacttcttccacaactgccacagctatattacagccccgtattgattattttccgtgcatttgcggcattccaggtacggcggcatccggagcacctatcagcatttcggaccgcagggcggccaggattccggcttccccagtccgcgcagcgccctcggctacccgttcccgccaatgcaccagaactcctactccggctaccatctgggcagctacgccccgccctgcgccagtccaccgaaggatggtaagtactgctcctccttatccgatcagtctcaggcccaatcccagtcccaatcccatacctactctcccagagatccgggtcttttgttgagaaagagatcttgaaaagatctcgctcgttgcttccctgtctattttttggcgacacttcaactcgagagctcaacgccgtcgagagccattgtggtcgccttctgcgggctttgtttgctcgttcacttcaagttcgactcgtctcaattaggctgccttcactgtcctcttgctactgcgctgcttttcacttttatcaaatttcaatttcaatcggctatagatcgaagataaagatatcagacttcattgtgtttatacgcctcattataatacttcttttctcgtagatcttccactaagttgttctttaaaggtctttttatttcacactaataagttagaaggctatgtagattgaacgcttcattggaaacttgcttaatttataaagacatctaagttgacacaagctctttaatacgaataatttaatgtacacgtactaaaatcgaaaatgccaggttaagttttaggtaaaatataatgcacgcaagtctttttttttgacatttatgttacttttccttcccatgaaacgtattctattgaaattgtgggacctctggaagctctttgttgctcatccacgtacgtgcaattttcccattttatttatttttacatctctctactttttgtgtgttctttatgttttttggaacatttttcccagtctctggcataattgcgcgcttgactgtgacaactcgttgttgctgcgatgcggctgtctctcgtatttgttgaacaatttgttgctatttcgatgcgttttggttgagcagttttgcttttcggtgagtgaaaagcaattcatttttatccattgtcggggatgtgagcaccgtcaaaagcagtaaaaacagtggaaacattactaacgacaacgacagcgccaacgcttcagccagcctccatttgttgtctttgactttcgtcactcatacgcaacgtgggccaattaaccttggtgcacttgctcttgaaaccgctcacttgctcaccgtttggacctggctaagagatctgcaaaacagttgatcgttagaaggaatccccatgtgtttgtaatcataattgctgcaattaggctttcgttagccttaattaattactccattctgttatgggcgaatgtgtggcagtctccgagtgagttggcccaatggcggctgtccactcgcacatactaacgctctgtgaagactacgagtaatgggccctgggcggctgaggtggccgaggtgacagtgagtgccgccatctctgctgctccgccgcactgagtcttgccatttgccattaagagtgtgcagcacgtgcgcctgctcgggcgccaaaaatatacggccgacaccaacattcggatggcagacacagatatagatacggacagagatagagatatagataccgataccgatacagatacagatagtgtggccatatttggcacttaataatagttcgtttggtggctccgtgtgttgttttcgaacaattagcaacgtcaacagttgcagtcgtcgctcattgaacttgagtgtcgaccgatcatcatcatcatagttttatgagctgtgtggacaactccgtcgtggagtgctttgaactttcgcttaagcaattaacgctaattcgttgacatttacaagttacttaacgaatcgatattcgagtggagcgggcggggccggacgatttctaagcgatgcggctgcaattaatgcaggtccataaatgtaacagtttcatgcattccagctgccgcgggaattcgctcataaatatgcatttggtgcacgggcacaaaaagggccattctggccataattccatagcctgattataaattcatcattggccagttccagcctgccatttacagactttactcaactgctcctttcatcgtattgttttctctctcccctctccctccgcagacttctccatctccgataagtgcgaggactccggcctccgcgtcaacggcaagggcaagaagatgcgcaagccccgcaccatctacagctcgctgcaactgcagcagctcaaccgccgcttccagcgtacccaatacctggccctgccggagcgagcggagctggcggcgagtctgggcctcacgcaaacgcaggtgagttccatcgctgtggttgggaatctggcggtcagagaacggggttacttatcttagtattacatctcttttcggtctaactactaatgagtgtataaatattccagactattgaatatacgttttgcaatcacaaaagcgtaaatattatgctgatattataaataccgtttgtgctaagcactctactgccataactcaacattacaggtttggcaaaggccactccacattgaacaggggaagtttttccctccgaaccaccaacgctcttaagccctggcaaggatcctttgaccatttcattggctgcgcccgtggttagttgacgttttcccaattgaattgttgacatgtctctaatgctgactgacaaacgagctaagacaacgaacaagtaacaatggcaacctcctacgcctgtgaccctctcccttgacaacacgccactcgggcgtatgtgcaatattgtaatgttctttttgttgctcctccacgtgtgtcaatgtcaactttgtgaaaagtttttcagttgccgttcggttttgtttttgcacgcgctactgcccacggcagggaggttccccgggggcggaggcccggcattgtcacaggcaacacccacccaagtcaagtactcatagtcgtactcgatgcccagttcgtctagttgccactgctccatttaatggctttccagatgagccgcaaccagcagcgtttgcaaaacggtgccgtgaatgagtctcgtgttttgagaaatttattgatagtgggcgtgggcttcctaattgaattagtgtgccacgaaagttcatgtgctcaagacggaggggcagaagccgaaactgcggggcgagagccgcaataatgttgtaagaaaaaacttgtaaaacaagttgaagaccctctgtatttgtgtgactggcattgtattggtggcgtgggtgttgctccgccgcaagttgtttatcaagatacatatttgaatatgtactgcacaccggtgctcggagagcgggtatcggggatcgggtctagaacgggcgtgccacacggcggctgtgcaataaattctcctgggccagggcctgggcctgcgactgggttttggtttgggtatggagcccaacaaaagccagacccattgttagtcaccccgcagaatcgggagagaccctgatttcccaaagtcgcgactgtggcagctgtcaatcgaggcagctaagcaaatagccacgcccctgcgcccccagcgacacaatcaactcgatctatctcagtgctccgtggccgcgggccttgaaggggttaaacgctaaacagttggccaaaagcctgaatttatgactgcattttggggtgcaagtcttggccgctttcgctttccgcgcggacggcgaaactctggccgcgtgttaattaaaaccgccctcgtcgtttgagcaacggaagttttttattgatttggccaggttcaggagctgctcctcctggtcatgatggtctgggatggtcagaggctagtcgccagtacacgccaatgtttgggccgtgcaaacaaaccgttgtgttggccctaagatttatgcgttgcacaaacaccaggccagcttaatggccttcagccttctggggcggtggggtggctttctactattgagtttttgttttttggggcgtgttatacaattcggttgttgtgccttacagtccgagctctcagctgacagcaacttgtccgttctaacacctgccggccagcagcagccactctccctgtgcaaaaagtcgagaacattagcgcaaaaaaaaaaatgtggcatactacttgctgttttatggcctttttttaattatggtaattttattatgattttttagctgctgctgcttcggcagcaaaaactcgtttgccagttgcatctttcacttggccacttgctgttcgcttgatttgaaagtgcatccggtgactgttaatgagctcagagcacagaaacacttggatggagtgtgtacaaacattcggagaataattaagtttcaattagagcaaaatcccggctactgtttctccctatctggctcgtttttgcaccccgactaattgaataattacatagaacgctcaagtggactgccaaatgttctcggtgcccgaaaagcagagtccagctgacagcgccagacaaaagtgtatgtacagtccgtgcgagcccctttcaacaggcttcgcggctccgatcttcgttcccgaaaaacggagacgagcagaaacaaaagccccgccaagcaaaatgaaataaaataataaaaaatacttttaaactgcgtgtttatgagctcatatcggcacattttgatctggttcctccgccgaggctctaaggcgcaacaaaaacaactgaatcagccacaacaacttcaacctcaacgagacggccacaaaagccacgaaattttgtaggaggccacgctggctgaaaacaaaggatttggcagacgaactgccaaaacggcgcttgtgggagcaagagacccaggaaagaggggtataagtcgtggaaaaaatattggtggtgctgcaagttgcataactaaactacatatatatgcatcttggggtatgcaagctaagcacttgatattatattagctagtattttcacttaaacatacaaagcatggacgacagattgaagtagatttatcacagtatatcacagtattttgaattatagttccgtcacattataaactaccattatcgacaaattgaaatgaaataagaaaagttgtacactttgccgcatgtttgagtttcttactggtttgcactaacatttcgccgtgggtctatggttctgcccgggcctgtcttcaaaaatcaacaacgcccgcttatgagtgtgtgtggtgtgtgttgtagctcagcaaatcttcgctgcacgcagatcagacttggtctgatgacgacgcagacgcagacgcatcgcccacggtgcacaccttcgccggctggggcttctcggcaagctgggggctccaagccgcgataagtctgctgctccacccctaatgtgagacgtggccaatgctctggtatggcgcaaaggtcatggactccgcggagaaacccaaaatgatacttcgctggaatttcaggccaaacaaaatacttgtaacgaaattaaattaatttccacatcaaataatacacacagcagacggcagcggcaaaaaatgcgcgcgtttttattgtattaggaaaaaaactagcacaacttgatttaaataatacaagtgtctagttagtatcaacggctaagcgagaaaaaaatgaaaaactggctgaccgcatttaaatgctcagctcacgttcgtttatgctgcggacagagccgcagcagcagcaacagcggcagcagcagcagcagcggcaacacatcgtatatcagatcagtgattgcctgatttacgcgggcaatgtcaattaaattatggcacataatacgctgtaactaagcagccgcacttgcgtcttaatcgcacgcatattgctgcaacatcggcgacggacccagcagcaacaccagcgactcttcgctcgcctgcctccctgtgtcgtaatttgcaccgctgctcgcgcaacaggaactttgaattaagtttgatcaatgctgatgctggtgctggtgctactacagcacaacaacactagtggcagcagcaacagcagcagccgcatcagcagcagcgacattcgacaacaaacaagttgccattaacaatgatgcatagtgagcggccaagcgagcgtttctcaatttctccccagcggttctccagcagatttccccctccgcgaagcccctttcttcatcttcctccgccgaccgcatttgcattttgaagagagctcaatctaacgccagtcaagagccaagcggacacatgtgaatacccggactcgtggatgtatcgcagatggctccgatgagtggctacgtgctgcttgtgcaatctcgattgcagctgacataattcgcgttggcaggtagcgatccgaaacacaaattaacccacaaagcgtgccaaaaagatgctccagctgaaagaccagtgtcaaagatacaagtactaaagatctgaaagctttgaaaatttcttgacttgggttggcttgagtgacctatggatgagaacccaaagtggaccagtttcaaaagagacaactttctgaatgtaacacaattttatataagtagctgatcgtccaatcccttgctaacatatattgcatcctcgtgccgcagatgagaaaatgaaagccagaagcctgggggatggggtaacctctaatggttccccagccaacatttactgcttcctctcgccatcagaatgagttcatcaacaacaactacactcgcctttccacccagcttgaggtccctgtgctgaaagcaagtttcgcgtttcattcacaatattggcagctttcaaaatgctcaaactggctctagctccggctccatttgcagccccatccgtcagcgtttcgatcaaaatcgtacgcaacgctcaggaaattacaaaatgctccaacgagcgtccaatggaggtgggcaggggaaggcagttatgggcctgctcaagtgagagtattcaaataaataaatttttacgactatcgcgcatagctggagtgcctggcatagatacccatgtcgtgggtatcttggccatcggtctattggccaacaaaacgagcgaggcaggcagggttaattacggcttcatttgctgacacacggcagaaaggtaaacaggccctggccagatgcggagccaaggatgcccctggttggcagatttctccgatgcgataataataataattattattttattgccgagactcggaggctgcggcacaactggtttggaaggaagtgatgggcccgagcctgccgagatagcccgctccagtgggtggctcttctgcagacaggctggtttcatattttaattggttctcaaatttgcagatatcgaaccggcgaacccgcaacccttctgcacttgtttggccttgtaaacgcgatgccaattagccgcactcgaatatcctgactatcgcatcccccagcagccttgttctctgacaccaattaaagcgggactctccggcatgcactgatagaggcggactcgtgggtgtgtgggggaaggggggatgtggatggcgggagatcggaaatcaactggcttaaattttccttggaggtttttccccaacgacaacaatggcgagacaacaaacttttaacgcttggttaactcgcgggtcttttttcgactcttttgttgctggcagcactatcatgatcgggctgtgaaaatgcatagggaaactgtgtgtaagcgacaaataatagtcagttgaccatgatttcattttccgactccgaactcaaaaaacagagggacacaccgaagagcaatatttaaattaccagccccgagcgaacaaaaagcagcccagtgaaagaatgcgcttatataaattgcacaattagccgccacacttttttgttagcgtttttcccccagttttgtttgtcattatctggccgatggatctgaccacaaaatgatttctgcccgccgaggggtcacccgccatcccgtctccccatttaatttcactccggaatctggttagccgtgcggaaaatgccttccttcgagtgcactttgatggggcggccatggctgcttggacactgcttataattgggccatctaattgagcttgatggccgggcagatgaagtgcaccccgcccaccgaggagttttctttcccatgatcgagcgggacttccccacttttagttattctacagttgggtctattgttaggtcccagttcgaagtgtagctttattgagagtgttttttgattcgacattcagaagaatcgcattaatattaaacaagtttcggggtttcccccacatgcagctgtacggaaatctactagacttggccaacaagctagtcagcccccgtactccatgccatctccaagaattaatgactttactaagcattgtgccaaattatctgcactgacacttgctacacgtaaaaagccgaaaactaatttagacatgactaacattttgcagtgactgtagaagtgactgcgacttgcagaaagtcgactgactaagtgagtccgttcaaaacaaatctatactgtatacaaactatgtgaacacgcccctctttccgccccttgggcaaccacttctacttgaaactgcacttgttgttgttgctccatccgtcgccgtcgtcatgatcgcagttattgtttttgtatctgcttaaaatctcaccttgacaattgctgatcaaatgctgccgccgatttattgttgaacaatttgtgtacgtcagctgctgccgccgctgctgctactgctgatttttttcatcataatttcgcgctgctgccgcgctgatggattacaaaagctgaactgagtcagtgtttcagcggcgaattagaattacaaaatttcaaggctttgcaggtgaatcaaaaaagcaaagttctcagtcgcattgcatgccagtcagtcagaacagctttgaacgttgctttggggcgtttttcagtgctcagtgctcagtgttcagttttcagtttttttgcgatcagcagttgctgttttttgctttcaatggctcgcactcgcaacgaacatgggaacagtttccggatttgacaacagcactttgttgcacaatgcgaggcgatcgcgtcaagaagtctgaatccacaaccgattgacaatcgctttgggccggatgagcgtcatcagccacagagtgcatagtacaatccgttcggctgatgccctgattggtccctgctcgttaatcgattctccgaactgaagtggtctcgaaatggcaacccaggcatttctctgcggccagctaagcactaattgagttagtaaaatgctcgatttgtccttggccgcggctaatttggcggttggcatgcggctgcacttgtcgctcgactaagccagaatcccagctccgttaccaaagaggctctgctccagactcggtcggcctaacaacataattaatatgaatttgagcgagttcgggtcgaaagctggtgaaatgctgcgaccggcgattgagcaatcatggctatatagaaattagatcaatatcttcatttctacacagcgagtctataaaaattgttccactcgtcactgccgcatttctcattagcagcagccgccacgatcgcatcgccgatggcttcgattcagtccactccaagtatccaagtcgtcaagtatccgagtatccaagcgtccaagtatccaagtatccgagttgccaagagttaattgctattagagtggctatagaacggagggaacatcttatataaacagctctctcgtctggccttgcttaattgcatatttattgtttattaagcaggggcttgccaccgctggcgcagctcataactgaccaggagctcagtgcctcgtccgcgtcttgtgccttctggtttcgctcatctcattcactttttacgcaccgcactgcctatatatgcataaattaatgaatctagccgggattgccgagagcttcattcatggcactggcgactctatcggcgtgcaactccttctccggctccattgataaagatcaatggcatagctgggacaacatacgcggcccccgagggaaaagcgcactagcaccagcactggcggtgacccaaaaatggtcaatcgaccgcatactttgcatcccaatgtccactgggctccactggggctcagtgaactttgaaatgccggtggagcagcaccagtagctccgatgagcatggaattaatagcaaattaattgtccgcaatgcggtgggttgcggtagccgccccacgtgcgtgccaccaacaagctgccacaagttcacaagttgccacggggtcagagttgcgttgctgccctgctgcactgcggccacgtgtttcaactttgaacgggcatcgatttgctttcaatttgtatgggcctggactggaccggatcggccggtgttaacttgcgttcatttgctggcagcgatcttgctccatggagccgggtccgaactgcgtccagagctggagcaggggagcggattcaaggcgttgttgcgttgttggccttgaagcctgggagcgctttttgttgaaactctgttgctgccgctttcctttctactgtttttggatttcgttttttcgggaaggcgttgcccaaaacagcccgcaacggttttatttggaaatcactttggttgcacgtcttcgcaacggcgaagatttctgtttgctctgccccatccatccattgcaagcgctattgccgtccctttccgcggctcgctctccttgctaacaagaacgaaagacttaggcagcgaacttgaactgactttagcatgcggtgttggctttaatgagctgaaagttgaggctggggatggagcatggagcatgagcacagagcacggagtgtgcgtgacacttgactctagggcaggcccgccacacgggaaacacaaaaaccttttcaaaagaaaactttttgtagcgtttttttccccatattttgccacgacatggcattgttgtatatgtttcgaagtcattgcctgcctagcggcgattgctgttgttgccgctgccgctcgctgcattcaaaattataaacaaattttttgttgagctgttggtgctgttgttgtttttgctgttgctgctgcggagcgtataacaacaaacaatcgcatgcaatgttcaaattttccaagcacaatgaaaaacgccaccgacaatgcggagagtttataataacaataataaaatgaaaatgctacggccggcaagttgcgtaatccgtcaaccatggcagtcaaaagagcatgcctcggggcgggggacgcggggcttgggccttcttggcggcagaagttgaggaagaaatatgctgatgtttctgtggccgccagtgggatggggcagtatcttctgctgctcgcgagggtgggcccagctccaactggctgcgttcagcacacgcaacagttgctgttgtcgctgtggcagcaacaatcactgcaatcgcttaaatcgcgcatttgcaatcgcttcggccagtgagaaatatattaaatgcgttttgttggcttttactttttggttttaactgtcccgagataaaaatcaggcccgaacatgcgcttaccaaaataaagacacagctacagcaacagcacagcaacggcaacaaaatcaaaagtgctacgcggccactgcttttatgaatgactgactgaccgaccgtcagcgagtgagttatactggccgaaagcacttgttgcgccaacaaacttgtacagcagcttcggccaacaacaacaaccaaaggaaacacgctacttgccgtcgccggctgttgacgaacaacttcagcgacaagatcataaatcaaaattttatttcgcgcagctcagatttttacctgtccctgtctctgtcccgctcccgctcccgcgtcctcatcctctctctctctctcttactctatcgcctatttaaatttttatagtttctgtgctttttttttacgattttccccttgtgcataaattaaaaatttatgcaagcgggttgcacgcgttttgctggcgattgcagcgcgattaaaaccgtttggtcagctggcgcgtgctgcgcgactcaaaggaaagttgttgctcataaaagtggatagccaggcaggttgtagccgaaaataaaacgaaagtgatccggctgatcttgagctgcgactgcgacccacagggcgtatgcgcgatgccccgtttggccatttggttatcaatttgcgagcaaatcgcaagtttagacacctttggatttggcgcctgcgaatgccgatcggaaatcgataatcccaaataagcgggtaatcgtatgcggctattaatcaacggctaagacaatgcctccggtcctggccgtaactcaaagccaccgctgaaagaagccgccaaaaagtgtttttcatgttaaccgctttggccagcaaattgaaatttctcgcaccaaaaatgtgctgcaaaaatgctaaaatcttgttgcacggaatttatgaatgaaaaccaaagcggcagcaacatcagcgaacataacaagcaacaagctgagaacaatgaggggaaaactcggtttggtagccataaatttgtggcaacaaaactgagaccatttcatgcctcgccatttgttgttgctgccgctgttgctgcagatcgttgttgttgcagcagttgcccctggtggcggggaaaagccataaacattttagttgctttttagacagacatcgtttgcgggtcgaggaggaaatatatttgcaacagccagctgtcaaaggaagaagctgagataccctatcaaatcggaggtggatataattaaatatgggctaactaaatactaaggatcgagtaatgtaacgtatttgtataatttcacaacagtctgtaaagattacacaatgggactggaaagagatctcctcaaattgaaaatttaaaaacggttggggttagaggacacaggtcccagggtgctaagctccataaccgtctcgcagtgcccacctgccactggagagcatcggactctattccatggaacgtttttggggcggtgtcggtgtcattaagccaaggcctctgtgtccgagccgtctctctatttacttagcacatctcccagccagctttgctaataaagccgtaagtttttgggtgtgtgctcgagggaagggcggcttctccggtttatgacttggcaaggggcggtcggctcgttgcgtcgtgatttatcagggaaaatacgtacgaaaaatggcgatgacgtgaagtgtttccgcggaaagcggaaaatcgtacagccagggatcccacacaaatcaatcgacggatcggttagcgttaccacggattggcttatcttttcccacgttttaaatgctcaactgtcaaatgaattagagcctggctggggcctgggacacatttggcaatgccccacgaaaccagttactacttgccgtggcacacaggtgtctccgtctccgtctctgtatttgtgactggcttttgtcgctcgaacggcaagtgctcgcaattagaaagcccgctccaagtggcgtttactccgcgctcctccctggtggctgcagatcactttagagctccatctccatctggagccccgtcatcgccagccacttggctgcgaagatctagcagcggctgcaggagaagcgcgttaccgtcgtcataaaacccatctgtaatctgcccctgcctccaacttggaaccccgggtcccagatcgcctgccatcccagaccaaggcgcagactcagactcttggctagccatcaattctgcgtttgactgcatgaattatatgccaagtgacatattgcggaagtgatcaagcaagtgttgctgccgcatgctggccatctgactacccgactatctgaatcgaagtgggttaaaaggataatgccgggcaggcagcttcgatccgttgtggttgctgtggagttgacacagtgacatgctaatttcttgccgtttttgccatatttgtccatgcgaaagtggtacaaattcggggagggaggcaagagagaacgcgaacggcataaggctgattgacatttgacagtctgtccgtccgatggattcgaaagacacttttactctcatgcaaactttttgtcctcgtcttcgcaaaggggaacttgttgacttgatatttcgcttatcttgtttgagcatttattttgttttttatataaatatacacactcgttggatcgtggctctaaagctgctgaccattagttttgacacctgctcagctctgtgaatgccaagtgacatagaaaagtgtttgattaaatgtttcaaaaagtgactacttttaaagagacctcgacagttttttcttgccgcagatttttcgcttggcctgccttgcgtaacatctaaacaaatgtgtgtatgctcgaaaaataatgttgtttcctagagcagttccttcctttgcttggcacaacccagatatgcaaagatgaattttcagtagccgaaagtttctccaactgaggtgatctgtgcggcctgacataacgattcgcgcttgattgaacactaaaatgaaatggaaatccaatcgtggatttcggctaccgcagttcggggctaccaatgtcaatgatccgacaatggatcgaatagcccaggccgaacggacagtcaattctggtagctatcggctaattgaaatcgatgggtggaatgcacataaaagccgagtctcctccgactgttttatgagcaaaaacgactaaccgaaagcccaaagtcagtgaaattcgccaaacacaaaaagcgagctccagcggcgctacaaaaattcagccaaccgcgaagaacgaccttgagcaagtctggccgggcaagtttatatagctagtgctggtacagtatctataatgcctagtacatgtacatgtgcataatgttagctcaacgtggacgccatggcagaatcaatgtacaagatttcaggcgcagatattaatactagcagatactcgcactcataagcagcattagatacgtgatattactgcttgtatctatatttaaaaggggcctgagtcaaactcagattcgtactcggactcggctggggattcagcgaagcttcagctgcggggctttcaaaagtgaagtgctccgccagctaacaactcacagctcagcgcacaattagttctaccagcagctggagctccagctccaaatgaaaaccgaaagtatccgcgagataattttcggctgccgtcgcctcaagtgctccaaagatacgggtttcgcaactgatgaaacacatctcgagctgcagcgcgattaagacgcgaatatgtgtcgcacgctgccaaaatccatagtttatagagccattttcctgccagccgcttttcacaagcgttcactcttaatttcaactgaaaagttgtttgaaaagctgccaacgctacacagtatatgtatctctagatgtaaatggatctgttagcggggttctgccccgattaaggatgccgtcgggtcgcattagccgataatcaattgcttttgtggccgattcccacgctaatcgagatcaatgtttgcttgcaggtgaaaatctggttccagaaccgacgctccaagtacaaaaagatgatgaaggcggcccagggcccgggcaccaacagcggcatgcctctgggcgggggaggacccaatcccggccagcatagccccaatcaaatgcacagtggtgagttagcgaacggaagattcctctgggcggccttagaaactaatggaactctcgctcttgtccattccacaggcggtaataacggcggtggctcgaacagcggctcaccctcacattatctacctcccggacacagtccaacgccatcgagtacacccgtgtccgagctttcacctggtgagtttgcatgcgcggaggcccagcgtcaagaaaccacttcatcagctgcctttgtgcccacagaattcccaccaacgggcctcagtccgccgacgcaagcgccgtgggaccagaaaccgcactggatcgaccacaagccgccgccccaaatgacgccacaaccacctcatccagcggcaacgctacatccgcagacgcaccaccacaacccgccgccccagatgggtggctatgtgccccagtactggtaccagcccgagacgaatccatcactagtgacgtgagtttcgagcccgatataccgtacccagttggctgtaaacgatgaatcagcccgtttaccaccagctccagccctcatccccctttcgaagtctcctaaccccgctatggggttcccttgatccgtttaacacacagtgtttggccggcggtctaacagcatccgaaccagctgccctcggctgcctggacgcagcaccagctgagcctggagcagcagcaccaacactcctgccaggagctggggcaccaactgcagctggagcagctcgagcagcagcaccaggcccaggcggaggcccagcacctcctccagcggcaggacctcgctggcaggaccttcgggggcggggcagtgcagcacacgatatcttagccaataaacaataaacaaccatgatagcaacctgtaaaatatctatgaaatgtcgagaaagaagcgagcgagagcactggcaagttaggcgtcaagttttgtacatttgaaacgtaatataaatatgtttaccaacgtaaataaagtcgttctaaaatgtagtctagctaagaagaaatcgaaaacacacacacacacacacaaacaacacaaaaagaaaacaaaaaaaaatacttaaagcagagaacattcctcaatcacagaagcaaggagagagtatgaaacgtgtcctttaattttgtttaatttagcaaattaactatgtataaacctatctatatgaacgtaactatatgtagtgagcaacaacaaagtataaatcgtaaaaagtacatcgtaaataaatgaaatcaaacaaatgaaaatcagctgttgatcttagagtttctttcgagtgatttgttcttaagtagaagagtcgaaaaaaggcaaaagaacgagcaacagaaatcagtaaaatcagatctcaaatgcaaaaggaaaagtcctcctaattcataaatgccctttaatttttttgtattttattttacctgcacccaaaagaggagaccggtttcgttctttattgtgcaatataatcttatttaccaacctgttgggcgttaactaattgcttgaagtgtacattttgtatagaccgcatgcagaatcaaatgtgtgcatcaaatgtcaagggatcccattttaacaatcgaatcaaggcgaattcagattcagactcgaaattcgactcgctgctgagcttgctgtagctgtaattatggattaacataatctagtttaagtggtaattagtgcgtgtgtttcaccctagtttaatttaaccacagcaagagctaaaggaaataattgatagtttaccaactaaagtgcgagtgagtgcgtggttgaatttatgaatcgataaatattcgagtggatgagtgagtgtatgtgtgcgcgattgcaatgtaaacaaaacaataaagtaaaacaaacacatggcaaattcgaacgaaatcaaattaatgagaaatgcataaacaaaccttatgtgctagcatttaattaattagttgtaatctagaaaatggcaacacaaatcactgaagagcctagcgactcccctccccatttaaattttagcaactaatgtaatttttaaatcaaatcaaacaacagaaaaaagcgcgaagcctcaataaaaataaagaaaatttaaatataaaacaaccgcactttgttcgagttgatggccacttccagggacattggctgtcctttcaggatacgaaagggggtgagggtgatgttgcggctgcaggatgcgggacaggacgacggcagcacattaatgcattacacttgaaaaagttaagtggcaactgtgtctctgtgtgcgccggtgagtgtatctgtgtatctgcgtggagggcggaaggaagctggaaaatctgttccattaatcatgaaagagcgcaacaggatatgcttgaaacgggcgggcttttacgggctggatgaatggttccattatgtcctcgaagcgacatcgtttcgagggatgcagatccgttcgctatatgcctccgaagtgaggaaaacaaggatttacacgcctccttttcaactgtccaagtgtttcatttgctgccaattaattagccgacgaaacgagactcctgccgaacataagaactgtcagcgcggtttccagagttccagcattt

SEQ ID NO: 25076 - DNA, 2582 bp, DROSOPHILA
cgcactttgttcgtgtgcagtcgtcgccgctgttctcgccgttgaattgccgtcgtcgatccgtcgtagcgttttgcgccttgcgtttctgcgtcgagctaagtgatccgtcgcggactataaagtgatttgtagtgatctgatctgatctgatttgatatgaattgatttgattgattcgcaaaacggagttgaaaatcgtgaaaatctacaaagaatatgcacagccagaaatcgaagtgatacaagaaagcaatttcgagtgagttgagttgctaacaagttgagtgtcagtgctgagaaaagtgcctcctcgccatctgaaaggatttacgcgctcaacagttccgccaaatcaagtcgccgaactgaactgaagccaagacattgtgtcctacaaaaaccttagatacgcaagccacacactcctactgtgcaagtatagctgatcattgccatcggatctctgagaacttccttcccgcgcgcatccccctgaacagccgtcaaaattcttgataaagtggcctcaataggcgccaacacgctcaatttcacggacctagggagcccctacgaggggcctcccagcaccccccagtcgggcatggacgcccccgacgccccgcacacgcccaagtacatggacggcgggaacacggcggccagcgtcacgcccggcattaacatcccgggaaagtccgccttcgtggagctgcagcagcacgccgccgccgggtacggcggcatccggagcacctatcagcatttcggaccgcagggcggccaggattccggcttccccagtccgcgcagcgccctcggctacccgttcccgccaatgcaccagaactcctactccggctaccatctgggcagctacgccccgccctgcgccagtccaccgaaggatgacttctccatctccgataagtgcgaggactccggcctccgcgtcaacggcaagggcaagaagatgcgcaagccccgcaccatctacagctcgctgcaactgcagcagctcaaccgccgcttccagcgtacccaatacctggccctgccggagcgagcggagctggcggcgagtctgggcctcacgcaaacgcaggtgaaaatctggttccagaaccgacgctccaagtacaaaaagatgatgaaggcggcccagggcccgggcaccaacagcggcatgcctctgggcgggggaggacccaatcccggccagcatagccccaatcaaatgcacagtggcggtaataacggcggtggctcgaacagcggctcaccctcacattatctacctcccggacacagtccaacgccatcgagtacacccgtgtccgagctttcacctgaattcccaccaacgggcctcagtccgccgacgcaagcgccgtgggaccagaaaccgcactggatcgaccacaagccgccgccccaaatgacgccacaaccacctcatccagcggcaacgctacatccgcagacgcaccaccacaacccgccgccccagatgggtggctatgtgccccagtactggtaccagcccgagacgaatccatcactagtgactgtttggccggcggtctaacagcatccgaaccagctgccctcggctgcctggacgcagcaccagctgagcctggagcagcagcaccaacactcctgccaggagctggggcaccaactgcagctggagcagctcgagcagcagcaccaggcccaggcggaggcccagcacctcctccagcggcaggacctcgctggcaggaccttcgggggcggggcagtgcagcacacgatatcttagccaataaacaataaacaaccatgatagcaacctgtaaaatatctatgaaatgtcgagaaagaagcgagcgagagcactggcaagttaggcgtcaagttttgtacatttgaaacgtaatataaatatgtttaccaacgtaaataaagtcgttctaaaatgtagtctagctaagaagaaatcgaaaacacacacacacacacacaaacaacacaaaaagaaaacaaaaaaaaatacttaaagcagagaacattcctcaatcacagaagcaaggagagagtatgaaacgtgtcctttaattttgtttaatttagcaaattaactatgtataaacctatctatatgaacgtaactatatgtagtgagcaacaacaaagtataaatcgtaaaaagtacatcgtaaataaatgaaatcaaacaaatgaaaatcagctgttgatcttagagtttctttcgagtgatttgttcttaagtagaagagtcgaaaaaaggcaaaagaacgagcaacagaaatcagtaaaatcagatctcaaatgcaaaaggaaaagtcctcctaattcataaatgccctttaatttttttgtattttattttacctgcacccaaaagaggagaccggtttcgttctttattgtgcaatataatcttatttaccaacctgttgggcgttaactaattgcttgaagtgtacattttgtatagaccgcatgcagaatcaaatgtgtgcatcaaatgtcaagggatcccattttaacaatcgaatcaaggcgaattc

SEQ ID NO: 25077 - protein, 327 aa, DROSOPHILA
MDAPDAPHTPKYMDGGNTAASVTPGINIPGKSAFVELQQHAAAGYGGIRSTYQHFGPQGGQDSGFPSPRSALGYPFPPMHQNSYSGYHLGSYAPPCASPPKDDFSISDKCEDSGLRVNGKGKKMRKPRTIYSSLQLQQLNRRFQRTQYLALPERAELAASLGLTQTQVKIWFQNRRSKYKKMMKAAQGPGTNSGMPLGGGGPNPGQHSPNQMHSGGNNGGGSNSGSPSHYLPPGHSPTPSSTPVSELSPEFPPTGLSPPTQAPWDQKPHWIDHKPPPQMTPQPPHPAATLHPQTHHHNPPPQMGGYVPQYWYQPETNPSLVTVWPAV

SEQ ID NO: 25078 - DNA, 8090 bp, DROSOPHILA
atcggcttgtcgaattgctctgttcctacattttttgtagttttttcctgccagtattggacgatctccacgcccataaaaggcaaaaaagaacacagtttaaaaaaggatatagacattttcgtatagtttctttcaatatgcaaaacgattgtacaactacaataaatgtaaccgctcccatgttgcgcttagcgttctggatggttttttaaagccctaagaagggtttttctttgctttattatacgcattaagaacatatttgattttaagatacatgatgaatgaacaaaccatccggcagctttaagcaggattagatgaaccggtgtttggcttatcgaagcgttatatatatacatttgtagctgcacgcacgacgttttcccgcctatcggcgcgcttatcactggagaacgtcgtgctcagcgccgcttaccggctggtcactgagggcgggctgttgtcttgggccaggcaaacggcccgctgaccttgaatactttatgggaggaattgctgataggatgaagaataaatagttgaatacaatactttattttggttgttcatgccgtgctttaaatacaaattaaatggggattatcgattagatttgaattttcgttaggcacgcttcttgcacatactataaagggaacagattaccttgcgaatatgcatttaagttatgatcatttcattgagacctgtacaccatggatgctgccactcacttttgatactttgcttataggttgtaatctaaagtttataaataaattaaatctaaatagatttatgtacattctttgttttttgtataacgagtaagaatacaacaaataaaatcattattttctatatacttacgtgggatcaattaaactagaccttttttgtgtctttccaaaaatagaaagcgcgagccacgcgatagatgacgatacgctggcaaaacacacgcgctagtcccaaaatagccgaataatcaaatatggtgaatacgattattaatttagacttccatttcagctatccgttaatcaacataccgttgcccgggacaatacccaccaagatcgttgtaccctacgaaactggatccggatcgctgtcatggcactctcttaatacatcctcgactacaccgcaggaaccgcacccttccggcgaaccctggccccccgaaccacaggtactcaatagcagtaccacggaccgcagcccgcctccccttctgccctgggcgcagagcagccccgcctttttctacgtccagcagattactctgcgaaccagtgttctcccgtggacggagggaatgcagcttatggatgcgtttcgtgcgccgctacacgaagtttttaaattgcttgaaattgtgcgcaatcaccagagcagcgaaaagtgagtacatccaaggggtcttccagtctctcaacaacactgatttacttaatactctgcgacagcaaacgtaccctggagcacaactgcctacatgtagacaacgtaaagcgcggaacacacgggcagctggaccagatctttccggagtatggctgcctgctgctctcgcccgccaacctgtggacgcagaactctcagaactttactcgggacacaaacatcctgaacacgatatttcagtaccatgtaggtataggccaatacatatgtacatgtaacaatgatcagaccttatcaccagatttaatggtagatctagaacaggcggagtcaacctatgtccatgtctgtaaactttagtcattatacgtcatatactttacacaactcaagcagcttgtaaatatttatgagagtttagtagatttaagtttagaagagagttttagtctagactccacattatccggacctaatgtaatgaattctagtctacaccgatgggctttgagcttttgaaagccacacaaacctcgtaataaccctcgatcccaagtactggcagagggcatttacattccaaatccgcagatgtactcaaaaaaataaggtctattacgaatatagtttaaaacagtcgagttccctcgctatcatatacccgctacgcagctagtggaagtgcgaacatgaaaattcataatttttctgtcatatcggtagatattggagaataaattgagaacaaattaaaaattcattcaagtttttccaaagtgtcggtggtgttgggaggttttttgagtgagcgcggcaatgcttggaaacaaacttgctaaatcaaaactctctagtttttatagtttctggccagaccgactcggctattgattatgattaaacatgtttatactttatgttgtcgaaatcgctttcttctacctcttacatacgtttcaacgaatctagtatacccctgtagtctatgagtagcggatataacaattttaaatgtctcctcttactgaatgatatatacactaaaaattgttattaaaagtctgcgagataagcacggcatgggattcattttaatcttaatgatttttacggaaagcttttttttcgatttcagctggtaaattgatttaaaaagtatgatattaaagttcaaggaaattgctctttgttgaatcggggaaatacttaaagtaaagataacacaactatcagacaaaagctcgagctataatcatttgtatatcagggtgagaagtattgatatattgaaagcgcaacaaatcactttattggtagcacatactcgtatttagatttctgttaatagatacatttataagagactcagtaatctgcataggtatcaacccatgcggagggtatattgatttcagtaagacgagacattcgcgacatttaaagtaaatatgtattgttgatcagtatcatcagaggtgtcgctatagctatatactagattcgcttaaaaagtatttaagaaggaagcatttccgaccatataaagtatatatatgatcaggatcaagagcccagtcgagatctcaagacctagaaaaaaatctagaatgttgagattaaacatacagattctagagacataggcgcagcacaagtttgctgacgaccactctaacatcctaaaaccgacaaaaactgccacgaccacacttttgaaaatcgatatgccaaaaacctttttgccacgcccataaaccgcccagaactgccacgcccacacttttgaaaatgttttgatattttttcttttattagccttttacatttctatcgattggccaaaaaactatttgccacgcccactcaaacgccacaaatgaccacatatttgaaaaagattttaatttttcttagttttattgtttgttttacccatttctacaagcatacaaaaatactttatttagatttgttctcattttattccctaatatctatcgatatcccaaaatgatataatttcgagttcgcattttcaccagctgggtaacgggtatctgacagtcagggaacacgactatatcattctcgcttgttttatttattgtatttaccgtagatagatatgcatataccatttcttcagaagttatgggcgtacagtattcctatttataggtgatttcctgctattttttgtgggtgttgttaccccatacaagccccatcagtagcaacttttaacatttatactttcaccactttttttttctaatcaccgttttttttgtattcgcaatcccttttacgaaatatgtatcagattttcatttcttcgtagatattctcgtatagtaaaagtcatcgcacaatctcctgctgcgctgtgataccacatacactatagtaaaaaagataatttctcagaaatacgatataaattttctacctaatcctaaatttttaatgtttgtccattttcagaacctacagaaatcaaaagtttccgcggcggaaatgctgtttggattacccatgcaggacactggattcaagcgctatccattgcgcgctcggtcgcgtattatacagtatgccttgacgttattcctcaagcacaacgatatggagtatctggacactctaaaggaaaagctgctgcgacactatcccccactcccgttggctagtgcgtcggctgaagagccgacgaccataacttacatcttttatccaggagagtacaggatgtgggagctggtgccttacacagtggcctttatgttggtgtttgcttatgtgtacttctctgttcgaaaaatcgatgtatttcgttcccgctttttgctggccttatgtagcgtaatcaccacagccgggagcttggccatgtcccttggcttgtgtttcttctttggcctgacaatttcgctgcagtcaaaggacattttcccctaccttgtaatccttgtgggattggaaaatagcttggtgatcacaaagagcgtagtctcaatggacgagacattcgacgtgaagatccgcgtggcgcaggctcttagcaaggagggttggcatatatccaagactcttttgacggagataacaattttgacaattggtcttgctactttcgtgcccgtcatccaggagttttgtatctttgccatagtcggcttgctttccgattttatgctacagatgctgctcttctcaacaatactggccatgaacattaagcggaccgagtatacggcggaggccaagcaccttcctaagatgttgctgagctgcacccaaggggctggtcgacaggatttccgatttttcggggccgccccagcactgccaccgtttgtccctggcacatttcagcgttctcagtcgcatccaaaactgtgttttgctgatcccgcatctgttagcgatcgtacaagcttggttaatggacactcgtcgccggagcaacgaatacccaaacgcataaagattgtaaatttctgggcgcggactcgcttttttcagcgtgccttcatgatctggatgattgtgtggatatgctctatagtttataattcgggatatctggagcagttgtttagcatgcagagcaacggcacaatgacggcaacccttgaacttcaacggcgactacaggcgggtcggggagcagtcagcagttttttcgagggatggcaagcggacgggcagcgtgccacgagtgcgccaagcggaagcggcttttctacgccaataaaagctcctctagcgatcgatataaacgaaacggccgaggaaatgatgagacttcgatatcccagcttcgacctaaactatttcctttcaaacttccactggtccacgattatgaaacagtacaacatctcactaagtgggcactacgttaccctgctaccgaccattcgccttagtcatgccatcgctccggagctagccactctgttgcggaatccgcaggagcagctgcaacaaaattttcaatggaaggccctagccgctgcactcgatccgctggactttaacgatgacgacgtgcgccgtgagtctccgatggtaatggcagaggggttgcctctggttcccaagagccccatggaaatatttttcgccatcctcttgtgctgcatcagcatcttcgtgctttgctacacgatggtggttttctaccgctgcatatgtaccaggaactatgccgagtggcgctccagttggcacgaatctgaggcaccgtacaagcagactgagcaaatcctggagggagttccaacgcaaatcgccggacacaaacatcgcattgaatgcctggtgtctgacggcgcctacataatcagctgctgccttaaaggccaaatccgagtgtgggatgcacgcagtggcgagcagctaaccagcatctcccgatccgatattcagatctctcagcagcggacggatgggcagacgctggtacgaaagctggccgtgtcaccggtctggtgccttgactacttcgataatctaatcgcagtaggctgcgccaacggccgcgtagaattgtgggaatcccctgcgggattgcttaagtgtgcataccaggaagacgcgaagagaaaccagggtataacccacatccacctgaacggcgatcgagtgattgtggcgcgtcttaatggccgactagatttttaccgcttagagacgtactacaaggggaagcaaatcgactggggttttacctcggcttacaggagaagtatgtctttcgcttaaatacccttttaaaaaactcctaaaagaaaagactatttccttcagctcatgttcgaactggatccactggaagcctgggattaatgttgcagcagcagcgctgtcagcaagaagcatcccagaagaccaccaaggaggaaatgaaaatcacattggagggtgtaagactagcccatcagcagccaatcacatgcatgcaggtcgttaacgacatggttttcactggcagccaggatcacaccctcaaggtaggcatgaaacattttattaaatcaactttccttactctaactggtctccataggtgtattgcctcaataagtcggatgttgagtatacgctccacggtcactgtgggcctgtaacctgtctctttgtggatcgctggcaacctggcacaggggggtctgggtcccaggacggcctgctctgcgtatgggatctgttcacgggagcctgcatgtataatatacaagctcacgacggagccgtcagctgcctggcctgtgcgcccagttacgtaatctcgctaggcacggacgagaggatttgcgtatgggaacgatttcagggaaacctgttgactaccatcaacatctcaaacgcatactcgagcctactgatgctaacaccgtcactattggttacgagcaaaatgggtaaggcctcattcttgattgccaatataagagggacagtaaataataaatttaattccaacacaggatctcttattgtgtgggatgtgcgcactgggcagccggctcgcgaggtcaaactggactttgcaaacctgcagctctgtcccaaaataatgatgcttgcctgcgattcggtagtttgcgactacggaaatgagatccgcgtcgtccgctttcctatcgtggcagacaagtgccattaaagcgcaaaattttaatttagcgtggttcgctagcacctaggaataagttgacttaaggctttaaaacgcctggaagtcattgacgcattcactattttatataaatatatacactattagggtccgcagcaacttacggttttaacacaagctgtacgtatctcatctctagaattttgtgttagtttgtggacactaagtgtaacagctacgctccggtaggttaaggaactaaactaaatgaatcagatatatacacatatattttcgcgtaattatataaactacatagtgtcttaaagcgcctcagcctaatataaaatgactaaatgttaaaataaatacattatttattagaatcacctacgcttaatattcagaaagaataaaaaattttaaaaaaaatgtttgattttaaatttatttctatccatgtcctttataccgaactttccacgctgctcagtagataaggtagtggatatttaataaatacaccactctaaaaatttcaacaagcttttaaggtaatttgatcccgtatcaggtaaaatgttgtcttagtgacgtgtatactaatcaaattttggaaaggtgttggagcttgcatgcgttattaagcaaatggaggttattgtaaagggtattaaggttggccaagaaatcagtctggaaacgccttttaaattcgacccctttcggtcagacaacgtagtgtaacagaccttgttggtatcaaaaactgcaaatcagctgaaaggattgtttttattggttatataatatctactatcttcttcttctttcatttaaaatgttccgttcaacataatgcgagaactttgcgatgattatttctatttttggtaatacgaaatagtgcggatacatatgtatgaacactcaagtgttcctacttactcacacaattaaatggcataccagttttgtttaaaagattgaaacaggtcaaaatagaaatataattcattacaaaata

SEQ ID NO: 25079 - DNA, 3669 bp, DROSOPHILA
atggtgaatacgattattaatttagacttccatttcagctatccgttaatcaacataccgttgcccgggacaatacccaccaagatcgttgtaccctacgaaactggatccggatcgctgtcatggcactctcttaatacatcctcgactacaccgcaggaaccgcacccttccggcgaaccctggccccccgaaccacaggtactcaatagcagtaccacggaccgcagcccgcctccccttctgccctgggcgcagagcagccccgcctttttctacgtccagcagattactctgcgaaccagtgttctcccgtggacggagggaatgcagcttatggatgcgtttcgtgcgccgctacacgaagtttttaaattgcttgaaattgtgcgcaatcaccagagcagcgaaaacaaacgtaccctggagcacaactgcctacatgtagacaacgtaaagcgcggaacacacgggcagctggaccagatctttccggagtatggctgcctgctgctctcgcccgccaacctgtggacgcagaactctcagaactttactcgggacacaaacatcctgaacacgatatttcagtaccataacctacagaaatcaaaagtttccgcggcggaaatgctgtttggattacccatgcaggacactggattcaagcgctatccattgcgcgctcggtcgcgtattatacagtatgccttgacgttattcctcaagcacaacgatatggagtatctggacactctaaaggaaaagctgctgcgacactatcccccactcccgttggctagtgcgtcggctgaagagccgacgaccataacttacatcttttatccaggagagtacaggatgtgggagctggtgccttacacagtggcctttatgttggtgtttgcttatgtgtacttctctgttcgaaaaatcgatgtatttcgttcccgctttttgctggccttatgtagcgtaatcaccacagccgggagcttggccatgtcccttggcttgtgtttcttctttggcctgacaatttcgctgcagtcaaaggacattttcccctaccttgtaatccttgtgggattggaaaatagcttggtgatcacaaagagcgtagtctcaatggacgagacattcgacgtgaagatccgcgtggcgcaggctcttagcaaggagggttggcatatatccaagactcttttgacggagataacaattttgacaattggtcttgctactttcgtgcccgtcatccaggagttttgtatctttgccatagtcggcttgctttccgattttatgctacagatgctgctcttctcaacaatactggccatgaacattaagcggaccgagtatacggcggaggccaagcaccttcctaagatgttgctgagctgcacccaaggggctggtcgacaggatttccgatttttcggggccgccccagcactgccaccgtttgtccctggcacatttcagcgttctcagtcgcatccaaaactgtgttttgctgatcccgcatctgttagcgatcgtacaagcttggttaatggacactcgtcgccggagcaacgaatacccaaacgcataaagattgtaaatttctgggcgcggactcgcttttttcagcgtgccttcatgatctggatgattgtgtggatatgctctatagtttataattcgggatatctggagcagttgtttagcatgcagagcaacggcacaatgacggcaacccttgaacttcaacggcgactacaggcgggtcggggagcagtcagcagttttttcgagggatggcaagcggacgggcagcgtgccacgagtgcgccaagcggaagcggcttttctacgccaataaaagctcctctagcgatcgatataaacgaaacggccgaggaaatgatgagacttcgatatcccagcttcgacctaaactatttcctttcaaacttccactggtccacgattatgaaacagtacaacatctcactaagtgggcactacgttaccctgctaccgaccattcgccttagtcatgccatcgctccggagctagccactctgttgcggaatccgcaggagcagctgcaacaaaattttcaatggaaggccctagccgctgcactcgatccgctggactttaacgatgacgacgtgcgccgtgagtctccgatggtaatggcagaggggttgcctctggttcccaagagccccatggaaatatttttcgccatcctcttgtgctgcatcagcatcttcgtgctttgctacacgatggtggttttctaccgctgcatatgtaccaggaactatgccgagtggcgctccagttggcacgaatctgaggcaccgtacaagcagactgagcaaatcctggagggagttccaacgcaaatcgccggacacaaacatcgcattgaatgcctggtgtctgacggcgcctacataatcagctgctgccttaaaggccaaatccgagtgtgggatgcacgcagtggcgagcagctaaccagcatctcccgatccgatattcagatctctcagcagcggacggatgggcagacgctggtacgaaagctggccgtgtcaccggtctggtgccttgactacttcgataatctaatcgcagtaggctgcgccaacggccgcgtagaattgtgggaatcccctgcgggattgcttaagtgtgcataccaggaagacgcgaagagaaaccagggtataacccacatccacctgaacggcgatcgagtgattgtggcgcgtcttaatggccgactagatttttaccgcttagagacgtactacaaggggaagcaaatcgactggggttttacctcggcttacaggagaactcatgttcgaactggatccactggaagcctgggattaatgttgcagcagcagcgctgtcagcaagaagcatcccagaagaccaccaaggaggaaatgaaaatcacattggagggtgtaagactagcccatcagcagccaatcacatgcatgcaggtcgttaacgacatggttttcactggcagccaggatcacaccctcaaggtgtattgcctcaataagtcggatgttgagtatacgctccacggtcactgtgggcctgtaacctgtctctttgtggatcgctggcaacctggcacaggggggtctgggtcccaggacggcctgctctgcgtatgggatctgttcacgggagcctgcatgtataatatacaagctcacgacggagccgtcagctgcctggcctgtgcgcccagttacgtaatctcgctaggcacggacgagaggatttgcgtatgggaacgatttcagggaaacctgttgactaccatcaacatctcaaacgcatactcgagcctactgatgctaacaccgtcactattggttacgagcaaaatgggtaaggcctcattcttgattgccaatataagagggacagtaaataataaatttaattccaacacaggatctcttattgtgtgggatgtgcgcactgggcagccggctcgcgaggtcaaactggactttgcaaacctgcagctctgtcccaaaataatgatgcttgcctgcgattcggtagtttgcgactacggaaatgagatccgcgtcgtccgctttcctatcgtggcagacaagtgccattaa

SEQ ID NO: 25080 - protein, 1222 aa, DROSOPHILA
MVNTIINLDFHFSYPLINIPLPGTIPTKIVVPYETGSGSLSWHSLNTSSTTPQEPHPSGEPWPPEPQVLNSSTTDRSPPPLLPWAQSSPAFFYVQQITLRTSVLPWTEGMQLMDAFRAPLHEVFKLLEIVRNHQSSENKRTLEHNCLHVDNVKRGTHGQLDQIFPEYGCLLLSPANLWTQNSQNFTRDTNILNTIFQYHNLQKSKVSAAEMLFGLPMQDTGFKRYPLRARSRIIQYALTLFLKHNDMEYLDTLKEKLLRHYPPLPLASASAEEPTTITYIFYPGEYRMWELVPYTVAFMLVFAYVYFSVRKIDVFRSRFLLALCSVITTAGSLAMSLGLCFFFGLTISLQSKDIFPYLVILVGLENSLVITKSVVSMDETFDVKIRVAQALSKEGWHISKTLLTEITILTIGLATFVPVIQEFCIFAIVGLLSDFMLQMLLFSTILAMNIKRTEYTAEAKHLPKMLLSCTQGAGRQDFRFFGAAPALPPFVPGTFQRSQSHPKLCFADPASVSDRTSLVNGHSSPEQRIPKRIKIVNFWARTRFFQRAFMIWMIVWICSIVYNSGYLEQLFSMQSNGTMTATLELQRRLQAGRGAVSSFFEGWQADGQRATSAPSGSGFSTPIKAPLAIDINETAEEMMRLRYPSFDLNYFLSNFHWSTIMKQYNISLSGHYVTLLPTIRLSHAIAPELATLLRNPQEQLQQNFQWKALAAALDPLDFNDDDVRRESPMVMAEGLPLVPKSPMEIFFAILLCCISIFVLCYTMVVFYRCICTRNYAEWRSSWHESEAPYKQTEQILEGVPTQIAGHKHRIECLVSDGAYIISCCLKGQIRVWDARSGEQLTSISRSDIQISQQRTDGQTLVRKLAVSPVWCLDYFDNLIAVGCANGRVELWESPAGLLKCAYQEDAKRNQGITHIHLNGDRVIVARLNGRLDFYRLETYYKGKQIDWGFTSAYRRTHVRTGSTGSLGLMLQQQRCQQEASQKTTKEEMKITLEGVRLAHQQPITCMQVVNDMVFTGSQDHTLKVYCLNKSDVEYTLHGHCGPVTCLFVDRWQPGTGGSGSQDGLLCVWDLFTGACMYNIQAHDGAVSCLACAPSYVISLGTDERICVWERFQGNLLTTINISNAYSSLLMLTPSLLVTSKMGKASFLIANIRGTVNNKFNSNTGSLIVWDVRTGQPAREVKLDFANLQLCPKIMMLACDSVVCDYGNEIRVVRFPIVADKCH

SEQ ID NO: 25081 - DNA, 6846 bp, DROSOPHILA
tggtactatactatacatacacatgcacgtgtgctccctacacgttcaagcattgactttgttgaaggctctgcattaagttgcgttattatcaaaataaaaactatagcgttgcacatgatcggaggcgttaacttcgcaatcggctaaattaaaaacattcgttttgtgtcgtcagtacccatacatatatctctctatttatatatataaatatatatacatatttattttgtatataccttgtggtttgcggttaaagtcgcctagtttgtgaccaaattcatcataatttgcaattcatttcattagagtttagactttaaatcactacgattttcaaagtaaagcttggtattcagtttatttggattttcctcttcctaattgttgtaactaaacggctttggggtgaactaaattagtaatgcgattcgatattcgggatacagtattgtgctgtgctgaatttacgcgatttcattcaaagatatcggattacacttacttggttttttttttgttattatttggcagttattttgttgttgttgcaaaacattattagctctagcagtgatgtaatcccaacccaaagagaaccaacagtcgcaaaagcattgcaaacggaaacagaagccagaagctggaaaagcgggcaagcacacgggccaatcgaatcgaatatatgtgactacgttacttaggcaataataaattaattacgaaatataattgggctgaggtggtttgtggtgtgacaaggtgcgttgtggaaactaaggtaaaacgaagatctaaccatcaaaacaataacattatctcggcctgatctgcgatatatatgcacctaatagaatagactcggaaactaaagccaaactagttacagcatttgtttacagttacaaaatccttaactccttaacactgcttatacgtatctatagccaccagctgggttcaagttgtgtggataggacgccggcaatggagcgcactacagctgcgccagcgagtcggagcgaatgagcggcgccagtgagctgggcgccttgtgacccggctcaatctcgtactgtacgtctagcgaggcacctgcgaaagatcggaatggaaagtcagcacagtgtttttcacatcactgggaattttattcatgactaggttgcaattggcgcatcttgctccgggacaatgggtgggaagatggttagatggcttggcgaacttatcaacaatggcgtctgtggacccttacgtttcttttccaatgtggaggtctgcccctccggaatgaacgcggacactattatggcacagaagacgcacaaggcaccaaacacgaagggcggacctggcacatgctgtgagatcttctccacgttcgtcgccctgctgccgctgctcttcgcatgcgagtcgtggtcgtcgttcagatcgacgttaaacaggtagaagacgacgccgaagaccgcaggacccaggccattgcacagacccctcatgcccgtgatcatgccctgaacagcgcctgaaattgtgacatttgattcagctaagatctttcgaatggagcagttcaagcccttttacttaccctgactctcgggagccgcataaagggatacaaaagcactgatggcgggatacgtgatggagcccagggcagccacaacgccagccgaccacatcatcctgaataaagaagcgggatttaatttagatgatatgcctctaagatatttgagatatttattactcaccacttttgactgccaaagccgtaccacagcagctgcacgatttccagggctaggcccattataatcgtgcgcttggctccaaacactctgcgaaagaagcatgtaattagccaccgaaaaaatcatgctgaagaaatttaaactcactgcatgaaggagccgagtgtgacttgcaccgtgatgctgaggatgcctactatggctataaagaccgagacctccacatagttaaagcccatcttcagtttcagatagacaaacatgcaggaatactcccctgcctcgggcagataggataacagcacggtgaggcacagcatcagcacggtcttatcggtgcccactttgcgcagggcctaaaaagagcacagtgtcataaaactagtttgagagaattcagaggttaaagcttcagcttaccagaaatggatccgcctgctcccagctgataggcgcaccccaggaggctggccgcatcttctctgatagactctccggcacggccaccagtatgaagaatacatcgagcagcgcaatggccgtggagagggccacgaccagcgtgtctccgtacatctccatcagggcattgcccagagccggcgagatgaccagactggcggcaaatgtggccgaggccaggccataggcctttgatcgctcctccggcgtggtgacgtccgccacgtaggcaaacaccaccgagaaggtgactgcgaaggcgccgcttattgagatcatggcaaagaaccaccacgtattgatggacatcagcggtatgggcaggcaggtgaagaatactgtgactaataggaaaaactttcggccccagatgtccgaaagggcgccgatcagaggcgccgacaggaacgacaggatccccttgatgcccatgaccaggccgttcattaggaatgtgtgatccgggaacgtctggttgagagtctgtgcgaaaaagaggaaagagttaaaatctgatacgtatataaaacatatatagttatatagttagctcaccgatattatgggcatcgtcagcaggccccaggcgaagaactctagaaatatcacaaccagcgcatgatgaacactcggctccccgattccggaactctgtgaaattagaaattagaaagctcattagtaataatttagatatctatcggctaattaaagtgacgcgcccgctgccaattggcataatagcaggatgcactggcggacgcacccatgcgagtgcgtcatcgttttgaacccaaccagttgataaggcgacgacaatgccgcgttaaccctttgagtccccggccaattgctggccgcctttatttgtaaacatttgagtcccgcgtcagctaaaaacaaattgtactaaatgcgaaactgtttgagctcgttaactgcaccaatgtcacccgagtccggctggccatggattcggaatgccggcaactgatttgttttgtcgcgcttcaataaatggaaaacgaaacccaaatgatttcggttaatatttaaactagtcaagaagctttcattatgatcagaaaagatcgaataaggaagaatatattgtaattaaatataatagctactcgggttaaaggtgactcttaataagtccctattgaattattaattactagcgctaattaactggaaacttgtattgttgtattgaagagaatgacatctaatgaggctcagtatttactgaattcaattaactagaaaactaagttaataaccggagcaatccgattgtttcttaatttttagtttcgttaatatcccacttattttaacgtagaaatattgacatgatttatctactttggagcttttaaataaataacaaataacaaatagttttttctttaacaatattctccatcaaaacaataattttccatgttccaattaaatgtggacaaggtcttgagataagcgttatctgttagataaattaaacgtttatcgagtttatcttacatatggtacatcttatctggctattgtgaaagaaacccaattacacagaagttatttgagtctgagtaattatgtaaagccctttaaaaaattagattattcataataataaaccttaagtgaacttgtagctacattacctataacaagtaacatcagtgaatggaattgtatatcagtaaatgggttaacttaactgaaaagtgtgtgttttttatgaaataccttgcagcagcagatgttgcacacaacgcgaatccactcgaagaagcggttacgctttggtcgctccggagtcgcctccgagttgccgccctgcgatctcatcgagatgtaggaggcggccgagtgggtgcgcctgtgggcggctcctccgctaccgccgcacactcggcccgatcccgacgacgcggtgatcgccgtctccgcgaatgccgcgctgggatgtgctgctgcagctgcataccgcgaagtctgcggggatgtggaagttgaggaggaggaggacgaagatgagggcgggctctgccgcagatcgcacccacttaccgtgggcacatcgtccgcatcgggctgctgactgcagctggagctggagctgctgtccgcctgctctgcctgcttgtccttcagcggagagtgacgcttgaccagctgattgccccgaccgccaaaggcgggtggtgagagcggcagggagctgatcgtctccacatcggccacgtccgccgttgtcggcgtggagctgctgctacgcgtgctcagactgtccgtctgttcacccgactcctgccgctctcgatcggcatccccatcccgatctgtatctccgtgcgccgatggttctcccttgattgccaccggtgaattgacctgttccgcctcggaatcctccagctcgaagctgctctccaacgtgtcgctctgccgctggccatagctccgcccgctgcgcatggtatcgtgatccgttttagctgcgtgtctccctcttggtttctagtgcttctgtgggttcgcttatcacactaatttccattgccacgggtccacgaacatgtgcgatgtgcggtgagtggtgatgatgatttcggctgtgattttggggatacgatccgttccactgctctgcactccaccactccgtttatctcctcgtttctgcggcgatcgaagcgatgttctatcttatcatttgtttggcttaaacacgctgtttccgctggcaacgtttcactttgaggcacttctctagctgcaattaaagttggccaaccgaatggctcttactcatttgaattcatgcgaaacgcgcgatttgctttcagctgttccctaggaatattaagttggcaaaacaacacactaaaaacatcgccgtactgaacactcttgtttgtttgttgtttaatgaaaaaccgtttaaaagttgtatgcaactactagagtaaattaataactcgaaaaatatgtgtgatttatatttggaaaatgattttaatccttaaaggcgccgcaaagtatgctgctttttgtcggaatctaaatgtgttatccacacttacttggcccagaaaaagataaagatcgcgctaaaagccacttaatgtcagtgctttgtggcgattttaacaccctggtgtaaatcgcagtcgcaagcttggataggctcgaaagtagatcgatcaacattagggaaatgagcaaacgaagcaatttaaatcgaggcacatcaaagtgaaatgaatggaaaatcaagtcggcgctgcctggcagttcacagcaattttccggtcatgtcagatgggtcgaattatttctgggaattgtccggtccgcagaacgtggaataaacaatcacatacccgccgacttttggatgcctggactcacgtcagatcacagcgattcacaccacgcgcgcgaatatcgatctctgaaatttcaattaaatcgactaacgaaaaaaagtcacctagaattttgacaaacatgtgaatcaaaaacatctccaactgtgacgctgtcgatatcgagattgttccccccctcaaaaaaccagcgacgtctgctgcgtttcgatgtgcgcgactcactaaattggatcgcttgggcactcggttctccagcccaccgattcgccagttctccggtcttccagtgagcggaagctcggcagagcaacagagaatcccagagagaaacacatgtccacctgctgtgaagcttatttacaaaagagtcacaagcagaggcacacgatagagaaaagatacttgaacttgaagtatcgaatgaaagatatccattgcaatttgaatacatttttcgttttaaatacaagtccgaaatataaatatatataatatatataaaatatatttgcattatatgtttgcatttgggttgtttaaatgttaattataaacgagagtatgatcaaatcaaaacattagttccaagcacacgtactttacagccattgtgacttacaaagtttcaaattctattaaattaacaattctattatcccaaatggcaaaaatacccctcacaagcacaataaaatgcccaaaagcaattgtcgcacatatcacatagatgaacttgacaacgatgatgaaagtttcgcgttaaaagcaaatgagcagtgctccccagtacaatggaaatgtttttgctatccgaccacatggattttattgttatcaagcactctggaattatgctggctacttgtgttggctcaataaagtctcaggatgacggagccgaaaagatccgatgaggttgatttcgggggattctatgctataaaacatgtaaacatacataaactacagtgcgtgatattgaaaggcaaattatttcaataataaataaataaacatattacatatatttacaatgaataataatacaatgaaataataatacaatgaataaagttgtttttgcctagttatctataaatatggtacgccaaaatatgtaaaattctcataagaacgaaatggataagttcgcgaacttgacgcgcataaatctcagccgcgtgcgtggaattagctagatgaaacccatttaa

SEQ ID NO: 25082 - DNA, 2564 bp, DROSOPHILA
cgcacatcgaaacgcagcagacgtcgctggttttttgagggggggaacaatctcgatatcgacagcgtcacagttggagatgtttttgattcacatgtttgtcaaaattctaggtgactttttttcgttagtcgatttaattgaaatttcagagatcgatattcgcgcgcgtggtgtgaatcgctgtgatctgacgtgagtccaggcatccaaaagtcggcggctagagaagtgcctcaaagtgaaacgttgccagcggaaacagcgtgtttaagccaaacaaatgataagatagaacatcgcttcgatcgccgcagaaacgaggagataaacggagtggtggagtgcagagcagtggaacggatcgtatccccaaaatcacagccgaaatcatcatcaccactcaccgcacatcgcacatgttcgtggacccgtggcaatggaaattagtgtgataagcgaacccacagaagcactagaaaccaagagggagacacgcagctaaaacggatcacgataccatgcgcagcgggcggagctatggccagcggcagagcgacacgttggagagcagcttcgagctggaggattccgaggcggaacaggtcaattcaccggtggcaatcaagggagaaccatcggcgcacggagatacagatcgggatggggatgccgatcgagagcggcaggagtcgggtgaacagacggacagtctgagcacgcgtagcagcagctccacgccgacaacggcggacgtggccgatgtggagacgatcagctccctgccgctctcaccacccgcctttggcggtcggggcaatcagctggtcaagcgtcactctccgctgaaggacaagcaggcagagcaggcggacagcagctccagctccagctgcagtcagcagcccgatgcggacgatgtgcccacgacttcgcggtatgcagctgcagcagcacatcccagcgcggcattcgcggagacggcgatcaccgcgtcgtcgggatcgggccgagtgtgcggcggtagcggaggagccgcccacaggcgcacccactcggccgcctcctacatctcgatgagatcgcagggcggcaactcggaggcgactccggagcgaccaaagcgtaaccgcttcttcgagtggattcgcgttgtgtgcaacatctgctgctgcaagagttccggaatcggggagccgagtgttcatcatgcgctggttgtgatatttctagagttcttcgcctggggcctgctgacgatgcccataatatcgactctcaaccagacgttcccggatcacacattcctaatgaacggcctggtcatgggcatcaaggggatcctgtcgttcctgtcggcgcctctgatcggcgccctttcggacatctggggccgaaagtttttcctattagtcacagtattcttcacctgcctgcccataccgctgatgtccatcaatacgtggtggttctttgccatgatctcaataagcggcgccttcgcagtcaccttctcggtggtgtttgcctacgtggcggacgtcaccacgccggaggagcgatcaaaggcctatggcctggcctcggccacatttgccgccagtctggtcatctcgccggctctgggcaatgccctgatggagatgtacggagacacgctggtcgtggccctctccacggccattgcgctgctcgatgtattcttcatactggtggccgtgccggagagtctatcagagaagatgcggccagcctcctggggtgcgcctatcagctgggagcaggcggatccatttctggccctgcgcaaagtgggcaccgataagaccgtgctgatgctgtgcctcaccgtgctgttatcctatctgcccgaggcaggggagtattcctgcatgtttgtctatctgaaactgaagatgggctttaactatgtggaggtctcggtctttatagccatagtaggcatcctcagcatcacggtgcaagtcacactcggctccttcatgcaagtgtttggagccaagcgcacgattataatgggcctagccctggaaatcgtgcagctgctgtggtacggctttggcagtcaaaagtggatgatgtggtcggctggcgttgtggctgccctgggctccatcacgtatcccgccatcagtgcttttgtatccctttatgcggctcccgagagtcagggcgctgttcagggcatgatcacgggcatgaggggtctgtgcaatggcctgggtcctgcggtcttcggcgtcgtcttctacctgtttaacgtcgatctgaacgacgaccacgactcgcatgcgaagagcagcggcagcagggcgacgaacgtggagaagatctcacagcatgtgccaggtccgcccttcgtgtttggtgccttgtgcgtcttctgtgccataatagtgtccgcgttcattccggaggggcagacctccacattggaaaagaaacgtgcctcgctagacgtacagtacgagattgagccgggtcacaaggcgcccagctcactggcgccgctcattcgctccgactcgctggcgcagctgtag

SEQ ID NO: 25083 - protein, 680 aa, DROSOPHILA; identical to SEQ ID NO: 24189

SEQ ID NO: 25084 - DNA, 2753 bp, DROSOPHILA
aggaactgtttggtagtcatacattaaatcaattgatttctacttgagctggatttggctcccctcggtcttcgcaaaagcccgccacattcgttggaattccgcctgaaacgtggctgtgagtttgtcgtcagctgtgataatgcagttctcccaattgcctcccagtccaagagccgtccagtttacggagccgctgatcacgatgctatagcacggacgcataaacttgagcttcctcagcagacgaatctcctcgacgcgctcgaagccgtcgattatgcagaatttgttgtgcatcaagttcgtggtaatggggacgcgaactggaactcccaattgtgccagcatactgatctgagaacctttggagtagaccatctccccgtcgctgatgatccggataatcacgccgcgctgcagggcccgctttattgaatccgccaaaaaaagcgaggtgaaggtgtatatggccaggtcaatggagtatacagcccgatcgatctgctctacgatcttggccacattccgcagcgaacaatgcgtgttgcagcagggcgacacttgtggtttctgggatcccatgctgctgttgcgcatatgcaccgccgcacagatctcgcccagttcattgaagatgatcacttcgtgcacgcggcttgccttctctcgcttgctgcgcgagcactgcaccagcttccaaatcacctctgaggccaggacagtgctgacggcaatgcttattgtggacacaatgggatagtctcgaatttgtttcataattatttgggtaatcaacatttttgaatttagctcgtttctctagcgcgctttaaataataatcttggggtgaccattataaaatataagtaaaatatattatcgttagtagctaccggtcacactgttgctcagtagcgttgccgtatcgcagccatgcgcttgcccattcgaatcaaacaatcaatttcgggtcaatttaagcattttaccacctaaatggatgatccatccgccacgctcttgcccgaacactcggaagatttgcggctggctcgcgatgcggagctgaagaaggtgctcaagctgaagctagtgctggacgagctaagacgcctggatgtgggcccaaatccgagtgatgaaatcaaaagagccctcaaattggtttccattggaagttatgcgcgactcggcgagatggagggagctggtcaggagcaggtgcttggtaggcgcgttacaagtttattccaaaagcagtgaataaccattggaaatctaacaggtctaccgagcggcagcagttttccgcccttgaattacacggatcgcaagacggtgcgtaccaaattgtccgctcaattacgcacaactctgcaacccattgccgaattgtgcgacaggatacgcgaggagttcccggacgcctttggccaggaggcggacttaagctgcgaccaaaaggagattctgcgcctggaggaggagcatcgcagcggtctggagaaattggttgcgcttctcactcgtaagtgcacgcttctcaaggagaccgccgaattgaaattggggccgcagttggcaaacgaactaaaattgcaacaggcgcaggcgcaacttgttcaaacaaaagcagaactactgcgcggatttttcgtccacgaggccgcctctcgcaccgaacatagcgtcaaggcacataaggaggtggaggcgcacctggacgagctgctcgccgccaagaagtagatttaagcaaactagtattatgtaaattagatttttaaatacattataattgtgatttaaacagggttgttcgtttaggtcttttcgctctagaatggcaacactgttttgcactgcagtatttgcagacggtcactctagggataaacaatttgtaaacaaaagaagcttttaagtttgccggaataaaacagatatgaccgaaacgaatcccagtgaaatatctcctccgagcgaagagccaccggcagaggacgaatccactgaccactctccagcggaggcagtgctgagcaataattcctcgagtgtctgcaatgttgtggagccggatgatgagcacgaagttaattccgtggatcgggaggacaccgccagtttgttcagcactactacgaccaccaccagaagcaaatcgccaaatacacgaaaattgaaccgcctgtgtcggcggatcaaggcacccaaaatggttcagcccttgtacaaatataggtgtgatttttccaggcagaacataagtcataatgtttatatcccggatgcattgcagctcccatgtccgcgaggaccacaaccatcagatcttcggagtgcagttcaatccgttcctggacagaggccagccgcaggtgttcgccaccgttggcaaggatcgggtttccatttatgagtgcgagaggagcaccggacaggagtcctgcgaaggcattcgactgctgcaagtctacgcagacccagatgtaagtactcatcatatgctattacttacatacatcatcgttacgccctcgttagaccgatgaaagtttctacacatgcgcttggtcctacgactctgtgaccggcgatcctgtgcttgccgcggctggttaccgcggcgtcattcgcatattcaatccggttaagcaccagtgcagcaaaaactacattggtcacgggcacgccattaacgagctgaagtttcatccgactagaccgcagttacttctgtccggca

SEQ ID NO: 25085 - DNA, 696 bp, DROSOPHILA
atggatgatccatccgccacgctcttgcccgaacactcggaagatttgcggctggctcgcgatgcggagctgaagaaggtgctcaagctgaagctagtgctggacgagctaagacgcctggatgtgggcccaaatccgagtgatgaaatcaaaagagccctcaaattggtttccattggaagttatgcgcgactcggcgagatggagggagctggtcaggagcaggtgcttggtctaccgagcggcagcagttttccgcccttgaattacacggatcgcaagacggtgcgtaccaaattgtccgctcaattacgcacaactctgcaacccattgccgaattgtgcgacaggatacgcgaggagttcccggacgcctttggccaggaggcggacttaagctgcgaccaaaaggagattctgcgcctggaggaggagcatcgcagcggtctggagaaattggttgcgcttctcactcgtaagtgcacgcttctcaaggagaccgccgaattgaaattggggccgcagttggcaaacgaactaaaattgcaacaggcgcaggcgcaacttgttcaaacaaaagcagaactactgcgcggatttttcgtccacgaggccgcctctcgcaccgaacatagcgtcaaggcacataaggaggtggaggcgcacctggacgagctgctcgccgccaagaagtag

SEQ ID NO: 25086 - protein, 231 aa, DROSOPHILA
MDDPSATLLPEHSEDLRLARDAELKKVLKLKLVLDELRRLDVGPNPSDEIKRALKLVSIGSYARLGEMEGAGQEQVLGLPSGSSFPPLNYTDRKTVRTKLSAQLRTTLQPIAELCDRIREEFPDAFGQEADLSCDQKEILRLEEEHRSGLEKLVALLTRKCTLLKETAELKLGPQLANELKLQQAQAQLVQTKAELLRGFFVHEAASRTEHSVKAHKEVEAHLDELLAAKK

SEQ ID NO: 25087 - DNA, 4031 bp, DROSOPHILA
tgcctccaacacttcgcacttgttcatcgtaggtctacttgcggtacggacgagtgagcggctagcaaggtgcgtaggaatataaaacatactgttaaatagcccgccaaccaatctctagacgccagccctggcattttgccatattcaactcgaaatacactacatgtaagttaggggtagtattttgttgaggatgtcccatacttcgacatatatcgctgccttttcataattatagggattttttgcagtgtactaggtccgttgaaaagtacctacaaggtatacagtttatattaggcagcagatgtggcaacgcccattctaaaaatctatgaagccggccaaaactgcaacacctccacttatgaaaagtgttttggttttattcttctcattattttatttttattttattagtctatttccaatttctaccggtataccatctaatgcacagcaactctccaaaatgttttatatattttttttcctgggtaacgggtatatcatagtcgagaaactggaccttatcgttctcttctgctcttatatgcaaaacagatcaacagatcaatgtagagcgcagattatagttacaatttcatagaagacatcaatcacccctcgttagactgtcccaaccaatatactgagtcagtatacttttgcggtattttttaggattttttgtacatacaaaatggacgactcattaaaattaagttaaaaaccactactttgaattgaagttttttgccatgcccatgaagaccactaaaatatgacgtcggacatcgattttcaagaaacgagaccgtgttcttgtgtggttatcacgatccgtagggccagcattcgagcagaaatcgtccccaaaaaacagtttccctgctggctgagacaagaaaaacgcgtagatttgcgagcagagctataaaagggcgcgcagacaacgcgctctacccagttaaaaagagtgcgttgtgtagaacagtcataagcagtccgctaagagattagtagcaactacgaagtgaaggtgtgtgtataccaaattctcaattttctcttcgagtcgtcgcaaacaaaaaccctgtgagatcatcgaaatggtggcgtactacgacgagtgcgacgcagccgagaaccccaagaccctaaccgactgggtccgtaacttccgcgttaagcgccagaaaatgcgtcgcaagctaagaggcgctggcagcgacctacgcgtgaacgccattttgtcgacggccctgctccacgcagagcacgagctgcgtagaaagcagcaggagcgcttcagtcgctggctggacattcaaacacggtttgtgccccacggcagaacgcactgcgccagtgacgcgtactctgcagtggcgacctcgaccaccaaggctgccgcagaagcagaggcggaaagcaatttatggagcagcgagcttagtagcctcgacagttttatgcgtagcttaagcagcaacaatggcaaccaagacacatgcaacaacaataacaatgggagcaacagttacacgggcgccagcaataacaataacagcaacaatgagcagcacagctgcgccattgccgtggccagttagttagacagagacgaccgtatggtgcgtactttatgtgtatgcgtggctgacacacacatctatataaacaaaatggcgtcaggatggaaggaaccgtttagttttcagctgcccgttcgaatcaaaccgtataccattgttcaaatacgtagctttagccctatttgtcttctgttaaaatagttttattacgacaaccaatttctcatttgcagtcgcaaacatgtgcaaggctgttgtagattgtaaagaaagaatgaaggattggaagagtgtgaggagacgctgagcaaacggccttcaaatcgaaagtggtgtgagtcatgggcgctgccaccatctatgcgaaaagcccaccaagcattggtcacggagcacactcggtttgtaaataagtatattttttttagttaaattacgtagcttaatgagtgtggcgaaataagacgtcgcttacaggcatcccaaacgtcacgaaatcggtcagacaaagaaaaaaaaaactcgatatacttacacaatgcatacacattaacacatctacatgtcgcgatggtgtgtgagcatgaacgctcgtgctatttttgtgtacaccaagttgagctacttttgttgtccgatgtgtcgagaaattcgatttcgaattaaattcgaacgttcgtcatcgccacttctgcgagttacatacggttcatattgaatcactagcgctagaaaacgggcaatattgcaaagtaaacgagtgaaagtcgaaaacccaactattaactgtaaatgtacttaaagtaagcatacagaactgatatttgataaaacctaaaataaaactattataattaataactgttaaaatcaacgttgcctttatttattattcacccagaccagactcagatttgttgctaagcaagcaccaaccctctccccgtttgacataacccgcacctataatcaattttgttttgcagtttcctgctcctcgcacgttaatggcaacgatgatgaggaacggaacacaaacaagaaactacgtcgcagtgggtcactgaatgaatccgcgtcccggtagcaacaatagttcgactatggctggtactggtaaagaagaatcccgaacacgatcgtcgcagtgacgatgacgttgcgttgtagaattactgagtgagtctcaacgtctgtccgagtccccccacgtccaccgccaggcactgagttccgcaaaccagccgatggccgattctacacagatcgccggagcagggagcagcagcagcaaacaccaccgagtctcctctgcatgccaatgcccatgcaattcagtcgcagcggacagaacattggggacaaggcggaatgcgcgcggcagcagctccagctcgcatcagcttacctgcgtttgaagctctcgtgctgttgccaaccaccgacaatcaccacctattctgcattgaacgcttcgcagctgctgatcaccacccacccatccgcacagatacacggtatttggtatatcagctgcgaacaaaatattgctttttaaacaaaattccagagaaaagaacagcggagcattcatttatcatcgaaacgacattgaggaactgctgtaatcctttcgggtgaacaccgtgtgcgattgttattgtgatatacaattgaaaggcagtcgtcgagtttttatctttctgtcttcgctcggtacacttttctggacttctctttcaccgtttgtgattttggcaagcgattattggacccctttccattcaaactccccatcttcctaatcaataggctagataaggccgcttaaatctttgtagctgcatgtcacagttgatcggttcctgtgggtgcttttgtttgatgggattgctttgcggtcttcaagtattcacggtcttgagggctccagacgaggatctttccagcaaatctatgcgcaagcaggcgtcaaagagtttgtagactaggcacgaccatcacatttcgttttttttttttttttatagcgttgcatcgcagttgatcggtgcctgcgggcatgtataaatggaatctagcgaggcggaagattgaggtcttcaattctatggccccaaacaacgctcctgcgacatcaatccctcaattagaatatgtgcaaagaagcataactaatcaactgaacaagcgtaaaagctaagatatatgcaaccgatatcttttctttcgtattttgtagaaatacattttcatggactgataatctacagagaataccaactcggcgctatgggcccgcccaatacatgtaaatttgtgattttatgtccaaaatattttttgtcttgtagcattatgggtgcagttgaatgtacctgcccataattaaagcctgcaaatcaagagttattgttaaacgcaagaggg

SEQ ID NO: 25088 - DNA, 657 bp, DROSOPHILA
tcataagcagtccgctaagagattagtagcaactacgaagtgaagtcgcaaacatgtgcaaggctgttgtagattgtaaagaaagaatgaaggattggaagagtgtgaggagacgctgagcaaacggccttcaaatcgaaagtggtgtgagtcatgggcgctgccaccatctatgcgaaaagcccaccaagcattggtcacggagcacactcgtttcctgctcctcgcacgttaatggcaacgatgatgaggaacggaacacaaacaagaaactacgtcgcagtgggtcactgaatgaatccgcgtcccggtagcaacaatagttcgactatggctggtactggtaaagaagaatcccgaacacgatcgtcgcagtgacgatgacgttgcgttgtagaattactgagtgagtctcaacgtctgtccgagtccccccacgtccaccgccaggcactgagttccgcaaaccagccgatggccgattctacacagatcgccggagcagggagcagcagcagcaaacaccaccgagtctcctctgcatgccaatgcccatgcaattcagtcgcagcggacagaacattggggacaaggcggaatgcgcgcggcagcagctccagctcgcatcagcttacctgcgtttgaagctctcgtgct

SEQ ID NO: 25089 - protein, 46 aa, DROSOPHILA
MGAATIYAKSPPSIGHGAHSFPAPRTLMATMMRNGTQTRNYVAVGH

SEQ ID NO: 25090 - DNA, 4166 bp, DROSOPHILA
tgcctccaacacttcgcacttgttcatcgtaggtctacttgcggtacggacgagtgagcggctagcaaggtgcgtaggaatataaaacatactgttaaatagcccgccaaccaatctctagacgccagccctggcattttgccatattcaactcgaaatacactacatgtaagttaggggtagtattttgttgaggatgtcccatacttcgacatatatcgctgccttttcataattatagggattttttgcagtgtactaggtccgttgaaaagtacctacaaggtatacagtttatattaggcagcagatgtggcaacgcccattctaaaaatctatgaagccggccaaaactgcaacacctccacttatgaaaagtgttttggttttattcttctcattattttatttttattttattagtctatttccaatttctaccggtataccatctaatgcacagcaactctccaaaatgttttatatattttttttcctgggtaacgggtatatcatagtcgagaaactggaccttatcgttctcttctgctcttatatgcaaaacagatcaacagatcaatgtagagcgcagattatagttacaatttcatagaagacatcaatcacccctcgttagactgtcccaaccaatatactgagtcagtatacttttgcggtattttttaggattttttgtacatacaaaatggacgactcattaaaattaagttaaaaaccactactttgaattgaagttttttgccatgcccatgaagaccactaaaatatgacgtcggacatcgattttcaagaaacgagaccgtgttcttgtgtggttatcacgatccgtagggccagcattcgagcagaaatcgtccccaaaaaacagtttccctgctggctgagacaagaaaaacgcgtagatttgcgagcagagctataaaagggcgcgcagacaacgcgctctacccagttaaaaagagtgcgttgtgtagaacagtcataagcagtccgctaagagattagtagcaactacgaagtgaaggtgtgtgtataccaaattctcaattttctcttcgagtcgtcgcaaacaaaaaccctgtgagatcatcgaaatggtggcgtactacgacgagtgcgacgcagccgagaaccccaagaccctaaccgactgggtccgtaacttccgcgttaagcgccagaaaatgcgtcgcaagctaagaggcgctggcagcgacctacgcgtgaacgccattttgtcgacggccctgctccacgcagagcacgagctgcgtagaaagcagcaggagcgcttcagtcgctggctggacattcaaacacggtttgtgccccacggcagaacgcactgcgccagtgacgcgtactctgcagtggcgacctcgaccaccaaggctgccgcagaagcagaggcggaaagcaatttatggagcagcgagcttagtagcctcgacagttttatgcgtagcttaagcagcaacaatggcaaccaagacacatgcaacaacaataacaatgggagcaacagttacacgggcgccagcaataacaataacagcaacaatgagcagcacagctgcgccattgccgtggccagttagttagacagagacgaccgtatggtgcgtactttatgtgtatgcgtggctgacacacacatctatataaacaaaatggcgtcaggatggaaggaaccgtttagttttcagctgcccgttcgaatcaaaccgtataccattgttcaaatacgtagctttagccctatttgtcttctgttaaaatagttttattacgacaaccaatttctcatttgcagtcgcaaacatgtgcaaggctgttgtagattgtaaagaaagaatgaaggattggaagagtgtgaggagacgctgagcaaacggccttcaaatcgaaagtggtgtgagtcatgggcgctgccaccatctatgcgaaaagcccaccaagcattggtcacggagcacactcggtttgtaaataagtatattttttttagttaaattacgtagcttaatgagtgtggcgaaataagacgtcgcttacaggcatcccaaacgtcacgaaatcggtcagacaaagaaaaaaaaaactcgatatacttacacaatgcatacacattaacacatctacatgtcgcgatggtgtgtgagcatgaacgctcgtgctatttttgtgtacaccaagttgagctacttttgttgtccgatgtgtcgagaaattcgatttcgaattaaattcgaacgttcgtcatcgccacttctgcgagttacatacggttcatattgaatcactagcgctagaaaacgggcaatattgcaaagtaaacgagtgaaagtcgaaaacccaactattaactgtaaatgtacttaaagtaagcatacagaactgatatttgataaaacctaaaataaaactattataattaataactgttaaaatcaacgttgcctttatttattattcacccagaccagactcagatttgttgctaagcaagcaccaaccctctccccgtttgacataacccgcacctataatcaattttgttttgcagtttcctgctcctcgcacgttaatggcaacgatgatgaggaacggaacacaaacaagaaactacgtcgcagtgggtcactgaatgaatccgcgtcccggtagcaacaatagttcgactatggctggtactggtaaagaagaatcccgaacacgatcgtcgcagtgacgatgacgttgcgttgtagaattactgagtgagtctcaacgtctgtccgagtccccccacgtccaccgccaggcactgagttccgcaaaccagccgatggccgattctacacagatcgccggagcagggagcagcagcagcaaacaccaccgagtctcctctgcatgccaatgcccatgcaattcagtcgcagcggacagaacattggggacaaggcggaatgcgcgcggcagcagctccagctcgcatcagcttacctgcgtttgaagctctcgtgctgttgccaaccaccgacaatcaccacctattctgcattgaacgcttcgcagctgctgatcaccacccacccatccgcacagatacacggtatttggtatatcagctgcgaacaaaatattgctttttaaacaaaattccagagaaaagaacagcggagcattcatttatcatcgaaacgacattgaggaactgctgtaatcctttcgggtgaacaccgtgtgcgattgttattgtgatatacaattgaaaggcagtcgtcgagtttttatctttctgtcttcgctcggtacacttttctggacttctctttcaccgtttgtgattttggcaagcgattattggacccctttccattcaaactccccatcttcctaatcaataggctagataaggccgcttaaatctttgtagctgcatgtcacagttgatcggttcctgtgggtgcttttgtttgatgggattgctttgcggtcttcaagtattcacggtcttgagggctccagacgaggatctttccagcaaatctatgcgcaagcaggcgtcaaagagtttgtagactaggcacgaccatcacatttcgttttttttttttttttatagcgttgcatcgcagttgatcggtgcctgcgggcatgtataaatggaatctagcgaggcggaagattgaggtcttcaattctatggccccaaacaacgctcctgcgacatcaatccctcaattagaatatgtgcaaagaagcataactaatcaactgaacaagcgtaaaagctaagatatatgcaaccgatatcttttctttcgtattttgtagaaatacattttcatggactgataatctacagagaataccaactcggcgctatgggcccgcccaatacatgtaaatttgtgattttatgtccaaaatattttttgtcttgtagcattatgggtgcagttgaatgtacctgcccataattaaagcctgcaaatcaagagttattgttaaacgcaagagggaacattttgaacagactcaaatctgtacacggcctctgtaaggaatgtgcaatcgatacccttttctctcgtattttatagaaatacatgttgtggaacagtttagatgctatggaattgtaccacgtagttgga

SEQ ID NO: 25091 - DNA, 491 bp, DROSOPHILA
tcataagcagtccgctaagagattagtagcaactacgaagtgaagtcgcaaacatgtgcaaggctgttgtagattgtaaagaaagaatgaaggattggaagagtgtgaggagacgctgagcaaacggccttcaaatcgaaagtggtgtgagtcatgggcgctgccaccatctatgcgaaaagcccaccaagcattggtcacggagcacactcgtttcctgctcctcgcacgttaatggcaacgatgatgaggaacggaacacaaacaagaaactacgtcgcagtgggtcactgaatgaatccgcgtcccggtagcaacaatagttcgactatggctggtactggtaaagaagaatcccgaacacgatcgtcgcagtgacgatgacgttgcgttgtagaattactgactgctgatcaccacccacccatccgcacagatacacggtatttggtatatcagctgcgaacaaaatattgctttttaaacaaaat

SEQ ID NO: 25092 - protein, 46 aa, DROSOPHILA; identical to SEQ ID NO: 25089

SEQ ID NO: 25093 - DNA, 4847 bp, DROSOPHILA
gcctccagtgcctccaacacttcgcacttgttcatcgtaggtctacttgcggtacggacgagtgagcggctagcaaggtgcgtaggaatataaaacatactgttaaatagcccgccaaccaatctctagacgccagccctggcattttgccatattcaactcgaaatacactacatgtaagttaggggtagtattttgttgaggatgtcccatacttcgacatatatcgctgccttttcataattatagggattttttgcagtgtactaggtccgttgaaaagtacctacaaggtatacagtttatattaggcagcagatgtggcaacgcccattctaaaaatctatgaagccggccaaaactgcaacacctccacttatgaaaagtgttttggttttattcttctcattattttatttttattttattagtctatttccaatttctaccggtataccatctaatgcacagcaactctccaaaatgttttatatattttttttcctgggtaacgggtatatcatagtcgagaaactggaccttatcgttctcttctgctcttatatgcaaaacagatcaacagatcaatgtagagcgcagattatagttacaatttcatagaagacatcaatcacccctcgttagactgtcccaaccaatatactgagtcagtatacttttgcggtattttttaggattttttgtacatacaaaatggacgactcattaaaattaagttaaaaaccactactttgaattgaagttttttgccatgcccatgaagaccactaaaatatgacgtcggacatcgattttcaagaaacgagaccgtgttcttgtgtggttatcacgatccgtagggccagcattcgagcagaaatcgtccccaaaaaacagtttccctgctggctgagacaagaaaaacgcgtagatttgcgagcagagctataaaagggcgcgcagacaacgcgctctacccagttaaaaagagtgcgttgtgtagaacagtcataagcagtccgctaagagattagtagcaactacgaagtgaaggtgtgtgtataccaaattctcaattttctcttcgagtcgtcgcaaacaaaaaccctgtgagatcatcgaaatggtggcgtactacgacgagtgcgacgcagccgagaaccccaagaccctaaccgactgggtccgtaacttccgcgttaagcgccagaaaatgcgtcgcaagctaagaggcgctggcagcgacctacgcgtgaacgccattttgtcgacggccctgctccacgcagagcacgagctgcgtagaaagcagcaggagcgcttcagtcgctggctggacattcaaacacggtttgtgccccacggcagaacgcactgcgccagtgacgcgtactctgcagtggcgacctcgaccaccaaggctgccgcagaagcagaggcggaaagcaatttatggagcagcgagcttagtagcctcgacagttttatgcgtagcttaagcagcaacaatggcaaccaagacacatgcaacaacaataacaatgggagcaacagttacacgggcgccagcaataacaataacagcaacaatgagcagcacagctgcgccattgccgtggccagttagttagacagagacgaccgtatggtgcgtactttatgtgtatgcgtggctgacacacacatctatataaacaaaatggcgtcaggatggaaggaaccgtttagttttcagctgcccgttcgaatcaaaccgtataccattgttcaaatacgtagctttagccctatttgtcttctgttaaaatagttttattacgacaaccaatttctcatttgcagtcgcaaacatgtgcaaggctgttgtagattgtaaagaaagaatgaaggattggaagagtgtgaggagacgctgagcaaacggccttcaaatcgaaagtggtgtgagtcatgggcgctgccaccatctatgcgaaaagcccaccaagcattggtcacggagcacactcggtttgtaaataagtatattttttttagttaaattacgtagcttaatgagtgtggcgaaataagacgtcgcttacaggcatcccaaacgtcacgaaatcggtcagacaaagaaaaaaaaaactcgatatacttacacaatgcatacacattaacacatctacatgtcgcgatggtgtgtgagcatgaacgctcgtgctatttttgtgtacaccaagttgagctacttttgttgtccgatgtgtcgagaaattcgatttcgaattaaattcgaacgttcgtcatcgccacttctgcgagttacatacggttcatattgaatcactagcgctagaaaacgggcaatattgcaaagtaaacgagtgaaagtcgaaaacccaactattaactgtaaatgtacttaaagtaagcatacagaactgatatttgataaaacctaaaataaaactattataattaataactgttaaaatcaacgttgcctttatttattattcacccagaccagactcagatttgttgctaagcaagcaccaaccctctccccgtttgacataacccgcacctataatcaattttgttttgcagtttcctgctcctcgcacgttaatggcaacgatgatgaggaacggaacacaaacaagaaactacgtcgcagtgggtcactgaatgaatccgcgtcccggtagcaacaatagttcgactatggctggtactggtaaagaagaatcccgaacacgatcgtcgcagtgacgatgacgttgcgttgtagaattactgagtgagtctcaacgtctgtccgagtccccccacgtccaccgccaggcactgagttccgcaaaccagccgatggccgattctacacagatcgccggagcagggagcagcagcagcaaacaccaccgagtctcctctgcatgccaatgcccatgcaattcagtcgcagcggacagaacattggggacaaggcggaatgcgcgcggcagcagctccagctcgcatcagcttacctgcgtttgaagctctcgtgctgttgccaaccaccgacaatcaccacctattctgcattgaacgcttcgcagctgctgatcaccacccacccatccgcacagatacacggtatttggtatatcagctgcgaacaaaatattgctttttaaacaaaattccagagaaaagaacagcggagcattcatttatcatcgaaacgacattgaggaactgctgtaatcctttcgggtgaacaccgtgtgcgattgttattgtgatatacaattgaaaggcagtcgtcgagtttttatctttctgtcttcgctcggtacacttttctggacttctctttcaccgtttgtgattttggcaagcgattattggacccctttccattcaaactccccatcttcctaatcaataggctagataaggccgcttaaatctttgtagctgcatgtcacagttgatcggttcctgtgggtgcttttgtttgatgggattgctttgcggtcttcaagtattcacggtcttgagggctccagacgaggatctttccagcaaatctatgcgcaagcaggcgtcaaagagtttgtagactaggcacgaccatcacatttcgttttttttttttttttatagcgttgcatcgcagttgatcggtgcctgcgggcatgtataaatggaatctagcgaggcggaagattgaggtcttcaattctatggccccaaacaacgctcctgcgacatcaatccctcaattagaatatgtgcaaagaagcataactaatcaactgaacaagcgtaaaagctaagatatatgcaaccgatatcttttctttcgtattttgtagaaatacattttcatggactgataatctacagagaataccaactcggcgctatgggcccgcccaatacatgtaaatttgtgattttatgtccaaaatattttttgtcttgtagcattatgggtgcagttgaatgtacctgcccataattaaagcctgcaaatcaagagttattgttaaacgcaagagggaacattttgaacagactcaaatctgtacacggcctctgtaaggaatgtgcaatcgatacccttttctctcgtattttatagaaatacatgttgtggaacagtttagatgctatggaattgtaccacgtagttggaccaccacacaaatttaattaaagtatggagaaaaacttttttctgttttcaagctgttcccgttgaatgtgcctgcccacatctcatctatagcttctgagtaaatccaacagcgaaccgtctattcttgggactttaacagcgtttgagaaatggttggatctttacattgctcatttaatactaaagttaatcttctttcccaatacctagacgcttatttatgaattcattgcagtgtttatacagagacatcggtttcaagcaaccagtcttatcaatcacatagttgacataccagtgcacatttgcctgtattaaaaccaaccgagaacatgtagcaaaatttcttgaggcaatgggaatcaaatgccaacttgaaagcaataacaccaacactaagtcgtcgcagtccaacatccatactacacggcgaattcgaattgaagacgctggtcaggtctgaacccaactagaacccgcttacacctgtttttcagcaatttttctggtcaggatgtggattatctgtcacagaaacttcgtttgtcttgagcgtcgctaagattggccgtttgaccctcccaaaagtgagattctaagcagccttaaatttattttacaattcttacagcggtgccgcacagttgagtgtgcctgtgggcatcgacta

SEQ ID NO: 25094 - DNA, 559 bp, DROSOPHILA
tagaacagtcataagcagtccgctaagagattagtagcaactacgaagtgaagtcgcaaacatgtgcaaggctgttgtagattgtaaagaaagaatgaaggattggaagagtgtgaggagacgctgagcaaacggccttcaaatcgaaagtggtgtgagtcatgggcgctgccaccatctatgcgaaaagcccaccaagcattggtcacggagcacactcgtttcctgctcctcgcacgttaatggcaacgatgatgaggaacggaacacaaacaagaaactacgtcgcagtgggtcactgaatgaatccgcgtcccggtagcaacaatagttcgactatggctggtactgcgttgcatcgcagttgatcggtgcctgcgggcatgtataaatggaatctagcgaggcggaagattgaggtcttcaattctatggccccaaacaacgctcctgcgacatcaatccctcaattagaatatgtgcaaagaagcataactaatcaactgaacaagcgtaaaagctaagatatatgcaaccgatatcttttctttcgtatttt

SEQ ID NO: 25095 - protein, 46 aa, DROSOPHILA; identical to SEQ ID NO: 25089

SEQ ID NO: 25096 - DNA, 2488 bp, DROSOPHILA
cgtggcttaccgtaaaattaaaattgcccaatacgaccactccggaaacggggcgaaaagaaaagaaaagaggaagacatcctagaggtgggcagggaatagtgtggctgtgtttggcgtctggcgtcgtgactaacgtgctgctggggaaagagctgtttctcactgctattttgggtattcgcgaaattgttaatttgctaataataataaataaaataataaaatttatcatattaaatcttcaaattcagttttcggaagttttactaatcagtagctcacttgcccagaaaatttggtttgatttcaatcttcgcaaggtcaatttcgctgaaatctgctttacctaatcgaaacgtttctaaactggataattttaatataagttaatcgattttatatatgtatataataattcaattagatgtatgaataattcgagttgagctggaaagttgtgtcgagcacttgccaattggatgagaagtgaaaaaggcgacccaatcagaaataaaatagagagtgaaaagaaaccagtggaaatattccgaagccgaaagatattttggactatgctatgcgttccactggcgtacatttttagacgtctttatttaacacatctaatcttcgaccatacatatcttattcttatattccaattctgattattatataactttaataggaaatgactcaacgatttgtgttaccctatgaaataaaatattaaatatgttaatattttttattttcccagcctcttttttctaattggaattagtaaatgtctataatctaatttattgattacagttgcaaatttgttaatttgctattctgaaagagaagaatatacgggcacacgaattggccttttacggctcgatatgtttgcggtatgtgcgcagaaatgagaacggtaatcgcggggtatttttcagttcgcgatggaataagctgccatcggctaattggtcacactgttggaatccgtcggggttttggcgtcgcgtaaaacggaaaaccgttctgattttcactgaagttgggaaattgaactgttcagctggttgtgcgatgcaaaggcgataggcgcccatcgctgtgcgtgaagaggcagcattctgcagcacaatgacggattcagtcttttcgcgacgcggtcgcaggaaatgaaagttggccagggacttggaggtctttggagcagctcccttggtggcagtggttgtggctgcagctggtcctggcttggcactggcagtggcagttcctgctgcagctgctcctggcgctccaggcacgtcattctccttgctcttactgctgatgctgctgctataaatgctgttcctttggtacactgcgctcgacctctgaagagcctgtgctgacggcgatccagctgttgatccggatgcacttgcaccactgaacacagccgagtatctcttggccagcgggaagaagtccgagttctcgcgtcgaaaaccgcgctcaaaattcgttggcaatcgggagtccgaatcctggcgcttatgcgctggggaattggtgctaccaccgcttccgctaccactagcacttcccgatcccgatccggatcctgatgctgatccttgttctttggcaatactttggctggcacttggttcggcctttagcggctgatagccccggggaactggtctcgtgatggcctccgccacactggccctttgcagtttcgtatccaccttcagcgtgctcagctgggagcttcggctcaagctggcagtggttgtggggctaccacgtccactgcccctcggaccgtttgcgttcttggggaagaaacgatcaaagtcccagtcccgcagcaaattggattcgtcgccgcgacgcgacggtgtcacattggcttgcgatgtggatgcggacttttgcaggcggtttatgttctgctctagtttctatttggggatttcgggttcaggtaggaggagtagtagttgttgttgtagtaagtacgcagcaagagaagaatggtgttaggttggtctgtttttttttttttttttaatacttagaggcatctaaatatcgattaaaagagagctttgtttcgtccccacccaccacagcatggaaagtttttcatgaattctgctcttcattccggtaggttactaaatacacagggttttgatatatatatctctgattttgatcagttgtctcagaaatatatgtaccaacccaggtatgtagttattcgaaagatatatggggtgtgtgtgtgtgcaaatgtgcatatatatattccatgtatgtacaatatctcgatcgtgtcaacattctatgcaccagtgcattaatgtttatatagatgcaacatcacacatggctcattcaaaatatacaacaagttggtaacggaaatttggaaaataaatttgtacaaagaaagaaaaattcacgaaaaagatttcacgctgcttgc

SEQ ID NO: 25097 - DNA, 4635 bp, DROSOPHILA
cggggttttggcgtcgcgtaaaacggaaaaccgttctgattttcactgaagttgggaaattgaactgttcagctggttgtgcgatgcaaaggcgataggcgcccatcgctgtgcgtgaagaaatcagcagcagcaattctccagatccagaagaacaaaataaaatagcaaatcaaaatggcgcaccagcagcaacaacaactggctccatcggtcaactgttcactggacgatatcgatctgacggccctaaaagatccagctggcatctttgagctcatcgaagttgtgggcaatggcacctacggtcaggtctacaagggccgtcacacgaagactggtcaattggctgccataaaggtgatggacgtcaccgaggacgaagaggaggagatcaagctggagatcaatgtgctaaagaaatactcgaatcaccgcaacatcgccacctactacggagccttcatcaagaagtcgccacctgggaaggacgatcagctctggctggtgatggagtactgtggtgctggatcggtaacggatctggtcaagtccaccaagggtcagagcctgaaggaggagtggatcgcctacatctgccgcgagattctgcggggcctgagctacctgcactcgaacaaagtcatccatcgcgacatcaaggggcagaatgtgctcctcaccgacaacgccgaggtgaagctggtggactttggtgtctccgcccagctggatcgcacgataggacggcgcaacacattcatcggtactccctactggatggcccccgaggtcattgcctgcgacgagaatcccgacgccacgtacgacaatcgctccgatctgtggtcgctgggcatcaccgctctggagatggctgagtcacagcccccgctctgcgatctgcatccgatgcgcgccctcttcctgattccgcgcaactcgccacccaggctcaaatcgaagaagtggtccaagaagtttcacggctttattgacacggtgctagttaaggactatcaccagcggccttacaccgagaacctgctgaagcacggcttcatcaaggaccagcccacagatcgccaggtgcgcatccagctgaaggaccacatcgatcgctgcaagaagcgcaagcaggagaaggagcgcgaggactatcgctactcgggctccgacaacgacgacgacgaaccacagctggccgccgccgagcagcagcagcagcatcacctgatggcccaggcgcaggctcaggcggctgccgctcatgccgctgcccaggcccaggcgcaactccagcagcagcaacagcaggctgcggcggcggcagcagcggcggcccatgcagcacaacaggctcagcaggccgcacagcaggcgcaggcccagcagccacaggccaatcggcagccaaaaccgccatcgcgccagcaggttgaggagccgggtccgccagcacgtccgccacagcgcctgatcgtggtgccggatccgccgcacgccaatcggccattgccaccgacgcccaagtgcggcgagccggcgggacagacgccgcagcaacagcagcgcaattcgcagaataacttcaagccatcgttaccaccaaggagacctgagccacagccgcagacggccgccggtggtcagggatcccagcagcaggcgcagccggaggcgccgcctcgcaacaatcgccagtcgagcggtctgtcctcctccggcggatcggcatccggaggcggcggttcgtcgaagcccgcagccgctctgccgcagcagtcgaacaatcatttgggccagccggtgaatccgctggatcccttggacagcagcgattcggacagcgagccggatgagcccaacgatcgggctaggaacgatggaactctattggccagtgatccgcccaagccactgcccggcttgggacccgtctccgaggacgccaacacgacaacgcccttgagtcacggcagcggtggaccgcccaaccgcccactgccgcccacgcccgacgacgacgatcaggctggcgatcggactttgatcatgaagcgcaaactagagcagaacataaaccgcctgcaaaagtccgcatccacatcgcaagccaatgtgacaccgtcgcgtcgcggcgacgaatccaatttgctgcgggactgggactttgatcgtttcttccccaagaacgcaaacggtccgaggggcagtggacgtggtagccccacaaccactgccagcttgagccgaagctcccagctgagcacgctgaaggtggatacgaaactgcaaagggccagtgtggcggaggccatcacgagaccagttccccggggctatcagccgctaaaggccgaaccaagtgccagccaaagtattgccaaagaacaaggatcagcatcaggatccggatcgggatcgggaagtgctagtggtagcggaagcggtggtagcaccaattccccagcgcataagcgccaggattcggactcccgattgccaacgaattttgagcgcggttttcgacgcgagaactcggacttcttcccgctggccaagagatactcggctgtgttcagtggtgcaagtgcatccggatcaacagctggatcgccgtcagcacaggctcttcagaggtcgagcgcagtgtaccaaaggaacagcatttatagcagcagcatcagcagtaagagcaaggagaatgacgtgcctggagcgccaggagcagctgcagcaggaactgccactgccagtgccaagccaggaccagctgcagccacaaccactgccaccaagggagctgctccaaagacctccaagtccctggccaactttcatttcctgcgaccgcgtcgcgaaaagactgaatccgtcattgtgctgcagaatgctgccctcatccgtgcattccacgccatcgaaatcgtttatcgccagcagcggaagcggtggtctcggtttggggggcggtaccgttgtgggcggcgtgattatcagcagcaatcactcgccccaatcgacgatatcgctcgcctcttcgtcctcgaattcgcgccagaattcgcccaagaattcgatcagcaagacgcgctcctccagcagtattactaatctcttgcacaaatctgcttcttcctcctccgcgaacctgcaccacctgacgccctgctcctcgacgtcctcggcctcgatctccaatccgctgccaccgcacgcctatgccctgcaacagaagcagcgcagtttcctgacctttggcttcggcgccggcggctctggtccttcgcgccgggaatcgcacgtcaatgtcaatgtaacgcccacctcccacgaggcggccaacgatacgcccgagatccgtaagtataagaagcgcttcaattcggaaatcctgtgcgcagcgctatggggcgtcaacctgctgattggaacggagaatggcttaatgctgctagatcgatccggtcagggcaaggtctaccagctcatctcgcgacgccgtttccagcaaatggaggtgctagagggccagaacatattggtcaccatatccggcaagaagaaccgagtgcgcgtctactacttgtcctggctaaagtcgaagatcttgcgcaccgacggactctccgatcaagtggagcgtcggaacggttggatcaacgtgggtgatctgcaaggtgctgtacattttaagattgtcaaatacgagaggattaagttcctagtgattgcattaaaagactctattgaaatttatgcatgggctcccaaaccatatcacaaatttatggcatttaagaattttggtgaactggaacatcgcccgcttttggtcgatctcaccattgaggatcagtcgagactgaaggtgatctatggctccgccgagggtttccatgcggttgatttagattcagctgaagtatacgatatctatcttcccaagcatactcagggtgcaatcattccgcattgtattgtggcgcttcccaactcaaatggcatgcaactgctgctgtgctacgacaatgagggcgtctatgtgaacactgtgggccgcgtttccaagaacattgtactgcagtggggcgagatgcccacctcggtggcctacatcggcactggacaaatcatgggctggggcaataaagcaatagagatacgttccgttgagagcggccatttggatggtgtgttcatgcacaaaaaggcgcagcgcttgaaattcctttgcgagcgaaacgacaaagtattcttcagcagtgccaaaggtgcttcatcgtgtcaaatctactttatgacgctcaacaagccgggcatggccaattggtaatcgaatccaatcgaaaccaatccaattcaatccaatccaatcgacgatcgatgatcgtggcaggcagccttcgatcgacggcccagcgatcgatttgctcaaccggcaacaaaatcaacccataaacattttcttcttattttaccacaaaaggcaaacgaaaatgaatgaaagtatctaacgcgaacacataaaagataattagctgatttaagtgaagagtgcataacgattaagtgagatatcctaaacaaacacaccaacaacaacaacaacaacaacactcaacaacatac

SEQ ID NO: 25098 - protein, 979 aa, DROSOPHILA
MAHQQQQQLAPSVNCSLDDIDLTALKDPAGIFELIEVVGNGTYGQVYKGRHTKTGQLAAIKVMDVTEDEEEEIKLEINVLKKYSNHRNIATYYGAFIKKSPPGKDDQLWLVMEYCGAGSVTDLVKSTKGQSLKEEWIAYICREILRGLSYLHSNKVIHRDIKGQNVLLTDNAEVKLVDFGVSAQLDRTIGRRNTFIGTPYWMAPEVIACDENPDATYDNRSDLWSLGITALEMAESQPPLCDLHPMRALFLIPRNSPPRLKSKKWSKKFHGFIDTVLVKDYHQRPYTENLLKHGFIKDQPTDRQVRIQLKDHIDRCKKRKQEKEREDYRYSGSDNDDDEPQLAAAEQQQQHHLMAQAQAQAAAAHAAAQAQAQLQQQQQQAAAAAAAAAHAAQQAQQAAQQAQAQQPQANRQPKPPSRQQVEEPGPPARPPQRLIVVPDPPHANRPLPPTPKCGEPAGQTPQQQQRNSQNNFKPSLPPRRPEPQPQTAAGGQGSQQQAQPEAPPRNNRQSSGLSSSGGSASGGGGSSKPAAALPQQSNNHLGQPVNPLDPLDSSDSDSEPDEPNDRARNDGTLLASDPPKPLPGLGPVSEDANTTTPLSHGSGGPPNRPLPPTPDDDDQAGDRTLIMKRKLEQNINRLQKSASTSQANVTPSRRGDESNLLRDWDFDRFFPKNANGPRGSGRGSPTTTASLSRSSQLSTLKVDTKLQRASVAEAITRPVPRGYQPLKAEPSASQSIAKEQGSASGSGSGSGSASGSGSGGSTNSPAHKRQDSDSRLPTNFERGFRRENSDFFPLAKRYSAVFSGASASGSTAGSPSAQALQRSSAVYQRNSIYSSSISSKSKENDVPGAPGAAAAGTATASAKPGPAAATTTATKGAAPKTSKSLANFHFLRPRREKTESVIVLQNAALIRAFHAIEIVYRQQRKRWSRFGGRYRCGRRDYQQQSLAPIDDIARLFVLEFAPEFAQEFDQQDALLQQYY

SEQ ID NO: 25099 - DNA, 6872 bp, DROSOPHILA
cgtggcactgccatcaacgaactgattgcccgctgcctgtagagaccctagcctagtaaacccttaagtgattgttcaacctctataacccattctgtagctaagcccaatacacatctatatacaaacgtattctatttgagcgtacttatttaacgaagaaaatagatggtcaggtcagcactatcgtgagtttactgtatgcctataaaagcaatcctgcgactattaaggaaccacatgaaactgtctctaacgacattcctcattattctacatgtttatcaacatgataaacttcacccacgaaacaagttctttgcttcttggccttgcgtgtcccagccgagttcccaaattgaacaaaccagagaatcaactttctgcctcgaataataaataagtcataaccgaggtggctcctcgcaaacgaaaggtatgccaaactgaactacttgttgccatgaaggaggaactgttgtttttcgattagtcggagtcagtgccactaacctagtgcaactcgggtcgtcgtatcttttgttcggataaaactccagggactacacattggaattcaaaatccttagattcaattaattctcaatgaattcaagtttcaacagcgagcagttggacaccgaccgcgatggactgcaaaaaattctggcccgatctctcaaggaacccattcttggcaagcactttgccctgcctggccgcatagagcagagtccacccatcgaactggacaccagccagagctacattgccgtctacactcatctcaaagtgcacgccaccatgatgccggagagattgcccacgccggaggcaatcggacgaatacaggcggagaacttggaggcagcgcccaaggcacgaagttcaaagacccgcttggatccctgctcaaatataaattaaattacgttgggcatcaataaagaaagtattgttattttatcttttggtatcccttaaatttagtaaaagaatattaaaatttttttttttattttattaaatatacatgttcataatccttgtaggcataagcttcacatcaaattcgtgttgaatacatcctcctatcggtgcagatcttagtatcctttttcttgaaagtaattaatatgatgcttttcgtaggttgtttaaatcgctactaggttgataagtataagacaattaatgggaccgcatgtggtgctttaacaatcaatattgggttcattcttgaatccataaaaatcatgagagaaatgtaaaataaccaagtgtttatgtgtcatcctcactcctaattctgcaggatacgcacggcgttgtacatctggccaatgatgggcagctgcttggactcgcgccggcaaaggtatttgtaggcatgcgacaacagcctgtccagggcagccacatcgatctcgtcgggcttggtggccgcgatctgaatgttgttctccgtcatcggttccttctgcgtaagcggcgtgagaaatggatcagtactgcgaatgatatatgcgcttgcagcacttaccaggttgtctaggtaggccagcaactggtggccaacagaggcaatcttcaggaacgtggactgcgagctctgtgcgtaaagattaagtctacggccagcgatctccagcagcagtcggcccagctcctcgtcatcgctgatgtcctggagcaacacttgagcctccgcatcatacccaaaagcgtacagttccaccacctggaggagggaaaaatatttggaatatattttctattccattgtgtttcctctgttgtgctctctacggagcaaactaacgaactgatgttgaaaggcaaaagggattgtaagctccctgtcatgtgtgttcatgggttcctagattaggaattctgggatcatatatgtatgtacattcttacctgccgtcgtaggataggaagtttatcgacctcccaactgtcggctaaggcacagatcttgcccatgtagaaaacatgatcgagaatgtacagctgctccaaatcctctctaatcagatccatggtagcggtgacaaggcgacacaggaactcagtgcgctgctgttgcaggacaagatctggtgcaggcaaaacataaggcagttccttattgatgtccgccagcagagctttgttgctcatggagtcaaaaagcgtggtcagtggttttggaatgcgcagctggaaaaaggaaacgaagtgcagcacgctgcacagttctgtttgaagacggagcagctgcggcatggcatggtgctgctggagagccagaaactgcaatggcagggctccttcgctgagcgactgctcgaagtgcagttcacgcttatcgtgctccatggaagcggtgaaatgctgcaggaattcgaggctgagttctagaaactctggcactttacccgcagacatctcgagatcttgctggcacatcttgtccactggcaggcgtcccactttttgaataagcttcgccgccgcctgtagaggaaacttcagggtggcattccacagcatgcaacatattccatgcttcagggcccagtcaggtgtacggaattggtttaaacaaagtaatgctgcctttaggtggtccagcgatgagagctgcttgctccactggaccatgtactgccacgacatgagacttaagaggacgcccgattccaagctgaagggaaaatgcgcacgcagcagagccaatctttcaagaataggttcatgggcttctttactcgccgcgtacacttcctttgccatttccaaatcctcttctgattccgcgtcttcatcgactgactccttggtaggctcatcctttatcttaactttgctctcgtcgtctaactcgttttcgggaggcgatatctccaaaactttactcggatgcaattgtgcactgatcagccacttggctgtcagttcggtgacgatgcctttgccactgctcacaatgcttttgagactgcagtccggtggctcgtaggacatctctggaccaacaggatcccggcagatgagaggcttactgcgaaggaagcagtggttcataaaggagctaagtggaacgattgatttggcacttaccttagtatggctcctagcacggccacatcctctagcttgccagtgagcaatccccactgagcctcatcgtgggagatacgctcccagcgctcatcatcttcgttctgcgaggattcatcacaagatccctaaggaaaaagtgtttttcgcaaaagagtttttgattttaatgactaggagtagacctacctcttttctgtttcgccacaaattagtcgctaccgttttgcatacaatggccaccagcaagcccgaaaattgtttactctccaagagaagttcccgaacttcctgccaccacggtgaaatggcattgtaggcatagtcatggatgtgttcaccagccagatcacaaatggtctgcaccatagcagcaattctggacatgtcctccactacttcatcactaaagtaagaaaagtagattgcacataaattgagaacggaatttataaaatatgtttttctcaccagttgttgtacttaaagggcttctcaagccaaaaccaaataatcaatttaagcaaatctctgctgggcaaacacgcctgattgatccactgcttgaattggccaaagcatagaccttgggcaaagaactgactaaagagatcgatgcttacggcgccaaacttatctgacttctccggaagtagacttatcccatccggactatcgatgttaaagatgctcaggtaatcgacaaattcttcggtcttgtgctccgcctgcaacttgaagctcacttcacgagtggcggcgggtttatccttctcggtgccatcgtccaggagcagaaccaacttgttaatggtgacaagatcagcatcggaaagctccaagtattctacgggtggctcgttgtcttcacgctgattggcttgacttagggccaagtagagatcagtcaagcgtttatagttctcgatttggttgacaaactcctcggagcccgttgattcagaaagaggtttctttatgaaggcattaatgatggattgaaacacctgtggctgcagcttcttgctcttaagcaacatctccagacactgttgtcgcacctctaacgtctgcagttcacttgccagttcgccaatctcctgcagcgcttcatctttggcttggccatggtttatggttctgagctggtttctgaggcgcctcagcatatggatatcccgtgatgtctgggagctggtctcgctgagcgcgtagtgaaaaggaatgtgtatctccttcaggctgccatcgctggggtccaggaacaagcaatgattgatggctaaagattttcttgactgactactgctattaccagatccactgctgccgcctgagcctaggggactatgattgttgtacataagttgcccgctcttcgaaacattgaatgcagccaccttgggtccgttttgcaaagcccatatgtccaggcagcccattcgaggagcgtagatcaccaggaacaaagcctttcgcttgtgcgttttgataccgcgaacggatttttctttaactggcacgaatgcgcactgtgcatctcgatagcccttccaaacacgcaagataatagcctggtgcgtatccaccaacattacacggtcgagattatcggtaacgacagccaggcgtccaccaggtgccacagacaaggtcagtccatctctcttgccgtcatatagacgacagcgaatccgcatcggtgcttctttcgtgggcaccggcagtggtgattcctcgggcgatggcaggggctctggagcgcgtcgaaagattccgcccagcaggttcttgtaagctattccgattacgtctttggcaacctcacccagcgacatcgttttataaccctcctccgcctgaaagaagcccaaatagggttctgctccggcggccagaacctgtgagctcctcggcggcgtggcgtgcaccttggcgaaataaccgagaccgatggtctgctgaacaatgtagtcgtatgtgggaggtcgctgggtggtagagatggcagcatcattaatgacggcctctcgttcttgcttgaacttatacttctggaatggcaccacatcagcagtgggatacgaactacgctccaatgcacctctttgcacattgtgccggcaattgttcagcgtgggcaaaatgtcctggccctggatgaagcacaggcagcgaggatagatgatgtagagcagtgaatctgcctcagaatgtcgcggagcggactgcagcttgactccaattactggatcctcttggcaacttgaaaaatatagatggttaatgccgtagatacatttaattccacaactaaccattgcgagaagagttttacacccgagtccgtgtagaaggtaaccatgccagagcacaggccaactgccacgcaggtccattcgatggctccatcggtgcttttgttctgagtcatcggcaagcaggtgaggctagtcacgatttggttgggatcctccagctcgccgcaccagccaagaacgtaggtgttgccattgccatggctgctccagcaggtgctgaggaatgccaacttttcaccctgcgccatggcaatcagttccccagttggtgaaatggcatggtttatcgcgtttaaccagttgtcatctgcacggatcggtttagctatgaatacttgctgcagagacttgtcttatcttaccatgtccgagtccaaagtattcttggactttcttaaaatcacggatttctccgcagtgttttacttcgcaagccatcgccttttgttttcatcacacagctgatttgcagtggagttgacagtgcaggtaaatttagctatagccagatgtatcgattatcgattatgtatcgatttcaatgcaacaggtaactccaataataacgaactaatgaaattcattaaagtaattttctttgttgtacgtaattttaaaacattataaactgagaggatgttattcatctaatctgcccaaactaataaatacttggcttatatgcatagatgttaaattataagttagaatacaaaataaatcaaataattttttgataatgatcaaaatggtaaactgtgcacttactttgtaccaagctgaaaatctctatagctttattttaatgcatactccaatagtaagtttattgtactgcaacatattgtagttcgatctaagatctaatatatgaatatagaaggtaaactaaatcaaatccgactccacaccgctgtcgataaagtccttaagcatcaggccgcaatgatcgggcaggagtcgcgtccagttgttgatgtagaggaggcagctcgggatggttacctccatgaggtcggtgcgatgagcctccacgatccttttggccacctgcttgggatcgagcaggcccaggatcgatgggaacttcaccttgggatgcttgcagaggccagtgttggtcatatagggaaagatggtggtggttcgaatctgtaaatggattcacacatggatcacataatctagcacattcacatggttattctaccagatccctgaaaggtccctgtcgtaattcggcatgcagtgcctccatcagaccgcgtacagcgaatttggtggcacaatagggcaccaggttggagatgcccaccaagccggcaatggaggacatgcaaatgatgtggccacgacacttctcctgcatgtgcggcaagaaggcctggatggtccagaactgcgagaacacgttcacgtcgaagacccgctggatttcct

SEQ ID NO: 25100 - DNA, 4331 bp, DROSOPHILA
cgatggcttgcgaagtaaaacactgcggagaaatccgtgattttaagaaagtccaagaatactttggactcggacatgatgacaactggttaaacgcgataaaccatgccatttcaccaactggggaactgattgccatggcgcagggtgaaaagttggcattcctcagcacctgctggagcagccatggcaatggcaacacctacgttcttggctggtgcggcgagctggaggatcccaaccaaatcgtgactagcctcacctgcttgccgatgactcagaacaaaagcaccgatggagccatcgaatggacctgcgtggcagttggcctgtgctctggcatggttaccttctacacggactcgggtgtaaaactcttctcgcaatgttgccaagaggatccagtaattggagtcaagctgcagtccgctccgcgacattctgaggcagattcactgctctacatcatctatcctcgctgcctgtgcttcatccagggccaggacattttgcccacgctgaacaattgccggcacaatgtgcaaagaggtgcattggagcgtagttcgtatcccactgctgatgtggtgccattccagaagtataagttcaagcaagaacgagaggccgtcattaatgatgctgccatctctaccacccagcgacctcccacatacgactacattgttcagcagaccatcggtctcggttatttcgccaaggtgcacgccacgccgccgaggagctcacaggttctggccgccggagcagaaccctatttgggcttctttcaggcggaggagggttataaaacgatgtcgctgggtgaggttgccaaagacgtaatcggaatagcttacaagaacctgctgggcggaatctttcgacgcgctccagagcccctgccatcgcccgaggaatcaccactgccggtgcccacgaaagaagcaccgatgcggattcgctgtcgtctatatgacggcaagagagatggactgaccttgtctgtggcacctggtggacgcctggctgtcgttaccgataatctcgaccgtgtaatgttggtggatacgcaccaggctattatcttgcgtgtttggaagggctatcgagatgcacagtgcgcattcgtgccagttaaagaaaaatccgttcgcggtatcaaaacgcacaagcgaaaggctttgttcctggtgatctacgctcctcgaatgggctgcctggacatatgggctttgcaaaacggacccaaggtggctgcattcaatgtttcgaagagcgggcaacttatgtacaacaatcatagtcccctaggctcaggcggcagcagtggatctggtaatagcagtagtcagtcaagaaaatctttagccatcaatcattgcttgttcctggaccccagcgatggcagcctgaaggagatacacattccttttcactacgcgctcagcgagaccagctcccagacatcacgggatatccatatgctgaggcgcctcagaaaccagctcagaaccataaaccatggccaagccaaagatgaagcgctgcaggagattggcgaactggcaagtgaactgcagacgttagaggtgcgacaacagtgtctggagatgttgcttaagagcaagaagctgcagccacaggtgtttcaatccatcattaatgccttcataaagaaacctctttctgaatcaacgggctccgaggagtttgtcaaccaaatcgagaactataaacgcttgactgatctctacttggccctaagtcaagccaatcagcgtgaagacaacgagccacccgtagaatacttggagctttccgatgctgatcttgtcaccattaacaagttggttctgctcctggacgatggcaccgagaaggataaacccgccgccactcgtgaagtgagcttcaagttgcaggcggagcacaagaccgaagaatttgtcgattacctgagcatctttaacatcgatagtccggatgggataagtctacttccggagaagtcagataagtttggcgccgtaagcatcgatctctttagtcagttctttgcccaaggtctatgctttggccaattcaagcagtggatcaatcaggcgtgtttgcccagcagagatttgcttaaattgattatttggttttggcttgagaagccctttaagtacaacaactgtgatgaagtagtggaggacatgtccagaattgctgctatggtgcagaccatttgtgatctggctggtgaacacatccatgactatgcctacaatgccatttcaccgtggtggcaggaagttcgggaacttctcttggagagtaaacaattttcgggcttgctggtggccattgtatgcaaaacggtagcgactaatttgtggcgaaacagaaaagagggatcttgtgatgaatcctcgcagaacgaagatgatgagcgctgggagcgtatctcccacgatgaggctcagtggggattgctcactggcaagctagaggatgtggccgtgctaggagccatactaagtaagcctctcatctgccgggatcctgttggtccagagatgtcctacgagccaccggactgcagtctcaaaagcattgtgagcagtggcaaaggcatcgtcaccgaactgacagccaagtggctgatcagtgcacaattgcatccgagtaaagttttggagatatcgcctcccgaaaacgagttagacgacgagagcaaagttaagataaaggatgagcctaccaaggagtcagtcgatgaagacgcggaatcagaagaggatttggaaatggcaaaggaagtgtacgcggcgagtaaagaagcccatgaacctattcttgaaagattggctctgctgcgtgcgcattttcccttcagcttggaatcgggcgtcctcttaagtctcatgtcgtggcagtacatggtccagtggagcaagcagctctcatcgctggaccacctaaaggcagcattactttgtttaaaccaattccgtacacctgactgggccctgaagcatggaatatgttgcatgctgtggaatgccaccctgaagtttcctctacaggcggcggcgaagcttattcaaaaagtgggacgcctgccagtggacaagatgtgccagcaagatctcgagatgtctgcgggtaaagtgccagagtttctagaactcagcctcgaattcctgcagcatttcaccgcttccatggagcacgataagcgtgaactgcacttcgagcagtcgctcagcgaaggagccctgccattgcagtttctggctctccagcagcaccatgccatgccgcagctgctccgtcttcaaacagaactgtgcagcgtgctgcacttcgtttcctttttccagctgcgcattccaaaaccactgaccacgctttttgactccatgagcaacaaagctctgctggcggacatcaataaggaactgccttatgttttgcctgcaccagatcttgtcctgcaacagcagcgcactgagttcctgtgtcgccttgtcaccgctaccatggatctgattagagaggatttggagcagctgtacattctcgatcatgttttctacatgggcaagatctgtgccttagccgacagttgggaggtcgataaacttcctatcctacgacggcaggtggtggaactgtacgcttttgggtatgatgcggaggctcaagtgttgctccaggacatcagcgatgacgaggagctgggccgactgctgctggagatcgctggccgtagacttaatctttacgcacagagctcgcagtccacgttcctgaagattgcctctgttggccaccagttgctggcctacctagacaacctgaaggaaccgatgacggagaacaacattcagatcgcggccaccaagcccgacgagatcgatgtggctgccctggacaggctgttgtcgcatgcctacaaatacctttgccggcgcgagtccaagcagctgcccatcattggccagatgtacaacgccgtgcgtatcctgcagaattaggagtgaggatgacacataaacacttggttattttacatttctctcatgatttttatggattcaagaatgaacccaatattgattgttaaagcaccacatgcggtcccattaattgtcttatacttatcaacctagtagcgatttaaacaacctacgaaaagcatcatattaattactttcaagaaaaaggatactaagatctgcaccgataggaggatgtattcaacacgaatttgatgtgaagcttatgcctacaaggattatgaacatgtatatttaataaaataaaaaaaaaaattttaa

SEQ ID NO: 25101 - protein, 1296 aa, DROSOPHILA
MAQGEKLAFLSTCWSSHGNGNTYVLGWCGELEDPNQIVTSLTCLPMTQNKSTDGAIEWTCVAVGLCSGMVTFYTDSGVKLFSQCCQEDPVIGVKLQSAPRHSEADSLLYIIYPRCLCFIQGQDILPTLNNCRHNVQRGALERSSYPTADVVPFQKYKFKQEREAVINDAAISTTQRPPTYDYIVQQTIGLGYFAKVHATPPRSSQVLAAGAEPYLGFFQAEEGYKTMSLGEVAKDVIGIAYKNLLGGIFRRAPEPLPSPEESPLPVPTKEAPMRIRCRLYDGKRDGLTLSVAPGGRLAVVTDNLDRVMLVDTHQAIILRVWKGYRDAQCAFVPVKEKSVRGIKTHKRKALFLVIYAPRMGCLDIWALQNGPKVAAFNVSKSGQLMYNNHSPLGSGGSSGSGNSSSQSRKSLAINHCLFLDPSDGSLKEIHIPFHYALSETSSQTSRDIHMLRRLRNQLRTINHGQAKDEALQEIGELASELQTLEVRQQCLEMLLKSKKLQPQVFQSIINAFIKKPLSESTGSEEFVNQIENYKRLTDLYLALSQANQREDNEPPVEYLELSDADLVTINKLVLLLDDGTEKDKPAATREVSFKLQAEHKTEEFVDYLSIFNIDSPDGISLLPEKSDKFGAVSIDLFSQFFAQGLCFGQFKQWINQACLPSRDLLKLIIWFWLEKPFKYNNCDEVVEDMSRIAAMVQTICDLAGEHIHDYAYNAISPWWQEVRELLLESKQFSGLLVAIVCKTVATNLWRNRKEGSCDESSQNEDDERWERISHDEAQWGLLTGKLEDVAVLGAILSKPLICRDPVGPEMSYEPPDCSLKSIVSSGKGIVTELTAKWLISAQLHPSKVLEISPPENELDDESKVKIKDEPTKESVDEDAESEEDLEMAKEVYAASKEAHEPILERLALLRAHFPFSLESGVLLSLMSWQYMVQWSKQLSSLDHLKAALLCLNQFRTPDWALKHGICCMLWNATLKFPLQAAAKLIQKVGRLPVDKMCQQDLEMSAGKVPEFLELSLEFLQHFTASMEHDKRELHFEQSLSEGALPLQFLALQQHHAMPQLLRLQTELCSVLHFVSFFQLRIPKPLTTLFDSMSNKALLADINKELPYVLPAPDLVLQQQRTEFLCRLVTATMDLIREDLEQLYILDHVFYMGKICALADSWEVDKLPILRRQVVELYAFGYDAEAQVLLQDISDDEELGRLLLEIAGRRLNLYAQSSQSTFLKIASVGHQLLAYLDNLKEPMTENNIQIAATKPDEIDVAALDRLLSHAYKYLCRRESKQLPIIGQMYNAVRILQN

SEQ ID NO: 25102 - DNA, 3818 bp, DROSOPHILA
cataaagtgggtttgctgtaactgaaaattctgtgctgcagaccttttgatcaacggtttgggtgttcttggaactgtcgtatccattataagtggtttcaaatgaacgctctagagatgggcacactacagagtgtcgtgtcacgaactcctgagggagaacttctatattttagctttactagtttaaaatccagtaaaatttatttgtctgagcaaatcattctatttatatttaataatataagcaaacatacttttcaactattcatcccctaaatgtttaaaaaataattaatccaaaaatctaataagtcatacattatgatggactgtaaataaaaattattatgctgacactacaacagcgcatctctagcataggcaaaatcaacaacaacaaggagctggaaagacaagtgcgtcattgtttttttggtcatcgtcggtagtttatgttgctgttgttgcacattgttttgtgcttgatccggcttatcgtccgtgcacataaaaaagcaaaaacaagcacatatgcgcataaaaaacatgcacacacgaaatacggggcaagtaaatttgattaaacgcaacagttggcggaaatttaatacacgaacggctccctaaagtaaacattaaacgaaaaattaattaagcgtaaatttagaccagggcaaaagaaaaaaacacgttcccacgccaaaagcaaacataaacagaaagaaactgggtgacggagagggtggtggggagagagacagagagagagagagggaaaaacgcagaggaagccatcgtaaattcattcacattttgcaatttctgctgcggttttcaacttgtttgcattccaatcaactggaatactggaattgcaatccctcggcttaataatgaattaaatcataccacaaacaacaacgccaaacaaacccacacacactgaggcaggcaccaatacaggcttagcgtaattgtaaaaaaatgccacttccattatccatcgtttttttttatcattttcgtgagtcaatcgatggacaaagattgcggtatttctcttccggcttcaagtttaccgttagccaattgcgactctcttttctttgcacatttcactaatcagtggacatttctgatttgattggatcagaattttcattttgatttcgttttgagctggggtttccaggaaaattccttagcacttgcacacacgcacacacgctcaggttttcgaaagcctacgtttttccattttcggaaacttactgctcgccaaatgcgcttggtgggcggcgacttaattagccagccctcgtagaaagtgcgatccattattttgcagcgctcgacgcaatttacttcgatttatttcactccactccgcgcacaccaactagaggtgggcctcacgcttgcgatagatcttccgaggcaatatcgaataagtattcgataggcttaagctaagtctaagatatatcgaaataaaagatgcgaacgcttatattcggcggaaagttattattatttatatatttgtttggtgtaagccccattgcttcaaaacttgaacttagtgtaatataccgtttgcttcaaattgttttagattagtgtgaccgtagttgacattacccaacactggcactatttataattttgagttgtaaaaattaagtatttacaatcttgtaaaaaacaaaacaaaaccttttttggttgccatatgaaacgtgttcaatctagtattttaaaaataagtccacaaatagcccatataaaatatgtatacatatttcaaaaaacacaagtatttctttgtttgaaaacaagaatttgcagataacataagtatttacctaataaatcagcataataaatccaaacaaaagctaataactaaaatcttaaaaactttaaatgcaaacgaagtatagttttacaaatacgttttattctgccgtgtcaagcgtatgcctagaacatacagattatccatgtagaatagcaatttcttccacgacgccgcacagcagagcacgaccactacccagatctcaggcggaacctgcgccacgccggaatcctgctgcagccagagcttacttgtccttgctgtcgcccttgccaccacggatcctaccggtacgacgggcagcgatgagaccgaccttgcgaccggcggatgtgcctcgcttgacggtggaggccttaccaatgtgctgatggttaccaccaccgtgaggatgctccacggggttcatggccacaccacgcaccttaggccagctgttgcgcttcaccttgtacttgtggtaggcacgaccggccttcaggatgggcttgtcgatacgaccgccgccggcgacgatgccaaccatggcgcggttggccgagggcacgaccttcttggcgccggatggcagcttgacacgcgtcttcttggtgtcctggttgtgggcaatcacggtggcgtagttgccagaggtgcgggccaaacggccgcgatcaccggtcttctcctccaggttgcagatgatggtaccctcgggcatctggctgaggggcatcacgttgccgatctgaagggtggccttgcggccgcagtacacgaactggccggtgtgcatgccctcgggggcgatgaacagctccttgcggatcttgtagcggtaggggtcgcggaagtggacgacggccagaggagcgccacggccgggatcgtggatgatgtcctgaaacatggaagaagtacgattcgcttagttacacttcaaaagcagttaagccaagtgagctaagtaacttctagtaagctggcacaggtgctcaagcacgtctcttgaatgtggcatggccaaatgcaagtgatctcatccacattaaacggataggtgtagttggtgatcctaggagcacgttactcaccttgacaactccgcggatgtagccggaacgctcggcgaagtccagggaacgcagcttggcggctcccttgcgcttcttcacgtgcgccttgaacacggaaccagctcccttacgctgtgcacgaataacgcgacccattgctgcaagacaaattcacgggattagtactcgaactccatattgcaaatgcggcggtttcactaaataagatggccatcttcaatgcaacacgctacggaatttcgatcttattcgaatattttgacggaaaattgaaatattccatgttacacggttataatgttaaattgcgcactgtaaacaatttccgcaattgaaaacaccaccaaatttacaaaatttagcacgtggcttaccgtaaaattaaaattgcccaatacgaccactccggaaacggggcgaaaagaaaagaaaagaggaagacatcctagaggtgggcagggaatagtgtggctgtgtttggcgtctggcgtcgtgactaacgtgctgctggggaaagagctgtttctcactgctattttgggtattcgcgaaattgttaatttgctaataataataaataaaataataaaatttatcatattaaatcttcaaattcagttttcggaagttttactaatcagtagctcacttgcccagaaaatttggtttgatttcaatcttcgcaaggtcaatttcgctgaaatctgctttacctaatcgaaacgtttctaaactggataattttaatataagttaatcgattttatatatgtatataataattcaattagatgtatgaataattcgagttgagctggaaagttgtgtcgagcacttgccaattggatgagaagtgaaaaaggcgacccaatcagaaa

SEQ ID NO: 25103 - DNA, 904 bp, DROSOPHILA
tatccatcgtttttttttatcattttctatagttttacaaatacgttttattctgccgtgtcaagcgtatgcctagaacatacagattatccatgtagaatagcaatttcttccacgacgccgcacagcagagcacgaccactacccagatctcaggcggaacctgcgccacgccggaatcctgctgcagccagagcttacttgtccttgctgtcgcccttgccaccacggatcctaccggtacgacgggcagcgatgagaccgaccttgcgaccggcggatgtgcctcgcttgacggtggaggccttaccaatgtgctgatggttaccaccaccgtgaggatgctccacggggttcatggccacaccacgcaccttaggccagctgttgcgcttcaccttgtacttgtggtaggcacgaccggccttcaggatgggcttgtcgatacgaccgccgccggcgacgatgccaaccatggcgcggttggccgagggcacgaccttcttggcgccggatggcagcttgacacgcgtcttcttggtgtcctggttgtgggcaatcacggtggcgtagttgccagaggtgcgggccaaacggccgcgatcaccggtcttctcctccaggttgcagatgatggtaccctcgggcatctggctgaggggcatcacgttgccgatctgaagggtggccttgcggccgcagtacacgaactggccggtgtgcatgccctcgggggcgatgaacagctccttgcggatcttgtagcggtaggggtcgcggaagtggacgacggccagaggagcgccacggccgggatcgtggatgatgtcctgaaacatggaagaagtacgattcgcttagttacacttcaaaagcagttaagccaagtgagctaagtaacttc

SEQ ID NO: 25104 - protein, 191 aa, DROSOPHILA
MVTTTVRMLHGVHGHTTHLRPAVALHLVLVVGTTGLQDGLVDTTAAGDDANHGAVGRGHDLLGAGWQLDTRLLGVLVVGNHGGVVARGAGQTAAITGLLLQVADDGTLGHLAEGHHVADLKGGLAAAVHELAGVHALGGDEQLLADLVAVGVAEVDDGQRSATAGIVDDVLKHGRSTIRLVTLQKQLSQVS

SEQ ID NO: 25105 - DNA, 3981 bp, DROSOPHILA
acgcttctatcccacacgtttggctctgaatgtgacaagcaaggaggcggctgcgactgcatctgtggccatggatgaggaggccactcaggactgtggctacattgtggtggagacgaactaccgagtgtatgcctacactgattctccgctccaggtagccgtgttaggtctgttcacggagcttctctaccgctttcccaatctcgtcgtgggcgtgctaacccgcgattcagtgcgccaggcgttgcgtggcggtatcacggcagagcagattgtctcgtatctggagcagtatgcgcatcccaatatgcgcatggtcgagtcagccattcactctaaatcctgcctgccacccacagtcgttgatcaaattaagctgtgggaattagagcgaaatcgcttcacctacaccgaaggcgtgctgtacaatcagttcctctcgcatacagatttcgtaacgctacgagactacgcccagtcgatccacatgctggtgtggcaaaatgagcgaactcgcacaatggtggtgcaaaagaatggccacgacgatgtcaagcgttactggaagaagtactctaagagtggtgtttagcccggtattacgaccaattattgggaagttattttagaagtaacatctgtgcccattttgttacaagctaaaattttaaaatatggtttaataagggagtgtgggattacacatttatcatcgacattcaacatacaagtggaataaaattaaaatacacaagtatcatacacataaaaacagaaaaccaccaaagcttttcctagattgtcctttaggatgggtcgacatgtaatattgctaaacgtaaaaaacagtgaagagacaactaacaaatgcatacaaaataattttatttacccaataaaatagaaaatttagaatgtcctatacgttatacctaaagaaagcatatcgaaacatcctcgcctacctaaatgcgagtggaaaagaaactagctcaacctaatacaaaatgggacgctggggcatgcagagattgtagtagctgcccttggcccaaaagtccatgcccttccagccgcaccaacctttaatttgaatggtggccaaatcatcggcacctgtataatggggatccaagatgaggaacttcacctgacccgtctgcacgcagtagtccaccccgataatggtgtgggccagaacaccgccaccaatcattaccggtgtaccttgcgtttggaaatgcatcgccagctcggaggcaatagtcgccagctcagctccagaggctacgtgcagaatttttgagtccacgttaaggaatccctgcagacacatgctgatttctgtggaaccaatccactgagaagaacccacgaatgcagcaggtttgtcgttgatcttgtgaaggtattcctgcacctccagatgcgtcggaatcggtgcgttcgtataaccctgcagcacaaaccaggagcagatcgtctgcagcgagcgatatgcgcatccccatcccttgtcctgcacctgctgttgcaggtaatgatagtaatggtagttaccatttactaagtactctttgccgtcgacaactccactgggacgtaatccgatgtgggtatttagcagcggagtccatggtgcgtcctccgtttcacctaggaaaagcatctggttggccctgcggaaataaggacgactgatgggcaaagcaaactgtcgatgcaggcgcttgcgtctcattagcatgcttggtgtatcgtcactcagaccttccagataggcgcagctcacgaagtgaccaaactcttgtgggtagaagtgatagctagcgggcaccagcagctttccacttcccgactccgtgagatgctcaatcaggctcagttcgaacaatctgagacctctgcagatgctctcgatgagtacgtcgtatagccgttggagcttcgttttgcggcagagaatggccatggcttcgatctctaatggtacctggactcggatctgttcctcattggtcacagcaatgctgagtgccggatgaggtggctctccggacacgggatcacgactgcgcgagcgcatcacatcgatggggatcacctcgtagtcgcagccagtcggagccagtctcttgactggcgtgttctgacctttaagcttctttttgtcgacactggcagtctccttttcatgtcctggagttggaatgacgtctataagatcctgaatttgggaatcgccgctaaactgtttgtccagtggcccgtagttattaatgaaaatctttgtctgcggaacgttaaacactagatttccgtcggctacccttttgcgcagcacatgcatttcccgggccacggattccggtgtggcggccgtttgcagaaagaatccgcactgcagccgggtgaagcagaagtcgttgtacagctgatgtgcctccataacctcgtagggtacctcctccagttttccatggacgaaaaacgaggcccgcaagcccaccaaggtgcccaattcgcattgcagtaggatgggattatcggtgatatccacagatttgatgacctcattaaggtgcgcctctccatcggtgcaaccaccaaacttgaccagtccgcataaatccagttccgccgggaatctgtgttggatctgctcgtagttcagttgtcccaaactggactcaatgttgaagctcagtaggagtaaggtaccttctccatagaaaactccaaacaagcatccactgcactgctgctttgttcgctccaggcgctaaaattggtgaaaccgcgtaaacgatatatggttaaataaacgatttatagtctcaccttcaacaggaatgcggatatttttagtttgggtagcatatttctgataaatgtatgaaaataaaataaagtaacacggccacccacccgagtaaatgttgctcagctggcaattttttatcgataactgagtgtctgtatggtattttcctatcgacatacatatgtatatttattggaaagtttgaaaatgaattcaaataaattgtttggatagaaatgtatgcattgacattttggtaggattttaggttagagattcattggtttaattattaaaatgtgagccaacgttttatataatagtccattatttccaatatatatacatatgtatttgctgcgacagttttccatctgcacaactaattaaaaagttcattcaagtacacacacatataacatttatttaatatatattttatattgaattcggcatagtgtatagattcgcaaaaatgttataaacgcagcccaacaccgcgccactggctccatgactctcccatcgactatcatccatagtccacaattcgttaattctatcaatgttacacatttatatacagtacataattgcgtggtgcctcttatatttgcttcaactggaatatcgtgctccttctcgatttgctttcgtgcctactaatttacattaagagttttcaagcggttttgttttgtttgcctttagttaggacatctacaaactactaggctttagaattttctaattaatttcattgctaaattgtatgatttgcgcaaaaacagaagcttacttagagaaaaaaagtttaaaacgcaaccccccgctctacagatatatattgaattcctgcggccttccatttcctgcccaccatccgcgcccattctcatcacgaataactatttaatcgcgaaacttaaaacacaagcatccatatccaccgcggctactctggcgctacttcctctgcttggcagcagaagtggctgcagatcctcctgatccagaggatcctccaccggtcacagccgatgtatccttgcgtggtgctgtggagatggtcacgcttggactggcgggctttgtcgttgtcatcgaagttttacagccactgttgtggggcttagttttgggcgttccaggag

SEQ ID NO: 25106 - DNA, 1922 bp, DROSOPHILA
agacactcagttatcgataaaaaattgccagctgagcaacatttactcgggtgggtggccgtgttactttattttattttcatacatttatcagaaatatgctacccaaactaaaaatatccgcattcctgttgaagcgcctggagcgaacaaagcagcagtgcagtggatgcttgtttggagttttctatggagaaggtaccttactcctactgagcttcaacattgagtccagtttgggacaactgaactacgagcagatccaacacagattcccggcggaactggatttatgcggactggtcaagtttggtggttgcaccgatggagaggcgcaccttaatgaggtcatcaaatctgtggatatcaccgataatcccatcctactgcaatgcgaattgggcaccttggtgggcttgcgggcctcgtttttcgtccatggaaaactggaggaggtaccctacgaggttatggaggcacatcagctgtacaacgacttctgcttcacccggctgcagtgcggattctttctgcaaacggccgccacaccggaatccgtggcccgggaaatgcatgtgctgcgcaaaagggtagccgacggaaatctagtgtttaacgttccgcagacaaagattttcattaataactacgggccactggacaaacagtttagcggcgattcccaaattcaggatcttatagacgtcattccaactccaggacatgaaaaggagactgccagtgtcgacaaaaagaagcttaaaggtcagaacacgccagtcaagagactggctccgactggctgcgactacgaggtgatccccatcgatgtgatgcgctcgcgcagtcgtgatcccgtgtccggagagccacctcatccggcactcagcattgctgtgaccaatgaggaacagatccgagtccaggtaccattagagatcgaagccatggccattctctgccgcaaaacgaagctccaacggctatacgacgtactcatcgagagcatctgcagaggtctcagattgttcgaactgagcctgattgagcatctcacggagtcgggaagtggaaagctgctggtgcccgctagctatcacttctacccacaagagtttggtcacttcgtgagctgcgcctatctggaaggtctgagtgacgatacaccaagcatgctaatgagacgcaagcgcctgcatcgacagtttgctttgcccatcagtcgtccttatttccgcagggccaaccagatgcttttcctaggtgaaacggaggacgcaccatggactccgctgctaaatacccacatcggattacgtcccagtggagttgtcgacggcaaagagtacttagtaaatggtaactaccattactatcattacctgcaacagcaggtgcaggacaagggatggggatgcgcatatcgctcgctgcagacgatctgctcctggtttgtgctgcagggttatacgaacgcaccgattccgacgcatctggaggtgcaggaataccttcacaagatcaacgacaaacctgctgcattcgtgggttcttctcagtggattggttccacagaaatcagcatgtgtctgcagggattccttaacgtggactcaaaaattctgcacgtagcctctggagctgagctggcgactattgcctccgagctggcgatgcatttccaaacgcaaggtacaccggtaatgattggtggcggtgttctggcccacaccattatcggggtggactactgcgtgcagacgggtcaggtgaagttcctcatcttggatccccattatacaggtgccgatgatttggccaccattcaaattaaaggttggtgcggctggaagggcatggacttttgggccaagggcagctactacaatctctgcatgccccagcgtcccattttgtattag

SEQ ID NO: 25107 - protein, 607 aa, DROSOPHILA
MLPKLKISAFLLKRLERTKQQCSGCLFGVFYGEGTLLLLSFNIESSLGQLNYEQIQHRFPAELDLCGLVKFGGCTDGEAHLNEVIKSVDITDNPILLQCELGTLVGLRASFFVHGKLEEVPYEVMEAHQLYNDFCFTRLQCGFFLQTAATPESVAREMHVLRKRVADGNLVFNVPQTKIFINNYGPLDKQFSGDSQIQDLIDVIPTPGHEKETASVDKKKLKGQNTPVKRLAPTGCDYEVIPIDVMRSRSRDPVSGEPPHPALSIAVTNEEQIRVQVPLEIEAMAILCRKTKLQRLYDVLIESICRGLRLFELSLIEHLTESGSGKLLVPASYHFYPQEFGHFVSCAYLEGLSDDTPSMLMRRKRLHRQFALPISRPYFRRANQMLFLGETEDAPWTPLLNTHIGLRPSGVVDGKEYLVNGNYHYYHYLQQQVQDKGWGCAYRSLQTICSWFVLQGYTNAPIPTHLEVQEYLHKINDKPAAFVGSSQWIGSTEISMCLQGFLNVDSKILHVASGAELATIASELAMHFQTQGTPVMIGGGVLAHTIIGVDYCVQTGQVKFLILDPHYTGADDLATIQIKGWCGWKGMDFWAKGSYYNLCMPQRPILY

SEQ ID NO: 25108 - DNA, 3406 bp, DROSOPHILA
cactgaggcaggcaccaatacaggcttagcgtaattgtaaaaaaatgccacttccattatccatcgtttttttttatcattttcgtgagtcaatcgatggacaaagattgcggtatttctcttccggcttcaagtttaccgttagccaattgcgactctcttttctttgcacatttcactaatcagtggacatttctgatttgattggatcagaattttcattttgatttcgttttgagctggggtttccaggaaaattccttagcacttgcacacacgcacacacgctcaggttttcgaaagcctacgtttttccattttcggaaacttactgctcgccaaatgcgcttggtgggcggcgacttaattagccagccctcgtagaaagtgcgatccattattttgcagcgctcgacgcaatttacttcgatttatttcactccactccgcgcacaccaactagaggtgggcctcacgcttgcgatagatcttccgaggcaatatcgaataagtattcgataggcttaagctaagtctaagatatatcgaaataaaagatgcgaacgcttatattcggcggaaagttattattatttatatatttgtttggtgtaagccccattgcttcaaaacttgaacttagtgtaatataccgtttgcttcaaattgttttagattagtgtgaccgtagttgacattacccaacactggcactatttataattttgagttgtaaaaattaagtatttacaatcttgtaaaaaacaaaacaaaaccttttttggttgccatatgaaacgtgttcaatctagtattttaaaaataagtccacaaatagcccatataaaatatgtatacatatttcaaaaaacacaagtatttctttgtttgaaaacaagaatttgcagataacataagtatttacctaataaatcagcataataaatccaaacaaaagctaataactaaaatcttaaaaactttaaatgcaaacgaagtatagttttacaaatacgttttattctgccgtgtcaagcgtatgcctagaacatacagattatccatgtagaatagcaatttcttccacgacgccgcacagcagagcacgaccactacccagatctcaggcggaacctgcgccacgccggaatcctgctgcagccagagcttacttgtccttgctgtcgcccttgccaccacggatcctaccggtacgacgggcagcgatgagaccgaccttgcgaccggcggatgtgcctcgcttgacggtggaggccttaccaatgtgctgatggttaccaccaccgtgaggatgctccacggggttcatggccacaccacgcaccttaggccagctgttgcgcttcaccttgtacttgtggtaggcacgaccggccttcaggatgggcttgtcgatacgaccgccgccggcgacgatgccaaccatggcgcggttggccgagggcacgaccttcttggcgccggatggcagcttgacacgcgtcttcttggtgtcctggttgtgggcaatcacggtggcgtagttgccagaggtgcgggccaaacggccgcgatcaccggtcttctcctccaggttgcagatgatggtaccctcgggcatctggctgaggggcatcacgttgccgatctgaagggtggccttgcggccgcagtacacgaactggccggtgtgcatgccctcgggggcgatgaacagctccttgcggatcttgtagcggtaggggtcgcggaagtggacgacggccagaggagcgccacggccgggatcgtggatgatgtcctgaaacatggaagaagtacgattcgcttagttacacttcaaaagcagttaagccaagtgagctaagtaacttctagtaagctggcacaggtgctcaagcacgtctcttgaatgtggcatggccaaatgcaagtgatctcatccacattaaacggataggtgtagttggtgatcctaggagcacgttactcaccttgacaactccgcggatgtagccggaacgctcggcgaagtccagggaacgcagcttggcggctcccttgcgcttcttcacgtgcgccttgaacacggaaccagctcccttacgctgtgcacgaataacgcgacccattgctgcaagacaaattcacgggattagtactcgaactccatattgcaaatgcggcggtttcactaaataagatggccatcttcaatgcaacacgctacggaatttcgatcttattcgaatattttgacggaaaattgaaatattccatgttacacggttataatgttaaattgcgcactgtaaacaatttccgcaattgaaaacaccaccaaatttacaaaatttagcacgtggcttaccgtaaaattaaaattgcccaatacgaccactccggaaacggggcgaaaagaaaagaaaagaggaagacatcctagaggtgggcagggaatagtgtggctgtgtttggcgtctggcgtcgtgactaacgtgctgctggggaaagagctgtttctcactgctattttgggtattcgcgaaattgttaatttgctaataataataaataaaataataaaatttatcatattaaatcttcaaattcagttttcggaagttttactaatcagtagctcacttgcccagaaaatttggtttgatttcaatcttcgcaaggtcaatttcgctgaaatctgctttacctaatcgaaacgtttctaaactggataattttaatataagttaatcgattttatatatgtatataataattcaattagatgtatgaataattcgagttgagctggaaagttgtgtcgagcacttgccaattggatgagaagtgaaaaaggcgacccaatcagaaataaaatagagagtgaaaagaaaccagtggaaatattccgaagccgaaagatattttggactatgctatgcgttccactggcgtacatttttagacgtctttatttaacacatctaatcttcgaccatacatatcttattcttatattccaattctgattattatataactttaataggaaatgactcaacgatttgtgttaccctatgaaataaaatattaaatatgttaatattttttattttcccagcctcttttttctaattggaattagtaaatgtctataatctaatttattgattacagttgcaaatttgttaatttgctattctgaaagagaagaatatacgggcacacgaattggccttttacggctcgatatgtttgcggtatgtgcgcagaaatgagaacggtaatcgcggggtatttttcagttcgcgatggaataagctgccatcggctaattggtcacactgttggaatccgtcggggttttggcgtcgcgtaaaacggaaaaccgttctgattttca

SEQ ID NO: 25109 - DNA, 1151 bp, DROSOPHILA
ccggagtggtcgtattgggcaattttaattttacgtgcgcaatttaacattataaccgtgtaacatggaatatttcaattttccgtcaaaatattcgaataagatcgaaattccgtagcgtgttgcattgaagatggccatcttatttagtgaaaccgccgcatttgcaatatggagttcgagtactaatcccgtgaatttgtcttgcagcaatgggtcgcgttattcgtgcacagcgtaagggagctggttccgtgttcaaggcgcacgtgaagaagcgcaagggagccgccaagctgcgttccctggacttcgccgagcgttccggctacatccgcggagttgtcaaggacatcatccacgatcccggccgtggcgctcctctggccgtcgtccacttccgcgacccctaccgctacaagatccgcaaggagctgttcatcgcccccgagggcatgcacaccggccagttcgtgtactgcggccgcaaggccacccttcagatcggcaacgtgatgcccctcagccagatgcccgagggtaccatcatctgcaacctggaggagaagaccggtgatcgcggccgtttggcccgcacctctggcaactacgccaccgtgattgcccacaaccaggacaccaagaagacgcgtgtcaagctgccatccggcgccaagaaggtcgtgccctcggccaaccgcgccatggttggcatcgtcgccggcggcggtcgtatcgacaagcccatcctgaaggccggtcgtgcctaccacaagtacaaggtgaagcgcaacagctggcctaaggtgcgtggtgtggccatgaaccccgtggagcatcctcacggtggtggtaaccatcagcacattggtaaggcctccaccgtcaagcgaggcacatccgccggtcgcaaggtcggtctcatcgctgcccgtcgtaccggtaggatccgtggtggcaagggcgacagcaaggacaagtaagctctggctgcagcaggattccggcgtggcgcaggttccgcctgagatctgggtagtggtcgtgctctgctgtgcggcgtcgtggaagaaattgctattctacatggataatctgtatgttctaggcatacgcttgacacggcagaataaaacgtatttgtaaaacta

SEQ ID NO: 25110 - protein, 256 aa, DROSOPHILA; identical to SEQ ID NO: 705

SEQ ID NO: 25111 - DNA, 5438 bp, DROSOPHILA
cgagtgcatctcgtgcgattcgtgggagaagttcagacggaatatgttcactccgcgcattatcatggtgtatatggtgtccgcgttccgggaactgaccgatatggttgcgatcagggaaacgaggcgctggtgggacgcctgctgggcaagatccagctcgcagatgtggctcagctgtgtggagccctcctttagcacggatttcgcggacaacgacatggttgtaaattttggataagaggaataacttaaaattttgggcaactaccattaaaatcaatcactctgcagttataaaaaaaactctgtgacgttttacgaacaggtaagtaagctgtttattaaaaagcaatacatttttacaaatcaattgttgaattgcagagcttaccaaactgtaaagtgcctaaaggtatgctatattccatggacttcctacaaaccaattacattttcgacacaacgttttaccattttttaattagttaggatattttctaagaccctacattccatattgtaactcagatacttggttttctatacagtaatgtgcattatgcactccgatgagtttgtggtacgctgcccctatgaaaaatgcatatcttacattatattaattatgttttattttgcgattttcatgttttctgctaataactcaaaacacgctacttaaacaatgcaaatcactactttacgtttaaagatagctattaaattaattgaagccattggctaactacctacatacttcgagagcttaagtacattgactttagcttttaactatcaactagtggcagctcaggcactacaggtaactacgattaaatgacaacgctaatgtaaatgctttgcaaaatgagtttaaattagttggagagaaatgtagttggatggttggatgctagctgaaatggagcgaaatggagtctacgtctaatttgtccgatgtaacgtaaatgtaacttggctaattctattcgcctctctatctgcagccacatgactccaccaccatgttgggcagcgtcttcaccgtcgccgtgttgctcgagtccatcacgaccagctgcagcgaggaatactgtttggcggtgcagcagggcaccaactccagcgacttgttagcaccgctcgtggagagaattttctgcaagggaagaggatatacattagtttcatcatcaacacatcagttcctgtcgaatggggtacctaccattatggaactgtggtgggaggccgcttgcgtaacactcgccaccgagctacaggatccgcgacagaagtaggcattgtagccctccggcttcaggatccagttgctccagccgatgtcccggaatgatatgtacaggtgctcccgacagcactcggtcattccgctggagcagttgatgctgcgcttctggcgactcttgcgccgcctgttctgcatgtcgatcacgatgaatggccggtaatccttgtccaccgaaatgatctcctccatgtcgctgacatcgcagccaccgcaggtgatttggatgaggtggctcagctcgtggccactgatccagtgtttgatgggccactcaatgtcgatcttcatccactcatctgaaagtatgcgaaaggaaaggcagagcggttagttgggggttccacagagccatcttctcttctcccagaatcgtagatcccatctttcttatctggtaactgaccccaggaactcacaactgtgctgggttgtggccaaagttcagtttttgcacccacgaataatgctttgtcaagttattcacccacatgaatttcagattcgagccgagctatcaagcagtgctatcacgaatctgcgcaatgatctgtctaattgaaaacacaaacaagcggttgtcaacgttggcacttatcggcgttctttataatttttataatacccatctagtatagacatgtcacatattttgatttgtcccccgagggtattgagggtcagttttggccgttccgcggctgccgaccaaaggtccaaacgtgtgcgattcttttctgggcatgattacgctctggggggatgagtgtttatgctatactaatgtatactatgtgtacccaccttgcacattcaccgactggatggctatggtcttggccgccgacaaatacttggagtccttctgctgatccacctccacctcggagactacgatcgtctgctgggcactggtgctgttcaccgatgccgtgtcggtgcggttctgtttgttcttgaagagccacaggacggcggtgctcacgtcgaagccctcggcatctgcgtcgtctatcttgaaggtgaagcacatggacggattggattttccatctctcgctcggttgcactcgacctcctctgtaaaaataaaggataaagggttgtgttagcaaaatcagaatggtaaaaggattccctttgaagttaagcttcaatctttactttctagtgcttaaatctagatttgcttacctctattgagcagtatgaacttcttgctagtgcgagcgtagtaatcgtccagctccttgttcttggtgctatcgtccggatgggagagtgtcatcccgtcgaagatgggcttgggcagctccacggccgacaccttggggctctccttgaggcgcagcttctccaggatctgctgcttaacgaactcgatgcgtaagtgggtcagctgctcctcggtgatgtgctccacttggcgattgctctcgcacttggggcatcctccggcgctggacttcaccgaaatggtgatgttcctctcacccaatgggagctctggctctatgggcgtttccggctgctgatctaggtccagatcgagatcgagatccttctcctgattctgctggtcctcggccatcagttcgttgcgcacaaagtccagcggcgacagatcatcaaagtgatcatcggaggagagggatgactcctcgggggcatctccgtacatgataggcaactccacgggcgggctcacatgtcggtgtgccttctcctcctgctccatgaggtgttgccacaggcggggcacctttagctgctccgaatgggagccgggatggttgtagctgagctcctgctgcaggaggtgctgcctcttgtggatgacgtggcgcctcaggcgggcatagtactcccgcttggtgatcggtacatcgtcctcctcgctggtcggatccggttccaggtgtttcagctgacgggatcgttgctgccggatatggtgttgctgctgcagctgttgcgaggtgtgctgcacatggggatgcggctggtgcttaggatgcggacgaaggatgtcgccacgggaactcggatgggagcgggcgtgcaggcgattgtatacgttcctgttctccagggccagacacaccagcaacaccagggctataaagtacttggccatttctgaatatgtacttatgacttctctttttttttaactgtgagatattttatatgtatcttatgatcttctggatcgcctttggtttcactcttgttttgtcggctggggctgattgctatctgtttggcagcattaaaacatcaatttttccggctttcaggtttacaaaactcatagaattgcagctggtttcacttattgttgccgttttatagccttgtttaagcacttttaaaacgtttatgcgttttttatgattttatataacaacgacttatacgcttgaatgatgcatgttcaatattttaaacttttcgttaagtttcgtctgcaaataagaagaaatttgtaacttagttaatattgtaagcacattccgattattaatcaaataaattaaaacagctatgccctaaattttctcataaatatttgcgaacgcgctgccccaattaaaatgcaatttaatatgccagcggatcaggtgcatttatcactatcactcactaagcccgaagtctcgcttaatttttgcaccaaattgcatcatttattccatatcgttgagctcgaattggcaggtggcaaagtgcaaatcgtttttttgacattaattccgggaagatttagtttagttcagtattcaatttcacattatcacatgggctatttgccccaagtgcgactcaaatcgaaagcgtagttgcgcagatccgctgataagcgggctcaattagatggcaattaggtggacgtggaccccacacgtaccgtggtgagcacactccgatttgctccaatgggatctgaatctgctcagccggatgaatccggcgggggttgcggcattaactttgaacccggacacgaaacacgagtggcacgggcctttagctatagctgggatcgcgcgtctatatagtattccacttgtggtatggtctatgatatagtatggtgcttctttctcttccgacatgcggcagcgcaaacgagttgtgaatgaatgaagcggttggctgattagtagaacaatttatgtgacgatcgccgagcgtttgattgatcgttccgcgagcgccagccgaaccgaaccgaaccgaaccgaaacaatccgaaccactcgaatcgcatcgtatctgacggatcgtttcgtatcggttgcggactcggatccaagccgagcggttcgggtctcgatttatgactatagaccatggttatggctacatggcgctctctctttagccgaagacaattggatatgcaagtggggtgcagcattgcatcagcttcttgaaaacgccaagccaccgaattgcataaaattcttaattgcaattttatttttaacctcccgccaccctgacaatgccacgcccccagttggcggcgtcactatctgttggcatttttggcactcgcttggccacaatggggcattttgatatcaagtgaatttatgatcgcttcaaaccgaatcgaatcgaatcgaatcgagtcgagtggcccattcatgctaattaccccgcagcgttatcaagcttgactttgatgatccgactcgattgtgtgtcaatcaattaatagtgaacacgttgctgataaggggcggtttcccacttttggtccacaaatcgggagcatggaatatgtagtgcggcatttaaccaattaagtacgcttagcatgcgattctgggcaatcctaatcggattcggttaatagatgcgcatttcaaatacatagtgtgtctgttttccaatttaaatgcgaatgggaaattcatgagtatttcggttgggaatttcatcagccagaatttctggtctcggctaaatgtgaagcagtcgagtaaggtcaagaaaagtattttgaaggccggcagatcacgagttatattataccgcctattcgatttagccttaaatgctgaacacgtgcccgattcgcttgtcacgaactgtgatttttctgaacccaatt

SEQ ID NO: 25112 - DNA, 2307 bp, DROSOPHILA
ctgccgcatgtcggaagagaaagaagcaccatactatatcatagaccataccacaagtggaatactatatagacgcgcgatcccagctatagctaaaggcccgtgccactcgtgtttcgtgtccgggttcaaagttaatgccgcaacccccgccggattcatccggctgagcagattcagatcccattggagcaaatcggagtgtgctcaccacgacgaaacttaacgaaaagtttaaaatattgaacatgcatcattcaagcgtataagtcgttgttatataaaatcataaaaaacgcataaacgttttaaaagtgcttaaacaaggctataaaacggcaacaataagtgaaaccagctgcaattctatgagttttgtaaacctgaaagccggaaaaattgatgttttaatgctgccaaacagatagcaatcagccccagccgacaaaacaagagtgaaaccaaaggcgatccagaagatcataagatacatataaaatatctcacagttaaaaaaaaagagaagtcataagtacatattcagaaatggccaagtactttatagccctggtgttgctggtgtgtctggccctggagaacaggaacgtatacaatcgcctgcacgcccgctcccatccgagttcccgtggcgacatccttcgtccgcatcctaagcaccagccgcatccccatgtgcagcacacctcgcaacagctgcagcagcaacaccatatccggcagcaacgatcccgtcagctgaaacacctggaaccggatccgaccagcgaggaggacgatgtaccgatcaccaagcgggagtactatgcccgcctgaggcgccacgtcatccacaagaggcagcacctcctgcagcaggagctcagctacaaccatcccggctcccattcggagcagctaaaggtgccccgcctgtggcaacacctcatggagcaggaggagaaggcacaccgacatgtgagcccgcccgtggagttgcctatcatgtacggagatgcccccgaggagtcatccctctcctccgatgatcactttgatgatctgtcgccgctggactttgtgcgcaacgaactgatggccgaggaccagcagaatcaggagaaggatctcgatctcgatctggacctagatcagcagccggaaacgcccatagagccagagctcccattgggtgagaggaacatcaccatttcggtgaagtccagcgccggaggatgccccaagtgcgagagcaatcgccaagtggagcacatcaccgaggagcagctgacccacttacgcatcgagttcgttaagcagcagatcctggagaagctgcgcctcaaggagagccccaaggtgtcggccgtggagctgcccaagcccatcttcgacgggatgacactctcccatccggacgatagcaccaagaacaaggagctggacgattactacgctcgcactagcaagaagttcatactgctcaatagagaggaggtcgagtgcaaccgagcgagagatggaaaatccaatccgtccatgtgcttcaccttcaagatagacgacgcagatgccgagggcttcgacgtgagcaccgccgtcctgtggctcttcaagaacaaacagaaccgcaccgacacggcatcggtgaacagcaccagtgcccagcagacgatcgtagtctccgaggtggaggtggatcagcagaaggactccaagtatttgtcggcggccaagaccatagccatccagtcggtgaatgtgcaagatgagtggatgaagatcgacattgagtggcccatcaaacactggatcagtggccacgagctgagccacctcatccaaatcacctgcggtggctgcgatgtcagcgacatggaggagatcatttcggtggacaaggattaccggccattcatcgtgatcgacatgcagaacaggcggcgcaagagtcgccagaagcgcagcatcaactgctccagcggaatgaccgagtgctgtcgggagcacctgtacatatcattccgggacatcggctggagcaactggatcctgaagccggagggctacaatgcctacttctgtcgcggatcctgtagctcggtggcgagtgttacgcaagcggcctcccaccacagttccataatgaaaattctctccacgagcggtgctaacaagtcgctggagttggtgccctgctgcaccgccaaacagtattcctcgctgcagctggtcgtgatggactcgagcaacacggcgacggtgaagacgctgcccaacatggtggtggagtcatgtggctgcagatag

SEQ ID NO: 25113 - protein, 586 aa, DROSOPHILA
MAKYFIALVLLVCLALENRNVYNRLHARSHPSSRGDILRPHPKHQPHPHVQHTSQQLQQQHHIRQQRSRQLKHLEPDPTSEEDDVPITKREYYARLRRHVIHKRQHLLQQELSYNHPGSHSEQLKVPRLWQHLMEQEEKAHRHVSPPVELPIMYGDAPEESSLSSDDHFDDLSPLDFVRNELMAEDQQNQEKDLDLDLDLDQQPETPIEPELPLGERNITISVKSSAGGCPKCESNRQVEHITEEQLTHLRIEFVKQQILEKLRLKESPKVSAVELPKPIFDGMTLSHPDDSTKNKELDDYYARTSKKFILLNREEVECNRARDGKSNPSMCFTFKIDDADAEGFDVSTAVLWLFKNKQNRTDTASVNSTSAQQTIVVSEVEVDQQKDSKYLSAAKTIAIQSVNVQDEWMKIDIEWPIKHWISGHELSHLIQITCGGCDVSDMEEIISVDKDYRPFIVIDMQNRRRKSRQKRSINCSSGMTECCREHLYISFRDIGWSNWILKPEGYNAYFCRGSCSSVASVTQAASHHSSIMKILSTSGANKSLELVPCCTAKQYSSLQLVVMDSSNTATVKTLPNMVVESCGCR

SEQ ID NO: 25114 - DNA, 4950 bp, DROSOPHILA
gtggcaccatcgagcccctcaaagaggagcacattttcgtggtcctcgacgccgctactgccgtgtccaccgtccgtgccgcgacccgttaatggcggcgaatgcggtcgatgatccaaatggatgtcgtcggcgtgggcatggccatcctcctccgcgacgaccatgttgcaggaggaggaggcggttaggggcaacgcccacacactgcgcgccgcccccggacttggatgcaccttcgaggccatgtagaactcgaagtccacgcccagacggtccgccgttccaccgttgccttgatgcagggggttttccagtaggtgtgcaatcttgtcgcctttttccgttacgctccgaccgaaatttgtactctgtttggccaatcttaggcgtggaatgctaggtaaacacgactgcactcgatggcgaggaaattatgtcagcactgtgagaaaatcaatatttgtcccgaatcgcaggactcgaattggggccactttcgaactcgacttggcgccaaacaaatcaacagctgaccgttattttcgcagttgggcgcgcagtgttgccaacacatactggtaattaagacttttctcagcgaggggtgatttaagatttaagtcaagaagtattaaagaaaaaatatatatatttaatttgttggaaggtcaattgttgaaaccgaggtatcatttagcttaacttaaatatactagaaatctcgtggcataagcaaactaaaaaaaaaaggtttatcaactgacttttatattagttttaacattattgggaaacatttgttttccgccgctagaaacctttaaaatgtatactactatattgcttggtacgaatgttgcattttgaactgatgctagcattgcattttgtaaggttcccatgtctctgttattttgccacctggtaacactgtgcccctttttgataaatttgtttcgtaaaaaatgggcgacaacgtggtgacggaactaaataacttggatttgaacaatcaaaaggcatgttaaactcttttcgaactgcattcgagtgtatgagaagtgctagttagccgaattatgttgaagttggcgccgcagggcggcagatattatagccaaataagccgcatttgccagtggattttgccgaaaattcagacgcagtcgaagccaccaaaacaacaacaacaacagcaaccacaattgaaagaacaacaacaacacagctacgcaactttggttggtgttttaagctaaaaagaattgacctaaacttcaatttaaacgcctgttactgctggcacgtgtaaatgttatgcttgtctgtgtgagtgtatgcgattctccaatgaatcagtgccgccggctgtgacgtcactaacaaccaaccaacttcatgagtgtctgtttttttttgctactctattgcatcagccataaaacgacgaagatacgctcaaagacggctcgataaaacagagataggagcaccgaaaacatagcaccgaaaagtgctcattgccatgtccccaattgtttaaacaataagaaaacatcagtcgaaagtagataccgaaaaagagcatttgtctaattgcatacgtagcacacttgtggccacttgaatatctccggtttatattgatttttaacctatttccgatggatttgcaggctgccaagatgaagaaggagaaaaaggagaagccatccggcggtggagatactcgcaagggtaagtaattctaactaagaattaaaaacacaaaacgcacttccgtctgtaagatatgtagcatatctttaagattagctgccttcttctctctaatacctgaaattccactgatctctgctatattgatttcagaactcagtcccttgcccaagtacatcgaggagcgcaatgtcttctgggagaagtgcaaggcggaatacgaggccgaactggcggccaagaagcgtgagcccatcaaggtgacactgcccgatggcaagcaggtggacgccacctcctgggagaccactccgtacgaagtggcccgcggcattagtcagggtctcgctgacaacaccgtcatctccaaggtgaacggcgaggtgtgggatttggaccgtgtgctcgagggaaactgcaccctgcagcttctcaagttcgacgaccctgaggcgcaggccgtcttctggcacagctctgcccacatcatgggtgaggccatggagcgcatctatggtggacacctgtgctacggtccgcccattgaaaacggcttctactacgacatgcatctggagggcgagggtgtaagtaatttgtgatgttcagtaagaattaaattaaattgaacgcccaattagatctccaccaacgactacggcgccatggagggtctggttaagcaaattgtcaaggagaagcagaacttcgaacgtctggagatgaagaagtccgacctgctggagatgttcaaatacaatgagttcaaggtgcgcattctcaacgagaaggtgaccaccgaccgcaccactgtctacaagtgcggttctttgatcgatctctgccgcggacctcatgttcgtcacaccggcaaggtgaaggccctgaagatcaccaagaactcctctacctactgggagggtaaggctgacgctgagacactgcaacgcgtctacggcatctcgttccccgacccgaagcagctcaaggagtgggagaaacttcaggaggaggcggctaagcgtgatcaccgcaaaatcggtcgcgagcaggagctgttcttcttccatgaactttcgcctggctcatgctttttccagccgcgaggagcgcacatctacaacaccctgatgggcttcatcaaggcggaatatagaaagcgtggtttccaagaagtcatttcccccaacatctacaacgctaagttgtggatgacctccggccactggcagcactatgccgagaacatgttctccttcgaggccgagaaggagaagttcgccctcaagcccatgaattgtccaggacattgtctcatcttcgataaccgcaatcgatcctggcgagagctgccactgcgaatggccgacttcggtgtgcttcatcgcaacgagctctccggtgctttaaccggattaactcgcgtgcgtcgcttccagcaggacgatgcgcacatcttctgtgcccccgagcagattaaaagcgaaatgaagggctgcctggagttcctgaagtatgtgtataccattttcggattctccttccagctggtgctgtccacacgcccggataattaccttggcgagttggaacagtggaatgatgcggaaaaggcgctggctgaatcactcaacgagtttggaatgccgtggaaggagaaccccggcgatggcgccttctacggaccgaagattgatattaccattatggatgcactgaagcgtgcccatcagtgcgccaccatccagttggacttccagctgccaattcgttttaatctcagctacatcgccgacgatggcgagaagaagaggccggtgatcatccatcgcgctattcttggctcagtggagcggatgattgccattctcacggagaactttgctggcaagtggcccttctggctatcaccgcgccaggtgatggtcgttccagtgggtcctgcctatgatcagtacgcccagtcagtgcgggatcagttgcacgatgctggattcatgagcgaggcggattgcgatgccggcgacacgatgaacaagaagatacgcaatgctcagttggcccagttcaacttcattctggtggtgggcgacaaggagcgctcctcgaataccgttaacgtgcgcactcgggacaacaaggtgcacggcgaggtctccgtggcggaactcatcacaaagctgcaaaagattcgcgacgaattcatcgccaacgaggacagcttctaagactctatttcgaactatttatcaaaagtatacttaacatttgcatagcaaagcaagtacgcatttttgttctttctatgtatttacgcttacgaaaccggaattcacaaataaaaaaccaaatccaaacacattttaaggtgtttcaaatagaagagaagagcatgcaatcaaataaaagcaattcgattcaatatacgattattaagcttccccaactaaaaatcgtatttttctgatccaccttaagccgcctatttcactccagtttcttgacgaatcagtggaatttgtcagcaattgaggactagtcatgccgacacagaggtgcgctgtagtccattcaggaacgatttggaatgataagataagtcggcccacatttggcggaaaactttttgggaaaggtgtgcgtgcacccacaacgtatgagtcatgttttgaatttatttttttgtattaatttattgctagtatcttgtatacttttcattttcataatttgatttattaaaaattgcatcaatagtttatgtttttattcaattatcaattttgtaagcttttgcttttcgcgtaaaaaatgcacaaagttctctcgctaatcgaagcaaaaatcgttaataatattgttaagtgtttgctctgctcgtgctctgcttatctgtttcagttttagtcataaaaatacatattttatatttgtgtatatttattcataagatgcacgtggccaagtcctatgccatccacagttccagttagcagtcgcgttcgctgtgctaaaaaaaaaaccgaaatcctaaccaaaactggcgaaacaaaagccgcaaacagaacagaacgggggctaaaattggaaacaaaatgcctggctggtggaatcattgaacacagactggctgcgtggtatctacgactgctggagatgccgagagctggaatgtcggaggatcctgggaccgcctggcctgacataagtacatggtcttgggttttt

SEQ ID NO: 25115 - DNA, 2326 bp, DROSOPHILA
cttggatttgaacaatcaaaaggcatgttaaactcttttcgaactgcattcgagtgtatgagaagtgctagttagccgaattatgttgaagttggcgccgcagggcggcagatattatagccaaataagccgcatttgccagtggattttgccgaaaattcagacgcagtcgaagccaccaaaacaacaacaacaacagcaaccacaattgaaagaacaacaacaacacagctacgcaactttggctgccaagatgaagaaggagaaaaaggagaagccatccggcggtggagatactcgcaaggaactcagtcccttgcccaagtacatcgaggagcgcaatgtcttctgggagaagtgcaaggcggaatacgaggccgaactggcggccaagaagcgtgagcccatcaaggtgacactgcccgatggcaagcaggtggacgccacctcctgggagaccactccgtacgaagtggcccgcggcattagtcagggtctcgctgacaacaccgtcatctccaaggtgaacggcgaggtgtgggatttggaccgtgtgctcgagggaaactgcaccctgcagcttctcaagttcgacgaccctgaggcgcaggccgtcttctggcacagctctgcccacatcatgggtgaggccatggagcgcatctatggtggacacctgtgctacggtccgcccattgaaaacggcttctactacgacatgcatctggagggcgagggtatctccaccaacgactacggcgccatggagggtctggttaagcaaattgtcaaggagaagcagaacttcgaacgtctggagatgaagaagtccgacctgctggagatgttcaaatacaatgagttcaaggtgcgcattctcaacgagaaggtgaccaccgaccgcaccactgtctacaagtgcggttctttgatcgatctctgccgcggacctcatgttcgtcacaccggcaaggtgaaggccctgaagatcaccaagaactcctctacctactgggagggtaaggctgacgctgagacactgcaacgcgtctacggcatctcgttccccgacccgaagcagctcaaggagtgggagaaacttcaggaggaggcggctaagcgtgatcaccgcaaaatcggtcgcgagcaggagctgttcttcttccatgaactttcgcctggctcatgctttttccagccgcgaggagcgcacatctacaacaccctgatgggcttcatcaaggcggaatatagaaagcgtggtttccaagaagtcatttcccccaacatctacaacgctaagttgtggatgacctccggccactggcagcactatgccgagaacatgttctccttcgaggccgagaaggagaagttcgccctcaagcccatgaattgtccaggacattgtctcatcttcgataaccgcaatcgatcctggcgagagctgccactgcgaatggccgacttcggtgtgcttcatcgcaacgagctctccggtgctttaaccggattaactcgcgtgcgtcgcttccagcaggacgatgcgcacatcttctgtgcccccgagcagattaaaagcgaaatgaagggctgcctggagttcctgaagtatgtgtataccattttcggattctccttccagctggtgctgtccacacgcccggataattaccttggcgagttggaacagtggaatgatgcggaaaaggcgctggctgaatcactcaacgagtttggaatgccgtggaaggagaaccccggcgatggcgccttctacggaccgaagattgatattaccattatggatgcactgaagcgtgcccatcagtgcgccaccatccagttggacttccagctgccaattcgttttaatctcagctacatcgccgacgatggcgagaagaagaggccggtgatcatccatcgcgctattcttggctcagtggagcggatgattgccattctcacggagaactttgctggcaagtggcccttctggctatcaccgcgccaggtgatggtcgttccagtgggtcctgcctatgatcagtacgcccagtcagtgcgggatcagttgcacgatgctggattcatgagcgaggcggattgcgatgccggcgacacgatgaacaagaagatacgcaatgctcagttggcccagttcaacttcattctggtggtgggcgacaaggagcgctcctcgaataccgttaacgtgcgcactcgggacaacaaggtgcacggcgaggtctccgtggcggaactcatcacaaagctgcaaaagattcgcgacgaattcatcgccaacgaggacagcttctaa

SEQ ID NO: 25116 - protein, 690 aa, DROSOPHILA; identical to SEQ ID NO: 11106

SEQ ID NO: 25117 - DNA, 2560 bp, DROSOPHILA
caaccggcccaaacgcctttcactgcgagctgtgcaatctggaccttacctcctctatgcacgcccgccagcactatttaggtcggaagcacaagcgtgtggagcagggcgtcgcgaagccctccggagccaggcactgtgatacatctgttggtcgttacggcatagggagtctgttccgcaagccggaaagtttaaccaaagattcccctacggacgtattaatatcagagaacagcgtgatcaagtctgacgataatgagcgcacctgccacctgtgtaaaatagtggtcacctctgctgcacaaatgcaggcccacttggctggagccaggcaccaaaagaactggaggacctcccggcaggatcagaatcattcggaggcgccgatccctgaaacggagaaattagatgccgcggaactggccttgtatcgcactccaatgggtcagtactactgccagccctgcaacatgatgatgaaccatgagagcaccttgcaacagcactttattggcaagaagcacctgaagagggtaaaaaacctttcccaaactgagaagaacgtgtaaagaatttatttgatataccctaagcctaagccatgacttcccgttagcagtaaagcttccttaataataatgacattcgagtttgggaaacagctattttgtttaagaaaggcattataaaaaccgtaatttgttatcatacccattactcatagaggggtatattaaactcgttaaaaggaatacaaatttctatcgatatgccaagataattttgaaatttctctctcaaactcactcccactatctggtatctgatagtcgagaaattcgactataacattctttcttgtttaaaaaaattgtctaaatttagggattcaaaagtggtttaccgatgataagctttcttgagccccacttaatatgatcacaaggtttaatttcttttctgcatttatttttaaaattattcgccgttgttatttcgtagataaatcggtagtggtcaacttttttttattaactgtcaggccaaaaacaaatggaatttaaaatagttcaaatcaaattcgaatacgaaaataagtgttgtattttgaaaaagaaaaaaaattcgtaatttcacaccatggccgaggagatagaggttgaggagacggaggacttccacgacatggacttcaatgacgaagagccatcctgtagtggaggagctgtccaggccaggacggagcgctttgtggtgaagaaatgggttgcgcacgccatgtggggatgggacgtagcagtggacaactgtgccatctgccgtaaccacatcatgaacctgtgcatcgagtgccaggcggacccgaatgcaaaccaagacgagtgcactgtggcttggggcgagtgcaaccacgcattccattaccactgcatcgcgcgctggttgaaaacgcgcctggtctgtccgctggacaacaaggagtgggtctaccagaagtacggccgctagcgaggaatatggatcgggatattaggtggtgatagctgtttgctggcatgtaattactgtaattaaataagaacggacttgggttccaaaagaaggtttacgcttcctggtcgggcaggagttgctgggccgtgggcctgacgccagttatatgttcgatttgagagtaaagcgaatcgcgctcctccactaagctagcgtacttttgctgcagctccttctcgcggtccatctggcgacgcacgtcctcttgcagcgattccaggcgtcgcggcacagcgatggcctcctgttcgcccaaaaagcggaatgtcgagagtgagacagagttctgctcaatctggccgtacgtgtcctgaagctgcttaatcagcacctgggcgcgcgcctggtagccgccggtgagaatcttcagcttcttctcgatcttgccgcagcgcttggcttccttggccatgtggcggcgatttgtctccagccgtttctcggcagactctaatcgatccttcttgctggccaaattggcgcgtgtgtagcgatgttgggagggtaggtaaagaacctggccgaggcactcctgccacacctgggcataaacgtctaggggcagttcgccatgcgccatgcgctccttcaccacctccatttcctcggtgagcatttgcttggccttcgccaactcttgctgcgagatgtcctcgtagggattggccttaaagtagctttgtagctgttccaacttgtgctgcgattgaccaggcacgggatccttgaccgagtcgtacactgccaagaaaaaggacgttagttacttgggttaaaatggaaacgttgggtttactcacgctgcatggtgatcatttcgtgtttaatcagctcttcggcctgctgctgttccgtaaggttctgtttctcggactgcggtcgcagaatcttggtgttcacttcagttggtcgcgggagactacgctgaataacctgggagcgcttctctagctctcgctttcggcgcgcctcttgttcagccaataacctggcgtcgacatcc

SEQ ID NO: 25118 - DNA, 560 bp, DROSOPHILA
cgtagataaatcggtagtggtcaacttttttttattaactgtcaggccaaaaacaaatggaatttaaaatagttcaaatcaaattcgaatacgaaaataagtgttgtattttgaaaaagaaaaaaaattcgtaatttcacaccatggccgaggagatagaggttgaggagacggaggacttccacgacatggacttcaatgacgaagagccatcctgtagtggaggagctgtccaggccaggacggagcgctttgtggtgaagaaatgggttgcgcacgccatgtggggatgggacgtagcagtggacaactgtgccatctgccgtaaccacatcatgaacctgtgcatcgagtgccaggcggacccgaatgcaaaccaagacgagtgcactgtggcttggggcgagtgcaaccacgcattccattaccactgcatcgcgcgctggttgaaaacgcgcctggtctgtccgctggacaacaaggagtgggtctaccagaagtacggccgctagcgaggaatatggatcgggatattaggtggtgatagctgtttgctggca

SEQ ID NO: 25119 - protein, 122 aa, DROSOPHILA
MAEEIEVEETEDFHDMDFNDEEPSCSGGAVQARTERFVVKKWVAHAMWGWDVAVDNCAICRNHIMNLCIECQADPNANQDECTVAWGECNHAFHYHCIARWLKTRLVCPLDNKEWVYQKYGR

SEQ ID NO: 25120 - DNA, 11098 bp, DROSOPHILA
cgtgatgcagtgcgttgctctccaagcaatctataaatacgtatactctagatctacttagttttatggcttcacacttaagtacctacagtgctagaaaagactggacgaggacaagagatcggcaacattgccgtggtcacatcacaaggttggaatttcacttttctatggcaaagtaaaaataaatttcgcattagtgctaggtaaatgaggcgtctctcttctttccaactggtgttatctggtcttcggattgtgcgaggtggtcatagtcatgtgagtggcgaatgctaaaagcatttccatcacttctcacctctgacgtcggcggatggtggagttgagcaaagtcggaggcccggctggagccccttgaggtgcaatgaaaatctgctctggtcgtagcattttatattaactaagtttttaattttctcattttcagtttgtttgttgttgtttgcttgcttggttggttggttggttggttggttgtgtgtgtgtggttttgcattataactgtagtacatggggatcttaggtggtaatagatgatatatattttaatattaatagataatgtgtaatataaatataagtttaaacttgtacacaaaaattaaaatgtcgaacgtctcgtcgtctctcagatcagtttagaagagtccttcccccccacgcttcgcttcatgcaacttcctcctctctgcctcatcatcatcatgactgttcgtacaaataagctagaagattcgagagaagaacgaagcgaggcacgtcatctatctgcggggcggggaccttttcaaaatgtatatacatactgcaacacacatttggatactcgtagttctcgtataaatagtttagtttttaactaatttacatagtcatcatgctgacgatgcgctctggcggcttcttcataatatgctttaaatatagttaaatatatatgtatgtatgtggtatattttagtagtagctacaacttcaacttatgtgcacactccaaaacgtatgtaactaaaatccgtaactagtatctctagtgaatctatgccgttagcgttatgtgtatcgcgtatcctgtagccgcagcaagtgacgctggcttgtccctcgttttatcaggtcaggtggtcaacggcttcaacggcgacggcttttgccactctgcttttccctcaccatccgccccaatttctgattattttcttgttctgcataccgacatccgacttacagaagtaaaggagcgggaccgtgaggcgccaatgtcgcgttcggcttaaaaacgaaactaatgttaaagcgctgtcaatgctgcaaacgttgcgagattaggtttttggttgatccaacatgctctttaatctgcaaagacaaaaacaaattattaaaatattatcataatgttactctaaacattttcaatccattgatctggaaaatcacgtacctatgacatgactctccatatttgtgatgcgtggcttcgatgcgggctgtggtatgatggtgatctcatcgttgatcttaagcggcttcaacagagagtcattggccgctcccagcgaactgcgcgacatccctgccccagatcccgacccgctggactgcgcactgttcttcttgctgtccatcgcttttctggccacggtactgtgggcggtgtaaacgtgcgtctcaaactgtttgtacatgccgaaggtcgccgtgcaaacggtacacttgtaggacaggtgagcgggcttcagggtcatatgatgatcgcgcgacacgtgattcagcagcttccattggtacatctaaagggagagcggcgattttagacattgttttcatcgtccatttatacgaaaaactcacccttccacagaccggacagcgaccagcatccttgcccttgttggcagcctcctgcatggaacttgtgaccaagccatgtgagcccagcaagtgtcgctccaatccctgatccgtaaagaaccggaactggcacttttggcaattcaaaggcggcctattgtagatcatcttggggtgaatctgttgcaaaacaaagcatttgttagcaaaggggaaaatcggggaaaatggaaactcagctctaccttcactttgtgcatccactgcatgtggttgcgcagctgctccagatccttgatgtagccatcgcagatctcgcaaataacaaattgcgccttattgttaccgctgggactctggccgggcttcattcctgctgccgcttggggcgctttgctggacgaggcacccgcaccggcgcccaccgagctctgacgaggtaatggcgttatcgagatgctgggctgtccggccatcggcttcttggatgcctgtataaatagatcgatattcgattaaaaccggtttttaatgggagagtctattttggtacagctaaacatgctacacatataccctttaaaacccaattccaatgtttaaataatttaatgtagattatagagcgtataaatgtagtttacctggacaagctgtccggctgccagctgatagctgttgggtaacgagagtcccgcattcatcgcgttgcctccgcgcacaggcgccggatttcgcactatgttctgtttgggtggctgcggggctcgctgacgcatcttggccgcattctgggcagctaacgcggctgcctggaggttattcctcgcctgcgccgccgcttgctgctgctggatgttggccaaagcggccttttgtgccgccgcctgtgctgccatagcctggaagggattaaaccgattataaacttattgcaaaagacttaggtgtagatattcctacctgataggcggtggcagtgcccacaagaccatgacgaggcttaatgcgcggtatcttagccggtgcctcccagtcgtttggcggcgccaggttaagctccggccggaacttcttagcgcagacgggctgatgtcgggccagctttgccttgccattatcctcaaagccgcagttgggacactggtggtagggcagtggctttataaggcgcgcctttatgttgtgcacagcctccatgtggtagacaatctccgtggcgttccgtatctcaaacgtgcagaagttacacttgtacagcactccgttcatgtgcggcgtctcgtagtgattagccatcgccatggcagactccgacttaaagttgcagaactcgcatcgcttcatccggaacttgaagggcgcgtttttcgtcttggatgcctgcaggttgccagagagcgcattgatggccatttcaaactccttggaattttgcacctgcgccttgcgcatcttgcgcttctgcagacgcagcagatccgactgcacgtactcctgcaccagacccacgccaatgtccatgaagaacttgcccaacggactctcaaagtagttctcctgtcctggcttgttgccgcccggattgtttaccgacactccgcccgctgttgccaaggcagcggcgggcttgatggccaccttcaaggcgctcaggtcatcgtttgcctccttgatcagcaccttagtccgtacgcccgactccgagtcgtcgtcgtcgtcttcgtcgtcatcatcgtcagactgctccgaccaggactcgtcgtcacctcgctttttctttttctttttgccgctttcatcggcctgatccgctggcttgtcctctttgttttgctcggtcatcatgtcgaactcgtcgcccttgtctgcctcggccaaatcctcagccgacagcgcatacttggtctcaattgctttgacgacctcgcagatgttttcgcgtggtggcttttcatagatgtagggtacaatgaaggagggcgcttccaggacaaacatgtcgtcagtgagaccgggcagcaggttggcgttgttggtcatgctgggcagcccggtaagcgataacgttggcggattcagctgcactggactggcgctcatgccgcccgccatgggaactagcttaggcggcacaacacccagattggtggccgctcccgtcacagcattcgttatggtcaccgggtagatagaatctcggggacccgacacagagctcggactgccatcgagaggcatcaacgagcgggcatccttaatggtcagctggcccattcccgagggcgtcgaacttcgctgtctcttgtggctgggctgttgcagctgcaggtcatctaggtcgctcttgcgcttgccgctgggcgaaatacttagcggtgtgtcatcttcaatcacgacgcagtcgtcgtcatcatcatcatcctcatcatcctgcacgggcgggggcgggatggccttgacaactggcgggagcttctttactggcggcggtggagctgcggattccgtatccgaatcggaggctatcagaacagcatcgtcggaggattcaccaccactagaggaagccggtttggctgccttttcggtgggcttggccggctccttgtgctccgtaatatcctccatttcctcgtcactatcctcatccaggttaaccacaccaccatcggagggagctattgccgccctggcctctgctatgctggcttggccgttctccttctggttgggactggccccaaacccattctcctgctttgctgggggctcttcctcgacgaccccttcgctagctacgctctcctcgccatctaggtgcgctttcttcccgctggccagttcatcgtcaggaactgtgactgctcccaggggatcttcggcctcgcagctgttttccgctgtgctaccgatcttttgggcatcgtcttcgtcctctggctcgtgatctccatctccgtttgtggtagcctcctcgtcttcttcatccagttttggctccttcgagctgctgctggtaatctgtgagtcttcgtcgtcgttctccacttcgttttcctccacgtcttcggtcccgtccacctccattatctcgtcggccactggagcttgtggagatgcctgggcaacatcctctttactgatatccttgccgcccgcggaaagcagctcgagcttttcattggagggggcctccggcaagtgcacatcttcctcctgctgctcctcgaccacctgctcttcatcgtcctccacagttgtgacctgctgctcaacatcatctgctgatggtttactctgttttggggaacttgatgcgctggcaagctttgtcgtgggctcggccacgccctccggcaaaacgacatcaacttcagtcatttgaggtccgttctctgctccgtggaatgtgcccaagtcggtttttcttccagctgtttgtgtttctgcaagagacacaataaaattgaagaattatcaaaactgagttgggaatttaaatttttacttaattttacttaatggcagcttcttcttaagaccaaccggaaaaattggcacgtaaaagaaaactaaagtatcaaaaagcaacgaatgagcagcacaaagcgcagcgggcgaagagtaaaaataaaaagagctaaaactgcagaaagaggacggcgaaggggcgaggcgaggcgaaaaattaacaatcaccgaaaaatatttgaaaatctaggtgaattaagaaggtgaactcaagaaaaggcggaccaaaaacagggcagcagcggtagggcaaggggagcgggggaagttgaaagaatggtttgatacaaaatggctgccatattggattaaaactaaaatacaatttaatatgtaatgtaagtatgtaaatggctttacactgcaagaaaaaagagaatgcagaaacgggggggggagttatggtttggcgatatatgcaatttatatactttggtattaacacacttgcctataaatatatattaaacatatatttatatatgtttatgtgaaatgtttgtatgtacaaacgaacagttaccgagcagagccaacaaaacgattgacatacatacagacacaaacgcacacacaccgcctgcacacacaaatatacaatctatatatacggcacatatatatttgtacgcttgtaagcacagggggagggacgcagggcggggggcggcacggatgacgacgtttggctttagctttattttttgtagttgtttttgttgctcggctggcggcgtggtggagtatactaccgctgttgttgctggtgttgttgttgtactttttggtacaggagcgtgtttttgcgctagtgtttgtccctgtgtgcgtgtgtgtgccgcgcttgcttgcgtatgtgtgtgtgttttttctgctgctatgttggatctcaccttacttttcaatattctaggtttctttcaaactaaagacgattttcagcggcatttagcattgtttttgttacttggcggcacttacattcacattttcccctcacaatcggcaggttgttgttttgtttcgcctcccttttggtcccttgatcacaataaacaaaaaacagagctgccaataaatgaaagatcgttttctttacgaaataaccagggaaaatccgaaaattttgcgtggggtttttttaattggagaaaaaaaactgagcagaaagaacgccgaaggcggagacacaagagacgaggaacgaacaagcaggcaaggcaaactggaaatgtgtgaggcggaaaaagcaaaaacagagttgcaacgaacagcagggcgcgcgcagggttgcacggcttatcggttatcgattaccggccatcgatagtgagccacccaaaggtgccaattgctgatttcgcaattaatttttaatttaattcatattttcgctcattttccttctctagtaacggtaatagcttttacattgccggctatggagagggctctctttcacttgaacgcctctcaaaaatagcgaataagcgtgtgaagcgcatggcccgcacacatgggcctttgtgcatgtgtgtgtgtgtgcatgaatggaatggcgtggaatgggagggaaaacaaatttgacaattgtacgcgcgccacgaacgaaatgaacaaaacaaaactgaaacggcattgcttgtcgccggttttactttgatggatttatgcgaatcggcatgtgcggaaattcaaacagagcgcgcgaaaaagtctagatggctttaaatatcgcagataaatatggcaaattgcaactcccccgccgccgcacccctctcaccaacacactcactcatactagcacacacactagcgtcttaaactgtatactcatcacgatacttttgctgatgcttcttctttctcctccaacttatttcagattacgctgtccctctctttcgcacccacggccccggggtatatacaatcgtacatatctatctatatgtatacatacaactaaatatgtatgtccgtatgtaagtcgccctatgcatgtgtgcgtgtgtgtgtgactgtgcgatttggtctatatgcaagtacaaaatttgaaagtaacccgcttctggcgcattttccatccccgtcccctgacctctgcccaccccctcccccatgatcgacaacttggtagaggtcgaagggcatccggagcaaggagcaagccacctaaccaatcgccatcatcattaaagaccccgaactcaaacccaaaccccaactttatgttatacatacacgtgacccttttcgatatcgagtaaattagccaattcatattttccagtgcaaatttacaaagttaagcggaaattactgtggcagttgggtcttaatatcttagaggtgaagtcaattgaatcgaaagtaaagatacaagatactaatttaagagattgatcgcatgtatcaaaaaggactttaccacatttcttctaatcaagtgattaaattataagatattaggtatcagagtttagataatcctgttgtccgaggactttctctagcagatttcggactttgatcaagatttaagatcaatctgtattgggattgaatatcaaacccaactaagaactcacaattgaaatggaaaaatgtaacattagatacattaaaaaaaagaagaaaataacataaaatttcaccacaaatattcggttttgagtcactaatatttttccaagtagtatgattcacgtaaagtacattacgtgataataataaatataattagtatgctaataatttacttaaaacgtgtaacacttatttaaaaaacataaatttggaaaagctttaggaaaaaatcatgttgtaggaatctaagggatctttaaagaattctataattatttttacgatcgacgtgtcaaaaccatgatctaatctcaatgattcatttctaaataacaataaatcagcaatacatgcatatgtttaatgcaaaaactcaaatatatactatatcatatcaacttgagtatacagtttagttctttggtgaaaaatctacaatctatgatgacagcgtcattgcgagttggattttaacacatacatatggaaaccccattattaaactcataaattcacatggcaacaaagaaatacaaagcatagttaacaatcatttgctgtttttgacctgaatttctcaccttaatcattcgctgcaggttaacttggttggttcaacttatagccagataactaaggtgtgatcttcaatcctcggcagtctcgtcctcctcgtcctcgttgaaggacagcttactactggcggccttggacttcttgctcttggatgtgctggatttttcggacttcttgttggtttcagattgggactcttttttctcgatgttgggctgcttgacacagtgtttgaagactattggctgcgtcagatccgctcgcttttcggctaattctggaagattgaaaatgggagttagttatgggtcagcaatcatctgtacttattatgatcgtagtaaagcgtgtaagtaaacacctatttacaagttaaatggagtatttaagttatataaactatcttagaatgaaaaatattttggggaaagtagtatgcacaaatttagggagaaaaatgccaatacatatatcaaagctgatataaataaaataaatttaaaaattgcattaactaaaaggaatacaagaaagtttttgaaaattgatctgcttataaaattgccaggaaggtgactaatatgccagcaattcattattggattggaaaatgtatctgggttttaaaaactgcagcatgacaaatggggaggagggaggtgtaaatcagaacaagccacccaccgaccccccccttttccaagcagcacccacaagatgtttttctcggccctgggaagccccttctcgcccgacgctcccgcttcactccccctcccgctccacccactgattcgcaacccgcccccgctgttccgccagccccttcttcaacgcctaccccctccccgcagcgcctttgccaccgccaccacgtcgtcaagccactttggcccgctcttttcctctttgctcgcctgcttcgttcatcattgtctctccgctttgcccgcctccttcatccgttcgttcttgcacacgttgttttcacccgattttctgcgctcttccaagtggggctgaaaggggcaggggggcgagcggaagaggcggacaaagcgagcggcggcagctgctgttgttaacttctttgccggctgctttatcgccgcgcccgctttgccaacgattttcatcacatgctctgctttggcggagcccccaatgaaaatgtcagtgtgtatgcctcgtcggctagctgctgcgggtgtgtgtgtctgtgtgaggggtgctccgctgggcaaaaaagggaatctttaggacggaaatgaccaagattgccatggcaacatagggctttaaaaagattgaaaaaccgaaggtgcttttcgaaaaaaaaaacacatacttcttgcaacaaactgctgttttcgcactaccgttagattttcatttggcaaaaatgcacaagcacacgcgcgcactcatacataagcaacggtatatacgcagttatgtatatatacatatatgatttagatatatgtaacgccgggcagaagaagacaaccgctcgattctgactgaaaagttaaactgaaagacaaactacaacatcctacctacgcacacacgtgcaactgccgccgccgccaccgtgggctatatgcatgtgtgtgtgcgtgtgcgagcgtgtaagtatgtatgtactacagcgatatgtatgtatgtatgcttgtacatatgtaccgacctttggaggccaacagtttctccgttttggcctcttcggcggatagatctcccggcctaaggacgaccacctgcggctgttcgtcctcccgtgaatcttcctcagaatcgtagtcctcctggtcctgcggatccaatcgctgacgctaaccaatggttatatatccgcattagaatgctgcagaggccttccccgtagaactcaccttggtctctacggtgggtccctccttgtagccaatttcagccttcaacttggccagaaaactaggttcttgcggctttacgtacgttatgttgcgcttggacatatcagatatggcggctatatcattgcacttcttgaccgatttagcagcggtttttgcactttttatttaccacaaatgtcgataagaaaaacatatgcttatcgagcagtgtgggaaagcgcgcgttgacaatactaaatcgatttcaactgctatactttaaagtaacgtaagacaattgtaaatccagttttaatagttataatgttaaagtttaagcttgctcttttaatattattagtcccaatttttgagtccttgatatttatcgatagcaccgataagtaacagctgtactgccgtgtgcatagtgctgcctgaaaaccaattgtagatgggcagcactgttaggcaaaagcggttactttttgaaaatgcttactgttgataaagagttaatatttcttaaaaatttctataaatatataatatttatcctattatttttgatgcatttctttaagtatcttaagttcccatttccaactggcatttccgctgagaaaaccgattgcccc

SEQ ID NO: 25121 - DNA, 4344 bp, DROSOPHILA
agaatcgagcggttgtcttcttctgcccggcgttacatatatctaaatcatatatgtatatatacataactgcgtatataccgttgcttatgtatgagtgcgcgcgtgtgcttgtgcatttttgccaaatgaaaatctaacggtagtgcgaaaacagcagtttgttgcaagaaaattagccgaaaagcgagcggatctgacgcagccaatagtcttcaaacactgtgtcaagcagcccaacatcgagaaaaaagagtcccaatctgaaaccaacaagaagtccgaaaaatccagcacatccaagagcaagaagtccaaggccgccagtagtaagctgtccttcaacgaggacgaggaggacgagactgccgaggattgaagatcacaccttagttatctggctataagttgaaccaaccaagttaacctgcagcgaatgattaagaaacacaaacagctggaagaaaaaccgacttgggcacattccacggagcagagaacggacctcaaatgactgaagttgatgtcgttttgccggagggcgtggccgagcccacgacaaagcttgccagcgcatcaagttccccaaaacagagtaaaccatcagcagatgatgttgagcagcaggtcacaactgtggaggacgatgaagagcaggtggtcgaggagcagcaggaggaagatgtgcacttgccggaggccccctccaatgaaaagctcgagctgctttccgcgggcggcaaggatatcagtaaagaggatgttgcccaggcatctccacaagctccagtggccgacgagataatggaggtggacgggaccgaagacgtggaggaaaacgaagtggagaacgacgacgaagactcacagattaccagcagcagctcgaaggagccaaaactggatgaagaagacgaggaggctaccacaaacggagatggagatcacgagccagaggacgaagacgatgcccaaaagatcggtagcacagcggaaaacagctgcgaggccgaagatcccctgggagcagtcacagttcctgacgatgaactggccagcgggaagaaagcgcacctagatggcgaggagagcgtagctagcgaaggggtcgtcgaggaagagcccccagcaaagcaggagaatgggtttggggccagtcccaaccagaaggagaacggccaagccagcatagcagaggccagggcggcaatagctccctccgatggtggtgtggttaacctggatgaggatagtgacgaggaaatggaggatattacggagcacaaggagccggccaagcccaccgaaaaggcagccaaaccggcttcctctagtggtggtgaatcctccgacgatgctgttctgatagcctccgattcggatacggaatccgcagctccaccgccgccagtaaagaagctcccgccagttgtcaaggccatcccgcccccgcccgtgcaggatgatgaggatgatgatgatgacgacgactgcgtcgtgattgaagatgacacaccgctaagtatttcgcccagcggcaagcgcaagagcgacctagatgacctgcagctgcaacagcccagccacaagagacagcgaagttcgacgccctcgggaatgggccagctgaccattaaggatgcccgctcgttgatgcctctcgatggcagtccgagctctgtgtcgggtccccgagattctatctacccggtgaccataacgaatgctgtgacgggagcggccaccaatctgggtgttgtgccgcctaagctagttcccatggcgggcggcatgagcgccagtccagtgcagctgaatccgccaacgttatcgcttaccgggctgcccagcatgaccaacaacgccaacctgctgcccggtctcactgacgacatgtttgtcctggaagcgccctccttcattgtaccctacatctatgaaaagccaccacgcgaaaacatctgcgaggtcgtcaaagcaattgagaccaagtatgcgctgtcggctgaggatttggccgaggcagacaagggcgacgagttcgacatgatgaccgagcaaaacaaagaggacaagccagcggatcaggccgatgaaagcggcaaaaagaaaaagaaaaagcgaggtgacgacgagtcctggtcggagcagtctgacgatgatgacgacgaagacgacgacgacgactcggagtcgggcgtacggactaaggtgctgatcaaggaggcaaacgatgacctgagcgccttgaaggtggccatcaagcccgccgctgccttggcaacagcgggcggagtgtcggtaaacaatccgggcggcaacaagccaggacaggagaactactttgagagtccgttgggcaagttcttcatggacattggcgtgggtctggtgcaggagtacgtgcagtcggatctgctgcgtctgcagaagcgcaagatgcgcaaggcgcaggtgcaaaattccaaggagtttgaaatggccatcaatgcgctctctggcaacctgcaggcatccaagacgaaaaacgcgcccttcaagttccggatgaagcgatgcgagttctgcaactttaagtcggagtctgccatggcgatggctaatcactacgagacgccgcacatgaacggagtgctgtacaagtgtaacttctgcacgtttgagatacggaacgccacggagattgtctaccacatggaggctgtgcacaacataaaggcgcgccttataaagccactgccctaccaccagtgtcccaactgcggctttgaggataatggcaaggcaaagctggcccgacatcagcccgtctgcgctaagaagttccggccggagcttaacctggcgccgccaaacgactgggaggcaccggctaagataccgcgcattaagcctcgtcatggtcttgtgggcactgccaccgcctatcaggctatggcagcacaggcggcggcacaaaaggccgctttggccaacatccagcagcagcaagcggcggcgcaggcgaggaataacctccaggcagccgcgttagctgcccagaatgcggccaagatgcgtcagcgagccccgcagccacccaaacagaacatagtgcgaaatccggcgcctgtgcgcggaggcaacgcgatgaatgcgggactctcgttacccaacagctatcagctggcagccggacagcttgtccaggcatccaagaagccgatggccggacagcccagcatctcgataacgccattacctcgtcagagctcggtgggcgccggtgcgggtgcctcgtccagcaaagcgccccaagcggcagcaggaatgaagcccggccagagtcccagcggtaacaataaggcgcaatttgttatttgcgagatctgcgatggctacatcaaggatctggagcagctgcgcaaccacatgcagtggatgcacaaagtgaagattcaccccaagatgatctacaataggccgcctttgaattgccaaaagtgccagttccggttctttacggatcagggattggagcgacacttgctgggctcacatggcttggtcacaagttccatgcaggaggctgccaacaagggcaaggatgctggtcgctgtccggtctgtggaaggatgtaccaatggaagctgctgaatcacgtgtcgcgcgatcatcatatgaccctgaagcccgctcacctgtcctacaagtgtaccgtttgcacggcgaccttcggcatgtacaaacagtttgagacgcacgtttacaccgcccacagtaccgtggccagaaaagcgatggacagcaagaagaacagtgcgcagtccagcgggtcgggatctggggcagggatgtcgcgcagttcgctgggagcggccaatgactctctgttgaagccgcttaagatcaacgatgagatcaccatcataccacagcccgcatcgaagccacgcatcacaaatatggagagtcatgtcatagattaaagagcatgttggatcaaccaaaaacctaatctcgcaacgtttgcagcattgacagcgctttaacattagtttcgtttttaagccgaacgcgacattggcgcctcacggtcccgctcctttacttctgtaagtcggatgtcggtatgcagaacaagaaaataatcagaaattggggcggatggtgagggaaaagcagagtggcaaaagccgtcgccgttgaagccgttgaccacctgacctgataaaacgagggacaagccagcgtcacttgctgcggctacaggatacgcgatacacataacgctaacggcatagattcactagagatactagttacggattttagttacatacgttttggagtgtgcacataag

SEQ ID NO: 25122 - protein, 1152 aa, DROSOPHILA; identical to SEQ ID NO: 645

SEQ ID NO: 25123 - DNA, 10120 bp, DROSOPHILA
tgaacacacatgttgccacaatgggtgtggtggtgtggctgttgttgagtgtgggtgcgagtgagtggggctgacaaggacacactgcacactgttggcatcgaaagcgcaataaaaacgcttaatttttcacttttacacgagtgagagcaaagtttctttgttgttgccgcttcggcacctcttctccattttttatccttttgcatcctttttcaaaggaaggataatgggtgtgtcaatgggtgtgtctccttgtataagccatttgaaagttatttaatttaataacaagcacgaaacatgtttccagtgaaagcaaaaggacatcaataagaagaggatatttagaagtataacagaataaccttataattggaaaagtgtgaacagctactccttaattaataaacacaagtatttcaaagaatcaagaacatgtagtgtttatataaaaggaaattgtgaaagcagattaaagtattaaccgatgaaaaagttttttcaattaaaaggcatttttgcatttcaattgcctggcatcaagttaaaaattcccaaaaatcaacacgacagcgtaaaactcatatacacagataaataaatgaaacaaaaacacgcccattgatacttttaagcccagtggcaaacaaaagcgaatgtgatttttatttattgttcaatgcgtttttctcctatttggcagattttccaagggtaccgtacaatctgcgaccgctcacagatttggattcgttaaaagtgaaaaatcagccggcggagtttgaggggaaaacaatccgactgcaaatgcaataagccgtcaacaaaagccccgtcttagccacagacaaaaaaaaagggaaaagccagcatcaaaaacggggacaacaacagggttttcgccaggattgcgttcttgttctttgaacacaggtgcgacgcggctgcgcccgtgcccgtgtccttggcaggatctgtgacgttgccagtagccaccatgaagctgtccaaactgtccaaccagaccaactcgcaggatccgcaggcggtcaactcgcgcatctttgtgggcaatctgaataccttccagtgctccaaaacggacgtggagcgcatgtttcagatctatggtcgcctcgcgggtaagtccttgtcatccagcaaccagcctcattccctctaaatctgactccccgaacatcctgcaggcatatccatgcataagggctatgcctttgtgcagttcaccaatccattcgatgctcggaatgcctgccacggcgaggatggcaagacggtcctcagccagacattaggtaaggaattaggtctttacatgtcctacaacatcctggtgacatctcctagttattatttcattttatcaatttcactgttaagcaaattgaacatttaagtagagaaacttttttttttcgaagatttctggaattatttaaaacattattatttgaacgaaatccttaaaaataatcgaagacagcctctatgatgttagccaactgcagtcttctcacttccttcatcttcaaaacgggtatatgatagtctagacagtgtttacctttaaagtgcataaaagttgtcttaaatctgtgcaatttctgcgtcccttgaaatcgccgctaacgaaggctgctgctttgcatagacattttagaccttaaccctcgtccgcgccttggccaaagttgcatgttcgcaggatatcgccagttatgtggctctgaaagtttgagtttggggcattcgtcaggttaatggccgccggcagcggaagcgttgcactaaaatcgaacaaacgcgcgaaaaaagccacaaaggcgacggacggggaaaaggaagtaggtgcggatggtatggcctgtcctggcttatggcttacatacacacatagtaggcaatggtaatgaaggaaccgccaacgatcctggcatgtgtagtggccatatctccaggcaccctccgcactaatgtctgagtatttcgacgggcggaagtcgctgccggccgcaaaaacttaaagtgcggccgacataaatcttggcacgatacttttaatgaaatttcaatgttatgccagacagtcgactgtcttttgtatctgcctcttaccctgactatcctgactatctggcagtctagtcgttcggcgtttaatgaaataattcaacgccagttgcagctgccatgttgacgattctgtgatcctcttttctgtttttttttttactcttttatttactattttttttttttcgtttctgcagtgcgtgtctcgtgtggagaacaagttaatgcacttagtgctctgtgtcggttgatgatgatgatgatgcttctgcttctggcggcaacgcggcggatgcttcatattcatacgccccgttcgccgaagcaaacaaagcgccatttccagactctcatggaaaatactctcccgcttatgcaaatgcgaatcgcaaaatgtggaatgctaattccactgattaggaaaagaagaacaacgacaacgaagtggccggcataatatttcattgctacgcgccattgactttgaagcggccaggcaaactaaagcgatttacactgggctacccagtggagatggttggctggaacttgtgcaaatccttcttacgcttttatccttaatcttaattatagcctgccagcccaacagtcggacagtgaggcagtaaaaggaaaaaaaacaaaaataacaaaaaagccaagaaggaaatggagcagctgaaaaaagaaagtctcaaagccttcacgcccgcttttcttgcagtatttctctttttgtaagccaaacccaccaatttgtagatagctctgggttcctctgaattttacccctgcccacctattttccaacggattggaggcgcagccgtcccacttcaaactttgtcatgaattatgatgaacgagcgtgggctgcgaaatcctggttctttccgaaaagctatccgtatccacccttttcataaaaaaatcaaatgcggtttgggtttataaagctatttgaatacacttagggaattgaaaataccgcataaaatacttaagctgtgttaaatatagaaatatctaacgatttaataattccgcagaattataataatttttcgaactacatgaaaatcacttttaaagctcatgtaatatagtatggatttttaatgttaaagagcaattcttcttcgaccatatattgtattttggtttgcatcatagcttttttgcattaacaataactgacaatgtactttctggctttggcgcacttttattgagattaatgattgggatgcagccagattgaattaaccgagaactgcagctggtcaatggaaatgcacgtagaaagaaaaaacaaaacatttttaatcactcacattttgtctattcatttgcataatgaaaggagtaggtttataaaggactgccttttgtgtttccaaacaatgacttcaaagaacactgaaattttgtattcttatatttttcggatataatacagattgccttttgtcattaagaatttcccatttcaaattcccatttccagatgtcaacatggtggccgaaccgaaagcgcatcagatcggaaggaaaaggcagaatgtgagcaagaccggaaacgattggtgagtccaacgctgtgttaccaaggataccaatttggttctagcctcatttcaatttaatctaaaagttaattttgctcaatttaacgccgccatgtggccattcacttggactgtatttacatatcatttaacgggtggtttttttttcgagtgcccgccccacaagtaaataaataaataagaaaccattcatcaggcgatggggtcgccctttgtttcaactgcccgtccggcataaaatatttggctgtcaacggctagccggactttttgcgcccaaccggaaccaggacacttcaggccaagttctcgtctccattgctctactcactttctctgctgtgtgtggagggtcagttggtgttcgagttcgctgcttcaaacgtagtcgtactacgtatacgagtatttatgtgtgggtatcctgcggatcctgtgagtgacagttgcaatgtatgccataatgtcctggcgctgacatgtgcacttgtttgtctttgtcgttggcgcggccttaatgatgactgagcgacattcacaatttatttgggccttgagcttccagaccttccagcactcgtgtggaaatatttaatttaagcttaatgacgccgaaacgaaatgtcgaatgcgttttcgctttggctttaaaaagaccaacgacgcgaacgacgacgagaaggggggggggggggggggagagagaggagagtttggggcggaaaacccaactgacatcgacttgattgtaattaaaacgcaaacatgtcacggccccccgctctatcgaaaacccatagctatgtccaggtgctcttgtgtttgtcattaaacggctgctcaggtgaggttgccatcctctgaccgcacacaaactgaccgaaaaagccacaattgttgcactccaccacccaagcccactgcccccactcatttgaccacaattggttggcttcgtcaggaaaacgttgggcggtggtggggggggtgttcattttcgtcctagcacggcatttgtatcaatcactggtaacatgacccaatgggagacctcggcacacaaacacaattgccaaatgacaattcaaacgatggcaatggcagcctaaacaaatattgacggactgatgggttgagcaagtgactgactgacattgaggttgggcaacagttggcaggttcttcatttgcagttaatgagagaaaaatcacatttatcattggtcttggttaaatgggaaatttggtttgttactataagtaacaaaaaccatatagtaaaactattttttaaaccattagcagggtattgacaattcgttgtttccgctaaaacacacaactatcctattccctgcacattactgaatagcatacttttggggattgacgctgctgacacttcaattagcgaacaaatattggttgagcagattacgagctataaatggacactagtttactaaatgcactgataaaaatatgagttatacacatataagcaccaagatttggatagttggggattattaaacaaccttttacttttctctccgtgcagggactacttctacgacagctactgctcctcggcgctgttgcgcggtggcggcggtgcaggcgggggcggttcgaatggagtgcgggccaagaagcgaaagcgtctgatgaccaacggcggcggtctcgctgtggccgtgcaacagcaacaacagcagcatcatcacagtgcggccgcggtggccgctgctgcggcagctgccgtccatcagcaacagcagcaggtgcagcagcagcagcaacagcaacaccatcagcagcaacagcaacagcaccagcagcaggttgctgccgttgcgatggcggccatggccaatttgttgccgcagcagcagttgctgctgcatcagcagaatctgctatcgaatgcggcggtggccacaacggtaacggcggctccaagttccattcactggtcgcaatacaaacaggagcagcagcaccacccacatgcgcaccacccgcaccaccagcaaccgttcggattccagctgaagagcagcgtggctgtccaggcgacgacatcgccgcaaaatgcaaagtctgcaataattgctaatcaaacggcgctcggcgagccatatccggttggagccgccgcctttgccgcccatcagcagcaacatcagcatcagcagcagcatcagcaaccgttgctgcagccgttgactctggcattgtccccacagcaaccgcagcctcatcaggcggcaacgccactacaattgcacagccaattgatgcagcaacatcaacatcagcagcaacagcaacagcagcaacagcaacaacagcagcagcacaaccaacagcagcaacatgctcaggagcaattaagtttgcatcagcaatggggaccattcaaagtctacagtgagtattgacttcagtttgctcaaaaggatgctggccaattgagggataaagccggaaaagtatattttaatgattgtctgtggtttcatcttgggattatcaaaaaagcagtaagcttttataagttagtaaaacagcggttagattttctctccttacttgactaaaaagacatttttgagtaggcatcttcaagataattacgataaatacgaataggactatatatattttttttaataattatccaaaaattttcgtctagttgtcctggttgaacgggtcaaaaatgctgacgcctgactaccgagtctctgaaaaagagaaatgagtcacgttgccactcttttggccattgcaagcgtattcagtgtcgttcggggtcaacagcaagttatgccaaagcccgtggcggaaatcccttcaccgcagcctctgcccgcggattacgtgaagggaatacttagcctgaagagcagtctgctgaccaacaagcaggccttgggttacgccaccagtcaggaggtgaacggccccgcttccgtatccggaatcagacctggtatgcgatatacacagcagttggacgtacagcagacgcaaagccagccgttgcaggagattcaggttgaacccgttgccaatctgaggccatcagcgatagctcagagcagccttcaatcccagatgccgtcggccaagttgaatcgatataaccaggagttccccgcctttcatctattccagccgccatttgtgccattgccaaagcagcaggaacgacaggagacacacgatccggcgccaactgccgagcagctcgagttgctgcaacagttgtccgagttctttggccagcgacagcagatgcaacaacaggtgcgaccgcaggaggcaatgaattgcgctgaagtggatcaaaatgagggaaaaggagaatgcgaagcgtttgcgactaccgaggcttgtgactccaataaaaatgaagaggaggattcgatatccgtcgatgttaagaacgaggagcgggaatctacaacaacaagcactgttaaaccatctttggctccaaaaacgaaggcaactaagcctccaatcggcaagactaccacccaaaaacctttgacaacgcgtgctaccaaaagtacgacaagaaaacttccatgttgcaccaagccaaagaatcacggtgtcgctgggactccaaatgtcatcagcttttctctgaatgtacaaaatgaaaatatggaacagccaaagtctttgcaacagcaacctcgaagtggtagacacgccattcagcctgatttgcgcataaatgccattacaaacatgttaagatatcgcagaaaaagggctcaggctgtagctccatatcccaaacccttttcttcacaaaaggatcatgaattgcagttgcagagccgatcgaaacgaaaaagagataggatcctggacaaaaagcaactgcttcaggctgaactgaagatttggccgattagcataagatctaattcggtgtaacgattgcaataagttcacaatattcatatatttttttaatgcaatgattaaaataaaaaaaattaaaacaattgaactgcttgccttacagaagctagattagtgtttttttgttttaattttattaccgaggcagctactaggaatcattaaaattacttttcttgtgcagacagttttttcacagtttttcacttacgttcaacatgttttcaagacctttccctttgcatatttacaggcaatccggatacattaatctgcggcaattgccgggaatcctttggcgagctgtctgagttattggaccacaagaaaagttattgcaagctgaggttcacatgcaagtgccaggatgttgcctttgcggcaagtgcaagtaagtgggcgaaacgggcctccttggggggcgtggggcagcctgtctgttggcaattaatttatgattgttaaacactttttgcccttgccccggccccaaaagtgtttgtctaagtcgtaggcgctccactgtttgccagtcagcaacatctggtcgccgggcggcaggatgtctgtgcattcatgtcctgcgactgctggcaaatgcatttaaaattgagttatttatgcgccagagcctccgatgtctgtccttctgcaaattccaacttaaataactaattaattctcgcatgtttcacccctgcgcctacagagactccgccgacgagcgccaaattgctgtgcgccgtttgcaaggatgcgttcgtcaatccttgggatttgatggtccacgcacaggccgcccacatggttaacatttacgagctgggcgatgatgagggcagcagcaacagcaatgccaccacagccagcagcaacaatgttgcaaatgcagccgtggagaatggccataccatcgccgatgtggctgccacaaagcagcagatgccacagatgccggatgcctcatcaacacttaacaaggagcccaataacaataataaaattagcaacaacaatatcatcagtggggccatcaatggccacatgtcgccctcgggaacgggcatcattatggcatcggtatcttcggctgagaatggaatggccagcgacatggagaccaactgtctggacattaagtttagccccagtgccagtcccaaggaggcgagtgacatgattaccgccgcaccaggcagtggttctcattccccagtgattccgttacaggatcagcacagggatgatctctccctcgatggacgcatgtcgagcagctcccagcagacccatcactccgacgaactgaacgtcaagctgctgaatggctccgtctcctcgaggggcagctcgcccggattggaggcggatgagccgccggccacaagggcttgcattgtccgtaccttaagcattgtgagtatggatgatcctgggcaaactaattacacagtcgcatcatactataaattataatagtcactttttatgtaactcaagaactgattattttctagttagagctttagaactatttaatcaacacatttttaattttatttccaggaaacagccgggtcatctacagcgccaactgccaatactttgagcctgatgtccaacagtttaggcctggctctcgcaccgcaataggtcaaagttcgcggggagggtcaacagcatatggaaagggttcagaaaactccctttggagcggtgttatttgtgctatcgtatggcgatacaagtgcaatttcttcagtatttttataacagactaaccttggagggaactaataagtccgaaggaaaaaaagaacgaataacgtaaattacagcaaacatatcatttttaattagccatagatatgaaatatgagcagatatagtatagtatatagtgtactgcgtgctatatatgtatatttatatcaattacatccatgtgtacgtttatatgtaatgtatttgtaatcgtaattgtaattgtaattgtaactgcaaaacgcctttgtgtttgtgttgtttttgcatgtcctttgggtttagcgtttcaaacggaagtgtatttatttgggtttcaaaactgcataagtgaacgtataggtaaaattatgaaaagcttaaactgtcatcgcctgtcggcggtgcaaattgaacggtaatcgagctttgtatatagttaataccaataatatggataaaaattacggagttataagatcattgttattaaccagacaatcgtctggtgccggctttaaccgatgtttaaatattttcgatataatttacggaacaaattaatcgtagttaataccaaattaacccacgcaaattgtatatcaaaagtagcatagtgacaacaggtgtttcaaaaacaaattcggagtaacttgctatacattatctagaatcataatcaaatatgcgtaatattaatagcgactatattctgtaataactatatcaaaagtagcggctat

SEQ ID NO: 25124 - DNA, 2982 bp, DROSOPHILA
atgaagctgtccaaactgtccaaccagaccaactcgcaggatccgcaggcggtcaactcgcgcatctttgtgggcaatctgaataccttccagtgctccaaaacggacgtggagcgcatgtttcagatctatggtcgcctcgcgggcatatccatgcataagggctatgcctttgtgcagttcaccaatccattcgatgctcggaatgcctgccacggcgaggatggcaagacggtcctcagccagacattagatgtcaacatggtggccgaaccgaaagcgcatcagatcggaaggaaaaggcagaatgtgagcaagaccggaaacgattgggactacttctacgacagctactgctcctcggcgctgttgcgcggtggcggcggtgcaggcgggggcggttcgaatggagtgcgggccaagaagcgaaagcgtctgatgaccaacggcggcggtctcgctgtggccgtgcaacagcaacaacagcagcatcatcacagtgcggccgcggtggccgctgctgcggcagctgccgtccatcagcaacagcagcaggtgcagcagcagcagcaacagcaacaccatcagcagcaacagcaacagcaccagcagcaggttgctgccgttgcgatggcggccatggccaatttgttgccgcagcagcagttgctgctgcatcagcagaatctgctatcgaatgcggcggtggccacaacggtaacggcggctccaagttccattcactggtcgcaatacaaacaggagcagcagcaccacccacatgcgcaccacccgcaccaccagcaaccgttcggattccagctgaagagcagcgtggctgtccaggcgacgacatcgccgcaaaatgcaaagtctgcaataattgctaatcaaacggcgctcggcgagccatatccggttggagccgccgcctttgccgcccatcagcagcaacatcagcatcagcagcagcatcagcaaccgttgctgcagccgttgactctggcattgtccccacagcaaccgcagcctcatcaggcggcaacgccactacaattgcacagccaattgatgcagcaacatcaacatcagcagcaacagcaacagcagcaacagcaacaacagcagcagcacaaccaacagcagcaacatgctcaggagcaattaagtttgcatcagcaatggggaccattcaaacctctgcccgcggattacgtgaagggaatacttagcctgaagagcagtctgctgaccaacaagcaggccttgggttacgccaccagtcaggaggtgaacggccccgcttccgtatccggaatcagacctggtatgcgatatacacagcagttggacgtacagcagacgcaaagccagccgttgcaggagattcaggttgaacccgttgccaatctgaggccatcagcgatagctcagagcagccttcaatcccagatgccgtcggccaagttgaatcgatataaccaggagttccccgcctttcatctattccagccgccatttgtgccattgccaaagcagcaggaacgacaggagacacacgatccggcgccaactgccgagcagctcgagttgctgcaacagttgtccgagttctttggccagcgacagcagatgcaacaacaggtgcgaccgcaggaggcaatgaattgcgctgaagtggatcaaaatgagggaaaaggagaatgcgaagcgtttgcgactaccgaggcttgtgactccaataaaaatgaagaggaggattcgatatccgtcgatgttaagaacgaggagcgggaatctacaacaacaagcactgttaaaccatctttggctccaaaaacgaaggcaactaagcctccaatcggcaagactaccacccaaaaacctttgacaacgcgtgctaccaaaagtacgacaagaaaacttccatgttgcaccaagccaaagaatcacggtgtcgctgggactccaaatgtcatcagcttttctctgaatgtacaaaatgaaaatatggaacagccaaagtctttgcaacagcaacctcgaagtggcaatccggatacattaatctgcggcaattgccgggaatcctttggcgagctgtctgagttattggaccacaagaaaagttattgcaagctgaggttcacatgcaagtgccaggatgttgcctttgcggcaagtgcaaagactccgccgacgagcgccaaattgctgtgcgccgtttgcaaggatgcgttcgtcaatccttgggatttgatggtccacgcacaggccgcccacatggttaacatttacgagctgggcgatgatgagggcagcagcaacagcaatgccaccacagccagcagcaacaatgttgcaaatgcagccgtggagaatggccataccatcgccgatgtggctgccacaaagcagcagatgccacagatgccggatgcctcatcaacacttaacaaggagcccaataacaataataaaattagcaacaacaatatcatcagtggggccatcaatggccacatgtcgccctcgggaacgggcatcattatggcatcggtatcttcggctgagaatggaatggccagcgacatggagaccaactgtctggacattaagtttagccccagtgccagtcccaaggaggcgagtgacatgattaccgccgcaccaggcagtggttctcattccccagtgattccgttacaggatcagcacagggatgatctctccctcgatggacgcatgtcgagcagctcccagcagacccatcactccgacgaactgaacgtcaagctgctgaatggctccgtctcctcgaggggcagctcgcccggattggaggcggatgagccgccggccacaagggcttgcattgtccgtaccttaagcattgaaacagccgggtcatctacagcgccaactgccaatactttgagcctgatgtccaacagtttaggcctggctctcgcaccgcaatag

SEQ ID NO: 25125 - protein, 993 aa, DROSOPHILA
MKLSKLSNQTNSQDPQAVNSRIFVGNLNTFQCSKTDVERMFQIYGRLAGISMHKGYAFVQFTNPFDARNACHGEDGKTVLSQTLDVNMVAEPKAHQIGRKRQNVSKTGNDWDYFYDSYCSSALLRGGGGAGGGGSNGVRAKKRKRLMTNGGGLAVAVQQQQQQHHHSAAAVAAAAAAAVHQQQQQVQQQQQQQHHQQQQQQHQQQVAAVAMAAMANLLPQQQLLLHQQNLLSNAAVATTVTAAPSSIHWSQYKQEQQHHPHAHHPHHQQPFGFQLKSSVAVQATTSPQNAKSAIIANQTALGEPYPVGAAAFAAHQQQHQHQQQHQQPLLQPLTLALSPQQPQPHQAATPLQLHSQLMQQHQHQQQQQQQQQQQQQQHNQQQQHAQEQLSLHQQWGPFKPLPADYVKGILSLKSSLLTNKQALGYATSQEVNGPASVSGIRPGMRYTQQLDVQQTQSQPLQEIQVEPVANLRPSAIAQSSLQSQMPSAKLNRYNQEFPAFHLFQPPFVPLPKQQERQETHDPAPTAEQLELLQQLSEFFGQRQQMQQQVRPQEAMNCAEVDQNEGKGECEAFATTEACDSNKNEEEDSISVDVKNEERESTTTSTVKPSLAPKTKATKPPIGKTTTQKPLTTRATKSTTRKLPCCTKPKNHGVAGTPNVISFSLNVQNENMEQPKSLQQQPRSGNPDTLICGNCRESFGELSELLDHKKSYCKLRFTCKCQDVAFAASAKTPPTSAKLLCAVCKDAFVNPWDLMVHAQAAHMVNIYELGDDEGSSNSNATTASSNNVANAAVENGHTIADVAATKQQMPQMPDASSTLNKEPNNNNKISNNNIISGAINGHMSPSGTGIIMASVSSAENGMASDMETNCLDIKFSPSASPKEASDMITAAPGSGSHSPVIPLQDQHRDDLSLDGRMSSSSQQTHHSDELNVKLLNGSVSSRGSSPGLEADEPPATRACIVRTLSIETAGSSTAPTANTLSLMSNSLGLALAPQ

SEQ ID NO: 25126 - DNA, 2809 bp, DROSOPHILA
ctgtaataaaattcgaattctgaaagtggttcgttagcatgaggttttaaaaatcattgagttaaatttttgatgtaattttcagatgatctttgtttatgtagccatcgtcgtggtgaaactgataattctgttcgtgtgtctaagtactgaattgaatcctgacaagacgacagcccatcccatatttatgatatgctggctccttacggtaaggttatacagacattcaaattatataactatgtattaaccaagtttttccgacaactgaatagttcttatgtatggccgttataataatatactggcttcggctacatgaccttgccaacgaagacaattagactggtattgaaatgaatactatgaatactatgaatactatctggcataaacgcaaaatatcgtattacctcctcattagatccgtcattgtgattttcagtgattaatgttaagatattaactatgtcgaataaccaactgcattagagcaaaaacggaaactcactggaaacttcattaatgaattgtaagtatctgtcaacttgggattttagaacttaacatcttgtcttttgtaagcaattggagttaataccaaaagctagctgaatttgcaaattataatggacatcgtattggtattgaaaaacatagtatcgctaattgtcaaccgaaaaaattctgttttttttttttaaagcagttataccatcgaaagcagtgtcattttaggtcaaaaatatatatattcgtatttttcggataaaatatggtggataatgaggaaacgggatgccttcaaagattactcagcgttggaaagctacagatttgcaagttcataatctactttgtgtggttggtcaatttcgtaggtaatatcatggaagcgaagaaaaaaccactacaaaggtgttcccacccacagattttcagctgtgcggatatttacatatactatttcatactgaaggaacacatgccttgctgggattgtttgttcaggtcctacatgataatcgctctaaccgtaaatgccctaatggcgccgctgctgatagtcggttttttcttcatatattcgcatttatgccgcgaaatacgcattgtaattgtttgtaaacattatttttaaaaacacagcgattgccaagattgtatttaaattttacagtatgccacagtactcttcctggcaacatggttgcagatgatgctgactatactgtttgcacaacagtaccaaattgttggagatgtacttcgaatatggatgaatcgcaagagtttggaattctacgaaagtcgcgtaagagtttcgcaataatattatattaagtagtaaagttacccacttcgtttattaaaagtgccagtgctgcggagttttgggacctgacgactacaagttgggcgatctgaatatcccaaaatcctgttacaagaatggcagtgaaagggatgaggacctgtaccgatcaggctgctccacgcgctccataaagcccgcgtcgcccatcatccatgtgatctccttcgtaattcaggtgagtagtggtcgggtgtttcgaattctaacgctaaaaaccattttagtatgttttagtcatatgcattgaggtattccttattatcctgttaaggagcaaatcccaacccacaagtatgtggtctgagcgggtcaccgaaaggtttggtagtgtaaaaaagtgacttgcagttctattcggatttgggaagcaatcctaaagaacatctctgaactttagggctattttccaacattgcatggaacttaagcagcagattttcatgtgaattgcaattttgggtgcggttttcaattcacattgtaccgggcatgagtattggcattctggcgggcgagacaaattggatgctgccggctatcgtcatatttcacggactgcaatcaataacgataaacacttgagtcgcaaatccaatgtccagaatcctgtccaacaacggcatgcatatggatgagccaataaagaaatcaacaaagcatgtcgggcgattgaaaaagtattgcaaataccccggatagctggggattcggacacggaattggactccaatccggacaatatgcaaatgcagctaagcagaaaatattcaaggacgatccagccccacccccttcaacaaacgctcaagtttatatattcattttgtgtccctcgtcccgcgcataaattttattgttgtcaacattaaattctagtcgtgaaaaacaattttgcagcatttgaaaatccataaaatatgcatacgaaattgtccgccggaacgaccaactttatggctaaatagtttgctccggcccacatcgttaatgccttttttatgcgttgtatttgggtgttgggtaaactttttagccgccataacaataacggcagcaaaagcaaccacactttggtcaagctgctgaaatatccagtgcaaagttcatagataaagggaagggatacaaagacgaagtcgcaggcgaaaagggtcatgtggctcattaaactttggccaacaattttttgttgcaccccccaaccggcaaagacaaacagaaagttttgcactaaatatttgcgccctcgcaaaaaaaaaaactaggaaaacagaatgaaaagggtttttgaggtgagtggccatggtttccggggatttaaaatggttgcaacaattcttagcacacatacgccccattaaacgctagaaaaattatatgttaagagctaaaacaaaaagggtgaaagtgtttctttaaattgatgtt

SEQ ID NO: 25127 - DNA, 689 bp, DROSOPHILA
gattgtttgttcaggtcctacatgataatcgctctaaccgtaaatgccctaatggcgccgctgctgatagtcggttttttcttcatatattcgcatttatgccgcgaaatacgcattgtaattgtttgtaaacattatttttaaaaacacagcgattgccaagattgtatttaaattttacagtatgccacagtactcttcctggcaacatggttgcagatgatgctgactatactgtttgcacaacagtaccaaattgttggagatgtacttcgaatatggatgaatcgcaagagtttggaattctacgaaagtcgctgccagtgctgcggagttttgggacctgacgactacaagttgggcgatctgaatatcccaaaatcctgttacaagaatggcagtgaaagggatgaggacctgtaccgatcaggctgctccacgcgctccataaagcccgcgtcgcccatcatccatgtgatctccttcgtaattcagtcatatgcattgaggtattccttattatcctgttaaggagcaaatcccaacccacaagtatgtggtctgagcgggtcaccgaaaggtttggtagtgtaaaaaagtgacttgcagttctattcggatttgggaagcaatcctaaagaacatctctgaactttagggctattttccaacattgcatggaacttaag

SEQ ID NO: 25128 - protein, 102 aa, DROSOPHILA
MLTILFAQQYQIVGDVLRIWMNRKSLEFYESRCQCCGVLGPDDYKLGDLNIPKSCYKNGSERDEDLYRSGCSTRSIKPASPIIHVISFVIQSYALRYSLLSC

SEQ ID NO: 25129 - DNA, 3681 bp, DROSOPHILA
tccatgcatttataattcaacattcgctcgcggccttatgaaaagctcatttggttacgagtgtcctgggtccttaagtcctttctacctcgaaagtgttaatgagccggcaggctgccgtaattatgcaaatttttaatgactatgaaaatggtttccgcggagcaacaagtgctcgcgtcttggtccttggatctctatacccctcatacccctctaaaaatgccagctaattccatttgaccccagaggccccaaagcaatccatttgcatggctaccaatagctcgtcgcattcgtcgtaccaacccaaccattttccatttaatccctacgatgtgagagctctgtactgagcttactgctggcattcggtctttagatttatacagattttgtcaaacaaaacatgaattcgcacttttacacacatatgtgtgtctgtaaatgactgaaagggagagcgtcgaaagccgatttggtgccattcagttgaagccctttaggtcgtgattcgcatatggtcgaggccatttaagctgatatcaggcacattaaatgtagtaaaggaacgtaagtatgataaaggcagcatcacaaaagtgtcaagtaaatgcaaattaacattaatttaagacttgaattcgtctgtactgaaacagtacaattaaaatataattagctatatatttgtaacttttaagaacggatacttctgggaccaatgttttttgaacataacagatatctaccatatgaagtgaaataaatagaatttttcgggaccattttgtttccagatttcaaatgaaatgaaacgcatatttttgccagtttttgataataaatatcaggggacttggccaaattttaatacaatctcatttagaaaaataaaacaattgcatgccgataaaataataagtgataccgaaagagagcttttgattagagtgaaatatgctcatgcggttcagtcgagatccaaagtttgcgcagaatgcttctgaatattttagctataattcttgtattcgtaatttcaagccaatcggaggcagttattcctggatgtgattacttcgacaccgtggatatatctcatatcccaaagctaaatgactcctatgcgtacgaggagctaatcattcctgctcatctcacgggtctatatacatttaggcaactggcggatggatcacaggagccagtgaagagtcacttaagagcatgtatctgcaaactaaaaccttgtatccgattctgctgcccccgcaacaaaatgatgccgaatagtcgctgtagcgatggactcacagagaatctgaagcggatcaatccctacttgaagatcacactggaggatggaactataggaaaatattaccttctcaccgacatgatcgtcttaagatatgagtttcggtattgcgagaaggttgtttcggtacaggaggatcagtacaagctatatgaggttaagatttcaatctttttgaagtatctcagtataatttgatatctatagaatggcagctttatgattaaacccgatgtaaactggacattgagcaagcagtggtactgcctccatccccgtttggaagatccgaattccatatggatactggaacatgtatatataccgaagtcaatgccagccgtacctcagggcaagcacctactatatcatctaatctcatctcatctaattctctgatttttccagtcggtactatttccatggttggttgtattctcacgattgcagtgtatctctacataaagaaactgcgaaatttgcttggaaaatgtttcatttgctatgtattttgtaagtttgtgcagtaccttatctgggcaggaggagatttgaacttgtggaataatatttgctccctagcaggttagttgaatccatattaaagtttgacttaaaatatgcgtttattctaaacaggttacactaactatttctttgctttggcttctcacttttggctctctgttatgagtcatcaaatatggaaaaacttgaggttaatcaatcgggatgaacgtagctatcactttctcatctacaacatctacggttggggcacacctgctatcatgacggcaattacatatctggtggattgggcctgggaggatagacctgacaaactgaattggattcccggtgttggcttatatcgatgctggataaacagtgggttttagggtagagtgtttaagccagtttaagaccagtaattgattttctttgaacagcctatgactggtctgctatgatatacctatatggaccgatgctgatcttgagtttattcaatgtggtcacgtttatcctgacagtaaatcacataatgaagattaagagtagcgttaagagttctacccaacagcagcgaaagtgtatacagaataatgagtaagctttaagtatttataacttactatttctaattccattctcttactatagttttctattatacctacgactgtcggtgatgatgggcgtgactgggatttctgaggtaataacttacttcgtcaagcggcacaaattttggcgacaagtccttcgggtgccaaattttttccatttgggttccggtatagtcgtatttgtgctatttattcttaagcgcagcacatttcaaatgataatggagaggtaagagctttttgcttaatagattttaaagttactatatcaatatcattttagaatcagcggtccgaggagacaacaacctgcatcttgatcaacctactagtttaaataaatgcaaattatagataagtgagctctttttttttataagtttagtatagagcagtccctctatggtcaataaatgcttataatcttcttattattgaaaaattctttattattgatatttaatcaataatatatttttattttttttttttttgttagaacaaaatgtcaattgtcatcaaaaatatgtgtttgtgaataaaatcaagttccgtaggaaaatatgcacttttatggaaactcgctttttcaattagtccttgcatacgcgccaggaccccaaatccttccaccttccccacaatcctcggctggtgtcagaatgcaaatgcagatttttaagccttgcggcagcttttgcgcaaacagattgtaaacaaataaatgccgccggcagacacacagatactcgaacattcggtggtcagtggccagattgcagcctgaaattcattcaatactttatctcacatgcattgcacttcacttttgagccacgttaagttcagtctgccgaaacctttttcgcacttaagtggttaaattggctgtgataaattgttgccgagtcaaagttgctgccgctgcggggcacctcaagtcacatgtggtgatggtgcgagtgggtggttgggtggcgtgtgcttttctcctcggaaaatgcgtgaaaagtccacaagcacaaaaagtctgggaggctggctctctctcatctcatcacgttcattgagtgcctgtcgctgacagtaatcataacgcagtcatcagctcgtaatattacggccgcctgacatatgacatctgggaaagcggaaaatgggggctcagggaccaaggaaaaggtatgcgtactattaatatgccagtgtgtgaaggagctttcattc

SEQ ID NO: 25130 - DNA, 1503 bp, DROSOPHILA
atgcttctgaatattttagctataattcttgtattcgtaatttcaagccaatcggaggcagttattcctggatgtgattacttcgacaccgtggatatatctcatatcccaaagctaaatgactcctatgcgtacgaggagctaatcattcctgctcatctcacgggtctatatacatttaggcaactggcggatggatcacaggagccagtgaagagtcacttaagagcatgtatctgcaaactaaaaccttgtatccgattctgctgcccccgcaacaaaatgatgccgaatagtcgctgtagcgatggactcacagagaatctgaagcggatcaatccctacttgaagatcacactggaggatggaactataggaaaatattaccttctcaccgacatgatcgtcttaagatatgagtttcggtattgcgagaaggttgtttcggtacaggaggatcagtacaagctatatgaggttaagatttcaatctttttgaagtatctcagtataatttgatatctatagaatggcagctttatgattaaacccgatgtaaactggacattgagcaagcagtggtactgcctccatccccgtttggaagatccgaattccatatggatactggaacattccatggttggttgtattctcacgattgcagtgtatctctacataaagaaactgcgaaatttgcttggaaaatgtttcatttgctatgtattttgtaagtttgtgcagtaccttatctgggcaggaggagatttgaacttgtggaataatatttgctccctagcaggttagttgaatccatattaaagtttgacttaaaatatgcgtttattctaaacaggttacactaactatttctttgctttggcttctcacttttggctctctgttatgagtcatcaaatatggaaaaacttgaggttaatcaatcgggatgaacgtagctatcactttctcatctacaacatctacggttggggcacacctgctatcatgacggcaattacatatctggtggattgggcctgggaggatagacctgacaaactgaattggattcccggtgttggcttatatcgatgctggatatggtctgctatgatatacctatatggaccgatgctgatcttgagtttattcaatgtggtcacgtttatcctgacagtaaatcacataatgaagattaagagtagcgttaagagttctacccaacagcagcgaaagtgtatacagaataatgagtaagctttaagtatttataacttactatttctaattccattctcttactatagttttctattatacctacgactgtcggtgatgatgggcgtgactgggatttctgaggtaataacttacttcgtcaagcggcacaaattttggcgacaagtccttcgggtgccaaattttttccatttgggttccggtatagtcgtatttgtgctatttattcttaagcgcagcacatttcaaatgataatggag

SEQ ID NO: 25131 - protein, 172 aa, DROSOPHILA
MLLNILAIILVFVISSQSEAVIPGCDYFDTVDISHIPKLNDSYAYEELIIPAHLTGLYTFRQLADGSQEPVKSHLRACICKLKPCIRFCCPRNKMMPNSRCSDGLTENLKRINPYLKITLEDGTIGKYYLLTDMIVLRYEFRYCEKVVSVQEDQYKLYEVKISIFLKYLSII

SEQ ID NO: 25132 - DNA, 4146 bp, DROSOPHILA
ggaggccaaaactccaggctgcaggtacaggcgggcacggagcacgagtcgcaatcgaaattggaatcggaatcgcaatcggagggcggagggcaaaagagcaacggtgcctggataaagacgcactgggcctacatcgatccatcgacgtacttccaatggagcgtaagtcgcacgccacaacttagctgccctgttggccgccactaactcccattactcccattgcagggctacaaggacgaggatagcgtgctgctgcccgctctgctgggcttcgccctcatcggagtgattttgatcatcacggtctgcctggtggcacgcaacaagcgcaccattgtgtcctccgtccgcaagcggaatcgcaatgtgagtatactgtgcatttggcttgaccaacgaaccggaagtgggaggttgggtgttcgcttggtgagcggcgcgtgagcgggtgcgtgggtggtagcgcgtccttgagcccgttctcctgccgttgtagttgtttttgttgttgttgttcggcatcgcgattgaatcacgaatcctagcattaagtctgcatggctaggtgttccaaggtgttccacctgcactgcatcgagctccaaacataatcgactaattcgagctgcgcgctgttcgtgtagcacagtgaaagaggtggtgcggtcttttgtttacctttaagctgttaagtgaagtgtgaaaatagtgcaaatcttgaataattgtgtataaagaaccaaaactttgaataaaaatatatttggcgccaaatcgaactgcagccctggtcgtgagcgatggcagtgcggaaaatcatcgcacgaagatcgccatggcaacaaggaccaaaaaataccaaaaccaccacagcagagacggcgtcggcgcgggtgcgagcaagacggcagtcgcgcagagagagtgcgtggcactttagccagggctgggcaaaccacaaattggaaccagcgaaaaataccttcgaaatttgcaagctgagtgtgacaagaataaatagttcggccaacaaatcggcttcacagtgaaaagtgcaagcaaacaaaaagtgagaagtgcgcgatgtgccatccctggtgtaaacacgcacacacacacacacacacgcgcaggcggcacacaggtgagcaccagtagcgcagtcgacagcagcagcggcgcaggcagcggcagaggcagagcgcccagagcagatacttcagtttgcgtcgattgtgccgattgagattcagattcagttccagatcacaacccgaatcggagccgccagtgtgtgccagacgcaacgcaacggaacggaacgcaaggcaacgtctacgtcagcaaaatcacgctgcaagtcaccagttggccggaagattggcgaaaatcctgtgagtaaaaatggcaagcgtgcaacaacagttttgccagcgtgtcgcttggagtctcccagtgtgcgtgcgtgtgtgtgagtgagtgggagcgcgcagccgtgtgcgtgcgtgtgtgtgcgagcgtcggtgagcagtgccaacaaggcaaaatgtgtgtttgctgttggggagcatcttgaccaaagtagtcactcctcggagcgccaggaggcgctcaaagggtattcgcccgagcacgacaccattcggcagctgtgtgcacaggttcccattcatggaaagtgggcagaggcgcggaatatgccaggcgagcgcgcaggtatcagttgtgccggaccgcacttgtgggcacttgtggctggcagattggagccgggatgcggagtagcaccattggagcgcactgctactcagttggtgttcgttgctaaaagccactccgggcagcatcgacggcatcattcaaccgatgcaacagacggccaagctgaaagggcgacgtgtcacatatgcgaggctactacagatgctcccccgcaacaacaagggcaggaagtcacgcagggaaaggcgaacagccagcagatcttgaataaccaactcataaaccatttcagaaacccctgaaccagagcaatggccattaaaccgggactcggtcgcaagaccagcaacaagaacccgcctatcctgagccacgagtttgtgatccagaaccacgcggacatcatctcctgcgtagccatggtcttcgtggtcggcctgatgaacgagtcgacggcggcgttcgccagcgcgttcatatccctgcaccacaacgtcagcggtgaggaccccagccgggagcagccatatggcaagccatacacctacatcgccggcatcaaggattactgcgcgatattcttctacacgctgacctgcataatcatgcacgcgatcatccaggagttcgtgctggacaagatcagcaaaaaactacacctgtccaagttcaagctggcccgcttcaacgagtccggccaactggtggccttctacctgctctccttcgtctggggcgcccacgtgctgctgaaggagggctacctcggacaggtggcccagctgtgggagggcttccccgaccatcccatgagctttctgcacaagttctactttgtggtgcagctggcctactacctacacatgctgccggagctctacttccagaagatcaagaccaaggaggagcagcagcccaagatcgtgcactcgatcagcggcttcaccctgatcgtcctggcctacacgcttagcttccagcgcctggccctcgtgctgctcacgctgcactacttcagcgagctgctgtcgcacgtcttccagctgatcggcgtgttcgaccgcgaggagcgactggccaagctgcgggtggtgaacaatgccgtctttttcctgatccgcttcgctacgtccgtgatcggtgtgctcacgctgtactacggcatcgggggtgtgcgatccctgctggccttgggcggcctgatcgccctgcagggctacctggtcttctccttcatcacggagcagctgcgcgccaagcgcgaggccaagaaggaggccaagcgggaggccaagctggcgctgcagaccaaaaagccagccaagacgcccaaggacaaggtgaagcgcaagaaggagagcgacctgcctgaggcggaccagacctcgcccagtcccatcaagcagaagctcaagtgagagccgtcccggccgagcagagcaacaaaatcttccgcacacttccaattcaaaacgaatgagagatagagagagcagcaccatggacaggagcccaggttggattggtggacacttgccactgaccactgaacactggctacttggctccctgtttgatgtaatctcgttagctcaaaactaccactgcaacatttctgctgcatttacttcctcgacacacaaaagaacgaactatttcttagcctaaatgttttgtttcatttaagtttacgtcatttttaaaacaaattttttttatttttatacatacaaaaaaaaaaaatgaaaaaagaaacaaatacaacaaaagagaaaagcaaagcccacactgcgtgttttcaattgctcctcctccttctcctgcaacttcccattgtcctggtgattaccccaaggtgatccatatggtgatccgaagcctgaataacttttctctcttgcaggacatcgaggaacagggcgccgaggacaacgccaccctgctgaccaccaccaacctgtcggacgacgactaattggagctcgttcagatgattccctgttcgccctcggttccagcttttgatttccggcctgcttgagcgatccaaagtcgctggctgggccatcgcccacttcgcccatccgtttgagacacacacgattacccagacacctggacctgctgagatggctccacgccagctgatccagtatgctaatcccgatcccgatccccaaatttcccctccgcttctggccatgaggcaggcggaaggcggagcaaagagtaatccaagcacgaagaagactgtttctgaaactactgtttagctatccccaaatttttccaatgcttgtcttcaccccgcactgtcccccccctcttaccaatcacccatccttacaaaactgtgtgcgtgtgtgtgctgatagtgtgtgtgtatgtgtgtgtgtgtgatccccaagatacccgtta

SEQ ID NO: 25133 - DNA, 1526 bp, DROSOPHILA
caagctgagtgtgacaagaataaatagttcggccaacaaatcggcttcacagtgaaaagtgcaagcaaacaaaaagtgagaagtgcgcgatgtgccatccctggtgtaaacacgcacacacacacacacacacgcgcaggcggcacacaggtgagcaccagtagcgcagtcgacagcagcagcggcgcaggcagcggcagaggcagagcgcccagagcagatacttcagtttgcgtcgattgtgccgattgagattcagattcagttccagatcacaacccgaatcggagccgccagtgtgtgccagacgcaacgcaacggaacggaacgcaaggcaacgtctacgtcagcaaaatcacgctgcaagtcaccagttggccggaagattggcgaaaatcctaaacccctgaaccagagcaatggccattaaaccgggactcggtcgcaagaccagcaacaagaacccgcctatcctgagccacgagtttgtgatccagaaccacgcggacatcatctcctgcgtagccatggtcttcgtggtcggcctgatgaacgagtcgacggcggcgttcgccagcgcgttcatatccctgcaccacaacgtcagcggtgaggaccccagccgggagcagccatatggcaagccatacacctacatcgccggcatcaaggattactgcgcgatattcttctacacgctgacctgcataatcatgcacgcgatcatccaggagttcgtgctggacaagatcagcaaaaaactacacctgtccaagttcaagctggcccgcttcaacgagtccggccaactggtggccttctacctgctctccttcgtctggggcgcccacgtgctgctgaaggagggctacctcggacaggtggcccagctgtgggagggcttccccgaccatcccatgagctttctgcacaagttctactttgtggtgcagctggcctactacctacacatgctgccggagctctacttccagaagatcaagaccaaggaggagcagcagcccaagatcgtgcactcgatcagcggcttcaccctgatcgtcctggcctacacgcttagcttccagcgcctggccctcgtgctgctcacgctgcactacttcagcgagctgctgtcgcacgtcttccagctgatcggcgtgttcgaccgcgaggagcgactggccaagctgcgggtggtgaacaatgccgtctttttcctgatccgcttcgctacgtccgtgatcggtgtgctcacgctgtactacggcatcgggggtgtgcgatccctgctggccttgggcggcctgatcgccctgcagggctacctggtcttctccttcatcacggagcagctgcgcgccaagcgcgaggccaagaaggaggccaagcgggaggccaagctggcgctgcagaccaaaaagccagccaagacgcccaaggacaaggtgaagcgcaagaaggagagcgacctgcctgaggcggaccagacctcgcccagtcccatcaagcagaagctcaagtga

SEQ ID NO: 25134 - protein, 368 aa, DROSOPHILA; identical to SEQ ID NO: 24333

SEQ ID NO: 25135 - DNA, 2353 bp, DROSOPHILA
gcagtgaccacatccggcggcgacatcgtggagttcgatcgctttggccttcgccgccatcggcgggatgataatcctccggagtggcggcagtcgctgatggtgggcgatgtgccggagccgtggcacgacttttgggacgaggtcctgcagcaggtgagtgcagaatccgaaactaaagggtgcctcgatttgtagctggtaaaaaatggtttatctcagtttctgtttgaaatgtatgtatacaaatggagtgaatgagaatagaatatggccagttgccagactgtattctgcactttgacatatccattcaccctgttgagaatcaatgcaaatccctaaccactcatctatcctttggtccatttgcattcacagatctgcgcccaatcggtgcgctggtccatcgccagttatgcggaggagagccacaactgctacgccttcgtcctggccttcctgcaggccctcggccacgcccacctgagcgaggccgcccgcagcaagaccgccttctgtgagcagtgcattgttccaaggacgacgacagcgggcaagtacatctcgctgtatcgcaaaatccgcaggagcggcatctacgtccatcgccagcagcctaaaaaccgcagtaagccagcatccgcaactcctccaagttcctacccctcagactcgtgcgatggccttggcagcagcaaaaaggtctcaaaaaaaggatactccagcagcagtattacaggacttgccaaccgcccgcggcccacgctctgcaccatcgaagagtaattaatcgattagatagaaattgtgtttgcaactttgcaaagactttagcgtagttaaatttaataaattcagaacaaaaaattgtacgttacatttgtattaaaaaggtaaattgtgggtacaaaggcgccaacgtccttagtgtgaagttcatgtacatctttggaatgattttagcatatatatacccctatatacaatatatatacatctattgcattgggggtgcgacattctccctgaacaagttgttgtagttgccagggggattgtagttgcacacaacatagatggtactgccactgaagaatgtgtttagtcaaagacttaataattaagtttagatcttacctcttcgcaaaacccacgcctagctcggtggagctcttccagaccacctgagtgaaatggccggtgttaccttgaaacgacggagaattccaattgtactgtcgaatctcttcgtaccaggatctgacggcatcggcacctttcagatttcccccggaggccatgtaaatgttctcaccatatccactgttctgtcgatgttccatgcgatttctggacagcaaatactataatagcgatttgctggagcttcaattagttgatgatctggagaatactcacattggcccattccgtggccaatcgattcagtttgggactcaaagtcaagggttgagcaccatgcttggcccgatataaattgtgggcttgaagaacttcttgctcaaactgaaatttgcaattttaataaacaaaaagaaggatatatgaaacttgttttatttgatgtaaggagctaccggataaattcctctgcttcccgccttacttgttgagcgctcattatgccgcttaaaattaacgtttttactcaagttaatatttaaattttgaactactttcgctggcacttgtcttcggaaactgttctcgtttggggatcggcgacacttttttatatcgattttcttatcagcttgccgaagttttgcacacactctatgcagttgtgtttcgacaattaaagctgactaagctatgatgattaagatgccggtgtctcaatgcccatcgtcactatgtgtactgaataaagcaccttatctctgcactgctatatatgtataaataaaacatttaacaataaatgaataattattaattggccaataaccgataagaatgttacgtattttaatgttaaaataacattagctctgtgtaaaatcaccttgtcattatggtaacccctataatcggatttttcgaatagattttaaatggagttttcttgacggctcacggcgaacccattcacgaccccggaggaggctgcctcgtccagatttcatatccccggctcggcttttgtggctgccactagcgcctgcctcattaatgaacgcaatatcccagacaggagcaagtgacaggacaggaaacggaaacgaggacgaagacgagggcacgaacgggactcttggttatgcaaaactgtcatgaatcgggaaaatgtaattacattctcgttgatgacgttgatgagcagcca

SEQ ID NO: 25136 - DNA, 304 bp, DROSOPHILA
aaatcgcatggaacatcgacagaacagtggatatggtgagaacatttacatggcctccgggggaaatctgaaaggtgccgatgccgtcagatcctggtacgaagagattcgacagtacaattggaattctccgtcgtttcaaggtaacaccggccatttcactcaggtggtctggaagagctccaccgagctaggcgtgggttttgcgaagagtggcagtaccatctatgttgtgtgcaactacaatccccctggcaactacaacaacttgttcagggagaatgtcgcacccccaatgcaatag

SEQ ID NO: 25137 - protein, 98 aa, DROSOPHILA
MEHRQNSGYGENIYMASGGNLKGADAVRSWYEEIRQYNWNSPSFQGNTGHFTQVVWKSSTELGVGFAKSGSTIYVVCNYNPPGNYNNLFRENVAPPMQ

SEQ ID NO: 25138 - DNA, 4858 bp, DROSOPHILA
gtgctctagatggcttccgttcttggaggggtttttggccagctcctggactttgttttggccataaatctgtcgcacgcgtttgcctaatgcatttgttgttctttattaaattgttttgattgctctgcctgtgggcttgtttttctctcgacttctgcgtcctccgtgttaattcgaatgtgtaaacaaaagataaacaacaatctggttcaagtacactgctacaatattgggcaaactgatatcaacatatgtacatatcaatagaagaagttcaaaaaccaattagaggaatttatgaatgtttattgaaaatatatgcaaaacattaaacaaaagcaatagaatgtttattttccagtggtgtaagtaatagttgtctataaataaatgtgaaatgctccgaaattcacaaaatatggaaatgcatttctatagatgcaaatgcggccatgcaatccacacaaatgaatacactcatttcaaatgtttcacgcattccctgcgtgccgtgtatgtgagcacacagtggcgtgcggatggtttaaccaaggggttaaggattactaagctgagtaagcagagttttggagttaaatttagcaactaagagtgctgttggaatttaaacttaagtttacattttgcaatctaatgtaatcagggataaatgaatttatttgatgctttttagtaaaggtttaagagagtttttcaaaactgagataaaaaggttgatagtattccgtgagtaatcttttaccactatctttaaaaacgaaatttatatgtatgcttatatgtaaacccacgaatggcatacaatattatttgttggatagatgaatttgcgaccccctttgctgggcccctgtgcgtgatgagtgcgtgtgtggctgtgtgagagttccactcgttccatttcgtcaccggcttttttgctttttagctgccgcatcgagtgaagcggctcagatgttctttggaagtgcgctggtcaagtcgtcggaaaagcgccgagaagcaattgcagctaaagaaaaatctagccaattcacaagtaaaagtgttagtcagtttgtataataaatacacaacgcagttgagttgcagtagtgcaaaaaaacaaaaaaaaaaaaaaagtgaaaaaattaacagagaacaattacgaggacagcaaaatgccggtcgatatatgcagtcaaccgcacaatttgctcagttcaatgaggtaaactattaaacgatgctgattgaattttccccattctccccaatcgagttttccaattaccatggcctctaaagtgaaaatgcaatatgtatcgggaaaatatcttgagtcttaggatttcttttaatttttattagtttttaatagcgtgtttaatttagagattttactcacagttttgagtcataaattctcccaaaaaagtacaaatgggaaaaaattgtgtaaattttaagtataaataattgttttttgttttttaataatgtggcatttattgctagctggtgcactgagataaaaactgatcccttatggtttcaattgagcacttccagagttgaaatcatagaaaagtaacgaaagtgcaagtggagtaagctctgatatgatacgattcgtcaccatctcttatcaaactaattgaagcgccagacttcagaccagactaatatccgatattatatctgatatctttatggccatggctttccggctttgctgtatattaaccaaatctaatgtgtccgattctagctctatcttttgtcagtttattgatgtggagtgattcgtatctggattgtcagcaagtccaatacttgaccttttagatgtgtgctcactgtaattacagcacacaaaaagtagctacattaatgatatttacatcgagaactctgaattgtggctggcattgaagatcaagatagtcgtttagagtgtttgtatataggaaaggcgaaatagaactgccatatcatgaggcggcattgaaactattgagaactacgcaatgcgaccttggatatgtaatacgcaatcgaagctatagcaatcaaaaacaatcagagatatacatatctttaaatatatttagctatcaaataaagggtaattctcaagggataatcaattaaaaatcagaatatatgtacaaagatacaaagatatattttcgaaatgagcaagccaagtttagtgaccatttaattcttaatggcaacacctctaaatatgatgtatccattcctttgtctgattgcagtggaacaacagatacctcgttgtcgctgaactcattgtccctgacttccgttctgccgccaacggatcccgatcaccataatccacacagtacacacagtacgcacaacatgaacaagctgtgccgccaagtgtcaattgagtcgcccggtccgggcgccaagaactgcgtcttcaacttcttcgtgcccatcgaggacacgccggcgttgggcgcccgcatccggatcgtttgcgccggagcctgctatcgtcgtcgcgatcgcgccaactccatcaccagcatgtcctcagtgtcctcggagctgagcgactactgtccgtcggtgaactcgatgtcctcgcccgcacaccagggcatccgggagggctccttctttcccggcttcgaggtggccggcgtcatcgagtccctgggctcggagatcaccgaggccaacaaccgtggcctgcgcattggacagcgcgtgatcgtctatccgttcgatgagaccccagccggctatgccgagctgctggtcgtgccggacctgaagcacgtggtgcccattcccgacagtctgcccatggaggtggccgccatgctgccgacgggcgccctgctcgcctggaatgccgtcttcaaggctcaggccgttgtcacacagattctcagccagcgggctgccacggagccgaagcggaagcccaagatcctcatcgtgggcactggcggcctggcactctgggccgtgcgcatcgcctcctatcactttgccacaactggagccgacaacgtggacatcacagtggccagtctgcgggacgagggcttccgcctggccacagaaatcaaaaagtaagcatcttgaggtccctctgatgtgtcatgctctaaccatctaacatcctcctccttcctccagtgtcagcgtggtccagtggaacgaatgcctgtacgagccgcagctgatcgagcgcaccaaggacgtgtgcggcggagccgtggacgtggtcattgactttggcacaacctccaggagtctgcaccgctcgatgcactgcttgtcgaagggcggcgttgtgctgatcagcgacgaggtggccgagaagctgctgcccaagttctcgcgcctgtcggagcagtaccagcaggagatcatcgccatctcgaacggcaccgccgagcagctggctgagctggtggagctggtagccaacaagaagatcgagccgccgccgcactccgtcttcccctgcgagcaggcggccgaggtcatcgccaagctgtgcaactccgagatacccggacgcgccatcctccgtttccacgacattgagtaggcgtggaggaggatatggttccccatcaaggcattaactcatttaatatggatatctgttagctgtattcggaagacaaccgacaaaaccgacaaaacaacctgcaacctgcgacactctcgaagcggattcagaaatgtgcttattttgtagccggtcattgttttgtaaccttaattttggactgcagacgaactcctcgttttaattgatttagcgttttaggcatttttagtattatgtacatatagattgtgatttattttatttgtaagccaccaccatgattctacttttgcaaagtcacccatcacatcgccatattagccggagtcaaaattcggcggcttcttcaatgattttcgattaagcaaaaagcccagcagaagcggattacaaaataaatgttatacatactatacacgaaattgttacgcatgcgatgcaaatgtttgattcaattgcttgatgtttgtactcattacgtacccaacattatactctactcttattcacaaataaaaaccattaactatcaatccatgggggctgatctaggttgcaactgcttttcctgatatttcttaggtgcctccgtaggatggccaatttggcctctatatgctaatctttctttagcatactgttccttttttcaaaagatattgtaggcaatatcattcgattacaaagagtatatcatcgctagcataaaattgatgtatagatatcaaattagtttcaggacagactagttttagccgatgaagcttaaggtgcagcaaattttcactttaaaaacgttttttttttagtttcaaatgtaacagctatttttaaaggtgagcaacaaacagatgtggcaaccccataagcgcttctcttatggttggcagcccaagccggactgattggtgttggaaaacgccgcaggtggaattgcgccaaaaactgtaaacagcgcggcaagctgatcgcaaaagcaagggagtcaatctagtgaagacccaattgaattattgctgacgttggcgacttgttaagcgactgatagggaatcgcagcgcgatggttaataaagagaacgcccgcagtgtgggccagcaggtgaagtggatcggaagccaagacgaactgccgccggtgaagaatctggagcacaagaacgtctacttctaccagaagtgcatctacggtccgctgactttgtccgttggcgactttatactggtgtcgaacgcggatgccgcc

SEQ ID NO: 25139 - DNA, 1577 bp, DROSOPHILA
tcaagtcgtcggaaaagcgccgagaagcaattgcagctaaagaaaaatctagccaattcacaagtaaaagttggaacaacagatacctcgttgtcgctgaactcattgtccctgacttccgttctgccgccaacggatcccgatcaccataatccacacagtacacacagtacgcacaacatgaacaagctgtgccgccaagtgtcaattgagtcgcccggtccgggcgccaagaactgcgtcttcaacttcttcgtgcccatcgaggacacgccggcgttgggcgcccgcatccggatcgtttgcgccggagcctgctatcgtcgtcgcgatcgcgccaactccatcaccagcatgtcctcagtgtcctcggagctgagcgactactgtccgtcggtgaactcgatgtcctcgcccgcacaccagggcatccgggagggctccttctttcccggcttcgaggtggccggcgtcatcgagtccctgggctcggagatcaccgaggccaacaaccgtggcctgcgcattggacagcgcgtgatcgtctatccgttcgatgagaccccagccggctatgccgagctgctggtcgtgccggacctgaagcacgtggtgcccattcccgacagtctgcccatggaggtggccgccatgctgccgacgggcgccctgctcgcctggaatgccgtcttcaaggctcaggccgttgtcacacagattctcagccagcgggctgccacggagccgaagcggaagcccaagatcctcatcgtgggcactggcggcctggcactctgggccgtgcgcatcgcctcctatcactttgccacaactggagccgacaacgtggacatcacagtggccagtctgcgggacgagggcttccgcctggccacagaaatcaaaaatgtcagcgtggtccagtggaacgaatgcctgtacgagccgcagctgatcgagcgcaccaaggacgtgtgcggcggagccgtggacgtggtcattgactttggcacaacctccaggagtctgcaccgctcgatgcactgcttgtcgaagggcggcgttgtgctgatcagcgacgaggtggccgagaagctgctgcccaagttctcgcgcctgtcggagcagtaccagcaggagatcatcgccatctcgaacggcaccgccgagcagctggctgagctggtggagctggtagccaacaagaagatcgagccgccgccgcactccgtcttcccctgcgagcaggcggccgaggtcatcgccaagctgtgcaactccgagatacccggacgcgccatcctccgtttccacgacattgagtaggcgtggaggaggatatggttccccatcaaggcattaactcatttaatatggatatctgttagctgtattcggaagacaaccgacaaaaccgacaaaacaacctgcaacctgcgacactctcgaagcggattcagaaatgtgcttattttgtagccggtcattgttttgtaaccttaattttggactgcagacgaactcctcgttttaattgatttagcgttttaggcatttttagtattatgtacatatag

SEQ ID NO: 25140 - protein, 381 aa, DROSOPHILA; identical to SEQ ID NO: 1647

SEQ ID NO: 25141 - DNA, 2783 bp, DROSOPHILA
tgataaacaaaatatacatatatatatatatataaaagaaagccgattcggtgtgaaattatgcttaagagatttacatgcctgactagcaagcgtatacaccccacaacgctgatacccttttatatatatgaagacacacaaccccaaaaatcacatatacacttgcaaactgcaaattttaagcatattttcatattattaaaactttattttaactaaaaaaaaaaacaagcgaaaaaaatctccatgtaaaagtcagaccactttcgatgctcccattgcacaactaagcgggtggcgactgagtgtgccaatgcccgggggcctccacttgacagcctgcgccagcattcaacactttgttggggcatcatcacactcatgtcggatacatcgggccagggcacaggcagagacaatcccaatagcaatccgcatccgaatcccccaaactcaaacccgatcccgatcccagcagcaacggcagcacgattatgttaatttcgggggccgccagagtgcagcattaacggagcacgcccaccgcatatggcagtgatattttggccagctgggatgtggatgtgtatggggatatggatatggaatcgggatggggctggatatggatatggattgctggatgtggctgttgcgcaagtggccagctagctggcaggctggtttcggttttgatatttgacatgcgccaggggccatcaggaaacttcgtttaaatgaaatcaaaatgcacaaatacataatttacacaaatttgccgtcgagctgcggtacgagtttatcgcctcggttgggcacgaaaaagagcggctcctcagatggctgggaaaatgctggcggattgtataatgcatcgggtattccaggagcgatgagcatccagcagatgcaggaagaactggcatccaaacatagtttttcgatgaggggcacgataagaacaaacaaaacaaaaacatcttgtgcattatatggtttaatttttatatgtcatattaatttttctatcattttccagtacattgaatatccaggtaacatagttggctagcctagtgtacacgcctggaaaatgtgggtcagcacatccatgcgcaaaggatacgattccatagctactgccgcggtgaaccaagggagctcctgagtcgccgtagcagtgatctcgtccagctccagctgcacacaccatatcatccgtgatgggacgatgcagatgggagtaaagtcgctggcaaagtctctgattaataactttcaccactgtgccacgtagtctaggttccgattcactgtcagtggcatctggattgccccaaccggcaaccaaaagggttcgtggaagtatattaagactcggaagcggcagcttcaccacctgaatatttcctcccaaagtaaaggatttatctaacttcaacaaggcgatgtcgttttccagagtacgtagattaaaatctggatgaaggataacactcactacgttccttctctgaccaccaccatcagtgaaagtagatcctgcacgaacggagtagctatctggatactgaacacaatgtccagccgtcaccaaccagagtgatgtaatcaatgccgaactgcaactatagttgccatgcaccgtgatcgaagccaaccatggtgtaagatgaatgggcacctctactccacccacgatccgttcctggggcgataaagcactggttttatggccacaaatgagcagtaaaatcaacgccaaaatattcatcatccgtacaaaaacaaatggaccgtaaagaaccaatattggccgataactgaaatttgacttcttgacccttgggcgcgaactctttgctagccagccgggaatcacgaatgctaatgacctccgggtttggcatgcgacctactgaatttggcatgaatattaattgacgctttaaataaatactatattctttctcttgggtgccttacaacgcaatctcaagcatggattttttgtttgagcgtaaattcaatatattgttaaccatagacaatttttaggcaatttctttactattataatttattttaaaatttcgaacttaatatttacgtaaactcacaaaagcatctgatcaatttataataaacttaatctctctagaaaatgatgaaatttttgtttgaccttttctgcacaaatcagagattaatacttctttgcaactttcttaatccagcgagtatattgcaacacattgacatatacacccggatatttggcactggcacaaccgattccgaacgatgttattccgtagagcacgccattatggaccagtggacctccggagtctccggagcaagtatctcggttctttcgtttggcgcagatcatttgcttgtatatcttgatcccggtgccccgataatcttgctgacacttggctcggctcaccttgcacacaatcacgccccgcagatatcgctggacattctgggcgttggctgaggtcagaccccatccgctggccaggtaacatttaggaaatcgcttcgttctcgtggagggaagcttcaccttctggacacaccggccgacattcagtggagtctttagcttcatcatgcacaaatcgttcttcatggtgtattcactatagtttggatggcacacagttttctgaacatgtcgaagttgaccgcctcttctctgctgcgttgatcccgctcgaacagtataccttcccggattgccgatcttgcaatgctgggcagttaga

SEQ ID NO: 25142 - DNA, 783 bp, DROSOPHILA
cggatgatgaatattttggcgttgattttactgctcatttgtggccataaaaccagtgctttatcgccccaggaacggatcgtgggtggagtagaggtgcccattcatcttacaccatggttggcttcgatcacggtgcatggcaactatagttgcagttcggcattgattacatcactctggttggtgacggctggacattgtgttcagtatccagatagctactccgttcgtgcaggatctactttcactgatggtggtggtcagagaaggaacgtagtgagtgttatccttcatccagattttaatctacgtactctggaaaacgacatcgccttgttgaagttagataaatcctttactttgggaggaaatattcaggtggtgaagctgccgcttccgagtcttaatatacttccacgaacccttttggttgccggttggggcaatccagatgccactgacagtgaatcggaacctagactacgtggcacagtggtgaaagttattaatcagagactttgccagcgactttactcccatctgcatcgtcccatcacggatgatatggtgtgtgcagctggagctggacgagatcactgctacggcgactcaggagctcccttggttcaccgcggcagtagctatggaatcgtatcctttgcgcatggatgtgctgacccacattttccaggcgtgtacactaggctagccaactatgttacctggatattcaatgtactggaaaatgatagaaaaattaatatgacatataaaaattaa

SEQ ID NO: 25143 - protein, 259 aa, DROSOPHILA
MMNILALILLLICGHKTSALSPQERIVGGVEVPIHLTPWLASITVHGNYSCSSALITSLWLVTAGHCVQYPDSYSVRAGSTFTDGGGQRRNVVSVILHPDFNLRTLENDIALLKLDKSFTLGGNIQVVKLPLPSLNILPRTLLVAGWGNPDATDSESEPRLRGTVVKVINQRLCQRLYSHLHRPITDDMVCAAGAGRDHCYGDSGAPLVHRGSSYGIVSFAHGCADPHFPGVYTRLANYVTWIFNVLENDRKINMTYKN

SEQ ID NO: 25144 - DNA, 5832 bp, DROSOPHILA
aacctcacctgtgatctcagcgaaacgaaactcatggcgcgcttcgtggcgctcagctctgggttccaagagcaagtccatcgccatggcctcggatagcagctcagatcccatcgatttggaggcggaaccagtgtttttcgagcacagcaggtgcaacagctactgctcctcgtcctccgccttcaccgaactaccgcatcccgccatccaaattccccaaggcgatgagcttatgtgtaagttggcggataatatgtgttcaggttttgggatatctgattggccaaatccagtctccttcgtaaaaatcgtgctaaatcgtgcttaaatacgcttttaattcgcctgatttgaggaataagatggattgaaatgcgtcgcatgatataagtaaattcactaaaaccctaaaaaacccttaatatgattttatttaatatgattttaaggccacaattaatcccatagtcagtggccatcggtatcgtccaatgaacccacagctagttatttagtatttagtattgtagggaataatattttaacatttgcctaaaaatgaagtacttggcgagaagataaaaaccgccggcctcttgactccatccagtttatagttaagattgttaaattctgagtaatgcattctgaaatagacctacacgttaaacaactgattagataaacgtcctgggggatctcgcgatttgcggatcgacaagtgaagatcggacaaattcggttgaagtgtacacctgtattataaaaaaaattgcttgagcccgccaaacggtcaattccctggtcaattcgagcaataccagcgcccgataagctgcgtgccgtgcccggagggcagataagaaaggtgtgtttacccgagcgcggcgcacatgcgttcagttcgagtcgattgctcatttcgctagtgttcagctgtttacggctaatatattatccggcagccagtcagtcagtcagttggagccatcgacgtgtcgcacttgcctgtggcgcccgagtgaaatgtttccggtttaggcaaaccaacgtagtatacaggcgcactgtgctcgtaatgaacccatagccatatactgcccgaaacgaaacccaacgcaacgaatcgaattgaaagcgccgtagttccgtggaatatatacacctcgacatacgcgctgcccgggtctctgggctgggctggtctgactgactggagagtcaaataaaataaaacgcgtttaccagtgattacacgtcggtgttatgtgcagccgattctatagtcgagcggaataaaccagcagcgccacagctccaagggttacacaatgccggaggcgctacactttacatcgatctttgatctcatcatcaagagcggtgcgtgcacttccaaagtccaattcggtgcgaagacattgccaatgcggggaagcctttggtttattacaatataaaagcattctgcttagacgatatccactgtatccgataagtatactctgtgaagtaccctcgcctcgataaagcaaccgttagcaggcagcagtgtgacacagtttggcgtcaatttgatcttgacaccatgagcatgaaccgctttcaagcatttagtttattcatttagctagcctttggcgttcgatttctttatgctcttgtaatgttttgaaacttgttgatttgccattgaatccgattcacaagcttcccgaacatgtttgtcgcagttgtttctcagacaggtttgattacaagtcagtcagatacatatgtgattaagtgttgcaatgccacacatgtggaaaataaggaactaagcaaaatttgacagttgaaatattaacaacacaaccacacaaaatatacaataatatgtttgtgccacaagtgggccaccaaaaaagacccttcgcttattgctgctattactttaatagatgtgggtgggtcatgcttatatgcttatatttaggcaacttacgaactagctagaacaatatatcctgcaaaaatataccttatgatcaatactctgccattgcagcgatgccatggtttggcatggacatcggcggaaccctcaccaagctggtctacttcgagcccaaggacataacgccggatgagcaggatcgcgaggctggcattttgcggaatatccgacgctacttgaccaaaaactcggcgtacggcaaaaccggacatcgtgatacgcacctacaggtgagatgagcgaccaatggaaatgtgggtgtgcgattttgtaacaaagcaaagcaaaaccattagcatcggtattatcacccaaaatattatcaatcgcagcgcgccgagccgcgatatttgcccgcgatccagtcaacaagtcatcttgtgcgggtcggaacgggtcgtctggtgatttcaaatgagttcgggtgctagggttttcgagtgtgagtgcctctgctgtgaccttcactctcgcgcacacacgcctacacggaaagcaaaatcgtgctggtagattagttcattgatgtacttaatctgagtcgtaaccaagttgattagacgtttagcgattcaatcttgataccatcgggaaagcttgcattcccaattggtggtctgtatttgttttcggtgtaccacacacttatctcgcactaatgagattcctttgtttaccttcgaaagcaagtgattcactgtcaagatggtttgcatgtcttattttcatttcaataaacgtttgagccgccatagtaaatcttaagagaccatattgcaaaataaattgttcgacaggctaaaaattaaattaaacaaaatatttttggtgtaaatgtcctacaattaattgcttatttaaaacatcggggtaaatgccccgcgccgaaatagtttgttattcaaagagtgaggccaaaagttgaacactttctaaagaactatgtcaatttacagacgctccctgttgcaagtttaattttcaattttgtacaaattaccctttcacttagactttggatagctaaaattaatggcgatcgtataatcacaccgctttataacctagtaacagtttggacagcactttcgcgaagtgaacattgacttttgcacttttcatttcaattttgtaataggttcagaagtctaatttgcatatttacgtagctcatttctcactcttccgcctggaatacgattgaaagtttttttaaagatgaaaagaatcttattattcttagaataggtaatatttattcgccctaagcggtttttgtaatccctatcgtttttcagatggacaatgtcgagatacgcaaaagacgcggctccttgcatttcattcgcttccagaccacggacatgggcaacttcctatcgcttgccaagcagaagggcatggccgagctggtgaccacggtttgtgccaccggcggtggcgcattcaagttcgagcaggatttccgcgaccaagtcaacatgaagctggctaaattcgacgagctggacacgctcatcaaaggcattctcttcgccgatctgcataatcgcacggagtgctactactacgaaaacgcacgtgacattctgtaagtggaccaagcgctggcgtcaaggagtctgtagatcctaaccatacaatttgtagaaaaagcgaaaagcagcagttcaatttctctcaaccgtttccgtttattctggtgaacgtcggatccggagtctccatcctggcggtctacggtcccgacaactacaagcggatttcgggcacgaggtaagactgctcttcatgaaattacacattattgcaacgatgctaaatgaaatgtattgttcagcttgggcggcggtacattcctcggcctgtgttgtctactcaccggctgcacatccttcgaagaggccatccaactggccaccaagggtgacaataggaaggtggacaagttagttaaggacatttatggtggcgattacaaccgctttggtctccccggcgatttggtggcgtcaaggtagcaaagccagaaatgaagggccatgtaccagttacgaattttccatttctagctttggccagatgcatctcaacgacaaacgggtttccgtatcacgcgaagatctggccaacgccactctggtcaccataacgaataatatcggctccatagcaaggatgtgcgcgctgaatgagaagatcgatagggtaagtatcaattttcgttacatacatatcctcgtagactgagcaacaaacccatttcaggtcgtctttgtgggcaactttctgcgagttaaccccatttccatgaagctgctggcgtacgcaatggagttctggtccaatggcacaatgaagggtcttttcctggagcacgagggatactttggggctctgggttgcctgctgcagttcaacggcgagctggcagccgcccttaacgacggagtggagcattcaatccacactgaatccgattcagcaagcgaagcagcacagacatcttctacggcggacgagccaccagaaaaggcgcccacaagcaaacactccactagatagtcgctataaccacatgttcctcccaagggcacccaacgtgcgccagccgattgaagtgcatgtacagtagacctaagatcaataaggcaatgacaatggcaatggcaatgactttggtccttcgcagttcatctcggtatttatcgtaattctttctcggctttagttgtaacttgatgacgcacaaattgtaaatgcatgaaattacgtatgtatggataaagtgcctgctagaaagcaacgaattttggcccgatcaaatggcgaaccacaatttatgtcttaatttttcgccgcgtaacattttaccatatgttactaccacgctatcttcgacagattcggtagtttttagtttcgattctaaagtgatagatgttagctctcagaaaagtattacaaatacttgacaatagaaacgcaattaaaagtctagcgcgcaacaaaatgacgaaagagcaggtatagcatccacctaatgattcttttaagttattatcttaacgtttttatacatgctttaagtggatgttttaaagttttctttttaggatccaattcgtggacaggtcaataaaacttgttctacacaaactgatggtatgatgatacagtttaaaaacaagacggtaatagccttctctctacctttgcctacttatacaattattgttaaggtttgtgttattctaaaaaaattccgtaataaactagacacgagttgttctgataagaacaaatagtacgctttacgggaaatcagcagacatcttgaatgtatatttgtacggcgcatttggtttcttcaaaacaatgaatgtataagatttggcacatttttaatatgggttatccaatgtgattaagtttcacttcgtttgtatacaatattgctgtagtctctccgaattccacagcttgccttaaagtcaaagacacgcatattgtgatcggtggccacgaacatatattggctatcacaggcgaggctgtacactggcgacaagccattatgacttcgcgtccttcccggaaagtacaattgtacgtatttcttcattcttatatcgtaaaggttgacccgtgcatgtctgttggtgccaaccagcaccgcgtgcagaccatcatactccaaggagtagaaggaggagtcgaacggatcatcccaaatggctacatcgcgatccacgcgtctgtcaaacatacgaaacgtgctatcgaagttggccgtgaaaatgacctggtcatctttcaatttcaggtcg

SEQ ID NO: 25145 - DNA, 1859 bp, DROSOPHILA
gtcgcacttgcctgtggcgcccgagtgaaatgtttccggtttaggcaaaccaacgtagtatacaggcgcactgtgctcgtaatgaacccatagccatatactgcccgaaacgaaacccaacgcaacgaatcgaattgaaagcgccgtagttccgtggaatatatacacctcgacatacgcgctgcccgggtctctgggctgggctggtctgactgactggagagtcaaataaaataaaacgcgtttaccagtgattacacgtcggtgttatgtgcagccgattctatagtcgagcggaataaaccagcagcgccacagctccaagggttacacaatgccggaggcgctacactttacatcgatctttgatctcatcatcaagagcgcgatgccatggtttggcatggacatcggcggaaccctcaccaagctggtctacttcgagcccaaggacataacgccggatgagcaggatcgcgaggctggcattttgcggaatatccgacgctacttgaccaaaaactcggcgtacggcaaaaccggacatcgtgatacgcacctacagatggacaatgtcgagatacgcaaaagacgcggctccttgcatttcattcgcttccagaccacggacatgggcaacttcctatcgcttgccaagcagaagggcatggccgagctggtgaccacggtttgtgccaccggcggtggcgcattcaagttcgagcaggatttccgcgaccaagtcaacatgaagctggctaaattcgacgagctggacacgctcatcaaaggcattctcttcgccgatctgcataatcgcacggagtgctactactacgaaaacgcacgtgacattctaaaaagcgaaaagcagcagttcaatttctctcaaccgtttccgtttattctggtgaacgtcggatccggagtctccatcctggcggtctacggtcccgacaactacaagcggatttcgggcacgagcttgggcggcggtacattcctcggcctgtgttgtctactcaccggctgcacatccttcgaagaggccatccaactggccaccaagggtgacaataggaaggtggacaagttagttaaggacatttatggtggcgattacaaccgctttggtctccccggcgatttggtggcgtcaagctttggccagatgcatctcaacgacaaacgggtttccgtatcacgcgaagatctggccaacgccactctggtcaccataacgaataatatcggctccatagcaaggatgtgcgcgctgaatgagaagatcgatagggtcgtctttgtgggcaactttctgcgagttaaccccatttccatgaagctgctggcgtacgcaatggagttctggtccaatggcacaatgaagggtcttttcctggagcacgagggatactttggggctctgggttgcctgctgcagttcaacggcgagctggcagccgcccttaacgacggagtggagcattcaatccacactgaatccgattcagcaagcgaagcagcacagacatcttctacggcggacgagccaccagaaaaggcgcccacaagcaaacactccactagatagtcgctataaccacatgttcctcccaagggcacccaacgtgcgccagccgattgaagtgcatgtacagtagacctaagatcaataaggcaatgacaatggcaatggcaatgactttggtccttcgcagttcatctcggtatttatcgtaattctttctcggctttagttgtaacttgatgacgcacaaattgtaaatgcatgaaattacgtatgtatggataaagtgcctgctagaaagcaacgaattttggcccgatcaaatggc

SEQ ID NO: 25146 - protein, 419 aa, DROSOPHILA
MPEALHFTSIFDLIIKSAMPWFGMDIGGTLTKLVYFEPKDITPDEQDREAGILRNIRRYLTKNSAYGKTGHRDTHLQMDNVEIRKRRGSLHFIRFQTTDMGNFLSLAKQKGMAELVTTVCATGGGAFKFEQDFRDQVNMKLAKFDELDTLIKGILFADLHNRTECYYYENARDILKSEKQQFNFSQPFPFILVNVGSGVSILAVYGPDNYKRISGTSLGGGTFLGLCCLLTGCTSFEEAIQLATKGDNRKVDKLVKDIYGGDYNRFGLPGDLVASSFGQMHLNDKRVSVSREDLANATLVTITNNIGSIARMCALNEKIDRVVFVGNFLRVNPISMKLLAYAMEFWSNGTMKGLFLEHEGYFGALGCLLQFNGELAAALNDGVEHSIHTESDSASEAAQTSSTADEPPEKAPTSKHSTR

SEQ ID NO: 25147 - DNA, 3460 bp, DROSOPHILA
gatcacgtattctaaccttcttcatcttgttcttgtgcagcagcgcgatggccacctcgttgtcgacgtccacctcgagcagctcctcgcacatctgggtgcacagatcgaacctctccagctcgtacgcacactgtgccgaccgccagcgggcctttgtgtagtctggcttgtagaacagagctcgctgggcgtcgctcagcgaggatctgtagttcttgatgaagaagtgagccgccgagcggttgttgtagagaacggctagcacgtcgggattgtccgtcttggtcttgatgccctcggtaaagctgtagattgccatgcggaacttcttgtgcttcatgtaaaagttgccatcctccttgtagttgagcgccagctcgtcgcgcgtgttctcctccggatcgtacttgagcttctgcagaccctcgaacatcggatgcacgtcatcccctggctgaggagcacgtttcatgaagaacgggtgcttgtccatctcctcctgccagcggtcctccggccagccctcctcgtaacgtttcttctccaggccatcgataaacgcatccagttccgcgtccagctgggccgccagctccagacgctcctcatccgtccaggctttttgtgccgccatttgtttcatttggtctaatcagaaacagtgtgaccgcagacgaaccgttacaatataccaactggccaaaggtgccgcacatttcctaaaggtggcgcctctaaaataagggtggccctccgtctatcgatagtcgtacgcttccttctttaaacgagctaaactcggaacgaattatgatcttaacatcttaaatcttaacatggtaaaactttaagccttttgacgctttacgcagctgttgtgatatatcagaaacatcgatagtcgccataacatattgttattgtatgagagttttaaaattatcgatgcgctgatgaccccttcatcggcgttttcccacccctaattggcagagacgcgactgagctgggacgtaccgttaccgttggcagagacgcgactgagaaataaaattaaaacgtcgacgttccttcctcgtagaagaaaccaatcaaaataaaaacaaacagagcgtgcgttcgcgccaaatacttaacaacaattagcaaacgtaagaagcaaagtgagtgtcgtcggctgcgggagcccgtgtgcccagtttggaactgggatccgacccagtccacgtccgtctcgtccccgctaaatttgtaactcttgtttccccgtcttgtcccctcagtgcataccctcacggcggccattgagatggacaagctggatgccaatcttgagcagcagtttgatctcaatctcatcgaggctgtcaagctgaacccagtgatatacgacaggtcgcactacaattacaagcactttgtgcgcaaggcccagacctggaaacaaatcgccgaaacgctcggtgtgcctgaaattactgtcaccagcgatgcacagctggccactgccgtgggcaaggaccaaaagccatacttctacgagccgccgctcaagcgagagcgcagtgaggaggagcacagcgacaacatgctcaacaccatcaagattttccaaaacaacgtctcgcaggcggtcagcgccgaggaccagtcgttcggcatggtagtcacggacatgctcaacacgctgggcgtgcgacaaaaggcagaggcgaaggtgcacatcatcaagtatctgacggacatgcagcttctggcacagcacaacaagtactaactgtcgggcggctgtcatcggcagctgctgcagctgctccaactggagagcgttctgccctgagatcaaacgagaacagacccacggctacccacatccacatctacacgggtttgggggtcctgtgcggtcattttctacagttcataggtcttaaagtcaaactacagaataacattagacgtaacatcccacagcgtaaaccataacgcgtaatgatacttccccacgcccatgtagacaaacatatatatttatatgcttagttgaccccatgatcggtgatttaattcgcgcccagttctcagctctgtacaaaaaatgcgattgaaaatagcgattctagaattatgagtagcttgttaaaagaccgtggaaacactttatatgcagcgtattgtaaattttgactacgatttagttgtaatttgccatcgggtcttagctctaaaactaagtatacacgtaaaagttattttaattttataagttctgttgtaatatgccgaaaacgcttgaaagacactttgaaatgcttaattaagtgtgacaaagggaaacataaaacacctttttcatagtgatcgcatattacacactttacatggatacgagtaaaatcgaaatagttgccggcaacgccagttgctaaacatttttaatgattaattgtgcaattatttggtattaaatgaaacatttgaaagtaaccgactagtttcaatcggggtgatatggcaacgccgcgagccagcggcataaacaaaatcagctgtgcgggctaatgattgattttatgtaattgaaatggccacaaaatcggataatgctgactcaaaatcggacaaatcaaaggaatcactagatgacgcatgggcagtaagtatccagctacgttaacagatccgagactcaggaatcccctttacagatccgaccctgtcatctgtacaaggaggagtacgacgactgcacgagttttaaggcgcgcttccaccagtactttatatttggcaaggacacagattgctcccaatggctaactgattaccgtaactgcgaacgatatcagcagtccaacgggaacgatgtggctgccggcaaagcggtgattaaaagcgaggaggagcgccgaaggatccgcctgcgcgcccactttgccaacgacacttggcagaagcgtaagaagccaccgctggattgggctgctcctctgccggactggatggagaagcgaaacgagaatacctatcttgagcttaagcaaaaagagctctctggacaggcggcgccgcaaggagaggaacgctcgctgtgcacgatcatgtgaagataaatagtaaattattagttaagaaaagaaggaagttgtttcattgttcttaaaagatttcagtttttcagcaatggtttctaataatcggcggtctggcaacgctcgtgtcagctgtatttgtttctgatagtgctgctacatttattaacatttattacatttattattattattgctttcattaaacacgtaaagacacatttttcttataaaactcatttgctttcaaagtctaggtgtttgtattacgaatcaaacaagttgtgtaaaatctaataaacgttagcagtggtaatcggtctaagaacagtaatgctgagaataggtaatctagctaaaaaata

SEQ ID NO: 25148 - DNA, 1754 bp, DROSOPHILA
gcgactgagctgggacgtaccgttaccgttggcagagacgcgactgagaaataaaattaaaacgtcgacgttccttcctcgtagaagaaaccaatcaaaataaaaacaaacagagcgtgcgttcgcgccaaatacttaacaacaattagcaaacgtaagaagcaaagtgagtgtcgtcggctgcgggagcccgtgtgcccagtttggaactgggatccgacccagtccacgtccgtctcgtccccgctaaatttgtaactcttgtttccccgtcttgtcccctcagtgcataccctcacggcggccattgagatggacaagctggatgccaatcttgagcagcagtttgatctcaatctcatcgaggctgtcaagctgaacccagtgatatacgacaggtcgcactacaattacaagcactttgtgcgcaaggcccagacctggaaacaaatcgccgaaacgctcggtgtgcctgaacaaaaatgtacgaagcgctggaagagtctgcgcgacaagttcgcccgcgagatgaaactatgtcaggaatcgcgctggcgttacttcaagcagatgcaattcctggttgactccatccgccagtatcgagagtcgctgctcggcaagtgcgccaatgggagtcaaagcgccaaccaggtggccgatccgtcgcagcagcagcaggcgcagcaacagaccgtcgtggatatatttgcacagcccttcaacggcagcgccacaacctcggcccaggcactgacccatccgcatgaaattactgtcaccagcgatgcacagctggccactgccgtgggcaaggaccaaaagccatacttctacgagccgccgctcaagcgagagcgcagtgaggaggagcacagcgacaacatgctcaacaccatcaagattttccaaaacaacgtctcgcaggcggtcagcgccgaggaccagtcgttcggcatggtagtcacggacatgctcaacacgctgggcgtgcgacaaaaggcagaggcgaaggtgcacatcatcaagtatctgacggacatgcagcttctggcacagcacaacaagtactaactgtcgggcggctgtcatcggcagctgctgcagctgctccaactggagagcgttctgccctgagatcaaacgagaacagacccacggctacccacatccacatctacacgggtttgggggtcctgtgcggtcattttctacagttcataggtcttaaagtcaaactacagaataacattagacgtaacatcccacagcgtaaaccataacgcgtaatgatacttccccacgcccatgtagacaaacatatatatttatatgcttagttgaccccatgatcggtgatttaattcgcgcccagttctcagctctgtacaaaaaatgcgattgaaaatagcgattctagaattatgagtagcttgttaaaagaccgtggaaacactttatatgcagcgtattgtaaattttgactacgatttagttgtaatttgccatcgggtcttagctctaaaactaagtatacacgtaaaagttattttaattttataagttctgttgtaatatgccgaaaacgcttgaaagacactttgaaatgcttaattaagtgtgacaaagggaaacataaaacacctttttcatagtgatcgcatattacacactttacatggatacgagtaaaatcgaaatagttgccggcaacgccagttgctaaacatttttaatgattaattgtgcaatta

SEQ ID NO: 25149 - protein, 253 aa, DROSOPHILA
MDKLDANLEQQFDLNLIEAVKLNPVIYDRSHYNYKHFVRKAQTWKQIAETLGVPEQKCTKRWKSLRDKFAREMKLCQESRWRYFKQMQFLVDSIRQYRESLLGKCANGSQSANQVADPSQQQQAQQQTVVDIFAQPFNGSATTSAQALTHPHEITVTSDAQLATAVGKDQKPYFYEPPLKRERSEEEHSDNMLNTIKIFQNNVSQAVSAEDQSFGMVVTDMLNTLGVRQKAEAKVHIIKYLTDMQLLAQHNKY

SEQ ID NO: 25150 - DNA, 14657 bp, DROSOPHILA
atatatgtatatttatatttagtttacttataattagtttatacttttaagatgtagtggtaacgttttaaagcaaacttattgagacatatatcatatacaaaaattaaaaaaaatactatttgcgtcccccaaagatctcccagttggattttggatagactctttgccaaggattcccgtaattagccattttaggagttctgttggaaacgaatggccccaattagccctctctgttgatgaatgaagaccttttatcgacatagtacaaaaacgtatgataattaataaatattcgtgagcattgtactcaagaaaaatgtaaattttccgaaaaatatgcacgacaatgacccccatttgacgttaagatctgcttagtgaaaaatagatttcatgttttggtagtgacaacacattcccggggatcttaatcccattgaggtctccttgatgaaaaccatatccttggcattgtgttcgtttgtgggtggaatatcattttctaaacagatgcacagctttattggatattggatatagttttctgtacgttctggtttgtttaaatgtatcctcttggacgactctgtaaattttataataatatacatttataatgtacatatcaagttgctttaaacattaagattgtccttcaaactcccattacaagacacgagatacattttccgttggattgtgtttgtattttttaaaaacttgcataaaaaatgccgagataatgtttataaataagtgcttttgttcatgacagtaacttaaggtagctaaacggtataagcagatgcaaatgagtctatctttaaattacatgatattcagcaacaactaaggtcctactagtacataaatggatgttcttaaattcaaactgagcaatgttagtcggtagtcgattgattcatgcctcatttcagctcgacaactaatactaggtagaggtaaatccgcaaatcccttttcgggtcgacgctcagttactcgcctcgtccgtatccacgtctgatatatctttgagttttacgttgccattgctgttgttcctgtcattgtcatccgccgccttttggaagttctcctgaagagttttgggatcgacgaccaggatgggtgtgcacccgtccattaggtgctcgctctggctctggtactgctcccgcgagatgctgcgagtgaaggagaatcgcagcgactttgtcctggtcagcctctttttgatgggtggcttgcccgccactggagccaatggctctgagctggtccgctctgagccttccggcgtggttggcacggagctggactccagctggtggtcccgcagtatttcctcagcaaagcactttatctgggtccaagcttccaggatgtccttctcagtggcgtgctcgtaggtgacgcagaagcggatcacgtagcggccgttgaacttggccggcgtcatatgcatcttgcccgagtggttgatctgggcgagcagcatgtggttgggctcgtcgccagttctgtagagaagattgagtagatcattaaagaccagcattcagatttagctgctttcttcagttaggtaaatactagctaacggttaatggtttataaatggtttaatggttaatagacttaccgcattcggaagcaaactaggccaaggtgaacatcgttgcgaacctcaaatcgttcatccttgcgcaccagcatctcaaacttcttagccaacgccatatgatttcgaatgtattcctgtaggccccgaatgccgtatgtccggaagacgaaccacagcttgagtgcccggaatcggcgactcaggggaatgccgtagtggcggtagtcaactccggtcaagtgctcgtgtcgtaggtagaggggattcacgttgagcgcgctcttaaggttcatcacatcccgcacccacagggcagaggcatcgaagttcgtcagcagaagcttgttgggatttgtgttgaaggagtcggcgtattcgagtcctgccgaaaagacccgcatctcgggcagaatgaaggagtttcccgcataggcgccgtctacgtgcagccaaatgctcgacacctggcggcacacctttccgatctccgtgatgtcgtcgaaagcgcagccgccggtggtacccacagtggccactacaaagaagggtgtcaagccggcgttcacatcgttttgaattgcttggcggagtaggtcaacgcgcatgcgtccatgctcgtcggcatcgattatccggagcttcaccagggccatcttggtggccttttccacggaggagtgtgcctcacggctggcgtatgcgatcaggctgggcaggaagacgctgtcgtgaacgctggtctgaccctttagctcgctgatggcccgggcgcgggctgtgattagagagacgagaacgcactctgaggcggatccctgaagggcgccgccgcctgtactgcctggggcatccgaaacaaaggccttgggcaggccaagggccttggcgtaccagttcatcacgatcgtctccagctcggcagccgccggacagctggcccagctgaagccaattgaaccaatggcactgctgagcatgtcgcctaggaccgatggaaaagagttgcccgaggggaagtaggcgaagaacttggggtggttccagtgcaccacgcccggcatgatcttctgctcgaagtcctcgagcacgtccttgaacggctccggcgactggggagcgtcggctggagatagagataaacaggcagtcggggattagtgggatgggccttaaatatttcgtttatcacccataaatttgggggggccagcaaaggcagtatttatggcgggtctgttgtttttggcagtgagtagaaagatcaacaagtaagtctatacgcaaggtgtgtgtttgcgtatgcataattaattgatttgtttagttgaactcgggattgcggcgtccattccggcgtaaatatttaacttagccaactgcgcggaattcgcctgaaattcgccagcgaaacctactctccaacctgccaacctctgaggtggacggagatcgaagatcggagagatggctgtcgagtgtgccccaattatgccggacccacccacgcatctcgttgcggggcacttgagtccgtgggctggggattttcgaatagtttacactcgcacattattcacatgactcttcggcagcgggcaaaacaattagtcaacatgatttaacaagtttttgagaggcattcagttgcttgttgctctggtctgtctttctttgattattttgcgcaaacgaaatattttcggattcattgctaatttgtttgggcatagttaacaaattagtgtatacaatttatcactagtgctataattaaactttttctttctggtttcaaatggaattctgcgaaaacaatcagacaaattagattcgactaacttcgaagagtattcaaaatttcccaggaaacttaaaaactctatgacatgccatggtgtaaattgtcagtagagtcccgtattttctatttgctattagactatgatcaatcagtattgggacataattatagatgtaaccaaaataaggacctgtacagtaagcacctctcaactcaaacttgacacaaaataactaaataatttcgatgttcatctttagcttttgccgggtctttgattttttcacacctcttctcattgcatgctcacctggtagcagttttttgaggtaacccggatccaaggtgggcgccacgtcacgctcctctatattagtgccgtattggcatatataatcaatcacttccttgccgtatttgcgaaactcttccacatccattttctctaatttacacttttcgtttatcttcttgttcaaataaattgcagtctattaagaagtatctgttggtgcttggtgcttgtatctctagtgctcggatactaggctctcacacggtacacagtagcttatctcgatcactttcgaatcccggttatctcgcaccgcacactcgttgcaggtcagcttccttgacgcgaatgtcttgcccactgcgccggaatcgtttttatatggcaccgatcggtctgttgctccatcgcaagatcggctactctcggcttctctctgtgctcggatgtattcccttctgacaccgacacctgtgaggtgtgttgtgctcggtgctcgtactgacgttgattgtctcgtgatcgcactcaaattactggcccggagactcggatcggactccgtttggctgggaaacccgctttggtcattatggacacatctctcgttcggctctcgcgtcgggcggagcattatcttgcttggcgaaaagtccctggtgggcaagggtttccagttgttggcttaattatatggtgagttcaatttgaagtgtgattgagcaacagacggtggtttcctacgtacgtgtagtcaaattattaattataattgaccaaaatagtttattatttaagcttctgaacattattgaggaattcacaaagagtaatattcgcgagcttgaaatgctaagctatagcgaatttatcgcattttcgaggcataaactcgaatttaatcgcgtgctttcttacagatattttaattgtgctcaatacctacctcaataaattcttcgacagcattcgcagacttttttatgacatttaaattagcttcgaatgtgaatattctgacacgcatggctcttcggggatcttttgggggttttagaaaatttcccaaatttgccgtaagtccgggacgtccaaacagtgtgcaaagagccaatgaaagagaacaaacttgtttgctctaatctcttgaagaagtaccgaaactttccgcggcttatggcaaccagtggggaatcacttccagtcccaagtggcgaacaagtgtccaaacattgaccaaatgcgttagcagaaagtcggatgtacgaatggccaaccctgccaagaggccgaactgatgacgtagctgtgaagagcgcccattgtttcatggaatctcctgctaggtgaaatacaaaaacactaatatcaaaataaacaatcgttgccaaatgaaaatcaccgatttgttcagtttgcgaggcgcgggaacttggcagataatgggtgtgggtgggcagaccgaacgaatgaatgggtttgttgtcagagtcagcatgaggcccccgcaatttggttgggtgctaattgccgacaagtacttatctaactttgccctgtaatgatctatacttaccttccagtctgtatgtttaatggtacgcggtccatcaacgttttcaagaggattagataaatagaatgcaaccgcttattcgcaggtagttagggaacacagtttgaatctcacattgttataacccgaaggagtgccttctcattcgtactaaataagttactgactatcttagatctctctctaagataagacaaagcaagccaaaccaaataacaatatacaatacattaactgggcgtaatcaatagataacctcctgcaggtattatcttgcaagttctgttcggaaacaaccgcaatccgaccactgtaactttggatgccatggcttggctgactcacccggcgcacgcgtcgcgccttgaagcaccgctcggtggtgggggcagagtccgcggctagagattcggagaccgcgggacagagatcgccccaacaccgtgacttgacgtatttcgctgctcctctttctgggcctgagcttcgccggaactttcattcacagtgccagacaccgcggatgacgtcgtgcttctaaatataagttcgtattcagtttacgcggtcacacatcgaaatgctcgatggccattgccatcatccatcgaatccatccgccttctgatgctgcttctgctccaacccggctgcgtgtttggatgtgtgttgggagcgcggctaacgcttttgttgtctaaccattaattatggcagttggcactgccaaacaccgatcaaaattcccatgaggacgcgatacagtcgagcatcgctaacttcgattgtgtgatatttggtaaagactttagattttggatgttatttcaatgctatttatatttcaaatattttatttcatatttcaatatttactgacagtgtgaacaagttttaaagagcgcccaatcttgggaatcaccaatgttttctaaatgagttcagctacatttgctcaaaggaatccagcatctacaaaaggggatttctgttggttgaggtgaaaaagtgtgattaggcttgagatatggaagattgatgttcagactcctctgtctgtctgttcgagagctgcctgtagatttttccaaaaatttgcattatatatgtgttttttatttgatggtgcgcgtgcttgacaatagctgacggatactgcatatgaagatttcgtgctccgaggctcttctattttcgtttatttttggcaatttcgcttgttttggattttgccagatcataccttaggcatttcattcattctggtggggcatactaatttatgggtacggtatttatttattggtttattcgatttgggggtgtcaaagattttgacagacgatactttgaatttcaatatattggcgccagtagattatggctcaggttatttggcgatttaattaaatgaatccgaacttgtttccaagttaatatttcgtgattttgcgtaatagattcgagctattaaggttacgattttattgacaaaaggctggagaatctttgaaagatgaccttttgcccaccagttctcttacatctctatagcctaaccctatttttcaaaacgtaaccataaacgatatattttattaacaattattcatttactcgcagttgccatgcgatttgttctatggtgaatttttacacatttctactattccttaaacatcccttaaccaatcaatctgcacaggtatgtcttcgtgctcagctccatgaatgtatttcaaaagtccaacgccaagtcaagactcacagctaatttgacagacgacccattgcatgcctataatgaggtcgtgcagaatttgattaagaactgggagtcgccagttgtctatctgaaaaaacgaggtttcctgcccagaaactacgaggatgcgtcaagaatcaagcacagcctggatgccctgatgcaacgaataaaaagggctaaacgggatcacacaaaggaggtcactttcaatgtaagacccaaagaaatggcaaaagcttacccaaggaatcaacgtggctttcagctatcaacgggcacaatgctctctagtttggagcagttgaaagtcatcgaaggccaggcaacgaaggccaagaccacggccaagtcaagtgagcaggagcaagagctgctggcaatgaagcggcgattggaagagttgcagcaggtagcaggtaccggtcaggatcagccaggataccgtaggcagattaaagtaaatccaatagacaaggatccagggaagtcagcacaaagttatgatgaaatattgcagcgaatgattgaaaagacgagcccacactactcacagcaatccaattcgcatttagaaacccatccaaatcaactagcgccagctcctccaggagcaacccaaaaacttgataatgtgcagatggctcccaaagaagacaagccgctgactttagaacatatcgagttgcatgcgtatacagcgcaaagtgctccccgaaatttattgcataaatccgtagttgatctgcccatacttagagcagcggagacccagaggagcaagaccgcaacggaggcatctaacgtggaatcgaagttgcgcgcgcccacctatctgaattgggacatgaaaaacggtcgactggatcattactcaagcgtggacaaggaggcctatttgaaccagttggtgagagtgttcgggcgcaatttggatttcaaggaacccactcaaaaaggaaaagagccgacagtttcttagaaccgcggttctccttcccaaaaacatgcactcatcttcataaaacgttttaaaatatatgagttctgttcaatgagtcataatccatttggaatccatgcccgtgcacagtaaatacatctatacgtttccatttccgatttcatgccgatcgacaatgatggtacgtcatatcaatggcatcaccatgattatttggatttcttctgtttaccttgcgcaagaaagcaaagaaaagcaggatatttctgtttaccatttgttagtacttaagcatatttttgctttcaatgttgattaaacagagatcaatacaaattttgctaatgggttgacgacatgcagtgttcaaccgatcacttcagccttgtatgactatattatattattatgaaataatatttattgcaattcataaacaagaaagatgttcgtttgatattttcgccacggcactcatagtattctataaagtttcaatattggaattcagaaaaagccttttactgtggcatgccaccgcattgtagattggtctagaattcaactaggcgcctgacctaaggaagcgctaatactgtattatagttgttccataaacggagtgaatattattagttgaggttgtcccgcgtggacgatgccttgcgcaccgccatgggcgatcgtcgtggcgatcgctgttccatctgctgctgctggacgttcacgtagtccaactcgttttccggagagggtgacgagccggctccggagtttcgtcgcgacgacgatggtcgtacgttggtgtccaggtgtcggaaactgaaagaaaaggatgtggcggacacaaattattcgttaagctcggtggtttgtctcttcactgtttgtcttttaaaatactttccaagtactttcgaacaagactcaccgcaacgagacgttactgcccttttcctcgttgttgctgttgaagaggaatgccagcggccaggatatccacgagttgtggtccaccgaactctgggtccggataatgggggcactgccgcggctcacaacgggcgagggcagctccattgagagcttgggagtgccggccttgttgatcgccgggttgtagatcttcggatcgctgaccatgcgcacgaagaatgagcgcttctgggccagcgtgtcctgcttcttgcggttcatgatctcggacagctcatcgtgctgctccttctccagcaactcgttggcaaagtccacgatgatgtcccaggcgtagtcaatgtcctcagcggtcgcgttttgggccacggcgcagaacctgatgatgtagcgatcgcccacgctggccggaaccatgtgcagcttgccggactcgttgattatgctcagcagcttctcattcagcttgtcggaacccttcagccgaaagcagaccaggcccagctaatggaatcaaatactatttattttggttccacaaatctgcggcgaatgactaaaaccaaactaaaaattaaaaatcaaaacatgaaggtatttgaaacttctaaagtaatagcgtgatccgaagtctctatcgtgtatgcttataagcgattgtctccatcgtttatgcttataagcgatttaaatcataagtatatatttaatattttcagttatctggcgaaagtttagcaagatacaaagaaatcctaacaatgtgctagcttgatttatttttactcccgaaatatgtaattagttggaaaactacaacgtgactatctgcagatccgctaccgaatcgaatcgtatcggccaattgacttggccacgcttacgctcaacgagtttgaacgttcatgtgtcagtcgctgactcgatgaatcacttgtggctgtctctaaatgattttcaatagcaattatgccaaaacacttccattgtcgggtcgaaaaagaaatccatttttgcgcccgtttctttgcggaatttggcgtgtagttgcgcacgtttgcttagtttgcttcgtttgcaaggcggtgtgaacaagttcacgtcttcgtggtcagagcttgggctccggacacttgcgttacccacgaatcaatccatttcccaactatttttggaccttacatgggcgctcggcccttggtccgcataatggacccgcactcccacccggttgcccgtggcaaatgaaaaccccacacatttcgtggggtgtacaaaagagctttgaactctgagcatgattaattaccgaaataaaccgaatcgattgaaaataaaacttaaaacacatatagaaaacgaaacgaaagcaaatatgtctcaccttgacttggttacagatctcgaagcgcttatctttgagcacgagctcttcgaaccgcttggccagcttgatatggtgacgtatataatgctgcagcccggaaatcccataggatcgcagcacgaacctgaaatcatacaagtctttctacaggcaaactcagagtggaattgggcaaataatattcttttgggtggtcacaattagcaataaacgtatgtttggcgttgtcatatttcgatgtggactcatctcatctgcgggatagattcggcacacacggagcaccgaaacccttgctttaacaactaatcgcaagcaaatacacgagggcataatttgagtaaacaagccagcatacttaacgccactccactccaatccaaaaacaattcaattgtcgacaacagtcaacagacccattcgcacttggttggctatcgagggctttcggaccccatatggcacatgctacataccacagcttcagcgaacgaaaacgccgactgagtggaactccccaatgacgatagtcgatggccgcatccgagtagccgtgcttcaggtacagcggatccaccaccagggctgaagtcagccggatgcggtcccgcacccacagcgtcgagcaatcgaagttcgtcagcagccatttgttgggattggtgttgaacgagtcggcgtactcgatgccctgtgaatgaaatccagtcagattggccatgcgtgccgtgggaataccactcaccttcaggagcggcttcagctcggggcagatgaagctgttgcccgcgtaggcggcatccacgtgcagccaaacgcccgggaatcgctgcaactgcttgccgatctctggcagattgtcgaacgcacacgagcccgtggtacccagagtggtggagacgaagaagggcaccagaccctgcagttcgtcctcctccattgcctcgtagatcgtctggccgcgcagactggcgtcgtcgtcgggctccagaatgcgcagcttcacgaaacagatcatcgccgctttctccacgcagctgtgcgcctccttggagcagtaggccataagcttggacagcaggtgaccctcctccacaaacgggtgctgggccttgagcctcttgagcgcctgtgccctggcagcaagcatcgtgaccagtacgcactccgatgcggaagtctggtggccaaaatgagccattgttagacacggacgagttaatcatgttatattatatgtagatatttaaaaactacaaactaagtcggccttcttcactcttataatctatgtaccggaccaaagaaagttccgtcgtcctataaaagatttatgttacctggatgactccccctccggtgctgccctccttgagggccagaaagtggtccggcagaccgatggccttgccaagccagtcgagcactatggtctccagctcggtgcacgcgggactggcggcccaggagaagccgatgcacccgatcccgtcgcccaacatgtcgcccaggatagaggggaacgagttgcccgccggaaaataggcgtggaagcgaggatgctgccaatgcgtcacgccgggcatgatcttgtcctccacgtccctcatgatctggtcccagtcctccggctcctgcggtgcctcagctgttcgagaggggtggtgagggagaaactgaccaggttctgcggtcatttttgtggcttacgtggcaacaggtgtctcaaatatcccggctccacgctgggcgtgacccgtcgctcgttcagcgtttccagatagttgcagatgtactccaccatttccatgccacgttttcgaaattcggtgctgtccattttcggtaggttttccaaatcgcctttctgagtgttttcctatttttccgttttcttttactcccacggtgagctttattatgaaaagtttaaaaattgtacaatgaatcagcgtagtggggcagtacgtgcaattatattcaatttttattgaatgaacaaattttccaaaatttggggagtcggttatttccagatttccggatattattcgtattattttgtgtatttatataaaaatgtttttttttattcttggacaaagttttaaaagaaaattagagcaaaacaggaaactagctaaataaatagttttgaaaaaactgttttttaccaagctagaacattttataattaggaacaacgaaactattattttcaattaacttgccgactgttcctactatataaataataataattgtcgtctgattttaggcaaattaaaattgaaataatatattaccccacaaaagtggcgtgtaccgataagggatcaaaagcatcgaaggtacatttttctttaatttttatctctaattattcctatggtagttacgagtatataatatatacgttctgacttttttgtataaaaaaaaagttttacattttgcaagcattttggttagaaaaaaacatgtttgtccgctcattgataaagtttaaattaatatccttaagttctgtcaaaaaaaaaagtattaagcgactacgcgaatacgaattttataactgaagctgtttttgcttgtatcatatttgtattattgttaaattaaccatctgaataaaaaaggtgatgtccacacagttaatataacatcttaagataacacatttgttattaaatttgttattaaagttgtgtttccttgatccttgaattggttttccttttctcgagtagaccgagtaattttttaaaacagaaactggagtaacaagaatgattttaaaaattttgagaacaaagaaaatcttttcccaggcaggttttcgtatagagtccactttcttcaaaaattcattacaatttgttggcaaacaagaatttattccgttttcattgctatgttatttataggatctgatttatttcggctggagctttatttgtggcttttttgaaaccgctgattcaattctgatttgtaaactttactataaattggcgctattttagatttatttttctcgatatagtgcgttgttccctaattttgcttgctttaatcacatgtatttagcataaacatcaattttgtttgtaattaaactgcggttcctcaggcacgttttacggctttgtaaagtatacaattcccgcatggtttgaccattatccattatcgaatcgacttccggatccggggcacttacttgtgctgagcaaattccgatgggcgaatgggaattttgtttcgaactcgagaccacgaaccgttggccccgactggcaaaaccaaactgatccttgctctgcggtctggccaaaagctaagctcggtcgtagctgccgtggctgctgcttctccttcggctgccctggcatgtctaatgaatgcatacttcagtgggccggaccagggatgagggctgagggtgctggtggtgctggttggtgcgattgaaatggcaaataaatggaattcttgcgacgcttcattcatagctgtgagctgtgggagtggggctcgaaattcgcctgcgttgtgcgtgaagatatgcagggaatagaatgggcgagctagaaattaaataaccaccgttgcccatgtgagtggttgcacggtgcgtatgcttgatgctgcgtttagctgtggaaaattgagtttcgaattgttaaatgattagcaaacctaatttgctcttaaagtgcaactcaatttcgccatggatgagttaattaaaagaacgtgttgtcataaacacacaacaaattacactgacaggacagcttcccacgtcccgacttcccacttgttcttggccggggtgcgaatcgttttattaataacttccgcgccaaattgaattattgttcggaacgtacttgatggggatggtggcgatgccaaatgattatgacgatggaaatgacgacaacgatggcccaggcggagcagagaggcgcaggcaggagcggagtcgaaggaatttcaacgcattcctctcggaaaattccagcccgttttcctttcccaacccgggctccttggatccggctgcactgggccatagaattgtctgggacacgtggccccatgtacttgccatcatcatcccgcacagccatacgaatcctgttcgtttttttgtcgttgttggatgaaagttcattaataaactttcattgctgctgtcgaattcagctgcagcaaccatctccgggcactgaaatgttgttcggccttagcttcaacaagtggcatcatgctcctgtggttatcatccccc

SEQ ID NO: 25151 - DNA, 3202 bp, DROSOPHILA
ccagtcggggccaacggttcgtggtctcgagttcgaaacaaaattcccattcgcccatcggaatttgctcagcacaactcaccgtgggagtaaaagaaaacggaaaaataggaaaacactcagaaaggcgatttggaaaacctaccgaaaatggacagcaccgaatttcgaaaacgtggcatggaaatggtggagtacatctgcaactatctggaaacgctgaacgagcgacgggtcacgcccagcgtggagccgggatatttgagacacctgttgccacctgaggcaccgcaggagccggaggactgggaccagatcatgagggacgtggaggacaagatcatgcccggcgtgacgcattggcagcatcctcgcttccacgcctattttccggcgggcaactcgttcccctctatcctgggcgacatgttgggcgacgggatcgggtgcatcggcttctcctgggccgccagtcccgcgtgcaccgagctggagaccatagtgctcgactggcttggcaaggccatcggtctgccggaccactttctggccctcaaggagggcagcaccggagggggagtcatccagacttccgcatcggagtgcgtactggtcacgatgcttgctgccagggcacaggcgctcaagaggctcaaggcccagcacccgtttgtggaggagggtcacctgctgtccaagcttatggcctactgctccaaggaggcgcacagctgcgtggagaaagcggcgatgatctgtttcgtgaagctgcgcattctggagcccgacgacgacgccagtctgcgcggccagacgatctacgaggcaatggaggaggacgaactgcagggtctggtgcccttcttcgtctccaccactctgggtaccacgggctcgtgtgcgttcgacaatctgccagagatcggcaagcagttgcagcgattcccgggcgtttggctgcacgtggatgccgcctacgcgggcaacagcttcatctgccccgagctgaagccgctcctgaagggcatcgagtacgccgactcgttcaacaccaatcccaacaaatggctgctgacgaacttcgattgctcgacgctgtgggtgcgggaccgcatccggctgacttcagccctggtggtggatccgctgtacctgaagcacggctactcggatgcggccatcgactatcgtcattggggagttccactcagtcggcgttttcgttcgctgaagctgtggttcgtgctgcgatcctatgggatttccgggctgcagcattatatacgtcaccatatcaagctggccaagcggttcgaagagctcgtgctcaaagataagcgcttcgagatctgtaaccaagtcaagctgggcctggtctgctttcggctgaagggttccgacaagctgaatgagaagctgctgagcataatcaacgagtccggcaagctgcacatggttccggccagcgtgggcgatcgctacatcatcaggttctgcgccgtggcccaaaacgcgaccgctgaggacattgactacgcctgggacatcatcgtggactttgccaacgaccgacgctccccagtcgccggagccgttcaaggacgtgctcgaggacttcgagcagaagatcatgccgggcgtggtgcactggaaccaccccaagttcttcgcctacttcccctcgggcaactcttttccatcggtcctaggcgacatgctcagcagtgccattggttcaattggcttcagctgggccagctgtccggcggctgccgagctggagacgatcgtgatgaactggtacgccaaggcccttggcctgcccaaggcctttgtttcggatgccccaggcagtacaggcggcggcgcccttcagggatccgcctcagagtgcgttctcgtctctctaatcacagcccgcgcccgggccatcagcgagctaaagggtcagaccagcgttcacgacagcgtcttcctgcccagcctgatcgcatacgccagccgtgaggcacactcctccgtggaaaaggccaccaagatggccctggtgaagctccggataatcgatgccgacgagcatggacgcatgcgcgttgacctactccgccaagcaattcaaaacgatgtgaacgccggcttgacacccttctttgtagtggccactgtgggtaccaccggcggctgcgctttcgacgacatcacggagatcggaaaggtgtgccgccaggtgtcgagcatttggctgcacgtagacggcgcctatgcgggaaactccttcattctgcccgagatgcgggtcttttcggcaggactcgaatacgccgactccttcaacacaaatcccaacaagcttctgctgacgaacttcgatgcctctgccctgtgggtgcgggatgtgatgaaccttaagagcgcgctcaacgtgaatcccctctacctacgacacgagcacttgaccggagttgactaccgccactacggcattcccctgagtcgccgattccgggcactcaagctgtggttcgtcttccggacatacggcattcggggcctacaggaatacattcgaaatcatatggcgttggctaagaagtttgagatgctggtgcgcaaggatgaacgatttgaggttcgcaacgatgttcaccttggcctagtttgcttccgaatgcgaactggcgacgagcccaaccacatgctgctcgcccagatcaaccactcgggcaagatgcatatgacgccggccaagttcaacggccgctacgtgatccgcttctgcgtcacctacgagcacgccactgagaaggacatcctggaagcttggacccagataaagtgctttgctgaggaaatactgcgggaccaccagctggagtccagctccgtgccaaccacgccggaaggctcagagcggaccagctcagagccattggctccagtggcgggcaagccacccatcaaaaagaggctgaccaggacaaagtcgctgcgattctccttcactcgcagcatctcgcgggagcagtaccagagccagagcgagcacctaatggacgggtgcacacccatcctggtcgtcgatcccaaaactcttcaggagaacttccaaaaggcggcggatgacaatgacaggaacaacagcaatggcaacgtaaaactcaaagatatatcagacgtggatacggacgaggcgagtaactga

SEQ ID NO: 25152 - protein, 618 aa, DROSOPHILA
MDSTEFRKRGMEMVEYICNYLETLNERRVTPSVEPGYLRHLLPPEAPQEPEDWDQIMRDVEDKIMPGVTHWQHPRFHAYFPAGNSFPSILGDMLGDGIGCIGFSWAASPACTELETIVLDWLGKAIGLPDHFLALKEGSTGGGVIQTSASECVLVTMLAARAQALKRLKAQHPFVEEGHLLSKLMAYCSKEAHSCVEKAAMICFVKLRILEPDDDASLRGQTIYEAMEEDELQGLVPFFVSTTLGTTGSCAFDNLPEIGKQLQRFPGVWLHVDAAYAGNSFICPELKPLLKGIEYADSFNTNPNKWLLTNFDCSTLWVRDRIRLTSALVVDPLYLKHGYSDAAIDYRHWGVPLSRRFRSLKLWFVLRSYGISGLQHYIRHHIKLAKRFEELVLKDKRFEICNQVKLGLVCFRLKGSDKLNEKLLSIINESGKLHMVPASVGDRYIIRFCAVAQNATAEDIDYAWDIIVDFANDRRSPVAGAVQGRARGLRAEDHAGRGALEPPQVLRLLPLGQLFSIGPRRHAQQCHWFNWLQLGQLSGGCRAGDDRDELVRQGPWPAQGLCFGCPRQYRRRRPSGIRLRVRSRLSNHSPRPGHQRAKGSDQRSRQRLPAQPDRIRQP

SEQ ID NO: 25153 - DNA, 5956 bp, DROSOPHILA
tgcgactaatatagtaatatagtaataataaatagtgcaaactaatatagtgtaatatattacatgcaggggaaatatgcaattggaatgcgtagttttttgagatagaacagaaagcatatgatttcttcatagaaaacattattcctctgtgtagtaatcccaacttgtatttgggacactgctattgttgtgccttctctggcgggggcacttaaatcaataaacgagcagcaaatcgctccgcatttgaattgaagtttcgccctttcgggtcaatgcaccgtacactcgcgcagcgaaaaggtggagagtcggagttttacggaaacaccgaaaggcccacggccgacgtgagtcagtgtatttataggccggctcccaaatgccggctaattctttatctcatctggcccacgtcagatggcccatgcccatgctctatgttcctgctggccaggctgacattgataatgccaatgacgcgctccatgagtaatctccatcttcgcgtcgcaacgaagcggatcgatatcgccgcattgtagcggcgaacagtccaagttcattgttcgcccgttccagtatccgcggagcattttctttcgttcgatcgccttttatgctctcgtaagtgtagagatgggtctgaagaggatttatcttctgaagttcagaaaaagtgctcttgcgacatatccaaatccatatcttgaacattgactaaagcaaagatactggttacttgtaaggataaaattgtttggggtcatgaaacgcagtaaatcagtgcatatgtacatatggcactctgccactctgtgtctttacgaatagttatgagtgattttaaatatggaatttgtccagtgtgcgattttggtttccgcattacgtatattttgaaaaataacaggatggcgactaagtggtcaaaaaacaggccttgagaatgttgcttttcagtagagatttcagaggtagattagtttgtataagtcctgccagttggtcacagagcgtaaaacgaagtaaaagaaaaacgaaagtaatttgtacagttcgatttcgttttgcaaattgagttttatcaagaaaggttagtttatcggaaatccagccagaagtacgtcggatatacagaggtggtaagtgcatcgggcagattggtatgctgaatccgggaagtaagacaattagcttttggtgtggaaatgcctatttgtggttcggtctgttcggtccagagctaactagccaaactactttcgaggaacaaattctgcagattgtggaatgagtgagcaacggtaacatgtccaataacaatcatttggcgttccctgttgccgtttgctttgctgatgactatcgtgatcttgatattgagcacgcacatgggacacgcttcaatgcaccccgagctaaaacaattattagccgccgcaattaagagccgttcatggcgctagcactcccacacggactgcatgtggagccgccactgtgcagttaccaactaaccagccttttgcatcttcgtttcagtgccgctaactaaaccagaggacaccaccaacatggctgtaaacgtctactccacaaatgtgacgtcagagaatctctcgcgccacgatatgctagcttgggttaacgattgcctccagtcgcaattctcaaaaatcgaggagctctgcacaggtaagtgggcttgactcgtctacaaagtgctgggatcaacctacgcttccacttctaggtgcagcttactgtcagttcatggacatgctgtttcccaattcagtgccagtaaagcgtgtcaaatttcgtaccaatctggagcacgagtacatacagaacttcaagatattgcaggcgggcttcaagaagatgtctgtggataaggtacatatgcccgcttgcttacattacttttctatttttcgaacctttatttaattttgacacacaaatccacccgatccgaagaatgtagagtggacatgggcacggtacagtggaagcgcttaaagcgtcgctaaaagcatatgtccactgtaccaatatactcttgtatgttgtgactaactacgatttccgttacaaatcaacttcacgactacgcaaccaccgacaaccacagatcattccagttgataaactgattaagggacgctttcaagacaactttgagttccttcaatggtttaaaaaattcttcgacgccaattacgacggtcgcgagtacgaccccgtggctcagcggggcggagtcaagctgggcaatggcaacggacacggcagcaacggaggcagtggcgtgggcagcagcaacaacgatctccatctgatgcaccggcgaccattgcaggctccagcttctggcggacgaatgccagcacgggtcatcgcttcaactggtacggttctgtcgaagctacgaactccggtgtggaagagccatttgcttgccatttcatttgagttgcgaagcgaacgaacgtgaagcacgcagcggaactaggcaaaactgggatgccacacaacaccacacaaaacttcaccaaccccactggccttgagctgctggcgcaccaagtaatacacaaaatgcacacacattcagtcgcatcaaagcacacagcacacatgttggaggatctgttgttgtcccacatccaacccactaactcctcttcatccccgtacagtgatgggaaatacccaaatatttgtatttatatagatccgcgacatggacaatacttttgaagccataattacttaggcatatgtgggcggatttccaactgcaaagtgtacaagatttctttattacaaggttaaacgcaaataatagtttagatcttatctttggaagtggctaagtctgcgatcaatttaactgaaaatccatccccatcattgcaaagttattatttatacacatcttttttatctggtgctttggctggccaaagagttctgttttccaaattcatactgtatgtttgtttaatctttgttcccattgcatttggattcaccacacgctctctcacctgtttgcatatctctcgcccattttacttttagattatacccattgacaaattagtcaagggtcgcttccaagacaatttcgagtttttgcaatggtttaaaaagttcttcgatgccaattacgatggcagggattacgatgccagcgcggtgcgcgagggagccccaatgggcttcggatcgggagcggtaaagtcactgcccggcacggcggcaagcggcgtgtccagcagctatcgacgtggcccatcggcaacgacacgcccagcaatgacgtctgcagtgaagcccagtatgttttggtttggttcccaattgaatccttctatcgctatctcttctttcattatcgtacgcactatccacatgatcagacaattgtacatatcgcatgcccaggtccatgtagatgttgcacatcctccaagtaaacacaaaagcacgaatagaagacaaatgctgtctgtgcttcacgtttgttgattccttatgcttttatacatacctccgacctggatgttcgcatactaaactcaatcgccttgcccattccagcagtatccaaggtgctgccgcgcacgaacaacgcagccccagcgagcagaataaacgcctgtgccaacagcacgggcacggtcaagaagaacgacgtgagcaattcggtcaacaatcaacaaatagaagagatgtcaaatcaggtgggtcaagatcaagaaaatgagaaaaaaaccggtactaatattatggatcaggtgatggatatgcgcataaacctggagggattggaaaaggagcgagacttttacttctctaagttgcgggatattgaaattctgtaagtaatgaaatcaacaggttgaattaagaacgccatgcctacctgctattatatttctagttgccaagaagccgatgacgccgaggcgcatccgatcatacaaaagattttggacatcttatatgcgactgaggtaggacaagtctgtactctttttacccggccctgcaatcgcttagacttatattttctatttgcaggatggttttgcgccgcctgacgatgcaccaccagaggacgaggagtattaatttgaaacgtgaacgaaaacccactaaattcatttgctgcatacatattcaaaacataagtcaagaagcatgatgaaggggacagagtttattatttagacagaatccaagaagacgttaagcaaaaacgagaagactaacaaatgaagagtgtttgatttcctaggccgaggctgacagcaggatcgccacgtgattaaatagttattcttcaaacatttatttgatacgaacgcgtcgtcgcttaacagatagagacgggatttttttcgattcaaaattgtacccacgataattttgctgatgttgccgatgtgtgtgaaccatcaaccatttcatatttaaattgtttgtatattagcggaataaacgaaccaaatctcgatatctaatggaaagccagcctacccttttcaaaattcttttttgaaaggttcacagactcgtaactaagaaaatttagaatgctcagcttgcaaatttactttgatttagattagctctttgtatcacatggtttacatggttgatttatatcctattaagcacatttataatttttgtttaagtaaaacttttcactagctgacttttgtcgttttgagtgttgtatgtagtggatcacaagagccgaaccaacggtattttgtactttcgatttctatttttaaataattggcttcataacaaaatgattgtataaaataagtgatttttgctctcaattttttaagttctatatttatgtgtaaaacaggcagaactcgttaaaaagtttgaataaaagcgaacgtctaaacacaactttttgatttccggctttcacattacatcactacgcacggacaagttactccaagcggaaactttcacccctccatttctcttctctgatcattgtaaataatttgttaacacaccacaccactcacatgatagtcaacctgtcctttcgacagacacaagtaaatgtatgattatgctcacacaccacagcatcgagtgtgccacccacgccatgatctataacctaattctagaataaaaacatgtgttgcttgattcaaaattaatgcatttctcttttcgcacacgggcagggccctacaaccaatcctaaatctatttgacggcgctctggatgtgtggctgcttgtgggtgccgtcacagaagggtctgtgggtggtctgtttgcagttgcagagccagtagtctcccgacttctccaccttgaaccgaatgggcctggaaagcacaggggtattacttcgtcgcatagctctggctcgagcacctatgtacatacctctgcttgatcttcaggaactcgttcttgtgcattccatcgcagaggggctgagacttggacttgccgcacaggcaccagctgtatgttttatctgttggaatcgcgagttgtggttatgtaaatacttgttctctgcgcaccgatacgatgcgatttctcaataatacctttgtccaggtggatcttgaaggggcgcttgtcgaagatcgtaccgttctccttttgcagaacggccgtttgcttatcctcgagcaggttactgggaattgttttggccgagtccaccggttttgcgctggaactgtagcatgcctgcatgggagtaatgccttgaaatcagggggtgatctatcttggctatgggggatgcctaccttgagcaaccaggatgcccccaggttccgtcttagtatcattgacattctaacgctaatttatttttgttctctttatttaagctgatgattgcagtgtcgaaagtatcgatatgttgt

SEQ ID NO: 25154 - DNA, 1860 bp, DROSOPHILA
cctgccagttggtcacagagcgtaaaacgaagtaaaagaaaaacgaaagtaatttgtacagttcgatttcgttttgcaaattgagttttatcaagaaaggttagtttatcggaaatccagccagaagtacgtcggatatacagaggtgtgccgctaactaaaccagaggacaccaccaacatggctgtaaacgtctactccacaaatgtgacgtcagagaatctctcgcgccacgatatgctagcttgggttaacgattgcctccagtcgcaattctcaaaaatcgaggagctctgcacaggtgcagcttactgtcagttcatggacatgctgtttcccaattcagtgccagtaaagcgtgtcaaatttcgtaccaatctggagcacgagtacatacagaacttcaagatattgcaggcgggcttcaagaagatgtctgtggataagattatacccattgacaaattagtcaagggtcgcttccaagacaatttcgagtttttgcaatggtttaaaaagttcttcgatgccaattacgatggcagggattacgatgccagcgcggtgcgcgagggagccccaatgggcttcggatcgggagcggtaaagtcactgcccggcacggcggcaagcggcgtgtccagcagctatcgacgtggcccatcggcaacgacacgcccagcaatgacgtctgcagtgaagcccacagtatccaaggtgctgccgcgcacgaacaacgcagccccagcgagcagaataaacgcctgtgccaacagcacgggcacggtcaagaagaacgacgtgagcaattcggtcaacaatcaacaaatagaagagatgtcaaatcaggtgatggatatgcgcataaacctggagggattggaaaaggagcgagacttttacttctctaagttgcgggatattgaaattctttgccaagaagccgatgacgccgaggcgcatccgatcatacaaaagattttggacatcttatatgcgactgaggatggttttgcgccgcctgacgatgcaccaccagaggacgaggagtattaatttgaaacgtgaacgaaaacccactaaattcatttgctgcatacatattcaaaacataagtcaagaagcatgatgaaggggacagagtttattatttagacagaatccaagaagacgttaagcaaaaacgagaagactaacaaatgaagagtgtttgatttcctaggccgaggctgacagcaggatcgccacgtgattaaatagttattcttcaaacatttatttgatacgaacgcgtcgtcgcttaacagatagagacgggatttttttcgattcaaaattgtacccacgataattttgctgatgttgccgatgtgtgtgaaccatcaaccatttcatatttaaattgtttgtatattagcggaataaacgaaccaaatctcgatatctaatggaaagccagcctacccttttcaaaattcttttttgaaaggttcacagactcgtaactaagaaaatttagaatgctcagcttgcaaatttactttgatttagattagctctttgtatcacatggtttacatggttgatttatatcctattaagcacatttataatttttgtttaagtaaaacttttcactagctgacttttgtcgttttgagtgttgtatgtagtggatcacaagagccgaaccaacggtattttgtactttcgatttctatttttaaataattggcttcataacaaaatgattgtataaaataagtgatttttgctctcaattttttaagttctatatttatgtgtaaaacaggcagaactcgttaaaaagtttgaataaaagcgaacgtctaaacacaa

SEQ ID NO: 25155 - protein, 291 aa, DROSOPHILA; identical to SEQ ID NO: 6108

SEQ ID NO: 25156 - DNA, 6552 bp, DROSOPHILA
agtatatacgagtatatcctgtacgactatatatcaaaccgaaagtcgaactgaaagtgtcctctaagcgggactttcatcgaggtcggtgcccctcattatcgtattcatttgtggggctcatttgattcattgtgtctgttcgtgtgtgttggcgtgttactctgttaagttggatgcaattctgtcgccgatggttgtggttttgtgtccatggcccatcaatggggatgctccatccatgtggatgggcggtcagccaactaacttggaacattcgtatgtgatgtgtctgtggtggagggcgccgacctcgaggcccgctagctactgtatccaattgaactgtgatttagctaactaactctaggtaccgacacctcgtgtcggcgtggaacaatccggcctctaaggatatgaatttctttacactcgcttacctaatcgtactgtgggaatcggaaggaaggttctgtgtgccgtgggttttggttttgggtgggaggaaaagcttgctgctcgtgatatgtgataggttgtgggagcagcccactttgaaggacactactctattctggtaaagcgaatcgtatccttggcgttttgcttacgtctactttggaatcataatcgcgtgcttgctgtgtgttgattatatcgctacttggggtttgcttaatgtaattgttaaaaattgtacctagcctacagcttgcaatccaccgttcatgctccacatagcatatatgtatgtatgtagtttagtggtatgtacagatctatttacataagtagctagtagaaccttaaagctattgggaaacgcaacgaacgacaaacgaaacgaaactggagcccaattgagatctctgctgcaacgatggcctccatttggcacactttgccatcctctcccgggctttaatccattccacaagggacccatcatccaattgcctattgctataactattgctggtgacgtgctcgccgttgataatcaccccatgtgcatgatcttcttgaaggccttgcgaaactcgggattgaatattgtgtagataaccgggttcacaaagctgttgatgtagcccagccaggtggtcatcatgtaggcggtgagcccaggtcggcagtctttcttgaacttggcgcacatggcgtccatgatgttgcagctgaagaacggcagccagcagaacaggaagacacctgtttgagggtttgaaggttatatatatgatggcatatggattagaatatggcagagcgcaaggacgtggtccaaaacggctgggggaggtggctcaacttgaacttacccaaaacaatggccaatgttttggtggccttgcgctcctttttggccgacgatttttcgcgtttctttttcgaggccttgtgcaccttgtatatcgtgaatctgtgcgtcacgcgaaggataataggccatggtgtggtatatattgcattttccacaggcaaaaaaggcaaatgatgaagagaggtagagaaggcgagaaggaaatggggtggcattagcatcgactggccaacaagagcccaaataactaataactgtaattaggggcaatggacggcgttactcaccttgacgcctgcgagttcttcttatccttgcgcgaggacgttttcgatgtagtcgatagcgtcgagtcgttgcgtgccaaagtcatggcctcctgcactccgtaccgcacaaaggacaatggcttcatggcgacgctgcgaacggaagtcggtcggattcggaatgagaacttaactgcggcattacgtactactagtcactatttttgggcttgccggattgcctacattgccaacatgcggcttctattttgggggtttcgaggataaagtggcaggtttctcgctaaacactacgtaataggtctgtgatgaaaacgtgagctcttttttgctaagcaacttaaatcaagcgattgtgcaagaatgccaccaaataatcaattgatgatttcataagcctgctgatatgtaaacatgccgacaataattatgaaaagtagtggcaagtggcagaactaatactgcaaatcactatttaaatgtgcaattggatttcaatctgtttgaaaaatgtaatgtgttaaaaaaaaaaaaaacatgtaatagttgacaacaataacccgacatatttaattaaactttgccatttgtttaccaattaatatttggaagcaaagatgttgacatttttgacgcggtcaaactctttgtctgtttttattgaacgaaaaaagccatgcgtgttatacgcatttattgttttgtttataaataatgacaattgatgtgtgcaatttaagcaattttaatatgctacgtaatctagtgtaagtagataaaaaaaaacattgcgcaaaaagagcactgcctatagctgaaaaaagtattatattattcaaaaactatgtacaaaaacttgaatgggaatgctttattttgtcgggctgcaaaaacagttcattaaacttttaaactgttgcgaaaagtttcattttacctatggtacaatcaaaaagaatgttgttcaatgatttagtaccaatgtggtacagatattggacggtattttgttttttttttttttctaaatattagcaatttctcgaatttccgatataattgccggaactttgattttaaaacaataacttggatgaggcattatgtttttatccgtgcacgaacttctactacgcccccaactactggggatgctatttctaaggtggcaggcttacggatctgaatgccaaatacctggagttatcgacaccgactgacctgagggcgggttcgccgcgcttcggcgagtcgtcgccggtggggcgccgctgactgctgacgctggatcgctggagggtggcgccactgggcagcggactgtccggcggcgagccgctgctccgcggagcggctgatgtggcagcagaggcggaggcgggcgccacgcctgcaaggacatcgtcaacgtttgaggctgcataaccagaatcatgattaccattcggatcggcgacgaccagctgcggctgtgtggtgatttgggccacaacgctgctgcgagtgcgttatggcaatgtggagcgatgtgacggtggggttatccaattaatggtgccgcgaccatatccatcaatcaatcaatcaatcggcgatagacgacgagtgggcgaagaagcagcagaatccggcgttgatgaaggacgaaaagatggaaaatcggggtgcaacgtcaattaaaggcaaggcaagattgagttttaataaagtgacgcattaattgaattattgagaattatttttctctgccattggctgtgatttcttttggcgggtaaagtttcgcggtcttgtttgccatccatttcagcccatcggttcggttcggttcggttcggatcggatcccatccctttgtgcatccagcctcctgtcattaatggtttcatttcatgtccttattggattaagcaggccatcaggatgctaattggctgcgcttaacgctcgcacttaatggcggtttcggccaggaattgggagaaagattcgaatgccgtggggcggggacatccgattgcaaggatgatgggcaagggatcctttcggcaggacctgattgaaagtgcagcacgcttttatgtcggcaattgagtgccgctgtgtccggacgaagcctgccattagattgacagttttccatgggcatgcaccgtctgggggtccattgctttgctggtctgctggtctggaaggaagtgcagtcgagaccactcagcagaaacaggcttatctattacgtgtttggggcacgtgccagggctgtcagggttgtcaggttgcaagttgcaagttgcaagcggacaaggatatggacacggaaacgaaactgctgagctccgaacttttgcagggccatcggagatagcccccagccaaacattcgttctccaggcgatggagttttctgcgaaattcgccgaaagtttccgcttttcataccccgttcacgtaagatgtaagtgggtttgcaaatgtacatatatgtccaatccgactccattggcaacgtgtttatattcgtgaagtaacattagccgccaaaagaaggtcttacacagccaaaaaaaaactttgtgaaacgtatatttcctttttgtatattccaaatctgatttaaagctatcatgttctacgcatttctacacagcacatcaaagcccctaaatggtatcgtaaaatgagtactcacttgcccgtctcctcgacaacggtggccagcatgaactcggtggacttgtcgttcacgatgacgtggcagtcgtcgatgtccggcgagatggcgttctcgtcctcctcctcgttggagccgctggccgtgttggtggcggcctcgtcgggcagaatcctactggcgtggcgactgctgtccagggccgtctccgccaggcgccgggtctgggcaatgttctcgatgacgctgccgcccgtgagttccgataggtggggcttgcgggccgcccgctgcttccgcgctcgactcctcagcgcctgtgggtgggtgggtacgagatgtaaaatacagaaaacagtataccaaacatgggacacaggatacagactacggacgacggaccacggactacgggctgtgggacacgggatgcaggatgcaggatgcaggatgcagtagagagcggattaggcactgccatgctgcgcttgcatcctacggatattcgcccccagtcagcagcaaatgtgcacaaacagaaacagaaacaggaagagaaacagaagcatccccaagccagcattgcagattatggatctgcgccagcaatattcattccactcgactcggagaaatccgattttaattgcggtcttttaataatagtgcttgaaatttttttgcgcaatggaaagagcgacagaaagaccaaagcgcggaaaattcgctctaggaattaatgtttgtgggaagcttggagtgttcaaaggaattaacatgtttggaatatatcgtatatatacatatatcgctcgctactcaccttgaaaatgttccagtagagaaacaccatgatgatgcagggtatgtagaagctgctcagcgaggagtagagtataaagtcggcgttgtagaaggcgcatacatcgggttcgcggttgggcgtgttgttgaggcccagaactatcggcgagccgatggcagccgatatggcccacaccagcagtatcgtaaggcaaacgcggcggctatttttgtgcttggcgtactttattggctgtgtcacagcgatgtatctgtgggatatatccgtggaatgtgtgcttgggtcatatgggtctccgaaataggggccgctgtgaactcacctgtctatggagatggcaactaagttgaatatcgatgaagtagagcatatcacatccatggctatatagaaatcacaaacgacgtcaggcagggcccaggctccatttacctgcaaaacaaaaagaaggagggggggggggcgtcaggtaagaacgaggatgtgtatgtcgatgcggatgaggagcacacttcatttgttcggcacttaatcgactcgggaatggagctctattggaatgcccatcctttgtcgaatattaataacaatattttcccatttcccgtgctgctgccacaaattagttttagactctatctcttcatcgacgtctccggcagcatctatgttatggcccaacccgaatgcggactccataaaaaccccaacaaaaacgtcaggaatttcccaagccaaacaatttgtagcacacaaagcacataaaaaaaggccgagtgggccaccagttcggttggaacttaatgtggatatgtttgggtgaacacccaacctgtcgtggttgcactccccatagcccgtgtacgaggtatacataatgtagcgccaaccgattcggtattagaatggcatcgatagctttttggatgtgaatactattagtaagtagaggtagctgtcacataggtatttgttgactgatctgcgggtaagaggtatcgcatagtcgaatacactcggcggagccagtttcccagaatcagtagtttaacattttaagaagtcaatatttgaataatactactactacatatattgtacttatatgccaccaatgtgtgtgtgctaactaaaatgcatgtagacggtatcgaatagtcgaagttaatcgaccctaacgtactatcttgtttttcttcttcaatcggttttgcgcctaaattatacaaacacattgaaacttgaagcggggctcaacgcgtgggaagagtgtaaaatattgatacacacgcaaccacaccacacgaaagtaaaagtgaaagtgaaagtcaagtgaaagcagcatagaaatgtgctaaaatagctgggcagtcgcagacttggaatttcttagaactcggatgaagactccttagccggagctaagcgagcataacaa

SEQ ID NO: 25157 - DNA, 1392 bp, DROSOPHILA
ttgcaggtaaatggagcctgggccctgcctgacgtcgtttgtgatttctatatagccatggatgtgatatgctctacttcatcgatattcaacttagttgccatctccatagacagatacatcgctgtgacacagccaataaagtacgccaagcacaaaaatagccgccgcgtttgccttacgatactgctggtgtgggccatatcggctgccatcggctcgccgatagttctgggcctcaacaacacgcccaaccgcgaacccgatgtatgcgccttctacaacgccgactttatactctactcctcgctgagcagcttctacataccctgcatcatcatggtgtttctctactggaacattttcaaggcgctgaggagtcgagcgcggaagcagcgggcggcccgcaagccccacctatcggaactcacgggcggcagcgtcatcgagaacattgcccagacccggcgcctggcggagacggccctggacagcagtcgccacgccagtaggattctgcccgacgaggccgccaccaacacggccagcggctccaacgaggaggaggacgagaacgccatctcgccggacatcgacgactgccacgtcatcgtgaacgacaagtccaccgagttcatgctggccaccgttgtcgaggagacgggcaacagcgttgtggcccaaatcaccacacagccgcagctggtcgtcgccgatccgaatggtaatcatgattctggttatgcagcctcaaacgttgacgatgtccttgcaggcgtggcgcccgcctccgcctctgctgccacatcagccgctccgcggagcagcggctcgccgccggacagtccgctgcccagtggcgccaccctccagcgatccagcgtcagcagtcagcggcgccccaccggcgacgactcgccgaagcgcggcgaacccgccctcagcgtcgccatgaagccattgtcctttgtgcggtacggagtgcaggaggccatgactttggcacgcaacgactcgacgctatcgactacatcgaaaacgtcctcgcgcaaggataagaagaactcgcaggcgtcaagattcacgatatacaaggtgcacaaggcctcgaaaaagaaacgcgaaaaatcgtcggccaaaaaggagcgcaaggccaccaaaacattggccattgttttgggtgtcttcctgttctgctggctgccgttcttcagctgcaacatcatggacgccatgtgcgccaagttcaagaaagactgccgacctgggctcaccgcctacatgatgaccacctggctgggctacatcaacagctttgtgaacccggttatctacacaatattcaatcccgagtttcgcaaggccttcaagaagatcatgcacatggggtga

SEQ ID NO: 25158 - protein, 444 aa, DROSOPHILA
MDVICSTSSIFNLVAISIDRYIAVTQPIKYAKHKNSRRVCLTILLVWAISAAIGSPIVLGLNNTPNREPDVCAFYNADFILYSSLSSFYIPCIIMVFLYWNIFKALRSRARKQRAARKPHLSELTGGSVIENIAQTRRLAETALDSSRHASRILPDEAATNTASGSNEEEDENAISPDIDDCHVIVNDKSTEFMLATVVEETGNSVVAQITTQPQLVVADPNGNHDSGYAASNVDDVLAGVAPASASAATSAAPRSSGSPPDSPLPSGATLQRSSVSSQRRPTGDDSPKRGEPALSVAMKPLSFVRYGVQEAMTLARNDSTLSTTSKTSSRKDKKNSQASRFTIYKVHKASKKKREKSSAKKERKATKTLAIVLGVFLFCWLPFFSCNIMDAMCAKFKKDCRPGLTAYMMTTWLGYINSFVNPVIYTIFNPEFRKAFKKIMHMG

SEQ ID NO: 25159 - DNA, 5137 bp, DROSOPHILA
aattcagagacttggtcacagttttccattccgaacaaatttactgcactttgaatcccttgtcatgtgtcggaaaaagtttttgcccagcttggaatgagcttaacttaaagactgtttcgcagagatttaagtgaaagggttttgccttttgcctatatcggaaaattcaataacttcattggaatatggtttaaatttaaatagttttggcaacaacaattcaacatcccacctcccttgctcgtccactttttcatcactctaccgatcaaagtttcggagcggagggtgaaaagttttctggccaaaacggaaaaactgtaaatccacaactaacatttttaagcataacaaagtacgacgagattccgagaataaatcttgacgccgcttttggtttagtcaggcgtagccccaaaaagcgcttattatgcggttcaagggggcagcaaatgggggaatgggggatgttttgtcctggggacttttagtttttagctctacaacgatgactgcaactttttctattgacttaatgcagttggcaagtgcagtcgggtctgaacttggacacggaaactttaaagattaactgcaggaaagtcaggtttttgggggaagtactttcaaatttaaggcacaaccaagttagtttctacacacaactcatagcttttacttgcagcacaataaacaagttaccgatttcgaatttgtttctaatttataagacaaaattgctaggatttgatataaaggatcgatggaagcgccggtgaagggcattattggtattctggccactgctggatcgttttttgcactaggagcttactatcagcacatcgatgtcatgcgaaagattcgacgattggagcaacgaaacccacatgcctactttatcagaaggaaactgtacgcactggtaaggaaatagattaaggattcagataatatatatattagcgaactctactccctttaaacatatctatagctgggaattttcgctgtgcgccctgataactcagaattcgacgtggataccgatgactgccacaagctgggcgggatcatgaagtacggcttccccagcaccaatgatatcaccataaatgagacctttgactttgtgacctctttcgatcgaagaaactctgcgattctgtggatgtgcgagcgggtagatctgtccaatcgcgtcgtctacggggattccacatccgtggctccagctggagcatttggacagtcggaggcagccagggtatttttcctgtccaacattaggccctttctaaacagagggttcaatctcactgtctgggatcgactgctgcagtacgtccatgagatgagtcaacgacatggaaccgtgtatgcctacaccggatcaatttacttgccccgggagctaaagtcgaacagttggttcctggagttccagtcggaggagagaaccatggtggccgtacccacccatttcttcaagatcctggtcattgataagaagttcgcgggcgataccattccctatgcggaggcctatgtgatgcccaactctccgctgaacaacaatgtcgaactgaagacgcttctcagcgatgtccgggaaatagaaaacgctactggtctacggttctttgaaggactcgaccgcaactttgtcaacacccaagcatcaaattcatttgtcccctcagtaaacggtcctttaacaaatccgttaacgttgccgatgactaatgccttagacagtcacagtgccctcacatcaagtatttctccaaaatagaatataaatacatatatgttgaaggagacaatgatggccatgagaaatccttcagataaacaatgttttatttgcttttgaggggtaattcacagagcccatttcatggaccgaaaatggcagctcctgggactgggtttcgtcctgggagtgactgcgctctgtgcatccttcgtgggtggaatgtattttcagcacacagatgccagaaaacgcctgcgggaactaatacaaacggatccctatgcctactatctcagtcccaaaatttatgaagtggtaaccaatactgtagtaaaagaatataagtaacacttgcaccaaaataatttccctaaccagtttactttctttgagagcaataatgaagacgatcaccggatgaggcagatcatgaagtttgggttccctggcctggatgacttgcgtctgtatagtgacttcgtactatcctacgatcgccgaaaccgagtggcccactgggtgtgcgagcacctccaggcggacagcatacatccgaatcgaggcagacgtggtcgcaacccataccagccggatttgagtgttccctccaacttccgatcggaactgagcgactatcggagatctggattcgaccgaggacacttggcagccgcaggaaatcaccatctgcaacagaatcactgcgaggatacgtttttcctaacgaatattgccccacaagtgggccagggcttcaaccgaagcgcgtggaacaacttggaacaatatgttcgaaatctggtccaccgatttggatccgttttcgtgtgtactggtccactatataagcccaatcaaagaccgggaggtaagtgggccgtggagtacgagatgatcggactgaatatggttgcagttccgacgcacttcttcaaggtgatcatggtggaatcaaaactgcacctgggtaaaccctatatggagggctatgtcctgcccaatgctccaataccagatggtctgccactacgatcgtttctctgcgacatccgggagattgagcactacgcaggtctcaagttcttcgatggtttgagaaggagtgccctattcggcagcaattatccaagtgaatctcgagtttttcgcgaattcagttagtggagggatcccaatcgttaaatatatatttaacttaactgcaagcaggctatcttcttccgactgacatatcgacaaattgttacattacacacttcatcaaagaaacactacacgaaattattgtaaggcccacttatgtcctttagcgaatcaaatgttcatcagtgggctttatgtgcccttgcgggagtaaccgggtttgtgtgtggagcctttgtccaacaagaggcgtccataaggcagctgctccagcagattcgaagggatccctatgtctaccatcatcgtcacaagttatatccgatggtgagcgatatgaaaaagttagaaatgtttgtaagattttaattctaatattttcccacaagttatccacctttgggacagaccatgaggcccgtttgtggaatcgtcctacttcatgggccgacaaattcagggagctggtattatcaccgatcctcgatttagttagtgctactgtgacgctgaaatgggattcggcaaccacaactgatctgctcgacctagtcaagtatggactgcccagcacggagaacttgtacgtccataaggactacgtggtttcgcaggacctgcgcacgaacggcgtcagatggatttgtgagcatttccgtggggattatcaaagggtatcgtcggatggaggcggatatagcaccatgaatcttcgctacaatgatgtgtatgtgctgagctgcggttcgatgagcatatgcaaggcgttcaagcggaaaatctggaacgatctggagaactacgtgtccagcatggccaaggagtttggctcagtgtacgcctacactgggccgatatacaccccaacatgttacgagattggcaaatggaccatgaagtatgaggtgtttgactggattccgataccagtgccatcccatttctttaaggtattaatcgtggagagtggagttccgggatcccaacccttcatggaagcatttatcatcgaaaacagccgaagggttggcggcaagttgaatgaccaccgcgtcaaagtaggcgaaatagagcgttacacaggactgcgatttaacaagatcatgcaacccgtagtccaattcgggaaggactcatttacggtggacaccagggcttgggccggcaggttggaggaaatttctgagcctttggtaacatttcctcccgaccagaaattaaatttaatataaacccctgaatgtaaggaatattttgataaaattgtgaaaatatacatatttattttaaatgtactttgattatatcttattcacttatttattttaacccaacgtatttaatgacgtcactgcattctattgcaccaccttacacataacataactcgcagctgttcgctaacagcagcgctgttaagttcaacacgattatcgattcggcgatggcagccgaaagagcacaatcgattgacattcgattttccactgccgattaccgatagcttacgtggcaaggcaaaaagagcaaaaaagatcgaattagggaactgacgtggaagttcgtttagctcgaaattattcttgtttttcaaccagcgatcgtccgccgcggccgtcgagagttgaggccaacaccgagtggccaaaatcgaggagtcagtggtcaggaatcaggccgagcagcccccgaaattgctaaatcgccgtggcgaactttgagccaatccgtgtgtgttttctcttcgttttccgtgaaagttgtttgttggcttagcgtcgaccctctccgctaaaacccaggtgattaatccgggccagaaatgaatccgaatatgtacgggccaccgcccacgcagttccagcagcaaccccagtttggggctcctcctccgaattccggaggttggccaccgcagcaacaacaactaccgcagcagcagccgccgcagcaacaactgcctccgcagcagcagcaacaacaaccacagtacggagcaccaccaccaacgtcggcggcatcccagccttacctcaatggcaactaccagcagcaggtgaatagatagccttaaccatggcagctttgacgagaatcggaagacaatccggttgcacacgtcaaatatatgtgtattcccttcagcttcattctggcaatagcctattgagctagtcgataataagaatagggttagaatctgaaaagcattgcagaattacgttactcttt

SEQ ID NO: 25160 - DNA, 2356 bp, DROSOPHILA
ctgggaattttcgctgtgcgccctgataactcagaattcgacgtggataccgatgactgccacaagctgggcgggatcatgaagtacggcttccccagcaccaatgatatcaccataaatgagacctttgactttgtgacctctttcgatcgaagaaactctgcgattctgtggatgtgcgagcgggtagatctgtccaatcgcgtcgtctacggggattccacatccgtggctccagctggagcatttggacagtcggaggcagccagggtatttttcctgtccaacattaggccctttctaaacagagggttcaatctcactgtctgggatcgactgctgcagtacgtccatgagatgagtcaacgacatggaaccgtgtatgcctacaccggatcaatttacttgccccgggagctaaagtcgaacagttggttcctggagttccagtcggaggagagaaccatggtggccgtacccacccatttcttcaagatcctggtcattgataagaagttcgcgggcgataccattccctatgcggaggcctatagcccatttcatggaccgaaaatggcagctcctgggactgggtttcgtcctgggagtgactgcgctctgtgcatccttcgtgggtggaatgtattttcagcacacagatgccagaaaacgcctgcgggaactaatacaaacggatccctatgcctactatctcagtcccaaaatttatgaagtgtttactttctttgagagcaataatgaagacgatcaccggatgaggcagatcatgaagtttgggttccctggcctggatgacttgcgtctgtatagtgacttcgtactatcctacgatcgccgaaaccgagtggcccactggccggatttgagtgttccctccaacttccgatcggaactgagcgactatcggagatctggattcgaccgaggacacttggcagccgcaggaaatcaccatctgcaacagaatcactgcgaggatacgtttttcctaacgaatattgccccacaagtgggccagggcttcaaccgaagcgcgtggaacaacttggaacaatatgttcgaaatctggtccaccgatttggatccgttttcgtgtgtactggtccactatataagcccaatcaaagaccgggaggtaagtgggccgtggagtacgagatgatcggactgaatatggttgcagttccgacgcacttcttcaaggtgatcatggtggaatcaaaactgcacctgggtaaaccctatatggagggctatgtcctgcccaatgctccaataccagatggtctgccactacgatcgtttctctgcgacatccgggagattgagcactacgcaggtctcaagttcttcgatggtttgagaaggagtgccctattcggcagcaattatccaacctttgtccaacaagaggcgtccataaggcagctgctccagcagattcgaagggatccctatgtctaccatcatcgtcacaagttatatccgatgttatccacctttgggacagaccatgaggcccgtttgtggaatcgtcctacttcatgggccgacaaattcagggagctggtattatcaccgatcctcgatttagttagtgctactgtgacgctgaaatgggattcggcaaccacaactgatctgctcgacctagtcaagtatggactgcccagcacggagaacttgtacgtccataaggactacgtggtttcgcaggacctgcgcacgaacggcgtcagatggatttgtgagcatttccgtggggattatcaaagggtatcgtcggatggaggcggatatagcaccatgaatcttcgctacaatgatgtgtatgtgctgagctgcggttcgatgagcatatgcaaggcgttcaagcggaaaatctggaacgatctggagaactacgtgtccagcatggccaaggagtttggctcagtgtacgcctacactgggccgatatacaccccaacatgttacgagattggcaaatggaccatgaagtatgaggtgtttgactggattccgataccagtgccatcccatttctttaaggtattaatcgtggagagtggagttccgggatcccaacccttcatggaagcatttatcatcgaaaacagccgaagggttggcggcaagttgaatgaccaccgcgtcaaagtaggcgaaatagagcgttacacaggactgcgatttaacaagatcatgcaacccgtagtccaattcgggaaggactcatttacggtggacaccagggcttgggccggcaggttggaggaaatttctgagcctttggtaacatttcctcccgaccagaaattaaatttaatataa

SEQ ID NO: 25161 - protein, 217 aa, DROSOPHILA
MKYGFPSTNDITINETFDFVTSFDRRNSAILWMCERVDLSNRVVYGDSTSVAPAGAFGQSEAARVFFLSNIRPFLNRGFNLTVWDRLLQYVHEMSQRHGTVYAYTGSIYLPRELKSNSWFLEFQSEERTMVAVPTHFFKILVIDKKFAGDTIPYAEAYSPFHGPKMAAPGTGFRPGSDCALCILRGWNVFSAHRCQKTPAGTNTNGSLCLLSQSQNL

SEQ ID NO: 25162 - DNA, 2778 bp, DROSOPHILA
aagctgcactgcgagaaaatggtttcaaatgtttagaaacgcaatatcctacaatttgagcctagactgtgatatttttggatttttccagtgcctctgaaccaaaatagaatccttggtttaattcaataaaatgttaaaacaaacttgtttctgcggccacatcgcttatgagtcagcgttttaaattgcttttgttcgctgcctgaagctccatgtccgcgggccactttcagctatgctgctcaaaagtctggaaagtaattctattaaaaatatcaaaaaaaaaaagtaatagccacgctcggccagaagaactaactacataaactaatgcgtggagtgggcggggttacgaactcgatagcattttagctggataaacaaatttctttggcgggcgaatatgaatttccattaatttgatggatgctccgggcgccaagaagtggatgaaatgtgtgatggcacttcgagtacaacaccatgcaccccacggggcgtatgattaatgcaatttcctgttgccgacaggcaagtcagtgtcagcggaagcacaatgcatttattaatgaataacaaatcaattcaattcaagatatcaatattataccgaatttccttggatacgggttgaaatagcaaaattgtaaattaaatgcttaaatgggctgtgagcgcccagttgctgcggaaaatcataattgaatttgatcaattatggttttccactctcatatactcagttagctatatagaaaaatacctttcagggtcttatgtaatagaaggcacaactataattaacacaagcttttatctcgtaattttaagtgcaatattcgttatcagcgaatagctagtccttattctacctaatctaaaattcatttgcttagtagaaatagtaatcagtttttgtataacctccagaccaaaaatgtataaaagctgtgcacttcttgtggtaatgagcaagttcttccaaagcaccaagaaccgagctcacaatgttttccaagtgctttcatttgcttttggcagtacatttgctgatttctccggtggtacctgtccttttggagccatctgaacgcatcatcggcggaagcagcatggacatcactgatgttccgtggcaggtgtccttacagtactacggcgaacatttttgcggcggatccatctacagtaaaaccataattataacagctgcccactgtattaaagaaggtgaacgctcaattcgagcaggatcctcgctgcatgatagcggaggagttgtggtgggagtggaagcatatatcattcacccacaatttgataaacataacatggagaacgacgtggctgtcctcaaactgagcagtcctttaagtttttccgattccatacaaacaattcccttggccgagacggatcctcccacgtcgtcttcggcgctagccactggctggggacgtggaaattttttaattcgaccacgacaacttcagggagttgaaatccttattcggccgctgatcgtgtgtaaattgaaatatggcaacggtgtgttcaatgaggacatctgcgcgggaagaatgggaaaaggcggctgttatggagattccggtggacccttggtcttcaacggccagctagtggggatcacatcgagaacgggaaacattgtttgcttgggatcttctctgtacgctagtgtggcgcgttatcgtaactggatccttagtgccatcgatgtattgcattttcaagcacccgctacaaatgtgtaatttacgacattccaacttaacgttcgcagcaacaattactgttgttcataaatcaagttttataaaataaatacattgaataattttacaaaactacactttttacgttctttctattacaacaacactgatgtggcagtatagaatctgaaactgccctccaattacttttttatatataccatttttgtgagtatacatatcttattaacgattcgaaatggttaataaataaagataagacacaaacatttaaaaatcaaatatataatgataaataataactagatgtaataatttattagatgtgattaaagtaaaactaaaaaaaatcgtatattaatataatttgcaagctaaaagtctaaacacacttatagttttgctttatttatatttatttatttatttatctcgtttcgctgacatacgaccattttactgaattgaggcaatagcatttaagatccattcacggaaataaggaacactgacgaagaatgcactggatacgcaaccttttcgaccccaggagacaacacccacaagttgtttgttgaccaccaatggtcctccagagtcgccatgacaagcggttcttccataagtgcctgcgcatagtagtgaaggatcaaagagtctgcaggagaaaatgcttttgatgtgcagggctaatccttgaagatgtgttgggtataaattcgtcgaatcgtttaagatataagacactccccagccagagacgagggcaatcgatctaggataaggattcgtcttagccaaaggaatgggttgaactttgcttgtgaactcaagtggcgtacttaacctcacgattgcgatgtcgtttatattaagatcaaacgcatattcttcgtggattattaaagcggccacatcgacaagagttccattggaatctgttagggcggatcctgcgcgaacttgatatccttggtcatctagccgattgccttcctcatcaaaaaaacaatgggcc

SEQ ID NO: 25163 - DNA, 778 bp, DROSOPHILA
cgagctcacaatgttttccaagtgctttcatttgcttttggcagtacatttgctgatttctccggtggtacctgtccttttggagccatctgaacgcatcatcggcggaagcagcatggacatcactgatgttccgtggcaggtgtccttacagtactacggcgaacatttttgcggcggatccatctacagtaaaaccataattataacagctgcccactgtattaaagaaggtgaacgctcaattcgagcaggatcctcgctgcatgatagcggaggagttgtggtgggagtggaagcatatatcattcacccacaatttgataaacataacatggagaacgacgtggctgtcctcaaactgagcagtcctttaagtttttccgattccatacaaacaattcccttggccgagacggatcctcccacgtcgtcttcggcgctagccactggctggggacgtggaaattttttaattcgaccacgacaacttcagggagttgaaatccttattcggccgctgatcgtgtgtaaattgaaatatggcaacggtgtgttcaatgaggacatctgcgcgggaagaatgggaaaaggcggctgttatggagattccggtggacccttggtcttcaacggccagctagtggggatcacatcgagaacgggaaacattgtttgcttgggatcttctctgtacgctagtgtggcgcgttatcgtaactggatccttagtgccatcgatgtattgcattttcaagcacccgctacaaatgtgtaa

SEQ ID NO: 25164 - protein, 255 aa, DROSOPHILA
MFSKCFHLLLAVHLLISPVVPVLLEPSERIIGGSSMDITDVPWQVSLQYYGEHFCGGSIYSKTIIITAAHCIKEGERSIRAGSSLHDSGGVVVGVEAYIIHPQFDKHNMENDVAVLKLSSPLSFSDSIQTIPLAETDPPTSSSALATGWGRGNFLIRPRQLQGVEILIRPLIVCKLKYGNGVFNEDICAGRMGKGGCYGDSGGPLVFNGQLVGITSRTGNIVCLGSSLYASVARYRNWILSAIDVLHFQAPATNV

SEQ ID NO: 25165 - DNA, 2933 bp, DROSOPHILA
tatccatccgagagcagatatttcagcagcagcaacgacaacgaaactcaatttgcgccggccaaacgatgcgttgagcatataaaatgcaaagcggaagcgacgttcatggatagattacacaactacttacaaatgtgcgtttaagcacccaacacccaccacctaccacccacagccagccatatttcccatttccaacgcttttcctgcgtgtctgcaactgttgcatattgcagtgcgtgcgctgcctttattgtcccgatgttaatggaaacacctgctggcggcggagaagtcagccccggagtccgtgaacgagtgccagtcattgtcaggggaaatctggccgggattgcggggtgaggttgactgtggagctggtggtgtacagccgcccttaagctgcgtcatcatctccatgccggatgacagtagacggaccgagaatggcatcttttgggagcgctttcaggtaatgccgccgagagatccattttacaaagtgcagccagtaaaagtgtttctgtgtcagctgttgatggtgcccagatgccctgctaatgtaaacgtgccacgagggacacaaattataattatgttgaactctgatacggcattaatggaagctcccatgcattgatccaccattgtattgattgctatccaatataccttataagccccattgcagccgtattactataatttatattgatattttaccttcatgctttataatattaaagttgctttgacttttcagcatttttacgtttttaattagaacagctagcacgtattgaaattggaataccaccactacgttttagtttattgatgttagcttagaaactcataaaaagcggagaaaatgaaacaacatgtgcgtaaaaaaatgaaccctagggaagttctagaacagcaactaccctacgaaaaaccaaggcaatcgtaacgagtttatgtcccaccgatatagttccaaccctccaggttaatgagccccgagtgggggagcggttcaattgaattgtgtgccgtaagttggacaaacccaattaaaatttcgactgcccgtttttccggcgataaagaaagaatagtgctggccaccccatttacaatcccctttgcacaggtgttgcacaattccactcgttcccgggcactcgaaagtgcactttgtactcactcaaaatttactccagtctggcgcgttccactttcacacgttcctcgtggactcaacgtgcgccttggcatatgcaacgcattcagtcgcttgtgggaggcagttgcattcgattgccagcactttcatcagcggaaaagccagagagcagctaatagccggacaaagagtgagaaagcgagagcggagagggagaggcagaacacattcgctggttggtcttggtcttggtaccactcattcgacacattttccttcagttttccctcggcagcgataccagccgtcgcttactttttcgttattctgttattgctggcctttgtttattagtgcgtgtcttcgctgcgagcggttttcgtaattgaaacgagagcgacataattaaattaaaatatactcgcacacagtagcgcactagcatcgatagacgggccaactaatcacattaccagccatcagacatcaagccaccagccatcaggccatcgtcagtcggaaaccgaaacgcagacccgcaacacaagactcacagttcgcattgcatactttttggcgcgcatcgaaataaacacaccaatacgtacatcaatacaacacaacaacaacaaacacattcaggctcgattgctgcgtgagtgtgagtgtgcctgtgtctgtgcgagagtgccttctaaagtcgcccatcctgcgaagcgacaaaattcatcaactcttgtgtctggtgagttgacataaaagacaatagaattgctggcaataaaaggcaaagcttgaagctaacaagaaaattccgggaaaagtgcctcgggctggtgaatgttttggcaatgttggtgtgaaaatgtcagactagatcgtgacctttaagcttctgatcattaaaggggttacatattttctgtgaatatgcttttaaaaatgataactggtgcgaataataatctgcaaaagtttttggtccaaatgttttgtaatataaagaaaacttgatgaaatcatgaatatttaataatcatccaatattctatagtgtactttaaaataacgtaaaaacgtaaaatgcgattacacaaaaataataacattattctcattttatattcagaatttaatctcatcattgacctacgccataaacacttttatatcaacttgtacaagatattttttgtggctgttttccacttgagtggttttaagtatctggaatgagagtccctttcatcgtagttattaatgcgataaatttcacagaaatgctatggtcatcgaatgtcgtgagcaattttataatttggtaaagtaatgggatttttcgaaattatgtcatgctagtaatgatagtaatgctactcgtatagttcagaaaagaagcttctagcaaagtggacgtaatgactccattaaaaaaagttctctattaagagaatggaatattcaaactttgtgatgggccatttaaccaaacatccgggatgtttgtgttaacacacaaaagttggtcatattactgatgaggaaaatatataacgtttaatggtcaacgttaatggcttttctttcgcacacattaaatgcacgatcttacttaacgaataataggattatgatgcagaagaaggaggatatattaaccagaaaatttccttatcgatgtgaaacaagtgaaccgaaatttgcattcatccgtggcccactgaatgcaatcacttagtcgacaccacccataccaccc

SEQ ID NO: 25166 - DNA, 726 bp, DROSOPHILA
atgagccccgagtgggggagcggttcaattgaattgtgtgccgtaagttggacaaacccaattaaaatttcgactgcccgtttttccggcgataaagaaagaatagtgctggccaccccatttacaatcccctttgcacaggtgttgcacaattccactcgttcccgggcactcgaaagtgcactttgtactcactcaaaatttactccagtctggcgcgttccactttcacacgttcctcgtggactcaacgtgcgccttggcatatgcaacgcattcagtcgcttgtgggaggcagttgcattcgattgccagcactttcatcagcggaaaagccagagagcagctaatagccggacaaagagtgagaaagcgagagcggagagggagaggcagaacacattcgctgcatcgatagacgggccaactaatcacattaccagccatcagacatcaagccaccagccatcaggccatcgtcagtcggaaaccgaaacgcagacccgcaacacaagactcacagttcgcattgcatactttttggcgcgcatcgaaataaacacaccaatacgtacatcaatacaacacaacaacaacaaacacattcaggctcgattgctgcgtgagtgtgagtgtgcctgtgtctgtgcgagagtgccttctaaagtcgcccatcctgcgaagcgacaaaattcatcaactcttgtgtctggtgagttgacataa

SEQ ID NO: 25167 - protein, 241 aa, DROSOPHILA
MSPEWGSGSIELCAVSWTNPIKISTARFSGDKERIVLATPFTIPFAQVLHNSTRSRALESALCTHSKFTPVWRVPLSHVPRGLNVRLGICNAFSRLWEAVAFDCQHFHQRKSQRAANSRTKSEKARAERERQNTFAASIDGPTNHITSHQTSSHQPSGHRQSETETQTRNTRLTVRIAYFLARIEINTPIRTSIQHNNNKHIQARLLRECECACVCARVPSKVAHPAKRQNSSTLVSGELT

SEQ ID NO: 25168 - DNA, 3410 bp, DROSOPHILA
ccacataactatccgctgctccattataacgattaaattataatcctattccgactcgtagccacataaaccacactcctggaaggggtggttatcatcgagttagccgtgctcgaacaccttgctctgaggattaatccacccatacgcacacttttgggcaggatcaacagcaacccctctagaccataaatatgcataatggaatttaccttttcgctttcgaggaaagtttgcaagcaaatgcgcatattattctaatacagtcaaaaattaaccagagcaacatgctcatgtcctgcatcctgccactgtgtgtgtgtgtgtgtgggcgagtgtgtggaagtttttctcgtttatacacgcacaattatggccaattaccctggccaaaactttgcccaacactgcattcctgcccgcaaaaacacctgtgctcggggtgtgggctttaatgttgatgggttcgccataagcataatcatattacttgatgcttatccgcactgcccggggaaccagaatggatggacattgttgaatttcatcgaacgcctccgagtaatatgcccatttgtatgccccggagcttggggctgccatcttgtgtaaactcacctcggctaatcgatgtgaccttgtcccgtagcacattcagtgtgtgaacgggtccgaactgctcgaacatttggcgtagcctcgtctcgtcccaggtcttcggtatttggcccacgaacatcttgatattgtccgcatccggctgatccttgatcgaatccgggctggtcgattccatgagctccattttgaccgagcagtcacgcgtgggactttggttgctgcaatgcagaaacaactttcaagattaataattttgtagatgtgtttaattatcaaattatttatatttattttcaatgctacaatctttttctattgccctctcaagcctttttaacttatacacttatttaatattttctatgcgaatagtttaatgttatgctttgttggcaggtggctcattagcagtctccacgggtttcacaggagcttgatctgcggtctccgcaggctttggaggttcatcagtggtctccgcaggctttggaggttcattggaggtttccactgctttcggaggttcctcggaggtcgttggtggaggtgcttccacaaccggatcctccggtggaggaggtgcaggtttttgcggttcttccacaacttccttttgggagtgtgcttcttcgggcgtagggactaccattgaaggcggtggcgtctttgttaccatattatcatcttcatgttgcggactagaaggtggaatgacactaaacgtgggcgtcgaatagcataggtcacttttggcgctttccttgcccggaaaacttggctgagtgccgcggcggcccatggagtaggcggcgcaggagtgtgccgcactgatatgatgttctgtggacagtttgggaaatcgagctatgtgataggccaagctgcccataaaggcatcaccggcacccgagggatcggccaagtgcggcacatcggaggcgggcacatgggtgcacatatctttgctcttcttggacatgtaaacggctccttgctcgcccatggtaatgatcacgctcttggctccctttgcgataagagtttcagctgcttttcgcgcctgatcaggggttaacacttcttccatatcggttaggttggcagctgcctcttgattcgcaaccagaatagtaggcaagccaatcatggcatttggaatatcttttcgcattggcgacatgtggagcagggaaacccccttgaactgacgcaacgcacacatggtggcattcatatccgtttccagttggcagagaagcaccttcgcatcctgaaaggacttcttagcccgggtcacatccttggccgtgagaaatacattcgcaccagccacgttgatcttgtactgatctccattctcagaaaccgcgatttcactcatgcccgtgggattgttctccacctgctggacgtgcgtcacatcaacctcgtgctgttgcaggtggtttaggtagtcatcgcccgattcgtccttgcccaacttggcgaccaggacggtggaggcccccaatttggcagctgccacacactgattggctcccttgccaccgaaacaggtctccatgtacgttccggcgacaagttcaccgggtttcggcaattccgggacatatctgaggtaatcaattgacaaattaaagattttcttttcctatacaaaacctacgttatatattcgatgtttgccgtcccgaagacaaccacatccagcttctttcccatttgaaagggctgcgtaagccggaaattttgaacaaaacttaacagagattttggttgggggaaaaatttctacatttctgacatatgacaatacagatcacttgacctttaatctgaatgatattttaagatagtcttcaatatgttatttttaataaacgtagtttcatgtggctgaaaagcaagcctctagggaaatgattcatgtaaatttagccaattaatttcgcattgatgctgagcagcttgccaactgtttctttatcgatttaaacatgtatttccattactggcaaataaagtgatagaaattctcaaatggaagtttggaactttttcattgaactttcatggacaacatattgtattgccgaccccactgagaacaactcctccgctttctaacttcatttgctaatgaccataaaaaaaagagaggggataacaacaagctgaaccattcgttctctgtccctgtctgatgccgagttggctaacagcataaaatacaaatactaattgttattagcaaactaatctaatctaaaaagttgtaaacgttgttacttttgttttgtggttgaccagtctccgactgcgagttccagcatgatggttccgtttccaggggaggattcgggaatgctggtccttgagtgactgggaacgcattgaacgctccactttgaggtcactttcagttggtttttgtgtgctgccgaaaaagttttccctttttcccgattttcccagccgatgttgtttttgctcctaatgggggtttattgggtgctcgtgatggtgtacgaaattgacttttggttggctgtcaatttggccagggtctccgttacggaaccgatttgccgtaagcagaagttgtcaagcagtttggccaataaatttcggctcttaattggctaagccagttagttgaagtcgctgagcgacagcggtatgttggcattaagtatcgctgatataaaggcttagtttttataatggctatgttttttagagtgcggaatataaattaaaaaattaattaaaatacgcaaaaatattaa

SEQ ID NO: 25169 - DNA, 1357 bp, DROSOPHILA
atttttcccccaaccaaaatctctgttaagttttgttcaaaatttccggcttacgcagccctttcaaatgggaaagaagctggatgtggttgtcttcgggacggcaaacatcgaatatataacatatgtcccggaattgccgaaacccggtgaacttgtcgccggaacgtacatggagacctgtttcggtggcaagggagccaatcagtgtgtggcagctgccaaattgggggcctccaccgtcctggtcgccaagttgggcaaggacgaatcgggcgatgactacctaaaccacctgcaacagcacgaggttgatgtgacgcacgtccagcaggtggagaacaatcccacgggcatgagtgaaatcgcggtttctgagaatggagatcagtacaagatcaacgtggctggtgcgaatgtatttctcacggccaaggatgtgacccgggctaagaagtcctttcaggatgcgaaggtgcttctctgccaactggaaacggatatgaatgccaccatgtgtgcgttgcgtcagttcaagggggtttccctgctccacatgtcgccaatgcgaaaagatattccaaatgccatgattggcttgcctactattctggttgcgaatcaagaggcagctgccaacctaaccgatatggaagaagtgttaacccctgatcaggcgcgaaaagcagctgaaactcttatcgcaaagggagccaagagcgtgatcattaccatgggcgagcaaggagccgtttacatgtccaagaagagcaaagatatgtgcacccatgtgcccgcctccgatgtgccgcacttggccgatccctcgggtgccggtgatgcctttatgggcagcttggcctatcacatagctcgatttcccaaactgtccacagaacatcatatcagtgcggcacactcctgcgccgcctactccatgggccgccgcggcactcagccaagttttccgggcaaggaaagcgccaaaagtgacctatgctattcgacgcccacgtttagtgtcattccaccttctagtccgcaacatgaagatgataatatggtaacaaagacgccaccgccttcaatggtagtccctacgcccgaagaagcacactcccaaaaggaagttgtggaagaaccgcaaaaacctgcacctcctccaccggaggatccggttgtggaagcacctccaccaacgacctccgaggaacctccgaaagcagtggaaacctccaatgaacctccaaagcctgcggagaccactgatgaacctccaaagcctgcggagaccgcagatcaagctcctgtgaaacccgtggagactgctaatgagccacctgccaacaaagcataa

SEQ ID NO: 25170 - protein, 394 aa, DROSOPHILA
METCFGGKGANQCVAAAKLGASTVLVAKLGKDESGDDYLNHLQQHEVDVTHVQQVENNPTGMSEIAVSENGDQYKINVAGANVFLTAKDVTRAKKSFQDAKVLLCQLETDMNATMCALRQFKGVSLLHMSPMRKDIPNAMIGLPTILVANQEAAANLTDMEEVLTPDQARKAAETLIAKGAKSVIITMGEQGAVYMSKKSKDMCTHVPASDVPHLADPSGAGDAFMGSLAYHIARFPKLSTEHHISAAHSCAAYSMGRRGTQPSFPGKESAKSDLCYSTPTFSVIPPSSPQHEDDNMVTKTPPPSMVVPTPEEAHSQKEVVEEPQKPAPPPPEDPVVEAPPPTTSEEPPKAVETSNEPPKPAETTDEPPKPAETADQAPVKPVETANEPPANKA

SEQ ID NO: 25171 - DNA, 4274 bp, DROSOPHILA
cgaagcccacaaactcggtgaccatcaggcagagtggtagtagaatatgtgccaatcatttggttggtgagtttgtggagcatgcggaggactgccacatgttttacctgtgcgttgagaacggggatgcagtcctggcttcctgcccaccaacgatgctcttcaattcggagagcagactctgcgattcggcgacaaatgtaaagtgcagaaatgaaacggatcccatagagactcctccattcgatggcggaaatggtgatggagatccgaataacatggtcacggatgccgccacttattgctccacgttggtggagcaacaacaatccagcgacaggattgtatatgtcggcagctcgagtagttgcagaaagtactatatttgctactatggacaggcgatcttgcaggagtgcagctcgcaattgcactggaatgcaatgacgggtaaatgcgatattccggagagagcccagtgcaccgtaggtggtcaggaggatatgccaacgaatggaaattccggtttcccatccggtggcaccgccatttcgagtgatctcattcactgccccgcctacggacagcatctgtatccccatatgcagcgatgcgagttctttatctactgcgtcaaaggacacgccagcctgcagcaatgtcctttctattacttcttcgatattgccaccaaaagttgtcaatggtcgcgcacggctcagtgtgtgcgagatttaaatttggcaccactaataaaatagaagttttaatatatgtagcatacaattttttgaactttgggagataccaaatgcttttagagaggtttcttttaaaagtactactacttttaaaactcccgccgattacagatgaaaaccagaactaatgtgtgtacacactaactttcgacaacaatgttcgatgaatcggtttcgataaagttgactatatggccactgttcttttttgcggtagtcagacacggtcatacaaatcccacaatataatgttaaattaatcatatttatacttatcttcatttaagtaaagcgaaatattcgattgaccctcgaagtaaacaacccaggtgctcaaaaatgaagctaacaaagttagattaatcggtgtctacgaattatctggaaacacaagcatttcccgtcatctaactcaaactgcccaactcgaaaaatcaacaatatttttgcatcgggccaaaggtgcattaaaaccggagcctcaagtctcgggcggcaggtaatttattcaagttcaaaacagccacccggggattctcctagacatcggttgccacaagaaaagaagaagaattaggcgtaatcttctagaaaattggtgatttcagccgagaatgtttgagaattttcgaggtatttttcggaaacggcgtcgctgcgagtcggacacaacaccgccgccaccgccgccgcaacccgcccaggaggcggagataataaaccgatatccggaagatatagaagccgatacgcccgagtccaatgatggctttgacgcctcctggaccgaaggctcttttcacagcccacattcagataggtaattgaattctgcgcattcacgcttcctcttctctcttattgcagcttcaaagcaaaaacagataaaattaagcttaagcaacagcatcaaacacttcgacacccactcgaaaaaaaaagcttaagacattccaaaaaaagtagccagcaaagcggctaaaaaaaaataaataagataaaaccaaaacccaaaacgaaacagtaggcagctatccaaccatcttgggtgacaaacacttgaccggctttttggagggcgacaggtttaaatcaaatctggagcagccgcaggatatggaagttgatgcgccaacaacgcaggaaaccagtgacactcatcatcatcaccatagtacttatcaccagcagctgcatcagatctcgcccagcgattaccactcggaggcatccatgaattttgatcatttgcaagacctgagggccgatgccatggcctcctcatccccatccggatccggaggtggtggcaatggcgggaacagctcctacggactcgtcgacgatagtagagctctggacaggttgttattccatcataactaaaaccaaatcagacacgaaaccaaaacaataccaccgattatattcacacaacctcgtagcgaaacaaaagttatacgtttcttatctattatttcttcacactaccagctaccagcttcattcgaatcttttgttccataatagtaatggtgatagcttaaagtatctgccgcgaacgcccacacaactctcaaaagagctttgtgtgcgagcgccttttcttgtagacatattctggttataatttcgtagctctataagtggtcagtcgatctgtagcagagcgatctaacaatctaacgttgcttgtctcgtttcatgacttaaccactgaaccgcaatcacacttaaccgacatgtgacagaccatttaacgccagcgagaggtaaatcttgaatttataataaccactgagcgtgactaacctttgagtgactcgcagatttgtcaccatactggatagtttggatgcacgtgtggagaagctgcgcaaggatgcactcaacctgcaggagaagaaagactaccttctgatgtccatggatctgatcaagagcaacgaaatgatgcagaacatgagcgaaggtaagtgacagtgattcttaaaactaatttgaaccctcattgttcatagctttactaaaatgtgtattatttcgaagtcggaagtaatggtttctgatgacaaactaagtaaagggttattcatagttgactgtgagctaatgttgtaccaccttcttttgcagctgaacgagaggagatcattttgtacctacaacgggtgagctctcgcttggccaccgtggagctgcgtgtgcgcactgttcgggacaactctcaggaggattcccttagccagataaatgtattgattgacagcatgatcaagatgggtgatcccgtgatcggacgccaacgatgccagttttacttaaacgcctgctgcagcagctcaatggatccatccggacacatggacaccgtgcccgaggccgatgttgggccggtcgacaagaagttcgagagcgttttgcttggctgcactctggacgatcagaagaacatcaagaagcggctccaggccttaatggcttatctgaataagcaaactgttagccattaattaaattgttttttggtctattaactattcatagcattattatcaaaccaaacgaaatacatcaccaagctagatgaaacgaataataaagaaagcagcatatacaccaggccagcagtgtttgaatcaagtaaaatataattttaatatttatattaacaaactaaatgttataagctaggaaagcacatgtccttcgcattcaagacccgatcacttaggacccataatgcatcattggaggtgaagaaaatctgctgaatgttcttcgatgtgatatatatgatttcgttgccctcggctgtgatgttggctagtttggcacatcgtacgacagctccgaatttggggataacatagtacaatgttccgaaattgtcgatgatcatgctgcgactgctgcccagaagactgcccaaatgtgtgagtttaatgctattgttaattggtttgcttgctaattcgcttttgccttcaatttccagtctgtccaccgtactgtatagatcaccatcctggtcggagagtatgagttccccttgaattccgaagatgaaatccactggcttgatgggaaacgattgattcatattctcgtacttattgctctccaaggataggcggtgccacgtctgctccaggatgtcgtaggctagaatttctggtacctttccaaggatgaagtaaatatggcgctcgtgctcgcatcccggactcttgggtcccatttggacagtcagaaagtgggtgtcattagcacctatatggtgtccacaatcgattctcaatagctccgcgttgttacgcatcagatcgaagacaaacaaacggggtgagcacgtgctgccgggaaatccgatgtccatgacccacagtcgactcagtgcatccacctgggaccagtgtgcctgttgtaccagagagcaatcatcatgatcccccatggaatgaacatcgatgtggggaaagacgacagtgggcatgggaaaataggaaaccg

SEQ ID NO: 25172 - DNA, 1297 bp, DROSOPHILA
cacaatataatgttaaattaatcatatttatacttatcttcatttaagtaaagcgaaatattcgattgaccctcgaagtaaacaacccaggtgctcaaaaatgaagctaacaaagttagattaatcggtgtctacgaattatctggaaacacaagcatttcccgtcatctaactcaaactgcccaactcgaaaaatcaacaatatttttgcatcgggccaaaggtgcattaaaaccggagcctcaagtctcgggcggcacttcaaagcaaaaacagataaaattaagcttaagcaacagcatcaaacacttcgacacccactcgaaaaaaaaagcttaagacattccaaaaaaagtagccagcaaagcggctaaaaaaaaataaataagataaaaccaaaacccaaaacgaaacagtaggcagctatccaaccatcttgggtgacaaacacttgaccggctttttggagggcgacaggtttaaatcaaatctggagcagccgcaggatatggaagttgatgcgccaacaacgcaggaaaccagtgacactcatcatcatcaccatagtacttatcaccagcagctgcatcagatctcgcccagcgattaccactcggaggcatccatgaattttgatcatttgcaagacctgagggccgatgccatggcctcctcatccccatccggatccggaggtggtggcaatggcgggaacagctcctacggactcgtcgacgatagtagagctctggacagaccatttaacgccagcgagagatttgtcaccatactggatagtttggatgcacgtgtggagaagctgcgcaaggatgcactcaacctgcaggagaagaaagactaccttctgatgtccatggatctgatcaagagcaacgaaatgatgcagaacatgagcgaagctgaacgagaggagatcattttgtacctacaacgggtgagctctcgcttggccaccgtggagctgcgtgtgcgcactgttcgggacaactctcaggaggattcccttagccagataaatgtattgattgacagcatgatcaagatgggtgatcccgtgatcggacgccaacgatgccagttttacttaaacgcctgctgcagcagctcaatggatccatccggacacatggacaccgtgcccgaggccgatgttgggccggtcgacaagaagttcgagagcgttttgcttggctgcactctggacgatcagaagaacatcaagaagcggctccaggccttaatggcttatctgaataagcaaactgttagccattaa

SEQ ID NO: 25173 - protein, 223 aa, DROSOPHILA
MNFDHLQDLRADAMASSSPSGSGGGGNGGNSSYGLVDDSRALDRPFNASERFVTILDSLDARVEKLRKDALNLQEKKDYLLMSMDLIKSNEMMQNMSEAEREEIILYLQRVSSRLATVELRVRTVRDNSQEDSLSQINVLIDSMIKMGDPVIGRQRCQFYLNACCSSSMDPSGHMDTVPEADVGPVDKKFESVLLGCTLDDQKNIKKRLQALMAYLNKQTVSH

SEQ ID NO: 25174 - DNA, 2660 bp, DROSOPHILA
cttccttctgccgtaaacccattaagatttaccataattcccggaactatctggcctgcgaggtccagagatcacaatctataaattccataaagtcactgccagtcaaatttccatcaacaccaaatagatcacttaacacagaaaaggattggtcgcatggtaaaaggtgtttacaatgcgcagctcccaagtgcaaaacatcttccagaagttccattcagtcgaaaaaactgaaaaaagataagaagtctctgttaaaggaatttgaaatatacaaaattcctatcattcgacgcaagcctataaaacaagctgtactaagggaaaccaataagtaccgaaggcttcacaacgccaatcccctgaaaatggatgaaaaactttgttcctatgcacaggagtgggcagatgtatgtagatgtatttaatataaatagatcctttctttttcacctaaacttgatttccacagcatttggctgatctgaacaaactggaaactcgacctaatcctctttacggcgagaatattatgcgtgtccggagatccaaattctccgtggatcaaatactgaaactctggtaccaagaaaaatacaactacgattacttaaagccaggctttaatttgtacactggacattttacccagttggtttggagagagtcagagttcctgggagtgggcgtggcatgcgagtgggttcataattttaagtcatactaaaaataatccgaaactaactacattttacacgcagtgtttcctccatttggattgtgtgcaattaccatccgcctggaaatgtaagcgaacatttcagggaaaatgtcctgcctagaaaattccttctacttaaatcggacttggatgccaaggaaactagaaaatcgaaacatcacaatttaaaatagaaaatggtaaataaaacaaacaaatactggacctagattacgcttttattatgcttaaaattttgatcaaaaaatcccagagttattgctttggcggcacattatccttgaacaaacccacaacattgccgggaggattgtagttgcaaaccacccaagttctatccgctctattggaagacatgtatgaataggattaccatagccatagccataagactcactttcgggccacacccgaacccatttccaccgacgacttccaaatgagctgagtaaagtgtccagcggtgggcacaaactgcgccttgttgaaatcgtagctattgatttcccgataccacatttccaccggcagatcaccggtcacatccattccaccggagaggaaaatgttttcgccgtacttgggattgggtctgtgcgccattgtgttctgatcgcggagatgctggaaatgggtgcaaattaatataaaatactatagaatactctttatccctcatcctacattggcccattcctgagccagcttatttagtgcagcattaatggtcaccgcgggacagccgtgcattgcccgatatttattggtggtattgaagacctccttcaggaagagctcgttgttgcccttggtatcctgacccctgggacctggagggcgctcgtgggttttgggaatgggcgctacgtttctcttcgccatatttctttgggggattggctggcgccgtgatttagttaaccaaatttacgtatgcctaatgactttttaagctagctggctagatcaacatttctcgtttttaagttacaaaattaagtggttattatacatgtatacaaggcagtcaattaaaattttcactgagttctgaatagctcacccatcaatcacaatgttttgtttacagccgaaaaacccttttttcaaaccgcctcataatctggcctaaacatcggtattagcattgtgattgataccgcaaacacaggctgtgggtgacggattcacaggacgtgtgcgtgcccaaatccattgacgggaattagacagactgtatcacacatccttcttctgcatctgccgatgggattaaccaacgtgacgtatgagtgatgcatgtcactgggtttggttattaatgagccggcgattctttcgcaatccagccatatggctggatatgtaggtgcaggcaaatcgggcaattggagtggcattaattgccgactgaatcgagctggataatgcgagttggccgacatggaggccccttatcaatcgcccgcagcgccgcccatggaagtgcaaatttcgatgtcgaaacactcggaatattaaattatttaagtgtgtgagtgtgtgtctgcgctgcgggtggtgcttcaagtgtgaatccctaatgagttgtgcaaatgcaaatcaatggaccggccgatgtcgctgctcccggcagagattaagccgatgctccgatgtacagataggcggatacagccgcaggacaggctgactcgctgaaattatcctgtgcgccgcaaggtggatgcggggtcacagcattgcgtttgatatactcatgtgccaggcactaaattatggcccagctcattgatttatgtgaatttgtgtactaagtacttaagtactcggccataagcttaaagctggataaaatagtttattaagccgcgaatttaaataagtattaatgttaatacagattaaagccaat

SEQ ID NO: 25175 - DNA, 546 bp, DROSOPHILA
aaatcacggcgccagccaatcccccaaagaaatatggcgaagagaaacgtagcgcccattcccaaaacccacgagcgccctccaggtcccaggggtcaggataccaagggcaacaacgagctcttcctgaaggaggtcttcaataccaccaataaatatcgggcaatgcacggctgtcccgcggtgaccattaatgctgcactaaataagctggctcaggaatgggccaatcatctccgcgatcagaacacaatggcgcacagacccaatcccaagtacggcgaaaacattttcctctccggtggaatggatgtgaccggtgatctgccggtggaaatgtggtatcgggaaatcaatagctacgatttcaacaaggcgcagtttgtgcccaccgctggacactttactcagctcatttggaagtcgtcggtggaaatgggttcgggtgtggcccgaaaagcggatagaacttgggtggtttgcaactacaatcctcccggcaatgttgtgggtttgttcaaggataatgtgccgccaaagcaataa

SEQ ID NO: 25176 - protein, 170 aa, DROSOPHILA
MAKRNVAPIPKTHERPPGPRGQDTKGNNELFLKEVFNTTNKYRAMHGCPAVTINAALNKLAQEWANHLRDQNTMAHRPNPKYGENIFLSGGMDVTGDLPVEMWYREINSYDFNKAQFVPTAGHFTQLIWKSSVEMGSGVARKADRTWVVCNYNPPGNVVGLFKDNVPPKQ

SEQ ID NO: 25177 - DNA, 4635 bp, DROSOPHILA
tcgttaatttgtggagttcaatattccaagccatgtatactttatttttatgttcccgtttttttgcacgtgccttgcattttttatatcagttactcgtagattttgtcatgagtatgtaaaataaagtaaaaaaagtaaagtaaaaaaatgtttcagtaaagagttttgttagtaaaaacttccaaaaaacggtccttctggcggcacaagcacgtttaatagctgcagcttatgtttccttatcttcgtattgctttactccttcgtataccttccgtattttgcgatctggagaatagtagtggccaggtcacgctattaacgttttagctcgaaataaaagacattgctaatcgacaaggaattgaatcaaacagatattttaattttgggaatacggactccagctctactcttctcccactctatcgaccacaagtcggtcaaatctggcaaaatttctgaaagagaacgatttttttggatttttttagtttccttatccataatatccagtgacatggcgaaggaacaccaaaagtgcccgaagttgttcagaccattcaactaatttgcagctgctaattttacagtgttcattacagcagtttttcagctgtactacgcgttttattcgatattttcaaagattttcaaagccgcaagagggcgctgatgtagaaagcttggcatcagtaataccaagatcgtcgcgtaaattaatattatttatattctttaataagaatacgttaacaacttttacatgtgacgaaaatatagcggtacagtgagacttccccattgtgctgcttacttgacgtatcctgacagattttagttcctggccgtgacgttagaggaatcttttgggctgccacagtagtacagaagtggtacatgagggagttgcaaggatccgtaataaaattcccccttttgtcttaacgtaacgtatttattgtggtatgtgagtaaagtgtgagtcggtggacttttaggccgccttgggattccgcacttgtccggcgaagaggagaagtccggttgccttctctacgatcatgtactggaagggccggttgagcaggaacttgggcggtgtggccttgttggccagcgctgcctccgtgacggctcccgccgtggttccctgttcgtccacaatgatcttggttgagtggacgaccagcttggcaaacaagccggaagacattcggtccaggttggctgtattctcgtcgaacagatcgcgaatgcccatctagaattagaagttatttacaaatgtatttccagattggatttagaagttctgtcacctggatgaggactcccttaagagtgaaatctgtggcagtcacaaacttgggcatcatgacctccacttcgttgtcctcggaggccctgttcctgaatgccgccagtcgctggaggatgggcctcaatcccaaggccttcagattattggctacgtcgtttagcttgaatccgcgcttgggcagcaccacgatcatcgccagacgatcctgggtgccgtagggcagctccagcacatagccatccaaaccctctacgtttgagacgtaggcgaagttcgcttcctgcaccatcatgggaatctttccaatgacttcgccgctctcgctgaaaaagggttcctctcttgtcagcgttttgttgaagggaaactgcaagcgaaaacgatatatcgaaggatttgcaagtggacaagttcacttcccaccttccattggcccttgaagtacagagacgagagcagaaacatcttcgctccatatacatcctgtggcagaatggtataaggaatcagaccgcgggtcgtgcgatttgtgtcctcgttgatctggatcaccgaatccgggctatagaagtccacttccatcggctggacattgtagttttgaatagcatcgcggtagttgttcttgatgggataccccttgccggtgtatatggcctgcagggtggctacttcgatggtggaagtggtgatgcttagaagagggaagggggtcaccgcgatccataaatatgcaatcctataaactcacttcagaaatgagctccaaaccttgtaggcgccccgaagcttttcgtcctcgacattgatccgcaggctttttttcaactggttgcgggtctctccctcggatccctcgtagagaagcaccaggagtgaccagacggaaaagggcgatatcatgaaatccttgttggccttctccacttcaacggatatgcgctgcaggagatcgagggcgaagtcctggaccccctgcgaaatgctgaccaggacatccgtgtcgaagttgcttctcatggactggatatggctgacgccactttggaaagccgtgggagctgtgaatgcggtaaggggattgcccactgaaagctggaggggcgcttggttgttctgaggatccgccgagcacaggaagatggctcccaggagtagtggaatccatagcatcaggcaatctggattaagatgtgcattagaacgtcatttcattaaggatcatgatgttaaaagccgcactaaaattattgtattattttacaccaacatcattttaaaatgcgttaaagatggataattttataaatttcgagttaaataatcattttacggtaactgttttccatcggaatataattttattattcatttcagaatgtaagtttaaaccatatacatatgcagttagccaattgtccttgaactccgtatgagttaaaccaacaactcgattttgaaaaactgcctgaaaatccggcatagctatttccggtctaatcaaatcgaatgaaattcaaaggcactcgcgtgagtactatgtacatatagtattcccagatgcgtaaaaataagcattttccaattgatagcgatgatccattgacgacctcatgtgtttgtacgtaatacaaaatgtatatatgtatgtacataatatgtgtttgctgtgcacacacgagtacttgtaaattttaaatctctttattgattgcctctaaaacaacatccccgcctctgggaaatattccataattaattgaccacgaagcttacctgcgattttacccattttttgtggctgcgatcaagaattggctcaagcctcgcttatcaggccttcaggccgggcttttaatattatttataattgggccttcaggcagggcttttaaaatttttataataattgcgcacacaaatgaatcacacttttgcttaaccatgtgggtgtgcatcaattattgagaggcttttaaaccttttattgatgtattttggggtttttcgatgttgacaaagcgacgttcatctatatgtctctatacactgttgtcggtcggtgttattcgaaaaccggaatgcactgaggggaattccacatatattatgtatacaaatacacgctcgcaaggagaccatacgtacaggtgggtggggtgttcgcgtatgcggttgccgcttatataattctatatatttatttcaatttgtgaacccagctactggtggttttcggttttgccaagattttgatgccagatcgaacccacgtccacacaactccccacaaacaatgtcaacctaacgcacgagcatcagctgagtgactgagtgactgagagactgctccatcgaccattcagcaccgtactgatatggtcatcccatcccaccgccaccgccatcgtcccacagccgggtccaaatcagttcagactcggattcagatgcgagagccgcagcgagagaacgcggtattgatattggcagacctttgtctgccgctcttgacaatgaagcctcattcgcgaaatggaaatcaggtggaatcactactatgagttgcagctaatccgatggtgaaactggttgaaatgccgggttaactccagtaactcacctttagatcacatctacatcaactgtgcctgaatccaagatattttaaaaggtaactacatgtattcaaatgtatatgcaatattgtaagctcgtggatggatggttaagatgacatcaaatatgagctgtagaagacatatgcaggtagctctcaactgtgttttataatcatacaaatgaatgttttcaataccagtaagtttacaagtgcaataaacaacaaacttcaaggtaaaaaacatttttttttcccaagtgacaggtgcaaactaatgatatactagaaagacaatgcttatggatggactggaatatatgctaggcaccattttaggaaacatcgatggatacgaagagaggatgacaggattaatccaagcgttaactttattaaagtatttgaattggaaatatccgtggtaacgcttgcatagaggcattaccaggatctttgcagtattaataattaaatgtgttgggtcaggtttcagtggtgttgtgtgtttcctggagatcttcattcaataaattcaataattgatttatttattcttgcttcggcctcgacgaccgcgtaatcttcgtcgctccgtcgtaatattatttattggattataattcgctcgtacatgttgatctactaaacatcgttaaaattttgcgagatggaattttctataaat

SEQ ID NO: 25178 - DNA, 1807 bp, DROSOPHILA
ttaggttgacattgtttgtggggagttgtgtggacgtgggttcgatctggcatcaaaatcttggcaaaaccgaaaaccaccagtagctgggttcacaaattgaaataaatatatagaattatataagcggcaaccgcatacgcgaacaccccacccaccttgcattccggttttcgaataacaccgaccgacaacagtgtatagagacatatagatgaacgtcgctttgtcaacatcgaaaaaccccaaaatacatcaataaaaggtttaaaagcctctcaataattgatgcacacccacatggttaagcaaaagtgtgattcatttgtgtgcgcaattattataaaaattttaaaagccctgcctgaaggcccaattataaataatattaaaagcccggcctgaaggcctgataagcgaggcttgagccaattcttgatcgcagccacaaaaaatgggtaaaatcgcagattgcctgatgctatggattccactactcctgggagccatcttcctgtgctcggcggatcctcagaacaaccaagcgcccctccagctttcagtgggcaatccccttaccgcattcacagctcccacggctttccaaagtggcgtcagccatatccagtccatgagaagcaacttcgacacggatgtcctggtcagcatttcgcagggggtccaggacttcgccctcgatctcctgcagcgcatatccgttgaagtggagaaggccaacaaggatttcatgatatcgcccttttccgtctggtcactcctggtgcttctctacgagggatccgagggagagacccgcaaccagttgaaaaaaagcctgcggatcaatgtcgaggacgaaaagcttcggggcgcctacaaggtttggagctcatttctgaacatcaccacttccaccatcgaagtagccaccctgcaggccatatacaccggcaaggggtatcccatcaagaacaactaccgcgatgctattcaaaactacaatgtccagccgatggaagtggacttctatagcccggattcggtgatccagatcaacgaggacacaaatcgcacgacccgcggtctgattccttataccattctgccacaggatgtatatggagcgaagatgtttctgctctcgtctctgtacttcaagggccaatggaagtttcccttcaacaaaacgctgacaagagaggaaccctttttcagcgagagcggcgaagtcattggaaagattcccatgatggtgcaggaagcgaacttcgcctacgtctcaaacgtagagggtttggatggctatgtgctggagctgccctacggcacccaggatcgtctggcgatgatcgtggtgctgcccaagcgcggattcaagctaaacgacgtagccaataatctgaaggccttgggattgaggcccatcctccagcgactggcggcattcaggaacagggcctccgaggacaacgaagtggaggtcatgatgcccaagtttgtgactgccacagatttcactcttaagggagtcctcatccagatgggcattcgcgatctgttcgacgagaatacagccaacctggaccgaatgtcttccggcttgtttgccaagctggtcgtccactcaaccaagatcattgtggacgaacagggaaccacggcgggagccgtcacggaggcagcgctggccaacaaggccacaccgcccaagttcctgctcaaccggcccttccagtacatgatcgtagagaaggcaaccggacttctcctcttcgccggacaagtgcggaatcccaaggcggcctaa

SEQ ID NO: 25179 - protein, 442 aa, DROSOPHILA
MLWIPLLLGAIFLCSADPQNNQAPLQLSVGNPLTAFTAPTAFQSGVSHIQSMRSNFDTDVLVSISQGVQDFALDLLQRISVEVEKANKDFMISPFSVWSLLVLLYEGSEGETRNQLKKSLRINVEDEKLRGAYKVWSSFLNITTSTIEVATLQAIYTGKGYPIKNNYRDAIQNYNVQPMEVDFYSPDSVIQINEDTNRTTRGLIPYTILPQDVYGAKMFLLSSLYFKGQWKFPFNKTLTREEPFFSESGEVIGKIPMMVQEANFAYVSNVEGLDGYVLELPYGTQDRLAMIVVLPKRGFKLNDVANNLKALGLRPILQRLAAFRNRASEDNEVEVMMPKFVTATDFTLKGVLIQMGIRDLFDENTANLDRMSSGLFAKLVVHSTKIIVDEQGTTAGAVTEAALANKATPPKFLLNRPFQYMIVEKATGLLLFAGQVRNPKAA

SEQ ID NO: 25180 - DNA, 9412 bp, DROSOPHILA
tattctaaaagcatgttaaagcaagtgacatcaaaaagaacacctaatatctcttaggtttttaatagataaaatgcattgttacattagcaatttgcctcataacctaattttaagaaaatgctaatttttaggtaaataaatgcacttacaatccatctatcataactttccttttgattaagcttataaataaatttcacgatgaaaaatgtagaagttagctaagaccatgaccgatcataatttaaaaatgcaaagtaaacgcataaaatatattatttcgaacgttagagctaaaaatattatagttatgagataagtgtaatctaagatacttttctagacaccctgtttcgttgaaatttggatgcgaaatggaacgtgcatggagataatttcctatctacacttatgccttattcgaaatgacggggtaaaagaagtcttttttgacagggtatattccagtctgatcataaccaaactagtcttcagcttgaagtcttggagtttggctatccataaacaaaatacggccaatgcggcgtttgttgaggtcaatgatttctgttgcgttgtctttttcatgcttttttgacgctttttgttcatatgttcgtatgtacgtatgtatgtattgaatattaatttttaaagtttttcggcttgtgtaaacatattcagcgaaatacttaagtggaaccatcgaccgctgtaatgtcgattctgcaagcaaatgatgacataatggaagatagttgaaacttgaaagaacaggaatgctgtgattcacggggaccagaatattttgtaatacaatgaaccgcgtctagagctatctcgaaggtcttttcgataaaacgatattcaattatactaaaaagaaatgcatgtcggttacttcttagggggaaaaaaatcatcgcagtaggtccataaatataatgggaaaaccgtcgacttgattcagtagaacattccatacggagccaataaaatgtccaaatatctgatacacctgtgcctggtgctgctctggagctctcggataaatgcagatcactttgacgaatgtgacgggatggacgatggggcatttgtacaaagttgggagagctgccaatcctacgtgtactgcgagggtgaggaatccctaaagggcgattgcgaggatggtgaatactttgattccgaggcgggaacctgtgatattgcggccaatgtgtcatgtttcctggacgaagtcgatgaaccctcggacccggaaccggaaacagacgaagaagaggaggaaatacccgcgacaccaagaccaaccgaaccaccgattgtggagaccccaaccgaagtggatatcataaatattgcgcccgttgtaaggcccaactgtccgatcagcgatgatcccggccaggttatattcatggccagcaataattcatgcaccaactattatctctgctatcacggccatgccatggaaatgcactgtgataatgagctgtactttaattccctcaccggacagtgcgattacccagataaagttcagtgtgccgtaagtatcttctgctgatccttttacccatcgatctaaattctgatctaaattccacttgcagttcgaagatccgcgatcccacaagtgcctgccacacatgaccgagttctttccacatccggacaactgcaattacttctactactgcatcaagggctttctgaccctgcaacagtgccccttctactacggctgggacatagaacgccggagttgtgtgcagataggtgtggcgaaatgctatggaaactccagaagaataggtcggaaagccccattgccacccagaaaacaactcatcaagtcttaaggggagttgtctactagataagagctctatttattgacaagttacaagattgtggcgacatgagacctttaattaaatataacttattaaagaagaccttgattttgattgacttgccaccgggctgagctataaaaagcttagcccaccaccacgaactccacaatgatcgagaatgcagcaatctttgcgcgtggaactgctattgatcgtttacgggttgattctcgttgtctggggaatcaatggattaaacatacccgagtgcagtggccagaatggatttattaacaatacgcgatccaattgcaattactccctcatcaattgctctggccagaactcgatgttctgcacggacaacacgacctgcaatgccaacttcacctgtagcgacatacttccggtggataattcaacagcactacccataagcacaactcccaatgtggtaaccacagcctcgacaactgtttcaccttccgatattcgacgagagtgtcgtcagggtgttaccaaaagatttagctatccgcagaattgtaactacttctactattgcgttgatggctttctgctggtggagcaatgtcctattggctacgcattcgatccccaaactggagcttgtggtggacgtacgtaatcgctccagcgattgtactttaaagtgaaaataatcgcaccaaacttttaattaagcctcttgtcgtgtcaaattaaacaattatagctagaaaataaaaatgaatttagagtcttatcagagaacaagcaaaccgcacagcatttccacctataaagaaggcactgatctcggcgatgaggcagtgcagaaagcctattgaatgtggcaattgttgatagtcttggcctgcctgttacctggctacctctgggtgcaggtgcaggcggtttttctcgaggaatgcaaaggtgtgatcatcaataaggtgaccaatgagaatcaggagtgcagtgagtttgttcactgcgatggcgatgattcctactactgcaatggggattgtcgtgaggccgtggagtgttataccaatgtggttaccacaccggttaccacattaagacccataggaacctctacggaacgagcaccatccgcagagccagtcaatactacatctacgactttagctactaccacgccaacaacgattgctgtaaccacgactacaagccaagttccgagcaccgatgtctatgtcatctgcaagacgagtggaaggaacggggtctatccctatccggcaaatagcaattactattatcagtgtatttccggttatctgttgctccagcagtgcccacagaatttccatttcgatgtcgcccagggacagtgcgttgccacaaaacccaatcgttcatcgggcttacgtttgtaagattcatatcccagtttgtaataaagcaattatcaaaggcgtgttcatgggcaaattattttctgataacgaaaggtggtaagaaaaccccaaagtttgcatacgcaatcgatcagtttaccattcgagatcgagctgagaagatgtttggagtattgaagtttggatccatcctggtgtccctcctatttctggccaccagtcatgcggatgttttcgatgagtgtaacgatggtaacaacctatcctttgttacttcgccaaagagttgcgcacattatatcttctgcaacggcgatgagtcatacgatggtgaatgcgaggatggcgaatactttagtcaagatatggaaatgtgtgagcccatgggcgatatcgactgtcgcacgggatcggaggtgcaaagggaaaacactaccgacagctcctcaacggagattacctcggagtccagtacgatttccacagttgtaatcaccacattagccccatcggcagtggtcacattacgaccatcagtcaatcaaagtggagccagcagtacgacttccgtatcgcctgctatagagattattgtgaccaatgtgtgcccacaactggataatcagagtcgtatcgcattgctgccaaatcagaactcctgttcagattattacatttgctatcgcggtgtggcacttcccatgagttgtgccaccagtttgcactttaattcactcaccggaaaatgcgatcatcccgaaaacgttaggtgtttggtgggttaacctatggtacttcatatcttataatttttgtataataaattatttatttacaggccatgacttataatcccagggagcagtgcaagcgacatgtaatcgatgtttatccgcattccgacaactgcaattacttttaccagtgtcgctctggctatttgatggtccagcagtgtcctttcttctacggatgggactacgagaagcgatcctgtgtagcactaggtcaagccaaatgctacaacaagctgcaaatgcaaatgaaaatttattaaatacacataataatatttattaaaaaaaaaaaacgaaattttacatttagttaattaacgagctttgtggaaaaattgaaaatattgaacataaagtgttgtatgtttacatatggaataaacctaaatactggtaatcaataagacttctttgtaaaactatcaagcaacacggccgaccttgactctttcctaaatttatcaggtgatatcaagcaattctttcatatctctgcaaaatgaagaccttgaatcgaaacatttgccaaaataggccaaccttcgatttgaaacatagtaatttgaccgatatgatacgattttcctcacaaggacaacatatgtcatcgtgatatcacctaatcaatttcctagctaatctcggcttccttttcaccagactttaaaattaaaaatccagcattaaagttgtatctgcttgccatttcgagatacgatatcgattgattgcgaggaaagggagccatatttcttttttggcaaaacaaaatacaggagtcttatcaacttcttcctacaagcaattgaaaatgttaattttctgatactgagccacatatgcggctgtatcttggcgccgaatgtatcacatatatgccaagttcaccgggcattacgaaattagaatataactgcgctctactggagtctgacgatagaaaaaacgatgatgcttaatacgggttagtaagatggatattctcaaaactaatagtatgatgagaatttattggtttccagctttctatttgatcgtgaactgcttgctggccacagcgcaattaacctggagaccatcgaagcccacaaactcggtgaccatcaggcagagtggtagtagaatatgtgccaatcatttggttggtgagtttgtggagcatgcggaggactgccacatgttttacctgtgcgttgagaacggggatgcagtcctggcttcctgcccaccaacgatgctcttcaattcggagagcagactctgcgattcggcgacaaatgtaaagtgcagaaatgaaacggatcccatagagactcctccattcgatggcggaaatggtgatggagatccgaataacatggtcacggatgccgccacttattgctccacgttggtggagcaacaacaatccagcgacaggattgtatatgtcggcagctcgagtagttgcagaaagtactatatttgctactatggacaggcgatcttgcaggagtgcagctcgcaattgcactggaatgcaatgacgggtaaatgcgatattccggagagagcccagtgcaccgtaggtggtcaggaggatatgccaacgaatggaaattccggtttcccatccggtggcaccgccatttcgagtgatctcattcactgccccgcctacggacagcatctgtatccccatatgcagcgatgcgagttctttatctactgcgtcaaaggacacgccagcctgcagcaatgtcctttctattacttcttcgatattgccaccaaaagttgtcaatggtcgcgcacggctcagtgtgtgcgagatttaaatttggcaccactaataaaatagaagttttaatatatgtagcatacaattttttgaactttgggagataccaaatgcttttagagaggtttcttttaaaagtactactacttttaaaactcccgccgattacagatgaaaaccagaactaatgtgtgtacacactaactttcgacaacaatgttcgatgaatcggtttcgataaagttgactatatggccactgttcttttttgcggtagtcagacacggtcatacaaatcccacaatataatgttaaattaatcatatttatacttatcttcatttaagtaaagcgaaatattcgattgaccctcgaagtaaacaacccaggtgctcaaaaatgaagctaacaaagttagattaatcggtgtctacgaattatctggaaacacaagcatttcccgtcatctaactcaaactgcccaactcgaaaaatcaacaatatttttgcatcgggccaaaggtgcattaaaaccggagcctcaagtctcgggcggcaggtaatttattcaagttcaaaacagccacccggggattctcctagacatcggttgccacaagaaaagaagaagaattaggcgtaatcttctagaaaattggtgatttcagccgagaatgtttgagaattttcgaggtatttttcggaaacggcgtcgctgcgagtcggacacaacaccgccgccaccgccgccgcaacccgcccaggaggcggagataataaaccgatatccggaagatatagaagccgatacgcccgagtccaatgatggctttgacgcctcctggaccgaaggctcttttcacagcccacattcagataggtaattgaattctgcgcattcacgcttcctcttctctcttattgcagcttcaaagcaaaaacagataaaattaagcttaagcaacagcatcaaacacttcgacacccactcgaaaaaaaaagcttaagacattccaaaaaaagtagccagcaaagcggctaaaaaaaaataaataagataaaaccaaaacccaaaacgaaacagtaggcagctatccaaccatcttgggtgacaaacacttgaccggctttttggagggcgacaggtttaaatcaaatctggagcagccgcaggatatggaagttgatgcgccaacaacgcaggaaaccagtgacactcatcatcatcaccatagtacttatcaccagcagctgcatcagatctcgcccagcgattaccactcggaggcatccatgaattttgatcatttgcaagacctgagggccgatgccatggcctcctcatccccatccggatccggaggtggtggcaatggcgggaacagctcctacggactcgtcgacgatagtagagctctggacaggttgttattccatcataactaaaaccaaatcagacacgaaaccaaaacaataccaccgattatattcacacaacctcgtagcgaaacaaaagttatacgtttcttatctattatttcttcacactaccagctaccagcttcattcgaatcttttgttccataatagtaatggtgatagcttaaagtatctgccgcgaacgcccacacaactctcaaaagagctttgtgtgcgagcgccttttcttgtagacatattctggttataatttcgtagctctataagtggtcagtcgatctgtagcagagcgatctaacaatctaacgttgcttgtctcgtttcatgacttaaccactgaaccgcaatcacacttaaccgacatgtgacagaccatttaacgccagcgagaggtaaatcttgaatttataataaccactgagcgtgactaacctttgagtgactcgcagatttgtcaccatactggatagtttggatgcacgtgtggagaagctgcgcaaggatgcactcaacctgcaggagaagaaagactaccttctgatgtccatggatctgatcaagagcaacgaaatgatgcagaacatgagcgaaggtaagtgacagtgattcttaaaactaatttgaaccctcattgttcatagctttactaaaatgtgtattatttcgaagtcggaagtaatggtttctgatgacaaactaagtaaagggttattcatagttgactgtgagctaatgttgtaccaccttcttttgcagctgaacgagaggagatcattttgtacctacaacgggtgagctctcgcttggccaccgtggagctgcgtgtgcgcactgttcgggacaactctcaggaggattcccttagccagataaatgtattgattgacagcatgatcaagatgggtgatcccgtgatcggacgccaacgatgccagttttacttaaacgcctgctgcagcagctcaatggatccatccggacacatggacaccgtgcccgaggccgatgttgggccggtcgacaagaagttcgagagcgttttgcttggctgcactctggacgatcagaagaacatcaagaagcggctccaggccttaatggcttatctgaataagcaaactgttagccattaattaaattgttttttggtctattaactattcatagcattattatcaaaccaaacgaaatacatcaccaagctagatgaaacgaataataaagaaagcagcatatacaccaggccagcagtgtttgaatcaagtaaaatataattttaatatttatattaacaaactaaatgttataagctaggaaagcacatgtccttcgcattcaagacccgatcacttaggacccataatgcatcattggaggtgaagaaaatctgctgaatgttcttcgatgtgatatatatgatttcgttgccctcggctgtgatgttggctagtttggcacatcgtacgacagctccgaatttggggataacatagtacaatgttccgaaattgtcgatgatcatgctgcgactgctgcccagaagactgcccaaatgtgtgagtttaatgctattgttaattggtttgcttgctaattcgcttttgccttcaatttccagtctgtccaccgtactgtatagatcaccatcctggtcggagagtatgagttccccttgaattccgaagatgaaatccactggcttgatgggaaacgattgattcatattctcgtacttattgctctccaaggataggcggtgccacgtctgctccaggatgtcgtaggctagaatttctggtacctttccaaggatgaagtaaatatggcgctcgtgctcgcatcccggactcttgggtcccatttggacagtcagaaagtgggtgtcattagcacctatatggtgtccacaatcgattctcaatagctccgcgttgttacgcatcagatcgaagacaaacaaacggggtgagcacgtgctgccgggaaatccgatgtccatgacccacagtcgactcagtgcatccacctgggaccagtgtgcctgttgtaccagagagcaatcatcatgatcccccatggaatgaacatcgatgtggggaaagacgacagtgggcatgggaaaataggaaaccg

SEQ ID NO: 25181 - DNA, 3933 bp, DROSOPHILA
atgtccaaatatctgatacacctgtgcctggtgctgctctggagctctcggataaatgcagatcactttgacgaatgtgacgggatggacgatggggcatttgtacaaagttgggagagctgccaatcctacgtgtactgcgagggtgaggaatccctaaagggcgattgcgaggatggtgaatactttgattccgaggcgggaacctgtgatattgcggccaatgtgtcatgtttcctggacgaagtcgatgaaccctcggacccggaaccggaaacagacgaagaagaggaggaaatacccgcgacaccaagaccaaccgaaccaccgattgtggagaccccaaccgaagtggatatcataaatattgcgcccgttgtaaggcccaactgtccgatcagcgatgatcccggccaggttatattcatggccagcaataattcatgcaccaactattatctctgctatcacggccatgccatggaaatgcactgtgataatgagctgtactttaattccctcaccggacagtgcgattacccagataaagttcagtgtgccttcgaagatccgcgatcccacaagtgcctgccacacatgaccgagttctttccacatccggacaactgcaattacttctactactgcatcaagggctttctgaccctgcaacagtgccccttctactacggctgggacatagaacgccggagttgtaactcgatgttctgcacggacaacacgacctgcaatgccaacttcacctgtagcgacatacttccggtggataattcaacagcactacccataagcacaactcccaatgtggtaaccacagcctcgacaactgtttcaccttccgatattcgacgagagtgtcgtcagggtgttaccaaaagatttagctatccgcagaattgtaactacttctactattgcgttgatggctttctgctggtggagcaatgtcctattggctacgcattcgatccccaaactggagcttgtggtggactcttggcctgcctgttacctggctacctctgggtgcaggtgcaggcggtttttctcgaggaatgcaaaggtgtgatcatcaataaggtgaccaatgagaatcaggagtgcagtgagtttgttcactgcgatggcgatgattcctactactgcaatggggattgtcgtgaggccgtggagtgttataccaatgtggttaccacaccggttaccacattaagacccataggaacctctacggaacgagcaccatccgcagagccagtcaatactacatctacgactttagctactaccacgccaacaacgattgctgtaaccacgactacaagccaagttccgagcaccgatgtctatgtcatctgcaagacgagtggaaggaacggggtctatccctatccggcaaatagcaattactattatcagtgtatttccggttatctgttgctccagcagtgcccacagaatttccatttcgatgtcgcccagggacagtgcgttgccacaaaacccaatcgttcatcgggcttacgtggtaagaaaaccccaaagtttgcatacgcaatcgatcagtttaccattcgagatcgagctgagaagatgtttggagtattgaagtttggatccatcctggtgtccctcctatttctggccaccagtcatgcggatgttttcgatgagtgtaacgatggtaacaacctatcctttgttacttcgccaaagagttgcgcacattatatcttctgcaacggcgatgagtcatacgatggtgaatgcgaggatggcgaatactttagtcaagatatggaaatgtgtgagcccatgggcgatatcgactgtcgcacgggatcggaggtgcaaagggaaaacactaccgacagctcctcaacggagattacctcggagtccagtacgatttccacagttgtaatcaccacattagccccatcggcagtggtcacattacgaccatcagtcaatcaaagtggagccagcagtacgacttccgtatcgcctgctatagagattattgtgaccaatgtgtgcccacaactggataatcagagtcgtatcgcattgctgccaaatcagaactcctgttcagattattacatttgctatcgcggtgtggcacttcccatgagttgtgccaccagtttgcactttaattcactcaccggaaaatgcgatcatcccgaaaacgttaggtgtttggccatgacttataatcccagggagcagtgcaagcgacatgtaatcgatgtttatccgcattccgacaactgcaattacttttaccagtgtcgctctggctatttgatggtccagcagtgtcctttcttctacggatgggactacgagaagcgatcctgtgtagcactagctttctatttgatcgtgaactgcttgctggccacagcgcaattaacctggagaccatcgaagcccacaaactcggtgaccatcaggcagagtggtagtagaatatgtgccaatcatttggttggtgagtttgtggagcatgcggaggactgccacatgttttacctgtgcgttgagaacggggatgcagtcctggcttcctgcccaccaacgatgctcttcaattcggagagcagactctgcgattcggcgacaaatgtaaagtgcagaaatgaaacggatcccatagagactcctccattcgatggcggaaatggtgatggagatccgaataacatggtcacggatgccgccacttattgctccacgttggtggagcaacaacaatccagcgacaggattgtatatgtcggcagctcgagtagttgcagaaagtactatatttgctactatggacaggcgatcttgcaggagtgcagctcgcaattgcactggaatgcaatgacgggtaaatgcgatattccggagagagcccagtgcaccgtaggtggtcaggaggatatgccaacgaatggaaattccggtttcccatccggtggcaccgccatttcgagtgatctcattcactgccccgcctacggacagcatctgtatccccatatgcagcgatgcgagttctttatctactgcgtcaaaggacacgccagcctgcagcaatgtcctttctattacttcttcgatattgccaccaaaagttgtcaatggtcgcgcacggctcagtgtccgagaatgtttgagaattttcgaggtatttttcggaaacggcgtcgctgcgagtcggacacaacaccgccgccaccgccgccgcaacccgcccaggaggcggagataataaaccgatatccggaagatatagaagccgatacgcccgagtccaatgatggctttgacgcctcctggaccgaaggctcttttcacagcccacattcagatagaccatttaacgccagcgagagatttgtcaccatactggatagtttggatgcacgtgtggagaagctgcgcaaggatgcactcaacctgcaggagaagaaagactaccttctgatgtccatggatctgatcaagagcaacgaaatgatgcagaacatgagcgaagctgaacgagaggagatcattttgtacctacaacgggtgagctctcgcttggccaccgtggagctgcgtgtgcgcactgttcgggacaactctcaggaggattcccttagccagataaatgtattgattgacagcatgatcaagatgggtgatcccgtgatcggacgccaacgatgccagttttacttaaacgcctgctgcagcagctcaatggatccatccggacacatggacaccgtgcccgaggccgatgttgggccggtcgacaagaagttcgagagcgttttgcttggctgcactctggacgatcagaagaacatcaagaagcggctccaggccttaatggcttatctgaataagcaaactgttagccattaa

SEQ ID NO: 25182 - protein, 1310 aa, DROSOPHILA
MSKYLIHLCLVLLWSSRINADHFDECDGMDDGAFVQSWESCQSYVYCEGEESLKGDCEDGEYFDSEAGTCDIAANVSCFLDEVDEPSDPEPETDEEEEEIPATPRPTEPPIVETPTEVDIINIAPVVRPNCPISDDPGQVIFMASNNSCTNYYLCYHGHAMEMHCDNELYFNSLTGQCDYPDKVQCAFEDPRSHKCLPHMTEFFPHPDNCNYFYYCIKGFLTLQQCPFYYGWDIERRSCNSMFCTDNTTCNANFTCSDILPVDNSTALPISTTPNVVTTASTTVSPSDIRRECRQGVTKRFSYPQNCNYFYYCVDGFLLVEQCPIGYAFDPQTGACGGLLACLLPGYLWVQVQAVFLEECKGVIINKVTNENQECSEFVHCDGDDSYYCNGDCREAVECYTNVVTTPVTTLRPIGTSTERAPSAEPVNTTSTTLATTTPTTIAVTTTTSQVPSTDVYVICKTSGRNGVYPYPANSNYYYQCISGYLLLQQCPQNFHFDVAQGQCVATKPNRSSGLRGKKTPKFAYAIDQFTIRDRAEKMFGVLKFGSILVSLLFLATSHADVFDECNDGNNLSFVTSPKSCAHYIFCNGDESYDGECEDGEYFSQDMEMCEPMGDIDCRTGSEVQRENTTDSSSTEITSESSTISTVVITTLAPSAVVTLRPSVNQSGASSTTSVSPAIEIIVTNVCPQLDNQSRIALLPNQNSCSDYYICYRGVALPMSCATSLHFNSLTGKCDHPENVRCLAMTYNPREQCKRHVIDVYPHSDNCNYFYQCRSGYLMVQQCPFFYGWDYEKRSCVALAFYLIVNCLLATAQLTWRPSKPTNSVTIRQSGSRICANHLVGEFVEHAEDCHMFYLCVENGDAVLASCPPTMLFNSESRLCDSATNVKCRNETDPIETPPFDGGNGDGDPNNMVTDAATYCSTLVEQQQSSDRIVYVGSSSSCRKYYICYYGQAILQECSSQLHWNAMTGKCDIPERAQCTVGGQEDMPTNGNSGFPSGGTAISSDLIHCPAYGQHLYPHMQRCEFFIYCVKGHASLQQCPFYYFFDIATKSCQWSRTAQCPRMFENFRGIFRKRRRCESDTTPPPPPPQPAQEAEIINRYPEDIEADTPESNDGFDASWTEGSFHSPHSDRPFNASERFVTILDSLDARVEKLRKDALNLQEKKDYLLMSMDLIKSNEMMQNMSEAEREEIILYLQRVSSRLATVELRVRTVRDNSQEDSLSQINVLIDSMIKMGDPVIGRQRCQFYLNACCSSSMDPSGHMDTVPEADVGPVDKKFESVLLGCTLDDQKNIKKRLQALMAYLNKQTVSH

SEQ ID NO: 25183 - DNA, 3254 bp, DROSOPHILA
tcatagcacaccaatgcttggtttatctgcaaatgttaccgaaaatgcttgtgtcacttacgcttgcgaacttcgtagcagataaagtactagaaaaaatatattgggttatatgtgattttaaagtcttagaaagaaaccaacttttaaactgagtttcattttttcaagtgatattttagctaaattacttaagacctttaaagtatagtacacatccagcttgttctttatggccactgagtgagtcttatcagcttcaaatctctaagataagccattatttcatcactttcgcgaaacctaccttcttagcgttggaaacctcaatgggttgtccatttaaataagctccgtggccttgccaagctgaatacaactcatttgcagatggattgtacacaatccccagcaccagctctttgtttatggccaagcccacggaaatacagcaatgggggatctttcgaacgtagttgttggtgccatcaatgggatctatgatccaagtgggggcatccgtcaactcaggcggcgttttggcgttggccatagcttcttcgcctattattttggattccggaaaggtctttagcaaaccatctgttagagtggcttctatttgcttgtcgtacacggtgaccaagtcatagaacgctgacttgacttcgtaatcggttttcggtttctggaaaccctccaaaaagagcggaccgcacttcctgaccagttccagggatacctggtaatatacttcaagtttttcctcgccgattcggtaactcatggctcgtctatcgactgatcagagtagaaactaatacttaatttagaaacacagctgacattatggtaaagctttcttcgcaagctcctgaaagttctgcgatacttatatgtacttaggtcgttttattgtactggaatatctgcgcgattagaatagtttacaagtgataaatgtggatactgtctttgcatactgagcctttaactgtctttacttaaatgtgtactctgtaatctgaccggcctcttcgataagactaatcacattcttggccaactccggcgtggcggcgcacacgcaatccggtttcatcacatcgaatttggatccgctggtatggcacacagtgccgccagcttcggtcagaatgatggctccggcagcaatgtcccacggtttcagatcctccacatgataggcatcgcactggcccgtggccacgtagcacagggtcagggcggcacttccgaaacacctggttcccgtggcattcgaggccatcttgtacagtcgcttcacattcttgtccctcactccggcggcgtggatcagggagatctcgtaggcaatcactgcttgcttgatctggaaaggggtacattagttgtgagagtaattgtatatgcgcttaattttggagagctatttttgtttggtggtatacgaatgaatgatatcggtgcaccgaaaaaaatgttagcagattgtatttttccattccaaaaagttgttataacaattgtatgggaattttgttataaagcggttataataaattattttatcacatttatcaaatttctcaaacattcctatcgaaatgcaaatttaagtttagccaaccttttttttttttttttgctgtgcaccgataaacctgtttgcaggaataatgtcatgcacggttatttgtcaaatttcgtttatctggtttgtcgctatacatagtattgttgctcccgggttatataagcacactcttaccgtcgtcactttggatgtgtggatgggttcgccattcagataggctccgtgtcccttgtaggcggagaatagttcattcgccggtggattgtagataatgcccacgaccagctccttgttgatggccaggcccacggagatgcagcagtgcgggatgcggtgaatgaagtttgtggtgccgtcgatgggatctatgatccacgtgggtgcatcagtcagctccgcctggcgctgtgaaactgccgactcctcctcgccaatgatcagggattcgggaaaggcggccaccaatccctcggtcaaaatatcctcgatttgcttatcgtacacggtcaccaggtcgtagaagtccgccttgaccttgtattccgtctttgccttctgatagccctcctgcatcagaggcccgcacttgaggaccagtttcagggccacatcgtagtactccttgagcttggactcgctgaccgcggaactcattgctatttctgttggtttccgactgagcagcagaactatatagacgcgagtcagctgtggaatgttggcgacgccagaggaaagctttctgccgaagctttcattgatgcaatagaactttggacatttaggagagcgcgatagagttgcttacgaaccgttgttccaagtttatggatgtgatattactacactagtcagccaagaatcagaaaatactattattgttaacatttaaaaatccatgaatgcataggaaattctttttactatttaagataattttattattttaataaaattgagtataaattggtatagaatttaaagaaaaccatttttatcttcatagcctgtagtatattttctgatatacgaatttaatactacataactgcaataggatataggatatatcccaatctatcttctactattacctatcatacataggatatattttcataatacattgcgtattttaaagatgtaaaggtgtgtttccttgaagttgtatgatggttattagagactatcttgtgtgttataaattcacaattcgtgagtggatgaactgagctgatatgagcagttcatgtgcagaggaaaaagacaaaagagacatcgtttaaataagattctgttttatgttgatcattaaacttttatttgttgacaaaagctctttgcgtgtggcttacaaatctcactctcctcccacatgcttctcctgatcagccttccgaataagatgctctatctcagctctcagtgtctccgttccggcgcagattagatctggcttcatgatatcgaagggtccgccgtagggatgcgtgacaactccgccggcctcacggatgagcaaatagccagctgcacaatcccagggatacatgtcttcaatatgaaaggcatccaagttgcctgcggccaccatgcaaagggaatccactacagcggaatatgccaggagtctgaaaaggattcaaaactttaa

SEQ ID NO: 25184 - DNA, 855 bp, DROSOPHILA
atgagttccgcggtcagcgagtccaagctcaaggagtactacgatgtggccctgaaactggtcctcaagtgcgggcctctgatgcaggagggctatcagaaggcaaagacggaatacaaggtcaaggcggacttctacgacctggtgaccgtgtacgataagcaaatcgaggatattttgaccgagggattggtggccgcctttcccgaatccctgatcattggcgaggaggagtcggcagtttcacagcgccaggcggagctgactgatgcacccacgtggatcatagatcccatcgacggcaccacaaacttcattcaccgcatcccgcactgctgcatctccgtgggcctggccatcaacaaggagctggtcgtgggcattatctacaatccaccggcgaatgaactattctccgcctacaagggacacggagcctatctgaatggcgaacccatccacacatccaaagtgacgacgatcaagcaagcagtgattgcctacgagatctccctgatccacgccgccggagtgagggacaagaatgtgaagcgactgtacaagatggcctcgaatgccacgggaaccaggtgtttcggaagtgccgccctgaccctgtgctacgtggccacgggccagtgcgatgcctatcatgtggaggatctgaaaccgtgggacattgctgccggagccatcattctgaccgaagctggcggcactgtgtgccataccagcggatccaaattcgatgtgatgaaaccggattgcgtgtgcgccgccacgccggagttggccaagaatgtgattagtcttatcgaagaggccggtcagattacagagtacacatttaagtaa

SEQ ID NO: 25185 - protein, 284 aa, DROSOPHILA
MSSAVSESKLKEYYDVALKLVLKCGPLMQEGYQKAKTEYKVKADFYDLVTVYDKQIEDILTEGLVAAFPESLIIGEEESAVSQRQAELTDAPTWIIDPIDGTTNFIHRIPHCCISVGLAINKELVVGIIYNPPANELFSAYKGHGAYLNGEPIHTSKVTTIKQAVIAYEISLIHAAGVRDKNVKRLYKMASNATGTRCFGSAALTLCYVATGQCDAYHVEDLKPWDIAAGAIILTEAGGTVCHTSGSKFDVMKPDCVCAATPELAKNVISLIEEAGQITEYTFK

SEQ ID NO: 25186 - DNA, 2351 bp, DROSOPHILA
atcagtcagttactcaagcattcctcgccttacggagatcatgattcattgacgactcatttgcattatccgaatacagcagcagcccagccaaagctatgcaaagcttaccgcgtccggcaaaaagtgaaacccgctttcattaacgaaaatacccgatagagactctagtattcgtcttcgcaatgaatgggaactcaggtgtccgtagctatatagatacccgtacatagaagtcagacattcgctgtgtgggccgcaacgaccttaaaaggccaggcagcgccgagctcgagccacaaatgcacttgaaaaaatgaagtgagcacttgctagatctcttaaaatatatatacaaatatcgagatctaaccattagctgtgactacaatgtttgatcattgattgccttacaacaaattaaatatagaaaatatcttattaagagcaaaatcaaagctcagtactaagaataacaaaacattccatcgttaagtcgaaatatgctacaatcggagtttaaagatatttttcaaagcgcatttggttgagtgcacggctaatgggttttccattcgcgttggtggcttctacttggaatcggagctccaagagcagctccatcttcgcagacagtggggcgccctctttaaaccggttggcactgaattcccccgaaggaaagtcatcgttggcacaagaagttgtagacactttcggatggtgactaaatgctgccaagcggacataaattgttgcaacttcttgcatcaccaacgcaacaaactaattatttgaaaatcgtgaatgcaaatgctagttacacatttatagatcatagttatatcccatatatgatttcttcctggcaaattgtatacatatattccggcgatctcgccacttatatgacaataataatcaaacacaactctgtgtacactaagcagtttaggtttacccatcaacaatttacaaacaattcagcaaaactggtgcctcagtctaccgtgtctacggtaatttgcaataatttacactatgtgcatcatattgcaacgtgcaaccgatgaatgattcgttttgaatatggaaaaatcataggctgcatcctgtacttacacttcattcgcatgcgattcttgatggacttcttgtcatcctcgccgggcagatcgagcaggttgccaatggagacgctcttatagcgctggagaatcgttgactgctgcgtctgctgcacctcattgtcctcctggatctgctgcgcccgcagaatgtcagtcactggcacaatctgcaaaatagcaaatgagagcccacagaggggtgtcagagtcacgcagtgcataaatattcaagttcggttcgcaaaagtctggtgggggaaggaaaagtgcggggctatctagtccagaagctctgggagcgtacaattgagatacacaatccgacaatctaagtaacgtctgcaaattaattgcagcttttcgtgccgttgtcgatgtttattctcttgccatttttttttcttttcgctttaatacctattatttgagctgcaatagggcgttatgtttaggcaaagagcataatcttcgagctttaacacataaactaaacatttagaaaaactaattgttcatacgaaattgataaaagcatcaaagacacaacaccttgttgttgttttttacgtgttttttttttcgtttgtttatctattttgcgaggtatttggcagtcgacaccatggctagaaattggtgttttcttgttcataccgtaactgccattagttcggggcaagttctttctgtttagtgggtttcttcctattcggttccacccatcgctcaccgttgtttgtcttcgcttgagattcaatctgccttccatgtcttatcgctgtctctctctctatttctctctctctctctctccccttttagactgcacacccacaacaactatgcgctatctctttctccgtggacagtgaagcgggcggaaagcggaacacacaaacaccgatacagaaagcaattgcgataagaaattgatttcgacttgtaagaaatcgcgcaacgccacggaaaataaatgcaagcgtccaagataacggctaatcgaacagtgccgctccaaggtgccgctgccaatgcatttatcgcctttgccacgcccaaccggcgtggccgaccgatctgttgtttacggcaggataaacaaattcctcaggttatcggcgacatatgtacaaaaccattcgtaaagaaggggggagttattctaaaccccatataacatacatatacatatgtacatactaaaacatatatgtagatcag

SEQ ID NO: 25187 - DNA, 243 bp, DROSOPHILA
atgcactgcgtgactctgacacccctctgtgggctctcatttgctattttgcagattgtgccagtgactgacattctgcgggcgcagcagatccaggaggacaatgaggtgcagcagacgcagcagtcaacgattctccagcgctataagagcgtctccattggcaacctgctcgatctgcccggcgaggatgacaagaagtccatcaagaatcgcatgcgaatgaagtacacggtagactga

SEQ ID NO: 25188 - protein, 80 aa, DROSOPHILA
MHCVTLTPLCGLSFAILQIVPVTDILRAQQIQEDNEVQQTQQSTILQRYKSVSIGNLLDLPGEDDKKSIKNRMRMKYTVD

SEQ ID NO: 25189 - DNA, 4652 bp, DROSOPHILA
ttctccaactggatacacttcctcgaaaagcacccgaatattcgccgcataccgaaggatacatggaacatgtacctcaattttacggaacaatgtgatatacaaaattacgatgataccgaagcgtggcccagcctcttcgacgactttgtcgactacgagaaaagccgggcgctggtttcctcgggcatccacgacgatgacaacaacaacgacgatcccctacagagccacgtgaaggccgaggatccgggtcttgtgtcatagtagccagtctccagtctcttcagggccaagcaacattcaactcgccaatagaaattaaagaatgtacattttcatctatactgaccactcgctctctctagctgctgcttaagatcccctgtgaaagtagaaaactttaaacacccgtggccactgaaaacgaacgatgcggtgctggcgctgcttgaggacggactctccaactgccatcattagccagctcttattatggctggccaacattctggccggagcaacaacggacgcatttgtttatgtaattaaagacttatcgacaagaattttggaaaagctcaatcatcggaaaccacatgtgtatataactaattgacttgaaggcggagcagaaggtagaccgtataatatttagcaattaattgatgtattattttaaacaaaattgcaacattttatggcacttaactatttaaatgcatacaattacatacttaactgtaagtagtggatgtgaattaaataaaaccaactaaaagattaaactgcttaattggatttgttaattatggcatggcgtatttagtttgatataccagtaaattaacttaacataatagttgctttaaaatggggggatgtattcaaatcaaccgccaattgcatggcctatcgatattcatatctgcagattggaccgataggaatgcctccatgcaaccgtgagactagtacattaaattgctattttggttggcctgataaaattataaaaatcatcgcaaacgcagtcagctgggtatgattaagtgttgagtgcacctccgcgctcttgaacaaatccccaccaggtggaaatgatagccgtgtgcagggcattctttatccagtgattcacggcgttgacattgaaaaacaaacgcaatgccagcacagtgggcgtgagcaggcggaaggggtgtaatcgccaggaagggcaaggattcagtgcaaggacacggtcgataggagcagctggccagtgtccaacgaccacgatgccctgcgaaagttgcggtgtggaattcacggtgttccgtcgcaagcgtgcttgcttcgactgcaagtgagtaatggcctgttcatttggttttcacggatttcggggattcatcgatattttgtaaacctccattagacgctactactgtgccaactgcattgcatccaggcggtgcaaacgatgctctgtattcgctcagcgaccactgtcaaggacagatctattaaagctcaagcccaaggacctgattttctatctgcagtccaaacacatctccactgaaggctgtctaggtgagttactcatccgggaagtcccctggatggggaaacctctggcaaaaacacaacttaatacaacttttcccacagagaaagaggagcttgtaggactggttctcacccatgtggcccaggttgacaggagccgaggctcaaacgcctcctccaatagtccgggtcggggccaggccaatcccatcgacagccttaaacagtcgtgccaaaacttcttctccaacctaagcgataacataagtgattcgctagcctcgttcgattccaaagttaccacaaagccgccggagagcaggcagcccgaggtgcccacccacatcttcgagcagccgcgagtatctacgcgtgagatacccacttatgccagtgccgtaaacggcggaccgcaacacgtgcatgtccaacagcaagccacaaccaccaatggtggcagtcaaagcagcagcagtccctcgacttccacgcagtcatcgaataatcgcgatgccagtagcagcagccaggcccatgtggctcatcaggaagcgagaaatgaagagcaggaagacgcgcaaagcaagtccgactgcgagtgctcagacgaagagattatggccacgttcagtgagcgtgtttcgatttcactcaaaaccgataccagtggccggagggtcaatgctgcggcagagcccagtcctgttgatctggcgaacgtagataatggacctgcagggaacacagcacctagtccaggctgctccaagccggggtcaagcagctccaaggcagatgcctcctcgcagtcaagttttgaggagctgggcgccattggtggcatctcagacgagagcaaggccaacacggacaccaacagcagtcacctggatcagtggcaggtgctggaggtaaaccggatcgaagctgtagaagagacgccgaccacgagtgccgccgatgagatattagaggtgacattgcgcagcaggccggcggtcgagggtgatgatagtgagatgggcgaaagtactcaggcacttaacgtaaatcagcgcccggccaacccaagtccggcgttctatcccgccgtaccgcagcgcacaaagaaagtgactcgaagacgatccgatggttacttgaatcgccgctaccattccagcgatgacgagtcgcctgtggcgccaggtggacctggcctaagcctgggactttccacgctgagtgaacacccagagcacggcttgcatccgcactcccatcgccagagctgccagcgctgcggtaagaataagacaaacattcgtcgacatgttgagaaaatgcgacgccatctggagaactcgcaaatgtccgaggaggacatcaaacgggagctccaggagtttctcacgtacctggagcagcgaaccaagtcggtggatgcctccgatgcggacagccacgcggtgtcgccactcagcgtggatgctatcagtgtggctgctggtggaagatcaccggacatgcccatcacgccaacaattgagttctcgccaacgcaggacgaagatatccgctgggacgatgacgagggcatccatgtatacgccgctccatcggacttcgaaccgacagccggcattgactcacgatttgtcaatttggaagactttgaggatttgtaaatgctctattctctagaatgttcatgatcgattaatgcctctctattgatttatagaaaagacttggagggtttgacagtgaagcagttgaaggaggtgctgatgctgcaccgcgtcgactacaaaggatgttgcgagaagcaggagcttctcgaccgcgtcagcagactgtggaaaaccatgcgcgagtgtccaggtgagctttggactttgcactacaatttcaccctcataacgattcaaccatttacgcagctgttgaaaaactcgccactgatgagctgtgcaagatctgcatggatgcgccgattgagtgcgtttttctagagtgcggacacatggccacctgcacgagctgtggaaaagtgttgaacgagtgcccaatttgccgacaatatattgtacgagttgtaagattttttagagcgtaatgatacggctaatcttacggtaactggacatagtgtaatgatggaagccgatagccgccacaagctacatacagatacagatccagcccagctgtacaagttgtacagcagatcctgatgatgcgactacaacgtatatgtttccttaaatgacgcgagtgcaacaataatattaatttgattatttggttcttctctgtagtatgttgccagtatatatatatgcctatatatagtgtaaaacctgatatcgcttttaaagtgtattcatctatttcaaatgtgaaatacttttgctatttattttgtttgttcttgttgtttgtataaaaacgagaggttatctagatcaactaacattcctataaaccgcaaaaaaaaacattaaatctgttattaacagttgtgtgaaaaactcgtctagatgcgcatttaaacaataaatattttccaatatctagcgctctattagcccagccattcgaaatggggattttcctccaaacaaaggttgtctggatcataaattctaatcgaagtcgattaagattggtcactagttttgtgacgaatcgcctgtaactggggattttcccataccttgagcttatggtttttcgaaatctttgaaatactctttttgcccagaaccactatgaaggaacctagatcagatcaatcccgaagatactcccatgccaccatgccaaactagagcagttcaattacaacagtctttaatcacgttaaatagtaatctaggtgtggtgacaagagctgggaaacagcgcaatgactagaaggggaagagagacgagaggcgaaccgattggccagttcagattcgatggatgcgcaggtcgagcggtgactccacgtccatcttaacgaagaagtcctcgctgtggagatagctatgctgtctatcgcctagccaatagctgggcgagaattccgcatcctgtttgggttttagcgagtaatcgctgggctcattgtt

SEQ ID NO: 25190 - DNA, 2383 bp, DROSOPHILA
cctgataaaattataaaaatcatcgcaaacgcagtcagctgggtatgattaagtgttgagtgcacctccgcgctcttgaacaaatccccaccaggtggaaatgatagccgtgtgcagggcattctttatccagtgattcacggcgttgacattgaaaaacaaacgcaatgccagcacagtgggcgtgagcaggcggaaggggtgtaatcgccaggaagggcaaggattcagtgcaaggacacggtcgataggagcagctggccagtgtccaacgaccacgatgccctgcgaaagttgcggtgtggaattcacggtgttccgtcgcaagcgtgcttgcttcgactgcaaacgctactactgtgccaactgcattgcatccaggcggtgcaaacgatgctctgtattcgctcagcgaccactgtcaaggacagatctattaaagctcaagcccaaggacctgattttctatctgcagtccaaacacatctccactgaaggctgtctagagaaagaggagcttgtaggactggttctcacccatgtggcccaggttgacaggagccgaggctcaaacgcctcctccaatagtccgggtcggggccaggccaatcccatcgacagccttaaacagtcgtgccaaaacttcttctccaacctaagcgataacataagtgattcgctagcctcgttcgattccaaagttaccacaaagccgccggagagcaggcagcccgaggtgcccacccacatcttcgagcagccgcgagtatctacgcgtgagatacccacttatgccagtgccgtaaacggcggaccgcaacacgtgcatgtccaacagcaagccacaaccaccaatggtggcagtcaaagcagcagcagtccctcgacttccacgcagtcatcgaataatcgcgatgccagtagcagcagccaggcccatgtggctcatcaggaagcgagaaatgaagagcaggaagacgcgcaaagcaagtccgactgcgagtgctcagacgaagagattatggccacgttcagtgagcgtgtttcgatttcactcaaaaccgataccagtggccggagggtcaatgctgcggcagagcccagtcctgttgatctggcgaacgtagataatggacctgcagggaacacagcacctagtccaggctgctccaagccggggtcaagcagctccaaggcagatgcctcctcgcagtcaagttttgaggagctgggcgccattggtggcatctcagacgagagcaaggccaacacggacaccaacagcagtcacctggatcagtggcaggtgctggaggtaaaccggatcgaagctgtagaagagacgccgaccacgagtgccgccgatgagatattagaggtgacattgcgcagcaggccggcggtcgagggtgatgatagtgagatgggcgaaagtactcaggcacttaacgtaaatcagcgcccggccaacccaagtccggcgttctatcccgccgtaccgcagcgcacaaagaaagtgactcgaagacgatccgatggttacttgaatcgccgctaccattccagcgatgacgagtcgcctgtggcgccaggtggacctggcctaagcctgggactttccacgctgagtgaacacccagagcacggcttgcatccgcactcccatcgccagagctgccagcgctgcggtaagaataagacaaacattcgtcgacatgttgagaaaatgcgacgccatctggagaactcgcaaatgtccgaggaggacatcaaacgggagctccaggagtttctcacgtacctggagcagcgaaccaagtcggtggatgcctccgatgcggacagccacgcggtgtcgccactcagcgtggatgctatcagtgtggctgctggtggaagatcaccggacatgcccatcacgccaacaattgagttctcgccaacgcaggacgaagatatccgctgggacgatgacgagggcatccatgtatacgccgctccatcggacttcgaaccgacagccggcattgactcacgatttgtcaatttggaagactttgaggatttaaaagacttggagggtttgacagtgaagcagttgaaggaggtgctgatgctgcaccgcgtcgactacaaaggatgttgcgagaagcaggagcttctcgaccgcgtcagcagactgtggaaaaccatgcgcgagtgtccagctgttgaaaaactcgccactgatgagctgtgcaagatctgcatggatgcgccgattgagtgcgtttttctagagtgcggacacatggccacctgcacgagctgtggaaaagtgttgaacgagtgcccaatttgccgacaatatattgtacgagttgtaagattttttagagcgtaa

SEQ ID NO: 25191 - protein, 700 aa, DROSOPHILA
MPCESCGVEFTVFRRKRACFDCKRYYCANCIASRRCKRCSVFAQRPLSRTDLLKLKPKDLIFYLQSKHISTEGCLEKEELVGLVLTHVAQVDRSRGSNASSNSPGRGQANPIDSLKQSCQNFFSNLSDNISDSLASFDSKVTTKPPESRQPEVPTHIFEQPRVSTREIPTYASAVNGGPQHVHVQQQATTTNGGSQSSSSPSTSTQSSNNRDASSSSQAHVAHQEARNEEQEDAQSKSDCECSDEEIMATFSERVSISLKTDTSGRRVNAAAEPSPVDLANVDNGPAGNTAPSPGCSKPGSSSSKADASSQSSFEELGAIGGISDESKANTDTNSSHLDQWQVLEVNRIEAVEETPTTSAADEILEVTLRSRPAVEGDDSEMGESTQALNVNQRPANPSPAFYPAVPQRTKKVTRRRSDGYLNRRYHSSDDESPVAPGGPGLSLGLSTLSEHPEHGLHPHSHRQSCQRCGKNKTNIRRHVEKMRRHLENSQMSEEDIKRELQEFLTYLEQRTKSVDASDADSHAVSPLSVDAISVAAGGRSPDMPITPTIEFSPTQDEDIRWDDDEGIHVYAAPSDFEPTAGIDSRFVNLEDFEDLKDLEGLTVKQLKEVLMLHRVDYKGCCEKQELLDRVSRLWKTMRECPAVEKLATDELCKICMDAPIECVFLECGHMATCTSCGKVLNECPICRQYIVRVVRFFRA

SEQ ID NO: 25192 - DNA, 4321 bp, DROSOPHILA
agattgaggttatgtactagggccagcgataataacctaaacggaacctggtgaatgcaacctatctttggggttttccctatcccattccccattgttgtgtctctgccaacggtcttgcgaccagcaggtagcaacaataacacgcttctttgttgacgtcacagaagaagcgagttcaatggacgtggggcatgtgtatttggcagggggtatttaggtagctagcaagctctatttaccattgtttgcgattttgtccgaggggttgagaccatcgatgggcgttggatccgccgccgctgctcctgctgaaggcgtggtggctggcgaacccggcgctggcgatgcggaattggaggatgatgtgggcggctgtgctgagggtgctgctgcccccgccccctgtgcagttggaggcggtggagctgctcccgctgtggatcccccgctgccgacggaatcgggtgtggtggctggcgtggctgaaccggaggcgggacccggatccgccgtctcctcggccgcagccgctgcaaccactactgccgccgcctcctcagctacattcacaacgctgttgtaactgaaactgggcacaaattctaccgcgttcacgttcagcgttgagaactttgtgctgatctccgtgttttcctgggcggccatcgttgcagtgcgtccgtaatcctccgcagtggtttcctccgatgaaaatctctctctcgcttttttcacgcgacgacacactttcgccctccttctacaaactgcttcagctgcttcttcttgctgctcccgcactcacacagaacacacgcggtcgttcggaattcttgggattgcctatggtaatggaaattgggaatggcaaaagcaatgccaccaacacacgcacgccttgatggttgttggccgggggggtggcttgtggggggtttaggccagactttcggctcaatgtggtctacacttttgttgtgactcggtgttgtgtttgttgtttgtgctttgctagcctggccaactcgggttgaactcgaattccctttaatttgatcgactatcgcctgtttggggcagtggtgaccacctggtgatctgcaggtatgattcgactacctgaacactaaatgcagtgctcggaactagcaatcttctattattttacacgttttaagccacgcatcaagtcagggttgccacttgtatgcggtgttatcggtgcatcgatatgtgctggctgtcacagtggcctataattgatttggggcaaagtattaagatatttttaaatttttttagtaagatttttaatacttttaaaattattcaacataaataattatattgcttttgtactttgttctgattaatataattttttaaggctaaatataacgtagtccacatgtacatatataaatacaaactgtatttgttttatgtgtgactagacattaataattttttattcactttcagtgagtttttataattattaatttagttattttgtataatagaagtgtaatgcgagttttgtaaatattgataagtgtgtagtgagccttggggtttcaatacatttctaagctcatcatcaatggtatcgaattacaatcgatgttgttccagctctaacgtcgtgccagacgccattttaacagtagtgaaaaaatcgtctggagtttggctcgttttcagcattcgcattagcattttagcggtaaaacaaatatccaaatagacaatgagcaacggtggtggtgccgggggattgggcgcagcgcgtccacctccacggatcgatggaatggtctcgcttaaggcaagtatctgctaagtaaaatgcgactaaatcgcccacaaaatggcggccggctggcaacgttgtgtggttaggtaacctctccaaaagcatgtaaattaatccgcgtgtaattatgcctacaggtcgacaatctcacatatcgcaccacgccggaggatctgcgtcgggtcttcgagcggtgcggcgaggtgggggacatctacatacccagggatcgctacacacgtgagagccgcggattcgcatttgttcggtaagcattcacttctcttccgggaaaattgtgaaagtcttaggtcttttttgttttgttactttcacttgccggcggtggattttaattatcatgggacctaaaatgtatccatacatactaggagtaaaatatatgtatttcccgaaagtatactgcgaaaatcatgctatacaatcactcgtcatatccgctttcactatctactttataatgtttcattgaaaactagcacattgaggaaaaatgttatgtattccctgaattaatcagggtatgcaagcaaattacaaaagtctcagagtaatcatttaaatatcatttgaatatagctgctataataagtacgccccttgtctaaactcaaatattcctctcatttcattagaactatttgcattatttgctatcatcgattgtgtatcagttgctaatctgtacactttcagtagcaaaatggtgccagaacaaatgtgttcacttgcaaccgttgcctactcaacatttactagccaacgtacagagaatactacatctaaataataagttctaaagttatagtttcataacatatggcttcaatgatacattaagttgatacaaggtcacttattctatttatttgttgtatctacctgcattatttgccccttttgaatgtgtaacagctttcagtctgtacatcttctttagcaaaaggatgctagattgaatgtgtacacttgcaacagttgcctaccaaacccctgctagccaacttaccgtaagccctacaattaaatatagacttaaatataaataaacgtatgtgcaaagtacacacgaatctagttgatcatgtccttaattttttagcttctatgacaaacgtgatgccgaggacgcactggaggccatggatggtcgcatgctagacggcagggagctccgcgtacagatggcccgctacggacgcccctcttcgcccactcgcagctccagtggtcgtcgtggcggaggaggaggcggtggttccggcgggcgtcgtcggtcacgttctcgctccccaatgcgccgtcgttcgcgcagtccgcgtcgccgatcatactcccgttcccgctcgcctggtagccactcgccggaacgccgatccaaattttcacgcagtccagtacgcggcgacagccgcaatggaatcggaagcggatctggaggactggccccagccgcgtctcgtagtcgcagtcgctcctagatatcgacgtcacgttccatttagtgggagtgcgaggtgagttcatatcgtgtaacgcttcagaaaaagctttatataaggttaaacataccttacgttaaatagggattattttaaaactagttgttctttgctttcagatatgactcgctgactagggccaatgctgtatcctgttccggatctatggctccatctgtgtcatgctgtacccgaacagcaggtatagaaaccattatacaatcttacacttaacacaactatttatagcgaactattttaagtttcggcagagtaaataagtagagatcaggcatgattatgttccgagtgagatccccgcaacctgggcgatccctcgatgtcggttcttgcacataggctttcatatactagagcgtagtagaaatccttgaacgtaatcagaaacagaacaaaataaactcaaattaacacggcttcaattcaatacctaaatatcaaatgacagacaggacaggaggagaatgagaggtggatgagtgataggaatactctaggattctgtttgtttcgttgcgattcgattcgattgcgtttgtgttgctcgtttccgttctttgtaccttttaacgacaaacttattaacaagcttctcccacacgtttattatatatatgcaggcgaatggtgtgtggcagttgttgcggttcagataagattgtggttaaatcgctcgcgattaaggatcagcagcagcgcatcatctaagctacaactccttcctcacgtaggcggacaccgcgtggctcctgattgttgctactgctgctgctgctgcagatgctgatgctgatgctgctgctgtcgcatgatgctgttgctggtgccgctgatgctgcagttgcagttgccgtagccgtagcagcttcctgtttcctgttagacgctggcgctgccaaagctgctccagattcactcatagtttcccgtttcccgtcacttcttctctcgcctcgtc

SEQ ID NO: 25193 - DNA, 831 bp, DROSOPHILA
ttgtttgtgctttgctagcctggccaactcgggttgaactcgaattccctttaatttgatcgactatcgcctgtttggggcagtggtgaccacctggtgatctgcagttacaatcgatgttgttccagctctaacgtcgtgccagacgccattttaacagtagtgaaaaaatcgtctggagtttggctcgttttcagcattcgcattagcattttagcggtaaaacaaatatccaaatagacaatgagcaacggtggtggtgccgggggattgggcgcagcgcgtccacctccacggatcgatggaatggtctcgcttaaggtcgacaatctcacatatcgcaccacgccggaggatctgcgtcgggtcttcgagcggtgcggcgaggtgggggacatctacatacccagggatcgctacacacgtgagagccgcggattcgcatttgttcgcttctatgacaaacgtgatgccgaggacgcactggaggccatggatggtcgcatgctagacggcagggagctccgcgtacagatggcccgctacggacgcccctcttcgcccactcgcagctccagtggtcgtcgtggcggaggaggaggcggtggttccggcgggcgtcgtcggtcacgttctcgctccccaatgcgccgtcgttcgcgcagtccgcgtcgccgatcatactcccgttcccgctcgcctggtagccactcgccggaacgccgatccaaattttcacgcagtccagtacgcggcgacagccgcaatggaatcggaagcggatctggaggactggccccagccgcgtctcgtagtcgcagtcgctcctag

SEQ ID NO: 25194 - protein, 112 aa, DROSOPHILA
MDGRMLDGRELRVQMARYGRPSSPTRSSSGRRGGGGGGGSGGRRRSRSRSPMRRRSRSPRRRSYSRSRSPGSHSPERRSKFSRSPVRGDSRNGIGSGSGGLAPAASRSRSRS

SEQ ID NO: 25195 - DNA, 2683 bp, DROSOPHILA
taatataataatataataatataataatataataatataataatataataatataataatataataatataataatataataatataataatataataatataataatataataatataataatataataatataataatataataatataataatataataatataataatataataatataataatataataatataataatataataatataataatataataatataataatataataatataataatataataatataataatataatagtataataatattgtattattatattatttaataataatctttttttaaactaaaactattttaagtgtacctaaggtgtgttcctaacacaagagaaaacagaaagaaaatcggactgtttgaaatttgtagaaaaaaatacgtatcccacaccattaaacaatattaataaactttaataataaaaagagaactaaatacttcagaaaataaagtttttgtttttgtccgtaaaaatatagaaactctaaaataataagaggtaaacaagtttaaattttatggactgtctggatagcgttttagttacctgattttaggtacataaagatcgaaatgaaagttatcctgttgttttttaagatggtacccgttatttaaaaaagcaaacagaacagaaaaaagtcaagagttcctctataagaaactgacacttacgattcgaatatttttatatttttaccaccaatactattctacttgattatttgccggtattactttaaaatatttaattcgaattaggattgccccttacataaagatctggaacagtgactttggcataggagcttccctcgaagacaagtgacacaactggcgtaatgggcttaagctgattaagtagaaagctgcgtatatgtgattcgtccagcgagtagtccaagttggtgatctgcaaagtaacagcatcgctcatctccgtaatcttagcaaaagtatgaccttctttatctccaccgtcttctccggttgacctttggatggtcaccgcggttgtcgtaggcctggagcaaggcaacaatacattgggaggaatcattttcattttgatgttgtgagaggtgatgccggccatggggcaagtggtgctttcaacgaatgaattgtccacgattggagctaccgatgccaatgttgtatgttgctgcgcacagtggcttgcggtctgataaagcggaacaatcgtttgataagacgctgcaccttgttggtcttggatgtgcgcatggctgctgatcagcggagtactggctatagggaaaccagttgttgaagcagagtaggaacgattgttatagtacggaatatatcggttgcggctgttaatagtgaagtttgccggggtacgaacatattggtacagattaaggtggctgggaaaagataagggttcagaagcattttgcacttgaccgtcgccgacatataggctgtggacctgtgacccagttttattaaggcgtagtctttctgcggttcctgcttccaaagagttgttaaagttcgagtatagtgcggtggtcggcgataatgtcgatagctgttgataaggcacgggatcggaatgttccattacatatatgttttcgacttttccgtttctatcaaacggccagcatctattaggtaaaaacaaaagaaataaatatatataaatcttaatatgaaatatatggttttaatggcttaattaaccaagtagaactaaaaatcgttctaacatccaaagatgtttataatgaaggcgcgagacactaaaatatcaaaaattaacatttcccaaataccttattgctcagaatatgcttgccagtttgcaacaaaacgtctctaaatggttggctattcctatgatttttgataatgtccgccgtcttctgaattcccagaatacctaaaaaatatttttaggctatccaatcagtcttaaatagactgtccgattgggagcaatagctagttccaggtgattttaatatatctggcactgcgtggtcaccaaaagaaaaagcaccacctaagaaggtgacaattgactaaggaaaagttaaatcagaaaagtcaaccaaacgacttcattgttttcgcaagataaactttctgaggctaccaaacgaattcattattttcgcttagtaaactttctgacgctaaaaattttatatctggctttaattggtcctaaaaatgggacaacataatggtggatgctataaatattttgtaaaccgcaattaacttattttttaactcttgtgctccaaagtacaattggtctaactctaataaatcgtcatggctttataaaatatgtacacacccatgaaatataaagtccagattttatacaaaatttaaaaataccgattctcagtttttctttcccaatatttacgtgctcggttaggttatagcgaaatttttattgacccgaaacagttttataatttcgtaatactaagcgcataacaaaatttaacggtgacatcggatcaggcaatagacgatctatttgcgcagttttttcaaagaacatattctataaatattatcaaaatggaatctaatattttgtcgcactctaacgtctattcgccaggtcccgaaaattaacactccaatct

SEQ ID NO: 25196 - DNA, 897 bp, DROSOPHILA
aatagatgctggccgtttgatagaaacggaaaagtcgaaaacatatatgtaatggaacattccgatcccgtgccttatcaacagctatcgacattatcgccgaccaccgcactatactcgaactttaacaactctttggaagcaggaaccgcagaaagactacgccttaataaaactgggtcacaggtccacagcctatatgtcggcgacggtcaagtgcaaaatgcttctgaacccttatcttttcccagccaccttaatctgtaccaatatgttcgtaccccggcaaacttcactattaacagccgcaaccgatatattccgtactataacaatcgttcctactctgcttcaacaactggtttccctatagccagtactccgctgatcagcagccatgcgcacatccaagaccaacaaggtgcagcgtcttatcaaacgattgttccgctttatcagaccgcaagccactgtgcgcagcaacatacaacattggcatcggtagctccaatcgtggacaattcattcgttgaaagcaccacttgccccatggccggcatcacctctcacaacatcaaaatgaaaatgattcctcccaatgtattgttgccttgctccaggcctacgacaaccgcggtgaccatccaaaggtcaaccggagaagacggtggagataaagaaggtcatacttttgctaagattacggagatgagcgatgctgttactttgcagatcaccaacttggactactcgctggacgaatcacatatacgcagctttctacttaatcagcttaagcccattacgccagttgtgtcacttgtcttcgagggaagctcctatgccaaagtcactgttccagatctttatgtaaggggcaatcctaattcgaattaa

SEQ ID NO: 25197 - protein, 281 aa, DROSOPHILA
MEHSDPVPYQQLSTLSPTTALYSNFNNSLEAGTAERLRLNKTGSQVHSLYVGDGQVQNASEPLSFPSHLNLYQYVRTPANFTINSRNRYIPYYNNRSYSASTTGFPIASTPLISSHAHIQDQQGAASYQTIVPLYQTASHCAQQHTTLASVAPIVDNSFVESTTCPMAGITSHNIKMKMIPPNVLLPCSRPTTTAVTIQRSTGEDGGDKEGHTFAKITEMSDAVTLQITNLDYSLDESHIRSFLLNQLKPITPVVSLVFEGSSYAKVTVPDLYVRGNPNSN

SEQ ID NO: 25198 - DNA, 2992 bp, DROSOPHILA
tcagcgaactttccagggtgggagatgagcgatgattcaaatgggggccaccttatgaggcactcgcgatgggatgagatcttgggcaataatttaatgcaccgtttcccgccactcttggcacatctcacatctcattcggtgacatgtgacttttggcgacttgtgcaattaagagcagtaacaacaatggcaaatgtgtcgcagtcgcagccccagttacagatattgcagccccgttccattgaaactcactcttcgtgccaaaactcaactcaactcgcctcgactcgactgaactgagctgagctgactaagaggattatgtggcactccgttgaatctctgtgctggcctgtaatccgatccactccatctaactcacaccgatttgaatgttttgttgtgcttggcaagatatctgggtgggtggctcgaatacttcgcggaagcccctttcatttgggccaaaccgagccaaacaccagcaaaccgatccgagccaacgccatgcgaagtaatttaaaacaaaaagcttaaaacgagtttgtcgaattccaaaagccaaataattacacgaaacgcatacgagttgcaacaaccacgaagctaagcctttggggctttggaaacttgaaagttgcattcgagtggcccaaaagaacccgttgagtactcacaaaaccatttggcagtatcgggaacaaagcaatatttcaaagaaacgttacacccaatgaagccattttgtatggaatcgaagaatattaacatttgacagaaggaatggcgtttattacagaatgaggttgaggtaaattatttcaaatttatataagtttttaaaatccatatatcgatttgccatgtgacatttcaaactgtagcaattaccttttaattatgctcggaatgcaaagttaatggtattattccacttgatgcggcatataaagccatgaaaaatctcaatcccaatcagtcgtaattaagacacgtgctattatggctatagaaccgatttctgcagttccttctttattatccgactaccttaggactccgtcttgcccaccgaacttacagtgggaccctactgttaagatttgcctcccaaacttggattataatcaatatgtgcctaagggacttctgaacaacccgagcttacctgggtcgccgtggaactcgcctgtggcaacacctggaagaaaacctggaggaagttctggtggtggcactaaggaaactcttgaaagaaagcctgtgcaacgtcctgttgcgaaacctagtgttagttctggcggaggctctgggggaagtactgaagaaaaaccaggaggaagtgctggcgggggctctggtggaagtcctaaggataagcctgtagaaagttctggagcaagtcctggagaaaaaccagcaggtagtccggagagcaaaccagaaggtagttctggtggagctgctgaagttggagctgctggagaaaagcctgttgatattccacaacaaaaaccagaagatagttctggcggaggctctgggggaagtcctcagaataagcctgtagaaagttctaaaggaaatccagaagtaaaaccggcaggaatccctgagaataagcctgtagaaagttctaaaggaaatccagaagtaaaaccggcaggaatccctgaaagcaaaccaggaggtagttctgtcggagctgctgcagaaagtgctgataaaaaaccaatagaaagtcctgataaaaaaccaatagaaagtcctgataaaaaaccaatagaaattccaaaaggaaaacctggaggtgatagcgatggctcgacaggacgtcccgaagagaaaccgattgtaagtcctggggaaaaaccaacaggtagttctggcgggaatgctaagggaaatgtaggagaaaaacctgcaggctccgctggaggaaccaccaacacaaatatcaacactattaaaatacaacacaaacgctaactttagaaaatgactttaaagtgtaacttaaatgaatgaaaaacattaactttaaaaaatgactttaaagtgtaacttaaatgaatgaaaaatattaaaacattgttgatgtaatgcttttaaaatttgtttagaaaaaaatcttgtttaaaatcattttgaataaagactttataatggtactatatatgggtgtattaatcagtaacatattacgtagtctatgaatgtaggtcagaggttcaagcaaataaacaatcgcgtatcaacaatttccaagttatatattttaatacgaagaatccttatctctatgtgtaattgtactataaacgagtattttcaataattttcagtacggtttcaaatataacaaaaatgaaattgatcaagctatattaataattattggttaagcttaaggtctaattgttgttctaattccgcagtacgttgccttgaaagtaatcggcattaaatttgaccacaaacagctgcgtaaataaaccggagccttataagatctctgtggacatacttatcaaccttaagaaatgttcgtaacagtgctcatgggaaaatctaattgtttgtttcgagatacacgtccgcagttttatcgcactgttgttatagtgtttcgccataattactccagactacgaaaaagtcaaaatgcccatttgtctctttttcgcatcgtgtttttcctttccactttttgtgaagcaaatcttccgcagtgtagagactcttatcaggaaatatataacaactttgaacaacacatctctccgcacttgtatcagcaaagaaataatttttccgtaattagttgctaacgatcgaaacatttctgtggcttcggttctagggaaaatttacactccagcgcaaaaaaagtatctttgtagctttttatctactaacacagaaaacagcagaaaagcgcaaaaaccaagcaaaacaaaaacaagaaaagaaaccgcgctcaaaaaaa

SEQ ID NO: 25199 - DNA, 992 bp, DROSOPHILA
ctattatggctatagaaccgatttctgcagttccttctttattatccgactaccttaggactccgtcttgcccaccgaacttacagtgggaccctactgttaagatttgcctcccaaacttggattataatcaatatgtgcctaagggacttctgaacaacccgagcttacctgggtcgccgtggaactcgcctgtggcaacacctggaagaaaacctggaggaagttctggtggtggcactaaggaaactcttgaaagaaagcctgtgcaacgtcctgttgcgaaacctagtgttagttctggcggaggctctgggggaagtactgaagaaaaaccaggaggaagtgctggcgggggctctggtggaagtcctaaggataagcctgtagaaagttctggagcaagtcctggagaaaaaccagcaggtagtccggagagcaaaccagaaggtagttctggtggagctgctgaagttggagctgctggagaaaagcctgttgatattccacaacaaaaaccagaagatagttctggcggaggctctgggggaagtcctcagaataagcctgtagaaagttctaaaggaaatccagaagtaaaaccggcaggaatccctgagaataagcctgtagaaagttctaaaggaaatccagaagtaaaaccggcaggaatccctgaaagcaaaccaggaggtagttctgtcggagctgctgcagaaagtgctgataaaaaaccaatagaaagtcctgataaaaaaccaatagaaagtcctgataaaaaaccaatagaaattccaaaaggaaaacctggaggtgatagcgatggctcgacaggacgtcccgaagagaaaccgattgtaagtcctggggaaaaaccaacaggtagttctggcgggaatgctaagggaaatgtaggagaaaaacctgcaggctccgctggaggaaccaccaacacaaatatcaacactattaaaatacaacacaaacgctaa

SEQ ID NO: 25200 - protein, 328 aa, DROSOPHILA
MAIEPISAVPSLLSDYLRTPSCPPNLQWDPTVKICLPNLDYNQYVPKGLLNNPSLPGSPWNSPVATPGRKPGGSSGGGTKETLERKPVQRPVAKPSVSSGGGSGGSTEEKPGGSAGGGSGGSPKDKPVESSGASPGEKPAGSPESKPEGSSGGAAEVGAAGEKPVDIPQQKPEDSSGGGSGGSPQNKPVESSKGNPEVKPAGIPENKPVESSKGNPEVKPAGIPESKPGGSSVGAAAESADKKPIESPDKKPIESPDKKPIEIPKGKPGGDSDGSTGRPEEKPIVSPGEKPTGSSGGNAKGNVGEKPAGSAGGTTNTNINTIKIQHKR

SEQ ID NO: 25201 - DNA, 2217 bp, DROSOPHILA
ttcaagcctgccctctttttccgagcgatttaaaacattgtagacggttttacgggatacagaaaacatttatactaattctggaatttattttcccaactggtggttatagtttattaattgggtaacttcaaaagttaatctctttccaggcattttatcaaatttaataatttactttaagcacgttcgatcagcaaaatttcccaagcaatgtcaaaaaatttcaatagaagcgttgtaaaaagaaatgcaaagaaaaataacggaaaaaccgagttctaaggaaaagagcaaaacaaagcaggaaaacaaaatgtgtagagtttcttgacagtctcaaaagtttggaatttcttgtttattttcttgtatattgaatatttttaatttgttttttgatttataagtaaaataaatattgtttaattatattgaataaaaaaattgcgtttaattaagcaaaaaagccttaatttttagctttaaagtcaaaaattcaacttatttcacagtgtgtaaacagtttcttgacaaactgtatatataaattagaatatttttaaaggaaattaataaagagttgatttgttttcaaaggcattcattttgcacacccacaaaatcatgttttgtttaaaatgcttaatatggattaaatgacttatgtagccagaagccaaaaattgttgttttttcgtgaagttgcggttaaatcgcatggagtatcatgactgctggtacaaaaacgttggtgcgaccaaagaccctagaataatctagtgtctttggtgcgacattgtttaaggtctgccggtacgcactcgtataaattaacgctcttagagagcttgtaaaagtaaacaaagatgaaccgaataatttaaaaggaattataaataatttaaatcttttttaaatatcttttaatcttttccaggtcatttattaagatataaaatagtaaaatactaaattaatacagtaatgcatgtggatgtaatatttatagcaaaacttactcagcgacgtcgaaatcggtttcttctccagatttagagtctaggttaagtttgtcgacctaaataaaacgagtgggaaaaatatatttacaaacaattataataaaaggcaaataccagcttagaaacctcctggtcctctgcttttttagcccaatcacccatgtttaaatagaattaataagttacttttatttttaacgtcagagtgaccaactggtctttcctaaaaataattacactgacatgttaaataatagcctatttccacatagcttcatccagaacacactttcataatttattgtattgttttacaccgaattctaacattcatcataagactggttggaaaagcttgagaggttttacaaaaattgccgaaatagtctgaattttagacgagcatgtaatatgtaaaccagatataatttaatataagcattgatttcttaactttcaatatgattaaataaatacgatatataatcttatatgatatcatatattcaaaaaaatatttggttataatgatgttacaatgatcttttaggagtgttccagttattacgttaagactcattggatcggtctcggcgccatataagtgccacatacctgatgaggacttgggcagaaggacgtgcagcatatggatgccggctaagcatcttaagtagatttccccccacaagattatctctccatggcatgacaagcattatgctaagagaccagcgcacaatgcgatacttttatgttaatttcatgagtcaaatgtacacccttcccttgattaggtcccttctcagaaattttaaatttatctccacattacactagattcgttgaaaagtatataacactcagatggaaacgtttccgaccatataacgtatatatatttttgatcaggatcaatagcagagtcgtctttatgtcatagagcttccaatctttttatatctttttaggttacggtattctaattcttgtaccaacgactgttaggacagacgcaacggtacgacttcatgactatacaaacggagaagttaacacaagcagttctcacgcggtgaaccgggaccggattctaataaatacttgaatattgtgaccctcgccctaacgggagagtggtaaataaatattagtaaatttatcatagtagctttagacaatgaaaatgaat

SEQ ID NO: 25202 - DNA, 159 bp, DROSOPHILA
ataaaagtaacttattaattctatttaaacatgggtgattgggctaaaaaagcagaggaccaggaggtttctaagctggtcgacaaacttaacctagactctaaatctggagaagaaaccgatttcgacgtcgctgagtaagttttgctataaatatta

SEQ ID NO: 25203 - protein, 36 aa, DROSOPHILA
MGDWAKKAEDQEVSKLVDKLNLDSKSGEETDFDVAE

SEQ ID NO: 25204 - DNA, 3172 bp, DROSOPHILA
acaggcgcccagtccgatggccccgccctcgcagagtcccgccccctcgccgcacagcccgtatccgcaccagcagccgggtccactgcaaggacctccgccacccggacatcccggtgcctacggacatcccatgcagcacggaccacccggccagggtccacccgggcatcatatgccaccgcaccaccaggggatgagtatgttcttaaacaacccaacaccaatcgctccagtcacacgtaattatccgtagttttctcaaaaggtccgcacatgggaatgcagatgccgccgacgggaccgaacatgtccccctaccaaacccacggaatgccacccaatgtaagtgacccccaagtctagccgtaggaatcaaaatagtaagcctacttagatgtctcagttctcaaatcaaatctatgccatctggacaaacagtagctcagtgcaaacattgaaaatatttccatcgatactttcaaaatttttataatcagtaattagcaagtttttaaaatacttaatacgtttgtaaaagatcctataaaatctacatagtattctaaacggtagattaaggatttctttaaatttctttatttactttactctatatacagatatgggtacataaatatctaaattccatgttagactaacatttttctgagggatgctatatgaaaaaggtataaacaatacgaaattcgtgaaactttgtgaataagtatagaaatactaaatttccaagtaggtaatctgtatattaagttgtttgccagctaaatgcttaaaattatggtatcatacggtgttgtttttcaaagtctcaagattgacgggctttcccgcctttttgacgtgtatcgtggaacagctgccggcgattaaagctggaatatatccgaaagctccccattagcagagcttcgagcgccaattggcagtgcagctgaccccaagcttttcaattaagatcgttgttgccttgcctaaattacttctgcaccggcttccctcccacggactcctcctggtctcccttacgcagaaggtcttcgatctccttgcgcaacttctctgtgccggcgcagattagatccggcttcattatgtcgaatggtccgccaaagggatgtgttaccacgcctcccgcctccttaaccaacagggagccggcggcacaatcccagggatacatgtcctcaatgtagaaggcatccagattgccagcggccaccatgcacagctcatccaccacacaggagtaggcaacaagtctgtggatttatgcaatattttgtaaggggtaatttctttttaaaaagctttaaaatctttttaattatcttcgagaacaaaaggcaattaaagcttttcatttagcagtgactggttaattgcttagtactcagatacttttgttttgttaatttcacagatttttacccactatatcaacgggatttagttttgcgaaatagattcaaatttataaatgatttacttaccgtctagcattcaatcccacatggtagatccttttgatatgcttgttggccaccgaatggacatgcagcagggacacttcgtaggccacattggcatccttaacgctctcgcagctgctcacgtggattggtttgccattgcaaaaggcgccttggcccagtttcgttgtgaagagctttttctggacaggattgttgattactcccactacgatttgtttgttgattgccaaaccgattgaaacgcaaacgtgtggaatctgcttgataaagttcgaagttccatcgatgggatctatgatccaggtgggagcattcgtcagctctccggacacgttgttgttcttagccgtctcctcctcgccgatgaacttgtgatccgggtatctggccaatattttctccatgagaaagtcctcaatcttgttgtcgtagtcggtgaccacgtcgtagaaatcgcctttgattgagacgtttttactggccatctcgtagccctccatgaggatctcgcccgctttgatggccaggggatggataaagttgtacaactcctcgatatcagcttgacttactcctgccatcttgcttctatgcgtattcctttgggcaaaaaacgatccgtcgctgctcagctcgcgatgtcaactaatcggagagattgcaccccactgggagaagctccacgctccggctgattttgtctagctggcgctggcgctggagaagtgcttgcggttcggttacaattcactcgttctatgattgtttgcctgcctcgcgtttttatgatcgctgcgacatcgccccataggggtgtactaaaaattggcagctcacctggctgcgtgcctctgttttatctcaattggtttgatgtacacaaatagacatactcttttttatctccacacagacagccagtcaaatagttgtaaaacccgtttttatcagcatttttcgacgctctcagactttattattggatgatttacacactcgagctgcaagtcataatactcagagaaaccttgcagatattatgttaaaattgatcgtaactgtattataaagatcaatcacttgtcttataatctttaaactttgcttttatgcttatcattaaacatattcgtattgtttcatacatccatcatttccaatctattgaatatagttgtttagacttcatgaatatatattaagctttatgatttatttaaaagtatagccgctaatttggtcggctccttctatcaattggattacacttttggccaattcttcagagctggtgcacacacagtcgggtttcatcacatcgaatcttgcaccgcttgtgtgatataccctgccaccggcttccctgaggattaccgcaccgccagccagatcccagggctttagattctccacatgataggcgtcacatctgccggcggctatatagcagagcgtgagagctgcgcatccaaagctgcgggtgctgatagcggaatgcagtgtagatgatggggaatagatcagagttctctgggtcactcacccagtggcactcgaggccagcttgtagagacgcttcacgttcttgtcccgccccttagacaccacgattagggagatctcatagcacaccaatgcttggtttatctgcaaat

SEQ ID NO: 25205 - DNA, 941 bp, DROSOPHILA
ctccgattagttgacatcgcgagctgagcagcgacggatcgttttttgcccaaaggaatacgcatagaagcaagatggcaggagtaagtcaagctgatatcgaggagttgtacaactttatccatcccctggccatcaaagcgggcgagatcctcatggagggctacgagatggccagtaaaaacgtctcaatcaaaggcgatttctacgacgtggtcaccgactacgacaacaagattgaggactttctcatggagaaaatattggccagatacccggatcacaagttcatcggcgaggaggagacggctaagaacaacaacgtgtccggagagctgacgaatgctcccacctggatcatagatcccatcgatggaacttcgaactttatcaagcagattccacacgtttgcgtttcaatcggtttggcaatcaacaaacaaatcgtagtgggagtaatcaacaatcctgtccagaaaaagctcttcacaacgaaactgggccaaggcgccttttgcaatggcaaaccaatccacgtgagcagctgcgagagcgttaaggatgccaatgtggcctacgaagtgtccctgctgcatgtccattcggtggccaacaagcatatcaaaaggatctaccatgtgggattgaatgctagacgacttgttgcctactcctgtgtggtggatgagctgtgcatggtggccgctggcaatctggatgccttctacattgaggacatgtatccctgggattgtgccgccggctccctgttggttaaggaggcgggaggcgtggtaacacatccctttggcggaccattcgacataatgaagccggatctaatctgcgccggcacagagaagttgcgcaaggagatcgaagaccttctgcgtaagggagaccaggaggagtccgtgggagggaagccggtgcagaagtaa

SEQ ID NO: 25206 - protein, 288 aa, DROSOPHILA
MAGVSQADIEELYNFIHPLAIKAGEILMEGYEMASKNVSIKGDFYDVVTDYDNKIEDFLMEKILARYPDHKFIGEEETAKNNNVSGELTNAPTWIIDPIDGTSNFIKQIPHVCVSIGLAINKQIVVGVINNPVQKKLFTTKLGQGAFCNGKPIHVSSCESVKDANVAYEVSLLHVHSVANKHIKRIYHVGLNARRLVAYSCVVDELCMVAAGNLDAFYIEDMYPWDCAAGSLLVKEAGGVVTHPFGGPFDIMKPDLICAGTEKLRKEIEDLLRKGDQEESVGGKPVQK

SEQ ID NO: 25207 - DNA, 2869 bp, DROSOPHILA
gttgtacaactcctcgatatcagcttgacttactcctgccatcttgcttctatgcgtattcctttgggcaaaaaacgatccgtcgctgctcagctcgcgatgtcaactaatcggagagattgcaccccactgggagaagctccacgctccggctgattttgtctagctggcgctggcgctggagaagtgcttgcggttcggttacaattcactcgttctatgattgtttgcctgcctcgcgtttttatgatcgctgcgacatcgccccataggggtgtactaaaaattggcagctcacctggctgcgtgcctctgttttatctcaattggtttgatgtacacaaatagacatactcttttttatctccacacagacagccagtcaaatagttgtaaaacccgtttttatcagcatttttcgacgctctcagactttattattggatgatttacacactcgagctgcaagtcataatactcagagaaaccttgcagatattatgttaaaattgatcgtaactgtattataaagatcaatcacttgtcttataatctttaaactttgcttttatgcttatcattaaacatattcgtattgtttcatacatccatcatttccaatctattgaatatagttgtttagacttcatgaatatatattaagctttatgatttatttaaaagtatagccgctaatttggtcggctccttctatcaattggattacacttttggccaattcttcagagctggtgcacacacagtcgggtttcatcacatcgaatcttgcaccgcttgtgtgatataccctgccaccggcttccctgaggattaccgcaccgccagccagatcccagggctttagattctccacatgataggcgtcacatctgccggcggctatatagcagagcgtgagagctgcgcatccaaagctgcgggtgctgatagcggaatgcagtgtagatgatggggaatagatcagagttctctgggtcactcacccagtggcactcgaggccagcttgtagagacgcttcacgttcttgtcccgccccttagacaccacgattagggagatctcatagcacaccaatgcttggtttatctgcaaatgttaccgaaaatgcttgtgtcacttacgcttgcgaacttcgtagcagataaagtactagaaaaaatatattgggttatatgtgattttaaagtcttagaaagaaaccaacttttaaactgagtttcattttttcaagtgatattttagctaaattacttaagacctttaaagtatagtacacatccagcttgttctttatggccactgagtgagtcttatcagcttcaaatctctaagataagccattatttcatcactttcgcgaaacctaccttcttagcgttggaaacctcaatgggttgtccatttaaataagctccgtggccttgccaagctgaatacaactcatttgcagatggattgtacacaatccccagcaccagctctttgtttatggccaagcccacggaaatacagcaatgggggatctttcgaacgtagttgttggtgccatcaatgggatctatgatccaagtgggggcatccgtcaactcaggcggcgttttggcgttggccatagcttcttcgcctattattttggattccggaaaggtctttagcaaaccatctgttagagtggcttctatttgcttgtcgtacacggtgaccaagtcatagaacgctgacttgacttcgtaatcggttttcggtttctggaaaccctccaaaaagagcggaccgcacttcctgaccagttccagggatacctggtaatatacttcaagtttttcctcgccgattcggtaactcatggctcgtctatcgactgatcagagtagaaactaatacttaatttagaaacacagctgacattatggtaaagctttcttcgcaagctcctgaaagttctgcgatacttatatgtacttaggtcgttttattgtactggaatatctgcgcgattagaatagtttacaagtgataaatgtggatactgtctttgcatactgagcctttaactgtctttacttaaatgtgtactctgtaatctgaccggcctcttcgataagactaatcacattcttggccaactccggcgtggcggcgcacacgcaatccggtttcatcacatcgaatttggatccgctggtatggcacacagtgccgccagcttcggtcagaatgatggctccggcagcaatgtcccacggtttcagatcctccacatgataggcatcgcactggcccgtggccacgtagcacagggtcagggcggcacttccgaaacacctggttcccgtggcattcgaggccatcttgtacagtcgcttcacattcttgtccctcactccggcggcgtggatcagggagatctcgtaggcaatcactgcttgcttgatctggaaaggggtacattagttgtgagagtaattgtatatgcgcttaattttggagagctatttttgtttggtggtatacgaatgaatgatatcggtgcaccgaaaaaaatgttagcagattgtatttttccattccaaaaagttgttataacaattgtatgggaattttgttataaagcggttataataaattattttatcacatttatcaaatttctcaaacattcctatcgaaatgcaaatttaagtttagccaaccttttttttttttttttgctgtgcaccgataaacctgtttgcaggaataatgtcatgcacggttatttgtcaaatttcgtttatctggtttgtcgctatacatagtattgttgctcccgggttatataagcacactcttaccgtcgtcactttg

SEQ ID NO: 25208 - DNA, 588 bp, DROSOPHILA
atgagttaccgaatcggcgaggaaaaacttgaagtatattaccaggtatccctggaactggtcaggaagtgcggtccgctctttttggagggtttccagaaaccgaaaaccgattacgaagtcaagtcagcgttctatgacttggtcaccgtgtacgacaagcaaatagaagccactctaacagatggtttgctaaagacctttccggaatccaaaataataggcgaagaagctatggccaacgccaaaacgccgcctgagttgacggatgcccccacttggatcatagatcccattgatggcaccaacaactacgttcgaaagatcccccattgctgtatttccgtgggcttggccataaacaaagagctggtgctggggattgtgtacaatccatctgcaaatgagttgtattcagcttggcaaggccacggagcttatttaaatggacaacccattgaggtttccaacgctaagaagataaaccaagcattggtgtgctatgagatctccctaatcgtggtgtctaaggggcgggacaagaacgtgaagcgtctctacaagctggcctcgagtgccactgggtga

SEQ ID NO: 25209 - protein, 195 aa, DROSOPHILA
MSYRIGEEKLEVYYQVSLELVRKCGPLFLEGFQKPKTDYEVKSAFYDLVTVYDKQIEATLTDGLLKTFPESKIIGEEAMANAKTPPELTDAPTWIIDPIDGTNNYVRKIPHCCISVGLAINKELVLGIVYNPSANELYSAWQGHGAYLNGQPIEVSNAKKINQALVCYEISLIVVSKGRDKNVKRLYKLASSATG

SEQ ID NO: 25210 - DNA, 2912 bp, DROSOPHILA
gggatctatgatccacgtgggtgcatcagtcagctccgcctggcgctgtgaaactgccgactcctcctcgccaatgatcagggattcgggaaaggcggccaccaatccctcggtcaaaatatcctcgatttgcttatcgtacacggtcaccaggtcgtagaagtccgccttgaccttgtattccgtctttgccttctgatagccctcctgcatcagaggcccgcacttgaggaccagtttcagggccacatcgtagtactccttgagcttggactcgctgaccgcggaactcattgctatttctgttggtttccgactgagcagcagaactatatagacgcgagtcagctgtggaatgttggcgacgccagaggaaagctttctgccgaagctttcattgatgcaatagaactttggacatttaggagagcgcgatagagttgcttacgaaccgttgttccaagtttatggatgtgatattactacactagtcagccaagaatcagaaaatactattattgttaacatttaaaaatccatgaatgcataggaaattctttttactatttaagataattttattattttaataaaattgagtataaattggtatagaatttaaagaaaaccatttttatcttcatagcctgtagtatattttctgatatacgaatttaatactacataactgcaataggatataggatatatcccaatctatcttctactattacctatcatacataggatatattttcataatacattgcgtattttaaagatgtaaaggtgtgtttccttgaagttgtatgatggttattagagactatcttgtgtgttataaattcacaattcgtgagtggatgaactgagctgatatgagcagttcatgtgcagaggaaaaagacaaaagagacatcgtttaaataagattctgttttatgttgatcattaaacttttatttgttgacaaaagctctttgcgtgtggcttacaaatctcactctcctcccacatgcttctcctgatcagccttccgaataagatgctctatctcagctctcagtgtctccgttccggcgcagattagatctggcttcatgatatcgaagggtccgccgtagggatgcgtgacaactccgccggcctcacggatgagcaaatagccagctgcacaatcccagggatacatgtcttcaatatgaaaggcatccaagttgcctgcggccaccatgcaaagggaatccactacagcggaatatgccaggagtctgaaaaggattcaaaactttaatagttgtataattaataggctaccaccacctgaccttctggcattggatcccacatggtagattcttttgatgtgcttgttccggatctttggagcgtgcagcaagcaaacctcgtatgccacattagcatcgttgagatgttcacagctgctcacctgaattggtttcccattgcaaaaggcaccctggcccaatttcgcggtatataacttattctgtgcgggattgttaactacacccagcacgatctgtttcttaatggacaatccaattgaaaccgagacatgtggaatttgtttgataaagttcgaggttccatcgatgggatctatgatccaagttggagcatccgtcagctctttcgttacattgtcattcttgtgggtatcctcttccccaatgaatttgtgatccgggtagcgcgccagtattttctccacgagaaactcctctatctggttatcataggcagtgactacattatagaactccccgtccttgagggccaccgccttgccagcattttgatagccttccaacaggatttccccagctctcactgcgagcggatagataaagtcgtacagctcctcgatctgggacttactggctgccatctcagttacttctccaatttgcttatctacctatctgtgtatcttgcaatgcttttgcgatatattgcacctgttccgacttcgtgtcgagtgaataaagcactgaacaagttttcacagttcagtaactcggttcactgtgtggcattcgctaactgagattctgggcgagtgggagcttttattaatttatttgcacttaagtcagcttttgtgcaaaatggaatttgtagtacgttcattataatatttacaaaattccattccttcttttacaaaattaaaatagttaatttaatttaacattacgttgaatgtaattgatgaagtcgttattaatctaaattcccttctctttcaggcacccacacaaccctgcatagtgtcacctggtggcccacctggaggcccgccacctccggagcgctcgagccaggagaacctgcacgcgcttcaacgcgccattgattcaatggaggaaaagggcttgcaagaggatcctcgctactcgcagctgctggcaatgcgagcaacctcgaagcatcagcaccttaatggcaatcaggttaacttgttgcgcacacagatcaccgcctatcggttgctggcgcggaacaagcccatatccatgcagatgcagcaggcgttgcaggccgcacagcaacagccaccgccaggacctccaattgggccacctggagcaccaggcggaccgccaccagggagccagcatgcaggacaaccgcccgtgccgccgcaacaacagcaacaaccgccaccttcagcaggaactccaccccagtgctccacgccgcccgcaagcaatccttatggaccgccagttcctggccagaaaatgcaggtagcgccaccaccgccacacatgcaacagggacagccattgccaccacaaccgccacaagtgggtggacccccgcctatacaacagcagcaaccacctcagcagcagcaacaacagtcgcagcccccgccaccggag

SEQ ID NO: 25211 - DNA, 855 bp, DROSOPHILA
atggcagccagtaagtcccagatcgaggagctgtacgactttatctatccgctcgcagtgagagctggggaaatcctgttggaaggctatcaaaatgctggcaaggcggtggccctcaaggacggggagttctataatgtagtcactgcctatgataaccagatagaggagtttctcgtggagaaaatactggcgcgctacccggatcacaaattcattggggaagaggatacccacaagaatgacaatgtaacgaaagagctgacggatgctccaacttggatcatagatcccatcgatggaacctcgaactttatcaaacaaattccacatgtctcggtttcaattggattgtccattaagaaacagatcgtgctgggtgtagttaacaatcccgcacagaataagttatataccgcgaaattgggccagggtgccttttgcaatgggaaaccaattcaggtgagcagctgtgaacatctcaacgatgctaatgtggcatacgaggtttgcttgctgcacgctccaaagatccggaacaagcacatcaaaagaatctaccatgtgggatccaatgccagaagactcctggcatattccgctgtagtggattccctttgcatggtggccgcaggcaacttggatgcctttcatattgaagacatgtatccctgggattgtgcagctggctatttgctcatccgtgaggccggcggagttgtcacgcatccctacggcggacccttcgatatcatgaagccagatctaatctgcgccggaacggagacactgagagctgagatagagcatcttattcggaaggctgatcaggagaagcatgtgggaggagagtga

SEQ ID NO: 25212 - protein, 284 aa, DROSOPHILA
MAASKSQIEELYDFIYPLAVRAGEILLEGYQNAGKAVALKDGEFYNVVTAYDNQIEEFLVEKILARYPDHKFIGEEDTHKNDNVTKELTDAPTWIIDPIDGTSNFIKQIPHVSVSIGLSIKKQIVLGVVNNPAQNKLYTAKLGQGAFCNGKPIQVSSCEHLNDANVAYEVCLLHAPKIRNKHIKRIYHVGSNARRLLAYSAVVDSLCMVAAGNLDAFHIEDMYPWDCAAGYLLIREAGGVVTHPYGGPFDIMKPDLICAGTETLRAEIEHLIRKADQEKHVGGE

SEQ ID NO: 25213 - DNA, 2573 bp, DROSOPHILA
tatattgtcaaaatacttatgccgactagtgtacataagcatatacatagatgtatcgtcacattatattgagttttgagtaaagcactaataagtggtaagtggtaatatagccccaagaggatttttttactatcgacatatagtaagaatgcactgaattcatgttaagtaagtcatttctgtagtattaacaacttaaagatttatataatagactttccagaatttcttacgatttctctttccttagttgttttcaactttacgtgtttgcaaatttgactttcattaaagcctaacggaaccacttgttcaaacatccttattcttaggtaattcacactcttgtcaaagacacgattgatggtttataaacatcaagtccactgacgcctggccacaaagttcatcacatatggatggagcgcaaatatttagctagataatggctcacggaacttgctgattcctttatgtaagatccataaagcaatccaaacagctggtagaaattattcgtactttactaccataaggtaaaagcattgttaagttctgaactgaaatagttttagatgcaattgattttaagacgcatttatccagcattcaattttataaaactttattttcaaatatgtgtaatagtaccatttcaatatgaataatttattaaattcagaaaaaatagagaagagtatatattttttatagactcattaacaaagctttgtaaccaacaattttggaaataaacctaaacatgaatcaaccattgtctacaaactcatattctttccatctgacagaaccccagagtgaaggccaatgtcaattgcgaagtgactgacttggaaagtggaatttacaaatccacactgacgttagtttgctcaacgcgcaaacgtcaccgatggaacacatgtgccaccgagacttttagcagacggtgggtatatataccgatgccaagtaatgccgagatcagttcgagtcgttaactatcagataacgaaatgcgtacccttatccttgttactcttgttgccctggtcgcagtggcctccgcccaaggacctggtccttggggtcccggtggacctggtggacctggtggaccaggtcgtggtcgcggaggaccaggacgtggacctggcggaccaggtggcccaggaggtcgcggacctggaggacctggaggaccaggaggcccaggaggcccaggaggaccaggaggaccaggaggcccaggaggaccaggatgcccaggaggaccaggtggaccaggaggccccaaaccatggggacctccatccaaccaaaccacatccacgacaactgaggcctcaacaagcacttccaccacgacagcttcgtccactacagtgtcctccactacagagtcctctacggaatcctcgacggaatcatccacagcatcctccacagaataaatcgcttgacatgttccccttcgagttttgcccattcggctattccgggttcataaataattgtatatatcaaaaagcgaatctgtgcgtaataaatttttttttttagctcaatcgtgatttttttatctaagttaatccttgaatgccaaatagttatccaaaggatcttcatccatgtttggcttatgatcaacttgatgtatcaagccagaaggtacatgcgagtaccacgcgagccatttaattacttcggccaatactaaaacttttcgtgagttaagtaattttagaacaattagttaaatggcattatgcaatgccagtgctaaattatccactggcgattaggaagtgcattgagaatttgaagcaaatcattccccgggccaattggaatcgaacttattcgagccggcctcgtttctcgcttgggtgaaagccaaattgtttaccaattaagtgcatttggtcaatttgcgacagaactggcgctagtggaatccaagaagaaggtacagaagcttaaaaggatgagcccgaggagcagcaactggattaggaggcattaaaagttataaaacaacaagattatggctttgccataacgaacacacacgcattcactcaactggttatgtgccagtgaacaaaggcgtttagggtgtcctctaataaatactcttgttttcaggatgtgtttccaggtctacggtttcttataaaaagaaatttgaaaaaaaaaaacactttaatgtatgtgtatgagtaacgtgctatttctcagttctggttactttagatattgaatataagccactccaaaatgttgcattcttggattggaatgatatgtattatacaataaattgtatgtgataaggaacgattgaagtgtatatgattgtgacagtttaaagcattatggctcattagtattagcatgtagatagcatgtagaagaatttgtgtatatatacatatatacatatacacatacatacagtatgtacattcgcttctgaatatataaagtatatatattcttgatcagaatcaatagccgcccacaatttttttacatttttattagtcttgtaaattcctatcgatgta

SEQ ID NO: 25214 - DNA, 573 bp, DROSOPHILA
ttaactatcagataacgaaatgcgtacccttatccttgttactcttgttgccctggtcgcagtggcctccgcccaaggacctggtccttggggtcccggtggacctggtggacctggtggaccaggtcgtggtcgcggaggaccaggacgtggacctggcggaccaggtggcccaggaggtcgcggacctggaggacctggaggaccaggaggcccaggaggcccaggaggaccaggaggaccaggaggcccaggaggaccaggatgcccaggaggaccaggtggaccaggaggccccaaaccatggggacctccatccaaccaaaccacatccacgacaactgaggcctcaacaagcacttccaccacgacagcttcgtccactacagtgtcctccactacagagtcctctacggaatcctcgacggaatcatccacagcatcctccacagaataaatcgcttgacatgttccccttcgagttttgcccattcggctattccgggttcataaataattgtatatatcaaaaagcgaatctgtgcgtaataaatttttttttttagctcaatc

SEQ ID NO: 25215 - protein, 145 aa, DROSOPHILA
MRTLILVTLVALVAVASAQGPGPWGPGGPGGPGGPGRGRGGPGRGPGGPGGPGGRGPGGPGGPGGPGGPGGPGGPGGPGGPGCPGGPGGPGGPKPWGPPSNQTTSTTTEASTSTSTTTASSTTVSSTTESSTESSTESSTASSTE

SEQ ID NO: 25216 - DNA, 80226 bp, DROSOPHILA
tcttctctaataggctccttcagtttggacgacgttatgcttatttcactgggcgaccaggcttgaatggaggccatcactgtgtttgacacaaaaatcggttggtagatgtagagcagaatgtctccgctaacccgaatgcggtctggctccattgatccgacctcctggcactcgatctccacgggcttggcctgctgcgagaagcggtgccggtagaagctggactcgcgtctctcggccggaatcatcgactgtgtccgcgaccttgtgtcccctatcggctgttgggaatcaaccgcctgcatgcttatcgtgggcgaaaagatattgctcttgcgcttctcgcgcaccagctcccgccagtccagagccacctgcttcacataggcgtagttgctttcgtccaccagagccgccatgacgaagctgtttattttaggtagtgttaggtcccttcagcggcctccaggtggtcccgataatgcccctattcgtcgccgttgccctccggtttctagatcattattatatacacacttgattttgtagcaagttccctagaccattttaggcagataattttggggagaatgaagtaaattaactgcaaactaagttacatatatcaagtccaggttgctatgtctataaaagatctttagcacccggaggcacttataagcgctttgaccatacatctttagtgagctcaaaagcttccagcctattttcagcctacatttatcctagaagcaagctacgaaatgttgaattaaagccagaaatcgattttttctttttaatactttttctttaatgtttttttgtgtataaatgatattttctgttttgtatttttaatgccaagtgaaagttttgaaaacgcacaaagtatagtataaaccttataagtatattacaatgatcatctgccaggagtgagtaaaccataaactaagtctaggaattccaaacacgaacctaagagatattttcgttttttttttttttgttgaatttttgttttcttgcaaaataagtgtaaggtttatcctattaatataatagacataaaacgtatgatgtgtgttggctgaagattcgttgtctccgcactgattgtgtatagttgcgttgcgtataaaaatataaactctgattcttcatcgctgttctggtgagctccattgctagctccttagtgctgttggctttttagcttctgtttgcttcggtgccttggattcatactctcgtttggactcctcgacggatcctttgtcatctgctggtagctcctcgttcacagttcgcatttgtaggcactttagtgtttttcaaacaaaaaagtatacaaaaacgccactcaattgatcattgtgtttgtatcatatttactgggtaagaatctgggggacgatccgcccctttgttcctttatgcggcagtttacacgtggctgggcatcgtctgctcctcgcctaagtacatattcagcgttcaatcgaacagcaacctaaactcgtaggaaattaaccgaaataacaaatacatccttactataaattgcgttcctttcgcgctcgctacctaaattagacatataaaattgggctgcctctgggtgtcgcacctttcggaggagagcgctctgttcgggattgtaaaacctcgagcgcggaaaacgcgcgccacaggcgagctcttagtggctctgcctaagtggctggttgcgctggttaactctagttacagctgttaaatgccttaacataacgtaacggtaacctacaacgattagcggcctgcttaattagtcgcgctctgtcctcagatcggaggtggtccacggatatagcggagctgcggcgtgaagctcatggacaggttgttcagattgtcgcagcagttgggttgcatcaggcaggcagcgcagaagattgtgaacagggccacctgcataggcactgccgccctcgcgatgcgccacgcccaccctcgcttagaggtctgtgcaggatccgctccctctccatcttcctcggagctttccaggttgaagagcaacgagggatcgtcagaggggtcgtccccaccatcgccacttgtcaaggtcttgagttgcttcaggaccatcttctgctgttctgggctgagacttggctcctctacttgctgatcctctccagccttcttggcctgacgcgcctttcgagctcctttaccacgtctgccaggcgactggggttctgccttgccctttgcggcctgcttcttaatgtgtccattggccttcggtgacacctgctgggtctgattttgctggatctgctgcttctgctggtggctagctgcagtgcgaacaattaagtctctacaggtgttctgcaggtgcttcaggtcggcctcggcactttccattcgggcagcaatagaacgcatggcttcgcttcccggcgccagagctagttccaactgctttgctaggcgtcgaagaactcccagtcgtcgctccctctcggacaggccaccatcagaagtagctcctccatcagagatgccggaatctgatagcgagccatttgaggctgtaaacttcgtaatgtggtagatgtggttggggtccaggtgctgctggacggccaaaagttgctcctggcttacgtgaaccttttcggacagcagcttggccaccagttttacattctgggccagctcgactggtgtggcttgtcccttgtccagagctccttcaagacccttcagagtgcccctatcttggcccaaagccaattggaactcactcaaaccggactccaactgcctccaggcaataagcgagttggtaagcatttccagttgcgtgttgattctgtggattgaagtacattcggttagaagtgatcttactagagatatcgtgggctaactcacctggcatccgcctcatcccaggaactgtacatgtcgctcacttcgttcttcagatgcttatggaactcctgctccgatgacatcagcgtgtgcacatcccaggctggcgtggaggtggaggcttctcctgtggctagtgcctccacctgattaccattgctgtcggtgaccgtgatggccactgctccggtagacgccagctccttctgaacgtcagctcccttctcctcttcaacaagtttttgctgcttgagttgttcggactcctgttgctgctcctgttcctccaaggcgctctgcagtcgccgctcctgcttggtaagccaactgtggacggaggcgttaagacgcagcatgttggtcctatagctggtcagttgcgtctgctccaactaaagacgaatgatgttagcttgttgcaataagaaagtccgatttgactcaacactcaccttgagcgcctccactgctatttggatggccggctccgtatcgaggagctctggagttggcttgtctcccaggcgctgcagcgagctcttcaacacactcatctcctgctgcaatttgcgggcagcggaggcattctcgctccagctaagtagatcctcccaggcgccgagcagatctgcgggagaagatcagaggcgggaatgaggatgtggtcggttagatgaaggaggatggtgattccagttaacagagttaaatggtgcacgagagaaaggcaatttaattgggcgctggcaatctaatttccatttatagcacacttccattcccacttggctgtcagagcccttggtaatgaatacctttctctaaacgctggaaagtgaaactctggaccgccaaaaggaaaatcaaagtcaacaaatacaactcggagaagagaaacagccctagccacagcagttaaaggcttgcaatcgctttgtggttgtgggagccagcaacaatgttttctaattgaaatagtttggctcgaacgatttgcactgcatttgttgttcccctcctttcgcctgtcatttccgctgggtcgttatatgtcattgattctgcatgaaagaacgttgggcggactggaaccagaaccaaaagttcggtgtcagcaccagacacacaaaagagcaagctagcaatgagtagtcgaccttggggtacctattagctctggagaaagatgtaatgaatcctagcttataagaacccaagaccctatagtgcacatttacctttatatggaaaaatgcttgcaaaagaagactcaccacgacagaagtatattcgtatcctcgattgaggattaccagtcaaaatcaaagagctcgcgacaagtgcgtgtggcccggttgagtaataaaaacgcaatgcgtaatggcaggctcgcacaaattactttcaccttggggctggccaaaaacagtgttttcccctgtttatttgcgatgttcgccagcagacaaaggcagtagaggataaaacgcactcgaagtgctggagaagtaaaacccaaccgatccgaacttgttggcagccaaacagaaactggttaagtgaacttcagtgcagctgcaacagagctcgaagcttgacttggatccccatgggttccaccaagtgggcgtaggatggggaatccaacatccaacccactagagcaattcgagcgcaaccaaagcgatcgcattagcagagggttcgagatgggtgtctgctgggtggagctcaactcaactcaaggcctacctactaaatgaaaagattgtaatcttaaaccataaggccgaaacaaaattaaaatgttttctcagtgaagcttaatcacacgcacttttaggatgttttttttttttttgcccatgcgataccctaactggttgatatcaaaactcgttgcaagtgcgactagatgccacttttcgcagattttgtttggatcggattttgattgtggatggagttggattgggggggactccacctgctttccggcagaaattgaataatcttcgccagataactttgagacagcagcaaacagtgcaaaaattgcaaataaaattgattagccattaagttggccaggtgagagagattattggcctggaaaatactttctctttgcgctaatcagactgcatgaatcgttaataattataattatgctcagttttagcgcacaaatatttttaatttcgctgcttcatagtttttaagcttcttgctgacatgcaaattgcctgcgggctgtttttcgtattttttgcaatgcatttcgtcacgatagctgaaatgcaaatagcagacgtaaattgccaaaaccgcaaagcggggtgggcagggcttttggccaaggtcgttgacgtttgctgcagtagttggccacaatgtgagaataatcagtttacgtgggaggtgctcgacagagaactaatcgagcaattttaacaaaaatacacaagtttttaaacaagcccaaaacgaagtgtatttgttcttttgactgcagtttgtctctatcaacaattaatcacttcgttcacaagaaaactatcctagactaccccaatattctttccttgatgtgcaaggatactcccaaaggagtggcgtgactaatagccgttaagagaatgaaaagggagtgttccacatgttaccttaacaaaaatacccgtagacagtttcatccaccatgaatgtaatagcatatttttatagataaaacaaaattcggggcaggtgaggtaatcaccgagaacagaagctaacgccgaagccaaacaaaaagccaaggcaaatggtcactgcctgacctaaggcaaagctcaaaatatttgccaaattaatcttgaataattattttagcacgaatttgtatggcaaaggagacaacaattataaacaattagcaagagcatataaaaaaaccaacgtcgttggatatttttaaatgctgattagagagctcagagaacgaaacgaaaattatcgtgaagatgcgagacatggtgaaaatgtgaatggcttcgagtgcgcggggtttctgcatgaatgaagtaataaatctaccgattcgagcaggaaatctacaaacggaaatcgccaaagatatgtaaatgggattggaaatgcaaatggaaatagcttgttactgcggttcaaagccctctaggaaaacgcattgaaccacttaactaaccacatatagaagctacttgagctggaccatcaaattagttgtctatgatctcgtttctaacgaaggtcaaccacaaatggggcaagcgatccataattaatgatatatcgaatgacaactgggaacttgaacttgcgcaccgtcggcagaaaacacagaaaaaagttatgaggtaatagaggcaaccggttccggctttcctcgctccaaaacaaaaaaacatactgacagaatactttaaaagcgaatgccactataaaagcgttcgccataggagtgctcactgttctgcatttaccgttaattagcggctcgaagaggggcagcgttgcttgaaatgcacggacggtacagtaagcaccctaattagcgggccaagtggcagaagtagccacttgcagcccgatttggcagcttgaagatcaaagtcggtcaatgtgtctggcagaatcgagtggtaaaatccgaaaggggaacaacttgcgttactctatgagaattgcggtaagaatagcgcaatcgctagcggatctgtcggttggaaaatatcattaaccactcaagagatgaatttatgtgaaacattgttgtgccccgtttctgattctttgcgtttgagttttcaaatttcccctcagaaagaaaaaacaaagcactagctcagttttcgatagctctaacccattatttggttatttgatcacggaactgatctaattaaactagacatttgaacatctaccttcataaaacgtgttcaatactaggctcacatttctctcatgatcgacctaatctttctactaattgcctgcttagtcaccttagtcacttactcaagaccataatctcctccaaatttgtctctcctattttccctttgtgtctgaaattgctctgctcgtttaactcttatctttctgtgcgatctgtgctccaaggccccatcgtttacacctgtttaccaattatgtttacccctccatcacatcatctcggtacactaacggtggccatatctttgcaatggagtgtgtttgctcgggtggcggccaagtgtttaccttgctccgatgacgagcgtgatgtgttggtggaagaagtggccgaaagcatttcggatatatccgtctggacggccacgctgactttccccattgtggtctgggttttggagttttcccctggcagacctcggcgggaaaagctctcttcaacccctgagtgacccactttcgctcgatgtgccacttgaaatcaatttttgtaatcaatttgtgttttaaaccatttcaatttcgtttttcgaagcacacacttgcagggattatggaagtatatacactatatacactgtaacttgaacaattcggcattgaaaactatcgaaatttccgcgaaactcttataacaaacaggaactcttatacgcagggcaaaaaaagcacgcgatttgggaactttatgaatggacacttctaagttggattttactggcctaagttactttagagggcatagttttgttttatcacagttgttttggcggaattatgcgggattctagtgggattacttcacacaatttcgcggaagcacgttaaaatataattacagacagcgaaacagagaacaaccgattggaacgcgcgcagaaatcgaactgagagatgtggagagtcgcgccgaaaggcagagacagctgagagctgggaaaaaagggggagcaaatgcgagaagcggcaaaactgagagatggagggcagcggcaacgtgttcgcttagcacagttactataagtgccgttggctttatttattttttaaacagccagagaaaaaaggtttttaaatttcatgtaaaatatccaattcatcactatttggcagtatgctttgaaaaattatcatataaatcataagagactgaagttaaattaaaatattaaaatactaataatttaatgatttctctgtgtgtacaaaaacacaagacagcaagcacgcaagcacccgaatgagagaattctgaaacagaacttttgaacttggtttcgtcacacgcaatctctgaaacacataccaacatatacattgtatatcattagggtcgagagctcaagcggcaaaaaaggccaaacagcattaagaaaaacaagtctatatttcaaatggcgacgtcatttttttcccaaagcaaccgaaatattttcgaaaaacagacaacgaaagctatttaagcgatgacgacatcaaagtcaaaagctgaagctacagtttgagagcgcttcgagtgaaaacaaaaacgctactcagcggagatctaagacacctcactatgcagttttgaaagcattgtgtcgaagatttctcgattttatcaatattatagaacccaccctcgcacagaaatggatgtttcacgaagtcatcacatttgtgtattgtttataaatattcgcagcaggcgcgtgacgtcagcagactaaaataaatttgctcttgctgggggtcaaaattaagcagctggctagcgaatatttatatcgctaaaataaaattaggcagatttatggttaatgcaaggaaaacttcaaagaatttggaaaattttttaaaaaaatttcaagttttgttcaccaacggcacagtgctttctaaactttatcacggacgcaaaccttaatgtagaattatactgaattggtgtagatactttttcctaatggaatatgctattaaaaacgacgaaaattgccagcttatggaatatcatacgagttaaatgtaaataagatattaatccttactatttaaattatgttaaatgtattatctcaagatctcttaaagagcacctgtatcttgagcataccattaccgcttcggaaacgggatcgatattagtgctagactacacgatgatctcaataagtaaactcaaagcaatctaaaaacaacagttaatggatgattgttaaataagttttgttaatacatttgacaaacacacaagcattagcggcattacgagaagttaacagatcggatgatggaatgacagaacaccaaaataaaaactaagttaggaatagttcacaggacaaacggatacaaacgcaagttgagaattataacaattttagttttgcttatggtgtgtagattttattgccaaaaaaataaagaacaaatgagcaagaaaaaatggatagaacaagtaaaataatattattaaaataataataaaatagaacagaaagcgaataatcaattgaggataagtaaattcgatgcgaaatgcgttttgtcaaatgcaaaaacaaactttcttcaaatcatacatcatatgcactatcatatacagcgtgtttaaagatctatttgtacggcgatcaaaggcatccgaataatacatgcttaaagctcggtgtctgcggcatctgtttaaaacagtccccgcagcccgtcaaagaaccgaccgaggcgtccacccacgggccggtctaccagctcgtagagcgacctcagcgttcccgccaggaatcggtagagcgcaaagtgctccagcatattgcccacgtccagcacgaactcgatcacccgtgccacgaagcgcgtaatgggcgcacactggcactcgaccatatgcaccatctgccgggaatcgccggattccgtgggaccgggaagctcagtccctagacgtcgcctccggcgccggcggagacaggctgatactggtgatgatgatgatggtttgcgtggagttggtggaggcgggaactcaccttttgtctggccagcgcagtggttggacaacacggtgccgggcggaccgcgcagcacggcctccaggcagcgaatgttgtcgcggcaagtgttgatgatctcgttctggtttggggtcaaggattagcggagaattagtgtgggtcccagaagcaacttgaatttaacttacataatcctctggtctaagcagatggcatctgatcttcagggctctggtgtcgtccagcctgtcgcggctctgctgcagcagggatcgcatctcctgctctccgtcctcggagtccgagccactcgacgaggaagtggtagctggaataagtttgatgcacttctccaggttgcgggaggagcgtcttctttcgtccgccgtcacagtgcgtcgtctcctggttgaagtatcgctctccgaggtgcgacgcagcagggactgagcggagtggctcattccgccgaaatccaacttgcgtcccacagattctgcgcgatggctaatctggtggctggtcgactgaatcttgggcgtggtcattagggcggtggcggaggcagacaacgaaggcgtgacctgcaattgctgctgctgttgatccgactggggactagccatcaggctctcatccatgtctggggtggcacaaatgctagttacatattctgttctatgcttgaatagaattgtgtttcttaccttggcaagactttcgtcgaacttccagggtcttgcgacgacgctcgtactgcagttcaagggcgcgctggcggcgggcgtggtccacggtgctggtgattgtgtcctggttgatatggagggtcttcagctcgtgcttctgcagtgagtccatgcgcggcggcgagaacgagtccagattgttggccgccgacagagaactgcagcagtccgattgcgagtcgatgaaattgctgcagaatgggttttattttgagcggttataaatagctcttggcacggcctcaaaggtcgacctcatcattatttgcactagcactcaccgatagtcgtcgccgaattccaagagacgccgggccgcatctgaatcaaagccctcggaatagttctccgagttgtatttctcttggtagttgtcccacgccgtctccgagatgctgctatgatggtcctcagtgctgagttctgttaaaaaataaatcgtattaacaaattatacgtattaattagggaattgtacaaggattaagagaacaggatgatagttttcagtggaagggaaggtgctttggcaatacctttgagcctggtctgaaccggcttgggtgcttgtgtgagaaacagatagatagagaacacagttgaagtagtgccaatattttgaaatcccctacaggattaccactcacctgcttgttgttcgtcctcgttcatgtagtttgagagggctgctaaagcgcctaacctcgtatcagtagccaataggccagctgtggtgaaggagcccacccggaacttgggtagcatcagctgggtttcccctccctcgccatcggccagtgaaggtactccagaaacgtcgcccttgggactcaaaggagcaactactgcgcctttttgaatgctcagaagggcattggtgaactcctgcagctgctgcgaggacatggactcgcaggacttcatcagtgtctgggtgagatctccacccagttcggaacctgaatcagatttcctgccagccgatgcggccgaaatgcgcttcttcctggccttcctcctcctcaatgagcccttgctatccgccttcttggctgcattgcttcccgttcccgaggaagaagctgcccgcggtcttggtcctggcgaaagcgagtccagggcactctcactgatcgagtgactggccagaccggacggagagttttccactatccgggccgtggttaactgggctgcatccgtagtcaactgggacagacacgagaccgaccatggtctctccgacttgcgacgcgtttgcgatcgctttacaatctttacattcaggctctggttgctgctgccaaagcccaaaggcgtgacgggctgtccaatgggttcagccgatccaccgattctctccgtggaattcccataggaattcgtgctcgtttgcatacatgtggcaatggaatcggtgaagccctccgatgtatccgatcccgcaccattcggtgctcctccgtttactcctgctccagcttggggcaccgagtctgtttcggatgcttctccggaggcctcacagtcatctggcttgcagctgggcaggagctcgtgcgtgtggctccgggtcagcagctgtggggtcgagggctggtgctccagccattcctaaaaatgcattgatatttgttattatttgaaatgagcaattgtgcaggttttgtttgatgaatgggaaaaatatatctattaaaaagggacatttttccattgtaatgagtggtggtttgctattatagctttgatgatttctggatctcgaagggtcttacctccacacgctgcttgatgggatggggcatagtgacctcgcgcttcttgaccgtcgacgagatcttaatgatggaatgtttctgcttggttggcgtcttcagtgcggtctcttgggcgtcgcgcaccaaatgctcggcttccagcaccaactgcttgattgaatcatgcgagaccttgccctgagaaaagagagcgagaggaaaggcggagagtgtgagaagcgagcgagggaaatttgtttagagagcggaaattaatgagcgtgcccaatcggagttgcaagctctaggcggttgattcagtgaagtcgtaaaaagatgactaactaaagtgagactcccctaagagaactgaatgctatcctaaagaatatatatccttattaagcaatatatagtgcaatttaatacactaataacttggataataatattggattgtttttaaatttctactgtaatggtgatcagcctaataggaaatgcctcgcaagagagtcgacttcttatcagcaacgagggaaatactgccaaagctgtgcaagtggtgggagtgcttttccttatcgctgagaacactcttatcgccatttgtcacccattttcagtgcacttcaacgtcattactgtcgagtggatttgaattgattggagtggagtgcagcgggtgggggagtaaagtgtagacttgaatttgccatatatgaacatggccatacaccattgttcttatctagttctgtttatatcgcagcctttccctgcaccttgccactactttttgcacaactcatcaatcaagtaagtaggttgctcacgagtaaatttcttgtacagaaaaggcgttttgtctgacaacagatattatttttacaccatgtgagacattgttttgcagaatctgtagttgagtaacaagcggcaaacaagcgtttgtgtagcaatgttccagactatttaaattccaaaaattctttaaaaaaagggctaaatttccttaaaaagaattcattcactagatacttctaagtagcccgaccaactgataattcgacaaaatcagagcattgcggccttacaagatatcttgttgacacatatgcaaatcaccgaagcgtggctaaatattccagtaccattacgaaatctatttgatatttgggaactatttagtctctcccgggtcaattgaacaatttgaaggttttgtttgaatcgctccgtcagatgtcgcgcacggttttttttttttcagttttgctgcagtttctctacatctgcatctgtatctttatcgcagctactcgaatccgaaactcacttttgccgtcagcggatggttaatctttggcttaatttaattaacaacttcctgcggtgagtgaggcacgcgattggaggtagtttgagagcgactgatgccaaaacggaaacaattttctaatgccgagtgaaaacggcgcttatgttcacggtttgcagcttaaaatgtcaacttacagttacagccagttgcccagtgagcgcgaaaagagcgattgggcgttcgcgataattaaaggcaattattagtgcgagtgcggacggccggccagccaattaagcccaaaactggaaagccacagctccagatacagatacgttcccattcggagtcggattcgtatacaacttcaactccttggcggcagtggctcttagactgtcgtcgtagcgctatctcggtctgcccgtctgagcctgtctcgctcgcacaactttaggccttgacagttgtcgatttggatttcttccttttatttatatttttacccgcacgcaacgtgttttttttttttttttttgttttgaccaaaatctaatcgcgttaattttgttctttggaaaattgaggtcaaatgcttacagttttggcagaactagggcggttatgagcaagtttaaatgtatataatttaaaaatgtaaatattgtaatacctttcaaattagtaattacttcactatttcttcaatttcaatttgatttgtttcttttttccaggcactcacagttttatatctactcagcgggagtggtagcaaagatcacaggtattttgtaaatgttttatttcacgtcaaatcactgttttaatgagttgaactattatgtttgctgtgttttttattttacaattcgaatgctgttttgtatttctcgttgtgttttccatttatttaatgcaaatttcgcaagcaaaataaacacattttatagctgctcttgctctgggctttctattgttttttctagcaattgttcgtcggctggctatttaacttttttgccattatcttggcataaagtccgctccccgatttcgtccgtccgtcggctccaacgttgcgaatcacactgaggctaatgctccgccggtgcctccatcgccactctggagtgcactcactctcgcacttcagcgtggatgtacgagtagtgcggattgctccacgaattaaaataaacctcggaatcaaaatgcgtctgataattgctataatggaagggggaatagcggtgagcagcccgacagctgataagataatgctccgaattgattcggagtcaaaatcagcgagaggagcaggcattggcagtcagatagataggaagcttctgcatttgatttctacttttccattcccattatacttttattatatatttatttcgctcaatttttgtttcgtatctttgctgaacactttaatttgcgggtgggtacaaatcatttgtgcacgtcgataagataagtgaaatgttagttttgctggtatgatttttcttacagtaattaacccgctatgtacatattatacatatatggtcccattttcatgtttctatctaatctcagcagatgtatctccaatttattgataaaaagtgttgacacttttaagttgatccagttttgaatgcattgattaaagtcatacttttgtggcaaagataaatacacttgtctatcagtttttgggcagtgaattatttattatcactgcaataacactaatttaaacgctgtctttgtccatcagtttgccaacttttaatttgcgagttcgtacaaatcatgggtgccccatcgataagatatgaaattgaccaagctctgatctttttcataagatttatttctgctttgaccgacgtcaccgcttttcgttatcttgaaatcagttggttggttgcgccaacttgatatatgggattcgttttttggggttcgggatcaggttcggactccagatcgggttgcgaaaatgcaaaatttgtcaaaattaatcaaggctgcacaagatttcactctcaataaatcaacgcactgcgcgatgcggtgcgctgcactccgagggaaataaggggaaaaccgcctgccctcggctggaaaatggcggtggaaattgcgtgcgacaactgtaaaatgcaaatgggactgcgaaaatgcgcaaacatgttcaaacgctgaccggggaaaagtgagagtgttgactactgccaaacacgttggctagtccaaaacctcagagacgacattgataggcaccgacaaatgatgggagcacctcggcgggagatacggtagatacgcactcctttatctgtgctgcgctgcgctgcactgcatttcccacacctccgcacccaacccaatggaccagctcgcattacactccattacgctcagcaagttgtcagcttggcatgttttaccaccgcatttacacgcacaaaaagtgaccacaaaatatcagtcgggagaaatttgaaacgcacgcaagccgctaaatcaaaacgggggcaggggatcgcaattggaccaccgacatcgatcgatttggcaggccaacgatcgatgggtcgcgctccgaatcgatcatgagtgatagccggttgaagtcggggaaaataatctagaacacaaattcactgattggtaaaaggggtatcccgcggaacttcagatcacggccctttaaagagaaagtctttcccgtagactaagaagattacactagctgccctaggctgacgacgtcgttttgattcccttcttgtccatctagctatattcacttaattattaagtgtgtccaattaataatatgtcattaatcacattggcagtgcacaaaatggctctctcgtgctaatgtctcaatctcattagcaggaagtgccacttcctgcttccatcatatcaataaattatggcttaccttgactggggaaacaagcgtggatccagacacggtggcattgctggcctgggatttcgaggacttggccgatttggccggcgatctcgggggcaagtggcaactggctacagtttctgccgcccaaacggtgaagttgcaagagtccgcgcgactgtacacaccgttgctcatctgtaggagaaaaaatggattttaataacactcatcactaatgtttaattatattcttaaatttaaatgttacagctgccaaatactgtcgagaagacattgcaaacgttatttctgcctataaatctcatgccgttttttgcccagcctgtcccttgtgattgtttcgttttatttcgcctcacgtccgcctgggctcttttcatttgccttcaatgaagaaataaatcacacgttttcaagttaatttcgtactttcccatttttgacgtgctccgctcaatttcccgagcggcggcgatcgtttttcctggaccacgacgtcatgccatgtcggtagtcatcgatcgaggcttcagtctgccgtttgcagcggcaggagtagtcggtgcatgattcgctttcattaacccaactgcttaatcatccgtcgaggtttcccatttattggaaagcctgtggccggcacccagacccagtcccaaaactaaaactacaactaaaaccaaacccgatcccaatcccagtccctcctcccgttcctgcccctcggagttgtggcaaacaaaactcttttattgacacaagtcacagacatggccactagacttgagcacttggcacttgactgactgtgggaacctgtccaaaagtcgagaggaccgaactgaatcgaatcgaacccgatgtctagttctccacaaatgacggcatgaccaagaggatcgcactgcgagggttcttgaagagttgtgcaaaacgttgggcaataaagggttctcttcccgaggttgatttcagagaaaaccgtatagataaggtaatagtgtatacgtgaaccattcacttgacataatatccctgttaccagctggtcaggaaactatattcataatattattattgactataaaagcatttctattatatttatgatagatctagagatcacttacctgctgagatttggtggcgtttccatttgccatatcagcagctgcttcatcgtcacccatcttgatcttggccagatcctcggctgcctcaccctcgttgttgttttgcggctgatgttgcatgctgctgtagcaattgttgttgctaatgatgtgtctgccgtcgatggcattgccattgatttggagctccatctgtgactgcgactgcgattgcgagtggatttgcatctgtagctgggttactcgcgaggtggctgaggtctccgtgagcctgccgttcgagttggagttcgaattcgaatttgaattggaggaggaacaggcgctgctgctgtcgtagttgctgctgtgcagtgttgcaatggatgttgcagttgcggttgctgccgccgtgattgtcgtggcgctgaccagagccaccttgttctccttatcagagtcgtcgctgggcgggagtggtccacccgtggccgtagtcgaggagacggccgtggactgcagaccatccacactcgatgttgctgctgcggcagtcggtgctgcagttgctgctgttgcaacttccaatgttgctgctgctgtcgccgtgtagagccaaccttcgtcgtcgtcatccgttgaggcatcagccgatttcagtatctgtgtggcaggaagacgtcgaatggaaagggaaagggagggaaaacgcaatggaacattaaaatcagcagtaacaaaattcgccaaaggaaagccaactgaagaagaaaccgacgatgaagatgaagtggtagaaaatgaagtttaattagcgttacttgcgcaaaatggcaaattgttgtgccgatgcactgccaactggcaactggcaactggcaacttgcaacgcgatgttgcgctgctgctgctgcacatgagcaacatctttgaaacttcgttcggttgccgacaacgacgccttctccctgactttactgactcttccaactccagcgacttctctcctttgtctttctgctggcaatttatttccatttcgaatggtgacgacctcagcagttgtcaaatgtgggaggaagactggagtattgaaggggagtgctggggaatcaatggaggcggagtaaagtaaagaagttgtagacaagccaggcagacagacaaacaaattaagtctgaatgctgtcagcttaagaaggcgaagtacaagatcttgagaaaatctaatgtaggtaagatattcagcaatactgcttcttttcaaaatcaaaatattttataaataattgggttatttgactttttgctccaaactaagaatttttttttagccctcgaaagaggtaatacgtctgcttttgatcattgtgtttaatgattaatgatccttaagttaatggtgttgtcgtagttgttagtgttgaataatgaagactaccgaataatagaatacaaaagttaattaagaaattgttaggcatgccgctatgaatgtttttagatacacgttagcttataaaaatgacgagctagtgatgcatgctaattatttcagaggatagggctctggaagacttggtagaaaccacggtccatcgatggacgtgaccccaacacctcgcgagtggaacgaatgccaccgatgatcggttgatatgtctgacccgtgaccgagagaaatgcgcgcagagatcgcagagatccgccaccagagaacggtacttacgtcgcctccagctctgcgccgatggatcaggctcggatcatcctcgctctggagatcactgcccgccgcgtttccctgctcgttgtccgtgtccaggtgcttgaaatagaagatcgcacagttcttcgacttgcgattggatcggttgaacttggaggtgtcattgtggtgatgacgcgtcttgcgcagccccaaaggcgacttgttcagctcgtggccgagtccgtgaccgagcccatgaccgtgactggtgtttccatgtgaattgggtgtgattaccgccacggcaatgttcttgccgtgcgctttgttgggcagcattttgttgccgatattgtgatttcgttgctgtagcaacgagttgctgctgctgatattgctgttgctgctctggggcatctcaatgaggttaaggacccttcgggtgctgcccactgttgggggtaatcctcttctgctcaactgctgcacctgctcgaagtcactgctctctgaatccgcctcgaaatccgttagggtggctgtaccactgggattcgggtggttcacctgtctccacgatcgcttggcaatcaggaagtccaccacatcggtgccgatatcaggatcctcgtcctcctcctctagctcttcatcggcctcatcgccgggctgaatgcaagtcaagtgttcggatggttggataagtgttaagtgggtcacacaaagggaagtgggtcgggtttttgtttgggattcacacactcattaaacacatgctctgcccttctagtaatgccaactaaggttttgtatgagtatttgattttggggataggagtgcaaaatgttggatttaatctagccctcaaattcggtttcggtcaaaagtcttgcgtaagatatctcccagaatgttttctattcgtaactagttgtttaagtttctcgattggttcttactgctttttttatggtggccaaaaatatctgcatatagcggagtttgccagatcatttgctaagtcttctgtttttccttttatgatcgggttttcggataacgtttctttacgggttaggttcatgtgggttctttggttagcttgagctgggggttaggataggtcaggctcagaaagttgacaatactatgtgaggcgggggcatgcaactaagctaagaacacaacagaacgacaagtcaaacaaacagtaactacatacatacggaatatgcaaatcattcagacgaaaggggcatctaccatccatcgtggtggtatggcttaccttttgaggtgcaagacaatcgcgtggctgatccgctgacggcgacttcgcttgggatgggacttgctgtgaccgcgactgggattgggtctcatccagtccgcacacaatctgggtagctgcaatctgacagcgctggagaataagttccgcgggggtggccgacttggactcgctgttctctagatcgagatccgagttgacctcgttcagatcgtcctcggtggcttcgccctcgtagccaaaggaatcgtcttcggtgtcctcctcttcgtcctcgtcgtcatccaaaccattctgcaaggagtgagaaaatagatcttagattagccaaattcattaggggtttcggttgctttgattcaataaagttgtgaatacaggcaccaaattttaattgggcaacttgtgtgatcttgatctttctttataagcagctagctacctgggaaaatttgcagaccagtccggtctccttcatttctcatttgctcttcctgtttccatcacgtaacactcttcctcttccatatgctggttaaaattataattgctttcaattgtcgacacacgaagctctcgcatcggatcagcgggtggacatggacagcgacaggctggcaaacagaaaagcagagacagggagacaaactggcaaacacttggccagacagatgtcagataagccaagaggcgagaaagagttggcgtataccctcgccgaatgttagattcgcctggggcctttccaaattgcagctcttttaaaaatttcttctacgaaaaattattataagccaactagagcaatggacaacgctcaactttaaaagttgtcgcatgtatgctggatcttaaaactcttagatttctccatttcaataacttacccattaaatgtgttcagaattattcaagaaagagtaatgaaatcttcgtatttcccaagtttcccatctaattttccattttctttttccatgcccacgcccacacaagcgagtagcggcggtgggtaggcgtctaaagaggccttgatggcatttcaaatatgtttcgctttttaccagaactgctggggaatagaatatacatcccatggcacaacctcaagtgaccttggtccatccgcgagtgctcccccttcccaccattcagcgatctgaactacacacagaaatgttgtcttaacactctataaaataaaactaacgaaattccacaattaacccaagagacctcatccctgacgatcagcaatcagctgtggaatggcttttatggccatcagatgttttggctgggcaatttagtgttttcgccttctcagatttgcgtaattcgcgttgttcgggtaaatgttttcgaacaaatcttgtggaggccgcccgaaggtcgccttaacatctaaagaagcgtgttctccacggacgagatccagcagattatgtggctaattgtccagatgatttatggccgggaattgcttatgcacctcttgtatggcgccatttgattgtttttgtttatggtaaacagaggcagaggcactgggctatcgagcaacaaagaggtgaaatgtgtaaatggaccaggccatcccaagtgttgtaaataaacagggaagtaagagaatgccagacgggccatcaaaagagatgggtaaacaagtagtgggccagccaaaagtgcaaagcgaatctacaaactcaaagagtttttaaaggttaaaaaaaatgtaaatatcacatttttatttcaaaatcatgggcccattctatttcattaatttgtatctttccatatcagtttcatcttcatcaaagggacagagattttactgatctgatctggtttcgaaactttctccaaattagcataacacccgcattttgtgatgcaacgtttgatcgggtaactaattttctcttatttacaactgccctgcgtcacgctttcatctgatttgtttcttcaatcttttaatccagtaaagaaactaattaagtggtacaacttagttgactaaacggtacaaagttgagaacctaaataaccaacaagtctaagccaagaaatccctaagaaatctggttaaagacccgcggactacccacagtgctggatggcataaacatatttatgttcttattatgcaaaagtcggaataggctggaaagaggcttacaaaacctagacaaccatcaagtttcgggcacgccttcttccacttccatctcctccacttaactggaaataaagttcatcttgacgcacttcagcagaactcttattttgagagagggaaagaaaaaggtggagtaacaagtcgttcccgtcgcttagcacctcgtttacgcccagatcttctttagctgaacccacaatccaacttagatttccattccgattcggatctcagcacgcaactcctggccatgtcacaattttcgttgtcacttcagctgggataaactagagcgataagaatcgatgtcagctgagtgaagtgaagtgtgggaaatttcccgacaattgcttctgtctttctatgctttctgtttgaaacttatgaatttctcacacgccggcgattaattatcgttaaacgctgccatatcgtcgatatctggttattatattttcgatcggaggggtggagaggggcaggcgttcattagcatgtgcttgtatgactgtaattatcgtgcaataaaaacgtgagttgcattcgtcagacgtttacttattttccatttgtgccggacttttcgtcagagatatcaaatgcaaagaggtgagtttacgaggtttctggagagttgatcgatgggtttgttttggccagaaagtggagaaagaagtaatgtgcatttcagtttacagagccatcaagtttatggaatacgtttatggcacctttggaggtctattaggcaatttttcaaatatttactaaacgttcgacatgcctccctagattttaaatcattcaatgtcttttttagtgtcattattattggccttcttctttgtgtttagtaacttatttttagaaaccttaaatcgccatcatattattaataaatcgtcatcatcttattaatatacgactccccctcattagcccgtccaattttccgtaagtctagcgaaatttcgcaacaattactcaattcggccacaaaacattcaatgaattttaatccagcggtgacaacggcaacaacaacacagccacatcggcaactccgtccgattcgactgcgagtggaaaaactcccgatggcgcgacaaaattgcagacataaaaacaccaacaatagcaataacatcgccatcggccgcgttgacaacccgcagcacagacaacaacaattggccagccagcaacatgagcagcatgaaaactccaagtcatatggaaagcgggcaacatgccccgccatcgaactccgctcaacccctcatcaagcaccaccaccccctaaaacagcaacaacaactgcagtaacaacccacagcagcgacaatattattactttcattgttgttgctggtgttgctggcgtacggcaaacatttcctggtacagcagccactgggacgtctacaatttagctcaactattacaaatcgcattagaggctaaatttagcaaggcagaggcaagctgcaagctgctagcattcaagtcgctgcattggtcgcagcagcagcaactgttgcggcgtgcaacttccaccagccgtcggccatagtttgcatattttcacttagacacccctgccaattctcgttcttgccgcgtgaccctaatctgcggacagtgcaacatgttgccgcagcactcggggctctataatgaccggaccgatccggcgtgggtgttgcccacgcctcaccagtgtagcccacgcaggagatgctaatgcccgattcctggccacgcaattgttcataatttgcaggttgtttcaggcagctttgcagcttttaacctaatgccatctaaggcaggacaagatacactacaaatcattgcagggaaacattttaaggtgttgctgacagaatgaaaatgaaatattgacaattgcaggcgattttgattcaatgcaaaggcgcgaacagggcaggcaaacaaaagtcgccggttgacatttggcaaatgtcaatttgagtaaggttgctgtgctggcaagcacaataaatcgcatttgaagatgtcgcagttgcgccacacgacaccgcagcaacatgttgctgctctcatttgtttggattgagcgttgggcaactgggactcgactcgactcgactcaattcgattcgattcgattcactattgatccccgaatgccccgactttcccagcagacgatcgatatgggaatgcggtctgttgaaccaacagctgctggcaatttgcttttgttgatcgttcattgtttttgttgttctggcttttctttatggcttttcctggcgatcataaatcaatggcccagaaagccaatgtgtgcgatcgcagatcaaatcagatcgaaaatccccaatcttatccgtgataatgcgctactcctctatcgagttggcctaagataatgaagcatttaggtggcagcgatcattagtcgggggggtaattgaaaacacggacaaacgcgagctccacagaaaggaaaccccaaggaatattacgccgcaatctgtcattatccaagccagaaactagagcagctaacggtttagcttagtctgcattataaaaccatttttagagccacccaactttttctgcggtggctcagttttccattacatgtggcccagtttttgtgcaggccattaaagtgtttttttttttttttttttaaataaggggaggctaatttactaaggagaatccgcctgaaacaaatataacgatttcaaaatatccaattgtttgtcttccgcgtttaatctgaaattgtgggtgtgtccacgccttgtttccacagattttacacaattattgtgatttaaacggagctgctttccgggcacaccagcaacatgcgccatgcagcaagcaacctgcaacccgcaacgagcaacttgcaactcgcaacatgtgtaagcaatcatcatgcataaattgcagttccgattcgattccgacgtgactgccagcaaaatggctggccactcccctccgccaccaattgtcaattattatgcgatttgcattcactcattttaaagcctggttttgtggttcacagcaaagggggaaacaaagaaatttgcatatttcgtttgcagatatattttctttcgttttttgggtgtggacttgcagactggtagcaagtttggggattgatttatgtcggtatttgattgatgtctgctggttagcaaaccactttgctgttgttgcactgatgatggccaattaagttcataaatatttgatcatacaccattgatggacgctaattggtacatgaaaatgctggccaattagtaatactagaaaaatgatgacagctccaaggccccaagaagtcaacttgatttccgcaaagtctcccactcgacgaatcccccgatcgtttccctttcagccgacagatgtttcccagcctccagtgcaaccttcaactcgctaaaaagcagccagccaaaggtctcgtggtcccagtcggctaaacaaacacaatttcccaagaataaacaacacaatccaagggaaaaagaggaggttcaggcgagatataataacaataataacaactataatggggcataattcaatgcaattcaactgcatttgtttattgaacttcttctggctgccacttgcaacatgttgccagagaccaagtgtgggaaacaaagagaagccgtggaaaagatgcaaaggaaaaagcacatagctccgagtaggaaaaacaaaaagtgagtaagaaagagagttgcctattattgcctagatttatttggaaacactgtctttttgtaagggtatcttagaaatcggcgaacacaagccatcctcttttctgggttttcaaaagttcaggcacgtcgtagatttgatttggtttatttccatttgccctgctctgctcatttcggtcactttcatttggtttcggtgctgatttccgaactgatttcggagtttaccgtcttgccggtgacttttctgaactctgcagttgggggagcataaatttcacttttacttttcgcagtttctgatttttatattgccatagatataaatgcatttctttatggcagctacttaagtttaaccccactgatgaagaagcggggaagtagttagggtgcaagccgtgagtttattacgacatttgttaaatgggggcaccgagagaaatacttttagatgaagatcaggtcggggatttagccatatggtatgcgctattgaaatgccaccttatgtagatcacattttctctgagtgcaagcacttgtgacatttccgtctgtccctcaattttgtacgttagttcggtttcaaagcttcgcgatcgtttaaagtccagccatggcctgaatggctcagctaatctcctttgaccagaaattggatgcatggcaaatgtggagcagcgaattccccccgcgggcaaaactgaactgagctgaatgtggccaggaaagtgttgaaaattgccaactggatcggcccacatagagattggccacggacggatcctggggggatgcaaattattgcatcagcgaggcagtggaaaatgaaattgtttgtgcggcaacgaggaaaatctaggaggcggggcacggaaggggtggataaaagcccgctcgaggcgaaatcaaatgaagcggttcacaaagcaaaaaaaaaaaaaaggttaactgccccacagccggaggtctggcgataggtgcgggaagaaagcccagtgggtcagaagacgcctctttcagtgcgtgtcttgaatgaattatttgtaccacaaagcccgggcacgagaccagagcattttgcgcttcctactccgcaaattacccacaattaagaggggtgcatgaaaaacgctttccaattaccagacaaagagaggggcagagaactttaaccaggaagcgcttagagctgcgaggaggatccaacccatccatctgccatccacacccgttgttggcaggaaactaggccaacgtgtctataaggcaaaattgactttcactggatctagacacgaaacggatgccacaagaggaacagaacagatcggcgagctcgaaggggaatggaactagcagatggaaagagagaggaaaaggaagtgctcagcagctgtgggggatctgtaagccaagcgggctaagctatatggcattcaaacactcttttatactggaacattcttcactttcagttctgtcttcttcccatcgaacaggaaccaagcagtcacaccttggtgagccaaccaacacaccacccaggcgaaactctttcatctttctcgctagttcgtctcactattcaatcgcaatgcaatgtgcacttcagcgctttcccaatacattttttgtcgcattgccggcattttcactaaatgaattaattaaatcactcgcaaccgagttatactaaaacgtaattagaaatttccacaattggtaatgcgaggcgacgaacggcgaactagctggcagggaaagcggcgccaaatgcattttctttctttccaagaatccctggcatctcgaatgcatttcccttgctggctgggagtttctttttttttttttttttactgtcagcaagataatccaaagtgacaaaagtcgaaggcagaccaagggcactggctgcagaggttattttcggaaaatccctaatcgattcaagttcatgtgaatgagccataaattagggggatatatgttggatgttggtttcgatactaggtatcgaatggtaaggtattaacggaaatatttatggtcttatttttaatgtatgatagatggaataaaatcagtgcatttagtagcttttgaaaacttaccgctgcggaactgcgtttcctgagcagattatccaggcacaattgcagttcgaacgccttcagatacaacagatggtagcgatccctaagtcgctccaagttgccctcccccttcttggatgggtgggtgctacttgacggcggggccgctgctgcggttccaatgggtgtggtcaccggatcggaagcgaaaccactgctcaggctgctcgactttgtggccgattcgctggttgactcactggagcagttgctggtcaatgaggcgggttgctgactcgacagttgctgctgctgttggagttgctgttccttttcggcggctcgaatgcaagagctcaccactcgagcgtgtgatgcaatttcatggtacaacacctggaatcaaaaagagagcgcacacaaaaaagggaaattaaaaaggtgctcgttgagttcaacttatgtggctaacatgacgtatacttgatatgcccaggctgctaattgattaggcaaacaatgcccgaaagggaagggttggaggtgaaagggtggagttgcttgcaagagaaaggcttggcgcaagggatattgttacaaagtgtcccaaaccaccttaaagttatgttgaaaatgagcgttattgtttatgaactttagttaactccttatttaaaccaataaacacttggctttccgttaagccaaaattttaatgccacattatctaaatacaagatttcatcctcccattgggaaatttttccaattcctgcaacagcatttaccgcccatctgcagcgatatggcatcgctcatttgtcattttaacagctgccgggccttggctttatccccattcaaacccatccgcatctttatcctcctccaggcaaaggtcaagctggaaaagtcccacgcattgcataagctctggcattgtttcatgattaatcacacagaaaggggagaaaagaaagattttccgcacagagcgatattcaatttatcaaacatcaagaaaataattacaagacaattgacgccaaggggtcagaaggggaaaggtgggcgtgacacccagtgacacccacacatgcgaggcatggaaactcccaaacgggcttccacaatctggacattgatctccatacaaacagtttaacccggcgaactcttgcatcactactgccgacaaaatgtgcaaaatcaacaaaaggtgcgcagagttgaaattagaaatcgataagttaggggaaaagtaggcgcttttagacaacaacctcttcaccccaaagtgttcaaagtgttcaaaagcacggacatttatttatggccccggacacatccttactcaaatcgcagcctagagcccctcgatcgaacccaaaacgaaacccaatgcaaacatacattttcattttcattttcacctgcttgagatcttcattgaactccaaatcgttgactccctttcggcactggcaaattgaaatgtcacacagattggggttcacttaaagcaatggcaaatttatgaaaatgaattccctggacagacagcttagcttgccttcttccccctttcctcctcatcatgctcttgatttacctttagtaatggccaaattgacactcaaaggcagctgccacaaaacctctcgcaaagtcacctcttgcaactccactctgccattttccgtttgaagaatgatccgagaaagcgacggcgctgcgagaaagatttatggggaagccttggcaaatcttccccctcccttggagacggggaaaagcgggaaagttttgacaggctgcctgggatttttctccttttttcggtgggttacttttaccgccatcatatatttctgtgcagtaaatttaattatgttgaaggaattttaataatttctttgagttgaaggctgcagggagtttgtcaaattttaaaatgtatttttcaaacgccattttaggaccaaagtcaagccatgcaattttctgcatcaaattgttttgcattatgattttatcattagagctaattataaggctgcagaaacaaaagaattctgaggggcacacagactcgactcattgtcagaggcttggcctgcttgcttaggtaaatagataaataagcatagcttaaccaagtcgagtcatcgaagaagagcccccctggcacagaacaaactttggaaatagatggcaagtaagacctcatcgcaggaggagtgggagtggagtgcaggcagcaaaacgaggaggatcaggagaggcaggtgtgggttgcttatttgcgatacttgaggctcattaccagatccgaagaccacagaccgaagaaccatagacccggcagagtcgaagcccaaacccaaccctggtgtaaccagccaaaaccacaacattgtgtcttttttggaggaacgcctttctctttgtttcggtctcggctccacaaccgaaaaccaagcgatccgggcccaaactgaggtgaaccactcccaatcttggcacgactctgaggtctgggcattgccttaatgcatttgccgccacccacccacttggggagcgctggaaatatgagaatttagaatgcagaactttatgcaaaattcgtgactaatctccgccggctgaacttgaggagcagccgttcattttattatttttattattttctgcgcgccagactcttgagaggtctcaagattattggcgagcgtaggaaataataaaagaaatcagggaaaacaaattgaagtcagtgcgaagttctccagattgaaatctgatgcaaaaaaaaaaaataataataactgcacgaacgaatggcaagaaaagtgaatgtgttggcctacagggggtgtgaaagtgctgggagaaaccctccatttcagagcatgaatggacagaaattgcgaatgttaaacaagagcctccaataggttccaggaactgaaggcgaatccaaaaggttattgatttagcacgcatcaaaaagcttgccattttcacaggcgattttgccgaagattaatttatttccttaccaactcaaatctttcaaatctttctatgattaatactcttgttgaaacattgcatttttcttaacgcattaaaaaattagttttccccttgactttttattgccagctggctaattgtttttctcagccgaatctgtctatttttctcaacttagtcatgcgaattgcaacacatttttaggcactattggaattcactgtgtcttccaaaagtctgtctgccgaattacattttccctgcttttctttgccagtatatgcgaaatgttcatcgcccctcggaatcggtcaaaataagttcctctaatgcgttggctatttttaccagccgcaactaaatagaaactgtgtgctaggcgcgtcgcgtatctatatctctatatctcggatgtctgcggcccaggttcgttgactcagagagactgttgttgtagttcggcgtggttgagaatgaccaaagaattgagtaatcggcttctgctttgggctatatatatagtacaatatgtgtaaaaaaaaaaaaaaaaagcaacaatggcccaccggatcgtacattcattatcggaaatgtcagtgcgtgacctcgaccgcgtttttagaattttacaatttgggtttacattttattggctggcttgctgtcccaggcaacgccttcagatattgtttaattcaccagaggtcgattatgaatagaatcttaagaaaagacattatttagtgtcttgcaacagtggctattaaagtcttaaaaggcgtggtcaaaacgtgggtaagtcatttgctcaagtattatgaataatgtatgtatttatgtttatagaactaatacgtgctataagaagctgttaaggataaaaagtaatactaagaatgcaaaaaatcctcttaagcctatcaaattgacataaatctcttcgtagaagaaaccaaatttatagtcaatatttttgaagcagtaacacgacaacaacccgaattccacccagaaatgtattatagagaacatttccaagatgtcacataaattgggaacgcacgagcaaaaaataaattgtctttttgtacgttttctattcggttcctttttttttttctttttgcaaacatttttatgtgaagtagtcacgacatttggaacacttccaaatcggcctaaaaatagagttcaacgaaatagaattagacgaaaatcaggcagcgactctaattacccaagaaatctgggagatgggaagggaggagagagcgttgataaatacaaacggaaaggggaagacagacaaattgacaaagtccgggaaaaggagatgaagatgctctagagatgggcttttccaggttgaaagacgaccccgaaagtgcaattaatcagctgacccaaaaaaccactcacagttctccagtttccactagaggaattgatgtcgtcgacgtgccgtgaccaaatgcatcgagaattatctcggacgggcgggtaaacctctttgaagatccccagatcccgcgaatgtgtgaagttaagacggtagacgcagttagagcccgacctggcctattgagtaacaagcatcggacaaggagttttgggttagcaggggcttttgattatgaatctgcttctgagtctgaacaccgttgacataatcacgtccgagtgtcacgttcaactcttcgccggcgacaaagatgatggccggaatcccgtctcgtctcgcctcttgtctttgttggcatcacgttcttgggtcggagccatgggccagagaacaagtttgccgctttgtcgtgaaaatctctgtgctcattgtggtctcattagaaacatgttacatggaaactgattacgaaattactcaactgcctctggccgaggccagtttaactgttttccgtgattattttcagtgaaattagggaaaaacatattttgatacgaatacggtgtgaaaaaaatctatttcaatccgctagtgaaaagtgcttttcaatgaaaagccttaccgcttttttcaataaagaaactttctattcaagtattgaactctttaaaatatttcaaatctttcattaaatatcaatgcgtttccttatctgacgaaagttcaatgagctcgtaaatcgatcttaaatataatcgagatcaataacgaacttaaccccaattaattctgtaagcccctagctgatagttttgatgattccccttatcttttgacaaattctgttctcacttcatttcgccctttctgtaatctcttaactagttgaccttctcagctaagccctatctctactgaattaaatccgcccgcggaaaaactgtcgctggttcaaataaccttcaatcgagtagaacagcaacgtaacaattaacgataattttcctaagcaaatgacgcagctcaagctttggaatgaggggcacaactcaccgaaaattgccttgcccctcaaaaaagcgaaaccgaaccaatcgaaattgttcgattaattgcacataattggatgccgattgagatgacacgatctctggctaattagcgctaaactgaaaccgaaatcaagataatttaccattataaacatttgcttgccatggaatctcacatggcaatttctgtcctctctctgggtttttgacccaagtgaactgtcaaatattgtgaaaatgcgtcattggtatccatctgcatgggaaacgtcattggcaaatgcatttcctcgccagttttcctcctgtcttgcctcgatttccatttttggccacggcttagcgcgatttggaaatcaatcatggaatatgcccgccattaacaattggatttgaaatcgaaatcggatttgtattagctacatgtgtacatgcctgtattgatcgtcggttggagcggcaaacaattggcaatttgttgttgatttttcctcaataattcaaaatatttgatttactttcgcctcgtgccgcagtggacatgttttattggattttgccgatggccccagacccgaaatggagtagcggaaaaaatccagttcactttcggctctggagagattctccctcgttcacccagatattcaagcgtaaatttgacaccactatagtgaacttttttgtgtggtctccatctccactatccgattaccaaacttggccgtctcattaacactttttggacttctccatcttcgtctgcttgaagtgcaattaagatgctggctgacatcgaatggaaaccgataaaaaaaaaaaacagggtacactacgatgcgggagacaacagacaaggtcatgaatttggttacaatttgatttgtgggggtgtggcggtgggcggaatatcgctgctaaaggctgtgctctgttcactgggaaagggttaacccccacttggccacctccttaaaaccccctaaattgagcaaccaaatggcgggcttggccaatgaaatgttcattacgctactttcattcgatttttggttcggctttgttttctttttttctggttttttgaccagaggcaattaaaatgagattattaccaacggttttgcctgtttttcttctcttttgtgatcaatgtagtacagggaaattcagttaccgctaaacctcaggcccaaacccaaagcagaaataaaaagcccaaagtaagcccctcctaacgagttgttaattgtgtaataaatagaaagctgaaagcggcaatggaacctgaaacgatatggctgagggataggaaaagcggcagctggtaatcagtgttgtaataattgaaatttaatactggaaaatgtgtgataagtagaagcaaaaccccgaagagcattaaactgctgaacaacacaactgataagtatatatgaaaaatgattgcaaatatctacacacagcctagtaaatggttacatacgtatcaatcccctctttgttagtcagttgcttctctatggaaataaagttacacagttaatccctccttcaaaccccaatccaaagagacccctttggcaaaccattccaatgacatttaaccatattgagtggccataaaagacaaatccccatacccataattacgggccgcagctgccatagaaagatctaccaactcgagataaagcaatagtaataaaaacaactgaataatgccaacccgaggggcaaaaaggaaacaaattaaaatctaacagatgagaaatggcaaacaaatttttggtgaattcgttaacatagcaaatgagtgtggtccggggattcgccttttttctggcaaggggtgtatccttaggcaaacaacgacaacaacatgggccttttgaagatccgcgtcagcagcaacaatgaaagctttgcctcacttcactttcactatcgccagtccgcttggcagatgaacatgcatcgcatcgaccccatccgatccgatcccaagttttcccgccattacgacacctcaatttgcgatggccccagcttcccatgcccagaagccatgaaaatctgaacgaaaaaagcacacggaggagccacctcctgcagccgccagctcctcccccttttttggtgggcactccgactcattaggccccaaacaagttcataactctggggtgcagggtcaggccgagacacgagcacagtgctgccgaaaagtaaacgaaccggcgatgatgacgatgttgtttggacatgtgagcggagccacctgcaagcacgatccaaaattgatttttaaaaaatcgccctcctcctcctcctcctcctcctcttttttatctcttcatcccaaagggtggagtacaaagtaaaagttcaacttgagtttaacctcccgccgcttggatttccatggcttcataagccccctcttcctttgacgtttttggtcagggaaacactttcctcagaccgatcaatcgatcgatcgtccgatggttcgattcagatgattatgaatctttcagggaacgtgattgctaccgcggcagcgaaatcggttaacctcggcgacattatttaatcaaccgcaaaacaattttcacggggcgttaataatcatcgttaaaggcggcgggttcaacaactttaggtgatgataagaaaaggaaatgctgaagcagtggcaaactcaaatttaatatataattagatcaatatacaactgcatatcatagagaataaaactatgaaactgtgtttcctccaaactttctcctccagagatttctgaatttacacaaagcctattttgtgaatttgtcaacgtctccctcgggagtgaaagttccattgatcttccttagagttttagtgccaccgccaccaccaccgcaggcacaaacgaacttattcaacgcaattgatttcacgcaataaacgccctcgtctcgtccccacacatcagcacctccttagacgaagcctcccccggcttttccactgcattctccaccgtgctccagtccgagttcgtaaagactcgacgcggctggaaataaagccaatatttattgtcaattcagcaatcggcgaaaaactttattagcaatttgccaatttgaataaaacgaagcgaaccagacgagacatgggccagccgtcgcatgagggagcaactcgttggcagaattaagtggaggagtagtggctggagttggggataatacacgcccatacgcctaaaattttggcgaaggcagttgccaaatagcagtaacaagtggcataaacaatcgcaacctcacctttaatatcttgtggcattgtgttcaataaattattattgccgttctaaaaataagcaaatactaagatcgaaaaacagataggtccgtatgcattgatcattagttggggaagagaacaaactgccacaacaagttgccatggtaattcgcatcagcaacattttcatgatccctacgatgatgggctctcgatcgacctgtgataaagacaaacatggccatcccagagttcgtcgcaaccgcagagcatagcatccccgccagatcccgagctcattccgttcagctgcgcattcgagaaatgccaagaagcataaacacagagatccacagatcgcagtgggcccctcgaatctacccattcccttatttcggctccactctcgttggtttcccatctgtcggttggtcggtcgggtcttccgactggactgctgtcagattgtgtatctctgacttttgctgttgctgtctgtcaaaggcaaaaagtgcatttcgatattggaaacaattcgaactttgttaatgctgaactttttccctcgccgctcattttgttttgttttgtttcgtttgttttggttttgttttttgccgtggactctcttccggcagtgttacaatgtttttgctgcatcggtttactcgctgctgttgtgtttctcctctatgttgaaggctgtcaaagagattttgtctcggcgatttgcagtttgatatgccagccaaaaggtttcccctcccccctcctttccaggcttttcttttcttattttcttctctatttccgccagttcgcgattgagtcacatcacgacttttggcaccttgcctcgccatttgcatttcttcgcacctggcttgctgacttcactttcgtggcctgggagtgggaatcttctcggtgaacccaagctgctgcacctaaccctcatatttgtacaatccttacgtgacaatggcggcgaccgagcggggtcattatcataaaatcgccacgtgatcaagtcggcggtgacaacggaggcaaactgaattttcctgcgcatggtgtttaataaacagcacgagaggtggcaggactttctaatataaacatgatcatggtgatcatggtgtgttatcactgaagaagttgggacagaaacctataactctgatcatcttcccctcaccactttctcgagaccaatcgatattacgtgtacccaaaggcgatccaaaagtaaatgacaacaattaaactgcacttttaaaaggaaactgaaacagagaaagccaatgaatggagacacgaatgaatgttaattatgaaatgaaatttcaaaaatttcaacagtccgaaataaatccttaatctcggccatcatcgccaaaacttaaaaaaaaaaaaactgccaattggcaaatgtatgcatggctgtctgcatttttgttcggtttcgtttttaaattgccatgaaaaattaaaaattgcacgcaatgccaaaacggtgaaaaataatggcaaatatgaacgggcaaatattgttgatagtttcggacctgagaaatggcaactttaattgcggaaacaaatcaacggaaaaccaatggaaattgctccttttttggcaaaaacttacgtaaccttggcggtcatacatggttagagttatgagtgcagtcagtcataccaaggactaatgtctgcgattcttacctagaaagagaagaaaaaaaaaggggaaaagtgagttagtggtgacacaatttcaaatgaaatttatggtgacattaggggaaaacaacttctataaatatattatttatggctaaatagggaagtgagacaacaaatgatttgtttggcttagtggggctggggcttcaatttgggattgaaatgttgcgggtgggtggcccacaaatccacaaattgacagctctcaagtagaagttttccacacacatacatgggaaatcttcaactcaagtggagcccgaaaaaatttagtcggggacaggggtggtttgttatgctaattgaaaagcgaacgagaaaagcttttccacttaactgggaaatttatgtatcaacagagagtgaaggggtcgggggcaaagaaaacttttcacccaattttctgcctcgtgacattcgcgtgggtgtgtttgtgggcggagtgcagtgaagtggagtgggaaaatagtggaaggcgctgacggaaagggggaagaaaatcggggacttgggcacgcgacgaattcggtcgattggcctgcggtttttcatatctctactcgctctctgtttcactcacatttctgtgcattgccgatggcctgatttttgtggaatgcatttcccagtcgatagaaagttcctacacataatgtgactggcggaagaaatcgataacaaacaacaaactttgccccacattgcccagacgaaatcgataagataaagagtttgtttggagttggaagcttactttcattgtgcttggccagcgctttattatctgtaggcataaatcatcatatgctacgatatcagggtcacaaaagtcagccatatatggaatattagttcgagaatagtgggtaattaattggagaaattaatttaatttattggggcctttaatggcttgatgatgctcagtcttttcattttctcagccgaattcaaatagaaaaatctgtttactatacaccccacactccacacaacatttttgccgccctgatgcgctccaatggattggcaaactcctaaaaatattacgaatttatagttacaccagcagagacagaaagacagtgaaaagggggaaaaacttggacaagtagagtgagacattcccgcatggctgagacacatgaatgggaaggagaaaaagcgcaagtggaaatatgcaaattgtttatgtaaacaggggaagctccgaggcaaggccgcaagtaggaaatgcccggaaaatgaacgggtggcatcgacatagacatcggtcatgcatgagtgggtggccagagaggtctttgacccagctatcagcggtctaagagcatatttccagggtgaaaccatgtccaactcacagcaggataacgaccgaaggatgatgctaactgcactcgagatcaaaggttaacagcaactaataacttgaagctgcacaaattgtcagcagcaaatttgaatgccatttcatggcctgtcaatcaatttgggagaaatcgagggaaacaacaagcagtgaagcccatgatttttttggcagctagggaaaatgcttttttttttttttttttttgacagggtttcggtttccccattctgtgtgagcattttcgtttgtgcgactccgttttcgccacctcggttgaaaggttaacataatattttttgattgcatttcaatttttgcacattggccataaatcttgcgcaagtggtaaaaattaaaagtcataaattacggtagaagacaaaccgcaattcccattccgatactcagtcccccggctccgccaatttcaactgctgcgactgtgcaattgcaattgcaactgcaattgccattgcaactttcaatgcaagcggcgtcgccggggcaataaaattcaattttttggccactttaattacgccgatccgtaaatagagtcaaagtttaccaaaaagagctaacagcggatgacaaccgaccagttggcccagtgggtggcaaacgactttttaattgaaattacatggctgcgagcgattccctgcaggaatttttcaagcaaccgcgcagaaggatggaatctcatttggcgtagtgaattgaattaaaagtataagcggcatttggaatgctaaagccaatcaatagatttgaaatatataatttaatatccctttatatcatttagtatttttaaaacctagaaaaatgttaagaacggagttctcagagatctataacttgttctacttctcacattcttccctctcgaaaaacaaatgttacacatgtcagctgctccaaacaagataattccgtttctcccttttatgtgggtagagctttcagtgctgcgtgtttttggagatcggcgacatgggcttaattattttttaaatgatttcccaacagtccgttgtacctacaatgttgtgtgtttttttcagcccacagccacagacgaattcaagggaatacgaacacatgtaaggcaagcttcgagacccaagaccccgatccaagacccagacccagaccaagcctcaatctattgttcggggagtaatgacgcccccacagaatgggaaatggttacccgggttgcgaaggcacaaattaatctctgccttttccgaactcctagttgcgtttgaagtgataacaggcataataaagttttcaacactctatggggatcgatggggactgggagctgactatctgcccacagatgcgagtacaacatgcaacattcgaggacggtatgggatgggatggccaccgaaccatcttagaccatcccattccaaatccaatcgcagcaatcccattccatgacgttgtcatttgggattgcgtgacgatggcgcatttctctcaaggaatcaaattgaatcttcgttttgggtgcttgaattcaaattgatgagtttgatggttttataaatgtctgaaaaacgttttggctttcgaatgagagaaatcttcgcttaatttaagagctttactgtcttacataacagaaggagtcctgaactttggatcaaccttttgccgacaatcctcggctgcaactacaaattatcgtaaatttttttttttttttgagcagctcataaattaaagttgcgcctgaaccgcacccgtccatcaatttttatttgcgccttcaacttgagatgttcaatttttcggggcttgtctgccggaaaactgatattgttgcgcagataatgcgaggatgggacgtcgttgtctgtttggcaattcaagagcatcgcgattagacaatataaatacaaagtaaaaggagaggttgtggctgcattatggtgatgatgtgcaggcaggagaaagtctgaaactagaaccaaggcgtgcatctctaggtttttgagtagaaacaagcggatgccgcccacagtttcggagtagtaaataaatgaattccccttctaaagcctccactcaaaatgatgagttgccacccacctaatgttgccaactttcccatacccatactcgttttcaaatacatttttaattacccgaaactctggtgtccggttttatttaagttgttgttaaatgctgtttaccaattttcccagtttattaaattaaccggaaagctctttaaaaacaaaaaaaaaaaaaaataataataattatggaagacaatgaaaaaagagtttcaattaccaaactacaagactgagaaacaggtggttaaagctcgactctcccgttgagcttgctcatttgacaggatagcaattttcacagcccccgaccccttttcccagccacgcccacatttacaatggcgcgtgaaaattttattgcgattgttgttaagataattgtcggtgcaccagcagcccgaatctcatttccgaccgtctccgatctggtcacgttcgcgggattctgcctgggaaattgggaaatcaggaaaatgacacccatggcgttccgcgccggaagagattgctctcggcgatccttcatcggtttcctcattacggaaaattaccctggtcccaaaaagatcgctactcgcaccaaatccagtagctccaactaaactataatccacactttgcccagaaattgggttggaaattggattcggtgtggtaatcatggcaaatgggggttccagagcaatttgttcttgttagtggactccagaatgacggaggattgggtgtgttttacacctctaatccgcggcaaggccaaatgtcagttttcattggcaaagacctgcaatttttagggcttctcatagaggaacgccttcaagatagcttgagctgccagccatttctttcaccaaagtaggctggtcacaacggcttgcattcaaatcccattccaaagaattgtagtctgcaatttaattttctcactaaaagtctcttattaagtgttgtagcactataaatagttctcataaaattgtgctccttttttaaccacaaaattttctggcctttcagtgttcccaaagattgttttcacactcgggctaaatggaaatgcttttcaactttgcgtttccgcatgcactttttcgcgcaaatatttcaagtggaaatgcgtggtgagagggcggagccacatgccgcagaaaatcgcgcgtgaactgttcacttttttcacttggcatagttcatttccgggtttttcttttatagacctccctcaattatgcaaacgaatttgtgaaaattgaggggaattaaggtgaggcaaactcatcatttagtttgagcagtttttgggcttcctttgagacaagtacgtctcctctttgcataattaggtgacctaagaagaagaggggaagctctaataggaggcttaaggattgaaggttccttggttcagggctatttgcatacggttgaaactaagtctaaattgatacgagaattggctggggaaatatggtgaaagccaattgccagtgtcttcttcatcgtattatgtagtgtatggtggctttaaggggctttggcgttcggaaagacctccagagtgggaggtgtcgacaggggttaaccgaattaatttcccattcagtcaccgcttagaaagatgcccccgagcagataatcgaaaccccagagtccgcgaagcgaagaaagacttttgcatgacttttacttggtctccaaaagcaaacagtggatttgtgtaccctattttaagtttagtcagctgagtcagatttttgtagataaataaaagattggcgcatgaaccttagtttgatcacagtcatattttgataatgtatatcaaccactcttagtaacttattggcctaatctaagttgaaatagcctcgatcgtagggtatttaacttttcgatctcagccgggtggaattcctttgcagttgcgatttctggtttgtcttggctcaatttggtgatgcggcggggttatcaaagccccaacatcttccaaaaatgcaaaagtaatgttatgcttgggggcggatccgaggggtattttccagcttttcagttgcctggtgttgacttttctttaatggcttccgttgaacttggggaggtctccagccttccagtcaccgcggcatcggaaaagcaaatgcagccactgcagcagctcagcacaaaggaaaaacagctgggggaaaaactttgcccggcggcgaaggtcacgaacgtcaagtgcgtttttcatgcaggcgtggctgggcggaaaaggaggaggcagagactttcgggggatccccggggcacgtgactttttttggtcaggtgggtaattaagcgaaagagccaaacatttggtcaacgccgaaggcggcaatgaacttttgcccgccacacacaagaaatgcattacggataagttgcatcacctggtgacggaacgaatttccacagctcttctgcactctcgattggttttcaccgttttcctgaactaactaaatgctaggaagggagaaactccaatttgagaacaacagaaacaataaagaaaaaaacgcataaagggaaattgttttctgtgtttatggatggaaaaactccatgtagttattgtcggtggtgcaaagtgcaggcaggtggttaaaaggggaagggagaaaactcggatacggagcgcaaatgaaaacccggtgaattggaacgaaagcatttcgtgaaggagaaacgaaggcggtctgtggtcgtacttctagttctgtctctggccaactgaaaacggctaatggtaatggaatggaaatggtaattgcagcgggttggtttcgagcatgataataagtgtagcatgtgctggagattgttttgggcggatcctagccggtgaattgagagcggaaaatggggtgcttagttcaaaatttggttattattatatgttgtgatcagatcacaaatgattcccttccttgggaaacacgttccaacatcaatcactcttttgatacctgtcagcacaggctgcagttttcggaaagcatttcataattaaaaatccaatattaagtgttgctttggtgaataaatcaatatagctagtagctagtttgtagttctgacatttatcctattttttctattataccacttgttcagacctttcagatcttctcgtgtcttgtatcctcctcgctcctcctcgttttagtttcacccctgggaccaaatgcatgaatcctccctctagtagcagctgtttcatccgtacattcccccattagataactgccacaatacgaatttattatttggttgttttagctgagacaaatcaacgcattgcatctcgaattacagcatgaatttcacggctgagggcgggagatctattgggaacccgctttatggatgtcattacgctgcttcggtaagtgtgaccacacaaaacacaactgacacaaaaactgggttaattagtattgcctcatacctcatagcaagtactaaaccggcacagtccctagccagatgatatccgcagtagtccaaattaaacccgtttgctcttcacttcgttccgctccgcagttgcaagttgctgtagtttccggtcgaattttggatttttattattactattattttttttttttttaaacttttttttattgttttgagttgaactttaatttgaattagtttgacgagggaaaactaagctgccttaagtgcccataccttatcgggtgtatgtatttgccaccctcggtctcgtttccctacttcctcactgaccagacacgccatatttcatgaccataatgaggcggtatcccttcggaaaatacgtggcttatgtgaccaaatgcaggtgccgtttgttaggcgacgcagaaattttaatgatccacttaatttgatttccaccacggttgtaattaccgcttatgtgtttgcttttatttatattgattttctgatgtgcagataaacaaatgcaatcaaagttgataaaaatacaaacaagatgtggaatcgaagtcaaaacgaaggaaaccctatttatttgaatcatgcaggagaattagccaggacggagaaaaaaaaaacaagctcaaatgaaaaaaaaaaaaaaaaaaaaaaaatattccagatcacatcagtgtggtacccttagtacatttttgacacaaacttgacagtgacattttagttatgtgtatcagtcgagcagggctctttaccatgagataataattacgtgatctacatcctctgagaggcgacagtgatcggcgagaatcatgactgacgcgagctactttaacttttggatgccacaagggagtcgctttagggtttgactacctcccgacaattaatgcctcaaaacttgacatggcgaaactggaacaatctctcctcgggtaacccccagcccgcttcgcttctccttttgaagccgtgccgcaatttgcaaatgaagtaaacggaaaaagaaaaaacaaagagcgtctcttgcaacggtataattaagttggcctcatcagccatttacggcttttggtctacagaggcagaaacaaacgatcgcgttttgtggcacagaccctcagtttttgccttcccctgttttatgctgttttgcaagcggaactgggatcttggaactttccaccgcaagacacagcgccaaaagcacagaaaaaactgttcttggtcttaacgaaattggtttgtttatggccataatgcggccggccattgtttgtctaattagattttgaaagcaaaggcacgcaaatcgagtcccagtccaattcgaacagttatgacagatcgcttgtgcttgtggttgtgcaactactatgactatatatctcgatctcgctttgtcggcaaatacccaccgattttcccccgccaatcacataatgctcgaaaattcgggctttgcatcgatagacatttaaaagccgcagcagcagcagcgctgcgctggaaaaacaaaattgttttcttggaatttttctattcgcgtttttgcggtttggccaacaaaaggcttggcccggccgagacaattaagccaaacgaaatacttacgagtgctcataagaaatattcataggtaaaaatactttggactttggcttacctgcaacgagagaaaatttcaaagaattttattagttgacttttctttttttgtcggaaggtcattaaaattagtgcgcttttgaactttgctacacacttcgaagcagatgaagagtcgtaaacttggaataagtaggagaagaacaaacttaaaagggggcataagagttccgaagtcggcgacaaagttgagtgaaattttacgatgtcactgggccagtttatggggcctagttttattttagtttaattaatgcttgagtctagagcaaatatacagctaatttgatgatgatgtgatagcaagagagtggagccatgtaaaactccaaaaccagagaccatccaacgcccacaaatgtggttaccatattactactatgatttaagaccatccattttatgtgcgatatcttcgttttaaatcgtacagctaaacccttaaccccgttttgataaaccggattaagactcgtaaaactaattgtgtattactctaagaaacaattaaccgaatgaaagttgttgtttcagggtattaaatcgtcgcaatccacaatttcatagctaataaaccgagtttacacctggtttagcatcagcatacaatttccaatttatgttgaccacatgaatcgttaaaatcttctgtaacataaaatccagaaaattgtcttaacaaggtcacacagaaaagaagcggcaataaagtttactcaattgaacccgctgagacatttgccttacacttttcactttcattttgagttatttgccactcgtagagcaacccaaaaaccatttcattttggccatcaaaagtgccgcgattagaccaacacacactcacacctgcgcacagtagctttgattgacgcttttatggcagctccgactatccgactgtatcgcactgcatccagcgcaacaatgcagttttctccattaaatagttgtaaaagtaaatattatcacaaggcgccaggaaaagttgaagtctttgtctcgcaaaatgtttattaaaatttcaatttcgtccgaaaattgctggtgatttgaatgcagcgataccaatgactccaagttgctctataattttaacaacgtatctgcagcttagcgcagatacaaatgcatctgcgactggccactggggcgaaaatccacttaggtaacaccaaatacgtctctaaatataccgtttatatggtagcttttacgagcaattaaaagccaagtcctgaaactaaaaatcgccagcctcttgaaaggggaagccaaacaagagcccccagccaacttgttgccttccctgtccgcagttggcatttgatatcgatgatgtctttgtttcatttacgagcccagagaaattatgcaaaattcagctcgcagcaggggacgaagccccagctccggactcgaagccccaaaatccccgagcccccagcgaagccaagaaaagccagccaaggagatcgcaggccgcagatttttgcggtttgaaaaggcgtggaaatatgtgggggctcccgcgagaaggattgcagaaaaacaagaaaagaaacttgcgacacaaagatatcttcatacgtggatcaaacatctgtatatgtgagatgaattcataaggacgctgcgagtcagtattattgaaaatatagttcaaaataaatggaagtgatattagcaaggtattttcttaaactcgaaaattacgaaactgtctcctttatgaaacagctttaatgcgataactgcctgctgatttccattcataaatcactttctttggcaattttgatcggaaattgcccaaatcatgctacactcaaaatatttcataaaaatattaatatgcatttacttatgaaacgcactgtctatgcggcaaaatgtctacctacacagatgcctataatcaagggagtataaagtatcaattacagttcaggcttactgcaaaaaaaaaaaccaacgcagcgcagacatataaaatgaaccttcgagccacgtatatttatataaaacttacaacccttgcttcccggacttgtgcgatttgttatctctcaacaactccacatcggctgaattgcggtgcacattttttgtgtttttcaccaaaaaacgaaagtgttttcgatgccaattggtggcaagtgcaacctcgtatgcgtgataaaccaattaagtgcagtccaagctccgaaaaagtgaaattttcggtatctttcgctaaagacaaggcagaggtcaactgcttatggcatacagcatcatccgacgtgcgggagatcataaaagtgttggagactgtttggaccgatcgggctaatggattgggttttgtttcgggttcagtttgttttgacagtcgctatagagacgtcagtcaaatgtttgggattctcgaacgtaaatatttacatatagaaaggatgtctgtgaaagagctttctaatggctattttgaatgtttttaatctgtcaaatgcttactcttatggaaaaccaaactgcttaagcttcagttccatttctcatgtagcacactttgtagagcaatttaacttttgtctgttgtccaatctcttgggttctttatactctattactctatttgcacatctcaatcaatcaagcacgaatggcgacagccaggcagacagacaaagccagataaacattaattaagtcaataagtgcaaacaaggcgaggcgtaactgattagataaaattgtacagcatttgaaatggttatcaaaagaataaataatgaagccaagagtggagaggaggagttacgagtaaataaaatctgcaagaaactacaagatgctccataaagtaacttcaaaaacaattatgttactcgacaaaacacttttctaaaatcactaattttgtacagcttctgtgaaatccaatctttcaatctgcggctcaatcatcgcgcattccatttgatggtcacccttctagaaccgaactccatgcggcgtaattcacaattaattgaattatagaccatactcaactcgactcaactccaattccgagaaccgagcgattattctataaaacgaaggctaagctccgttcaagtccctcacttcattttcggagtggttcgagctttgcgtgttttgtcagacgcaatataacggaaatgtttgtctatcccctcgccgatttcctcaacttgcccccagaaatcgcctcggattcaccagcaaatgatgtaagcccgactgaagaacgggcccggccccagaagaaggggcttggccccgtctcgcctccgtaatggagtggaagtcactttattattacaacattttccatttcgcctcgctaaaataataattcgcgcttcattttttacaacacaccaaccaacgaacgacacaacgaagcgtcgaccaatggagaagccattgaccccgaggttcgtttagaatggaatgggttgggataggatgggatgggatgggatggccaggctaaagcctcagtccccattctcattgccaaagccctccccaaactcctcttttatccggctctgagctgaacggcaaccaggcttacaattgaggcaaaaagagtggggcttatcttacaatctgtagattttaccttcaaataaagaaaacattcatgctaaatcttgaaaagttaaatcttgataacttgatctacgaccctgagctccaaaattgtatgcttatgcccgatctatgattaaatcataccgattaagccaattatttgtaccaattttactgtcaacctttggttagtttatttacccttgaattcgaagaaaaccacaccagatgggtttcttttcacaaatttctcgcaaatccaagcaagacgcccctattatactgcctcctgctgtggcaataaatccagagcacacaacgtcacaagaagaactgaccggcacttttgccttggcctggactccattccaagggcgggggaggagaggttctccagggaggtggagtgcagccgagttggaacggagacgaacgccaaagcaggagccagctgcattcagcacgtttcagctgtttctctggaattgtcgtcgcttcgcctgcgaacgaatgcgatttggacgcacagcaaaaaatacatcgatgatgatgctgaagaattcgcgaggacgtaatatagtaactcctacacacaaaacctatgtataattatattttacttattaattattaacattaacataaatagaagtagtttttttttgccaacggtacattgaatgactaaacttgcacagtattatagataaaagttgttttcggtgcaaccaactgagcatgacaacccaccagcaaccccccagcggaatccccttcccaccaacaacttcacacttgcaacattgcaacatgttagagttctcggcatatttcgtttggcaatcgaaacgcggtgttgcaagacaaaactagttttcctccttagaagttactaattagagccaagaaaaacccgcaagaccaggtgaaaatcgattacagatatcgagtggccaagtgcccaaggcatcgtttggcgcacgagtcgattaatcgatagttaatgatgcaacattggtgcctgatcatagcctaaagtagatgtcaagcgaagatcattaaggatttaccaacagaagaaatcgttttagggctaaggtaaatcgaatagcatgcgattaatcactcagcagaagattaatgggcattaagctgaagaactttgttggcaaagctaaacaaacagagactatgagatcgactaaaacgtgacattattaatagtgtacaaagaaatagttatctacgaaaacctaaatgacctttatataggtattactaaaaagttcgattaaactgttgaatccgtcctttgaggtataatgacccacaaattctctatccaagttaacctttttctaacctttcacgtcctatcaatggaacctgcgtgggtagtttgtgtaagccactggaaagcaacaacgatcagcaaaatccacaaatgtttttccaaatatatatagatccaaaaagatcattaccaaaataatgagaccataccaaattgctgaacgcaaaaacctagataccaaaatgaaattacgtgcgggcagcggtcgaataaaaagcgaagggggcgaggtggaaaccgatctgtgggggcgtcaatttgaattgaaagcacgagctcgatctgggagagattgaaccgagagacttacccttccactgccgaatgcatttctttccaccagacatatgattattaatttgatttgtagctttttgtgcaatttccttcactttcctacgaagcagaaaatgccccaaaagagttttcttttcggctctgtgccagatttcacttttcttttgtttttgtgattgtttttttttaggaggtggatcggtaatttaatccggaatttgtaagcaatttgcccgaatgagtttcaatgtcaaagtgtggcttggccgaactcctcctcctgcgcattggaagatggggaaaagtttgcggccataactcacactggggaggagcacacagaaatagtgagaaaaccttttgttatggtaatgagcaatgagcaaacactgcaatggccaaataagtcggcttgggaaactcggctctgaaaagagcccataaaccaaaacttattaaggcacaacaagcttcgaaagctgtaacttgtcagccttgcacaaatttcataaatctcccggctagagaacccaggagtcctcgtctttcttctggcgactggtttgccttggtttggtcataaaactcgcagattccttgttccattctcctccgctctttcgtttgccactcggacgcatcatttcaagggaaaaaagcatttcaacttcttttcttctacttttctcccttttgaagaaaaactggaaatgtttttcatttctgcaaatgacggaaaagttcttgcatctggacacgtgttgggcacatggttcgaggttcagaggatgagaatgaggatgaggcaaataaaaactgtcattactatttcggtggcaggggcaatgcaattaagccagcggtgaagggtgcagagtgggataatggataatacctagacgtacacgcatgatgataattgaaactgtacacccatgggtcttatctctttactagaggaaactcaactgaaaaactggcggcttgcgggggaaatcattaaaatgaagtatgacgttgcgcaaggaaatattatacctgctcaaggtgtgcacttgatttctttattacagaaagttgtttgaagatttctaaagacaaccacaaaacaacccaagaaattgatagttgatctctcaaagcatgtgttccaatgcctacattgacaaatttatattctgctgattgttaacgtcatagttaaaggctattgcaaaaagattagattaatggtaaggacaagaaatgaattataactttctaatatggttgctcgataatttaaagtaagcatgatggtaatgaaaagattaaagacaatctttaatctacagttctcaaaataagattccttttcttaatgtgggtggctaaagcatctctatggcacccttttgacacgaggccacgacgattaagccctttgaactacacacctgcaacttaaatcaaatccagcagctggtgatcattattactccaggtcccgagtccaaaaaccttctcaagtgagtcataaaattactgaaactcgaaaaagatgcagatatacagaagccagcatctgcatcccccagaacgtccttaaaacgggtttttttttttcgaccaaaaagctaaaacacgtttttgcccaacttaacgaaatcaattcagtggactgagaaccgagtgctgaaaacagaaaacagacgcgaggcacgagtgtttgtctttggtctggagaagagccagccaaaagttcaataagaacagaggccgataaacagcagctgataaagacaaaaaggtagagcacgaaaattagtagtggccagaaaaccgaacacatgagtgaagaatttctgggcttggagatggggaaagggcaacaacttgtggcacgatgacaagttctgaaatataatttttcgggtgagagatggaaaccgttagcaatcacatagggtggagtgccgaagtggtaataaaataatcgatggatagttggtgatagatcctagctgcgaaagcaaccaccaaacacctcctggccatggatctccccctcttttgcaggttgagggaccatcaaattaaattgcctcggtttgttgtaccaataataacaatggaacgcagccaaccctcgtcggaaaccaaaacacgcaatagtcatcaggaaggaagagtcccgtcccggacaatcgtcattcgagcagctgcaaaatatttccaactacagcagacttttgctggggcgaagcttcagtttgactagcataaaccatttatttttttggggtgattttgcctgcaatgcaacaggatgttgcgaattttacaaattcaacctcaacagcaaccacagatgtttaaggttcctctgtcattggggaagttgtccttcaaaataaaacatcctttggtatccatttcggggttgaaccgtggtcaattgttgggtgttaagggttaagctggaaattgctgtaacttcctttaaaaaacttaaggggcggctaaataaccgaagcgattatcgaattaccgcggattcaattgccaacatatggtgttaaaaaggaatgaaatcaaagctttaattaaactattgtgttgctaacatatttgatttatagggccaactgtttgaattttacatgaaatggaaaattacttaacagattttctgtagttaatatccttcggtaactgtaaagatcttgctagtatgcaaatattatttacgaaaaaaaaacattatgatggaatcgactgattgctccattttgctttatttactccgatcaacaggctcactactttagcatatttctcacataattaagcacttcccccgaaatcaactcaagaaacctacttcatgaatacatacaatagtataaattggcctcttctggttctttcatatatttttcccctactttttcctgtattcagcaaaagtgttgtccaaattgccggctagcttgagaccccgtacataagactactatatatcgttgcgcgtccgctttttgtcacttttataattaaaattgctcacacatgcttttctatacagatacatttatgtagaagagcaaaaacggcggggcaaaaagtaagaaataaaacaactcacgactcgagccagtcgagtcattagcagtggaggcaaactaactcagcagaactgagagcaaaatatttctttaaatttattacagtggtggaagacagaactggcgtaataaaaagctgccaaatgctcaggaaacgcgcagaagaattcaaatggaatacaaaacaataaggaaagagcgatctgggatttcgaggaggaagtaaagtatgaagacatacccgagtgtttttgggaatgggttaaatccaaatcgaaaagtatccacgagatgcacgacgaagatgcaggcagaggccacagatgccgataaagaggaagtgcctcggaggccgtaaatcagagatccaaaccacaagagatgatgctttgattcagtaatgtgttggtataatattattatcgtccatatgtcggcgaatcctctttcctttcctcttttcggtatgtttttcgtacacttttgcggctgctcgggcattcggcccttcggcaggcaaagtaggtagtttttaactctgggttccgaaacagagtgttttgcgcactcacagatacacggacactcagataacgataccctcacacagatactccggagttggggtagaaaacaaatacaaatacaaacacagacgcaacggaacgagaattctgtacaaaaatgcaggcggcacttggcttgtgatatatcccatatatatatacatatgtttgtatgtgcacataaaacacgctgactgactgtttgttctcactgttcgagtgagtttctttgtggagtttctggcgcaagcaaggtcttgaacaacattttaagtattcagcaaagtttttataaatgccggcagttttgctttcgaaacattatgtattttcactcattatatatctcacttttagcacttggtcggtttgaagtccatgtttcgatgatcatagatcatcggatacaaaactgaattgtaactacgcgttgcgcgcgttttttgtttgttagtggtttgtttttgcctatttgcaatttacaactcccggaaccgttccgatccgaaagtactgttcatttgcgtggaccgctcgcgagttactgagtcgctcgctcacagcgcagatacattttgctgccgacgacttcgccgcagataaattcgccgccccgacgcgtcgggcaagtttgcggcgactttggtggcaacatgttgccgcaacattttgaaatccatcccaggattattgaagctaatgttgccagctaattattgcccatgtgaaatacatcattttaaattatttaccaaatatatatatttatttcaatttcacactagcttaaaatgaaatttaaaaactagagacgagttctcaatgatttatcagcgagctgtgcttacaacgctatgtggcagaaatccgccaaaaatcaaggaaatagttggataagtgccagcagctacatattaagcatgtgtgtgtgtgtttcaacgtggctttgtttgttcatatgtgggtgctaactcagtggttggcacggcaagaatttcgcaaattaacaaagacggaaaaacacagcaacaggaaaatccataggaaaactgcaatatcgaacgccactttcccaggacagagcaaaggtcattgacattgcctttatagcgaggtgttaaatgcaattagaatgttggtaagaatgtttttagcatgggtataaataaaggcgcaacggctgatgagctcaacatcaaaacgtaactagcatattacaagttttcatttgctgtttatttatttggaaatacttttttcagacagaagaatttaacagattatacctggtttatccaccctacccaaaagagacccaaaatgaattagtgtcatttcgaacactaaaatcccatataatattgcccgttttttgcataatccgcaccacaccttcaactcttccctcaaacttattaatgatcttcaactatcaactcgtctatgatcgcaacaaattaatcaagtccacgcataaaagtgcttatgcaagttaccctccgatatatatatatttgcatgtctttatatatttttttcgaaaactgattaatctaccttagctgggcggcaattttttaagagaagggccaacgatatttcggtctagccgcgggcggtgacagcatgaaatgcgaaaatgtaaaatacagaaacttggccgagggaaaatacacgaaaagtaaaacataatttgatttgacaaatgatggatgccaacaaaaggggagaaaaaacagcagcaaaatcaagaagacgccagcgaagaatctccccgagcgaagctcatactgcccaaactgtaatcaaatatatgtaaatttcataacaagaccaattatttataatgccctgtaaaacattgcacaaaaacatttcctggtcgtctctgaaactttagaccttaagcacattaatttcctctcgcgctggacgtaaagaaataaaatgcgtaaaattcgattcaagccaaaaaaaaaaaacgaaagactaaaccagagggttttacctcaatgatcgctgcacagaaagggaaatctcaataaaacattaaggtatattcggccatttgtcaaagttgtgtcagatgcgaggcaaattaacttaagatcggtcaattacatgcaaatgcgatgttggcaagcttaagacaactatcggggtcagaagaatttattttgcgtcattatggatgttgaaggaatattgggaaaaatatttccagatcaacgtatctatacatgtgcgtctgtagacttttagagagaacccaaaattcgtttcgcaatacagacaaaatgtttagtaccgatctcctatgtaaacttattagcttaaacgacctggcttttaaatttatggcattttcttttcgcagttcaagtctctcatttccgccatttccctctcctctctctctctctctcggtctctctctttccctctcttttaatggcttcaacttccctcactttcgatagtttttatcaccgtcgctcccccacaactatcgtacttggtgtccactaaaacggctggttgttaagaaacttgaagggctttgcataataatattgacatcatcatcaaagcggtttatgtggacctttggccaaactccggacagacctccgcccgaagctctgtcacagagtccccagatgtttgcctgatttatggtcgtgctacttacgttgcaatataaaatacatatatgtggagctgcgcttcacgagcgatcagctgtgggtaaaaggcggtttggacaatttgcttacctgaaacgagaagagcgggggaaaatatgttgaaaaagatttgtttgataggggagttggccattccggatgctagaaaagtatcttcgggatcgcaaattcgcgataatctatctgggtcactaaagcgtttgagagattacgttttaaacgtaattaataagtgagtgcggatcttacggcagacggtgatattctcaaactatggcatttcccattaaatctgcatatctgcatcttgctcgctgcgcgtttgatccacttttcaggctttttggtctgaccaaaagccgaatgtcgccactttcgtggcctttggtgcgcacaatttatgcattgttggccaggccaagagccactgagccgtgaacagcacaccagcaggaatcgaaacagaaacagaagtagaagccagaagctttcacaaatcgcaaacagacgacgacgatgaaaacagttaaaaagttgcgagttcattgttgcatgcaccggacccaatggagaggccaggccactgcagtagcagcggcgaatgcaacacaaggagcagctagcagctagcagcgagcagcagccaccgtttacccactcaactgcctagaaagggggattctcctccggattcccctgctcatccgacattggttgttctactgaaccgccgcatgaactttgcgttcgttatgagctggagcggcggtcgcaacttcgaagtgcagcagcgaatgcgaatagagatgtgtgcgtgacacgatgatcattccaaatataaatattcaaagaccaggactcacatttaatgtctttaaatgtacacaacaaaacccggcttgaatattattttttaagatacatatagagatcgattgatctcttgaaagccgaatctcatacccaaaccaattgagctgcctttttaaatacataacacagtctctcagcttcatcagtttagcggagttcgtcgtttgtcttgccgaagcgcggagatacagttagaataatggtgattgataaatattgtctatgcacgactttcagcatttaattgaagtttgaagcgcaaggtcccgtgctgcagcctgagatccccttgccaccgttgcacccatttacccattttccccgttgcaaccccattgaggtggaagtctaattgatggcagcatttacagttttgtctgcttttgtctccctgccatgaattcgctttgggttcaaccgcaatacagttgctttctccacccacacagcaattgaaagttatagactagcagcgaagaaatgcctcccacttgcaggagagcggcaggaaacccctagcatctgccaccaattttgatgtctaattgtcgagatttttatgctcgatttttatgaaccccaggaaagctgttttttgttcgcagtttaacgtaattacaatctctttgcaaataggcgactaatgtttctcgagccactcactcgattctcggttcactttcttctggccgcagcctccttgcaaacggacaatataacttaaattttcactcatgataaccagaaaagtgaattgcctcggcatgccgacttggcagttggaaaatgaaaacataggcgagaccacaaggatattgaaaatgcattataaggcgaagagaatcatactcttgaattaaagatagtcaagatagtagtagtatagtattgctcattggttttggaaattaacataaggagttgccaacttgcaaacgagataagtttagatatgtgattcgtttcgttcgttcgtttttatcattatcataaaagaattacttgaattttcacaacatctattttattggtcacatacccacgaaaagtgcctgcattaaagtattcccacagatttacggtctcactttcccccttcaaaagattgcaggcaacttctgccaagtgttcagcttctttttagagcatcgcaatggatcttggggcagctgagacttttccggtattccactcgacagcaactttcatgttcttggcagatgcgcggcaaatgataacataaaatgcgttttccatttcgaggcataatttcgtggcgcgggcaaaaccattttccgcattttctcggccaattttcgttgcctctgcgtgctgttcacaacttggcggtgaaagaagcactatgaaagaatcaaaagcagtcaactcctgttcagcagcaaacaaacagcaaagaggcgggaaaaacaatattgtattttgcggaaggggaaaggtacgaggtcccccccgggctccagaagtctgctggagcaataaaaataataatcgaactgcagccgcattgcgttggccgcaaagttattgcccattggctctgatcgattgggccaacaaggtgggcaagaggggcgattcgagccaagagaaatgagagaaaacagaaactgccgttggttagcgatggtaatttgataattggccaagctgtctgctcgagagttgcataacaacatagggttaagagtggaccagttcaaattactgaagcacagtgtaagtctaaagtttaatcactaatcaaagatccattcttacactgaagtttggttaagattgaagctatagcttgaccggaattaagccatcttcaaggaaacttcttcttacgaaccgcagcgatccctaaacctatttcgagttgaccccaatttccagacctctaatggttattacggttaaccagagattacccaaccgactaaccgactaacatttgccacttcattgccctgccactttccgccgaacaccgaacgccaaaccataatcggagttggccaaatcattgctccccatttaccttcgatgggtagaaggctcctccccaacgattattacccaatcctaatcatatacataaaaccgctcagtcttgtgaactcccgaaccggaatgtctcactaagtctactagagtgggatctctggatctggggtatatgaaaatctcattcgcacgccaaattgatttcaatcagcgaacaataaagcaatttccttagaatttcacacttcaattcaccgactgagtgactgactgactggcttgacccagtgctccacaatcggttggcaatctggcaaacaatatgaacagatagatatacggctggccaaatccccccaaatcagtcgcgaagtttgtacacttctttggcacctttgcagctgacaatgagttggggaaattaaggggaggagggggtgagcagcagctgcgcctgcgcacacttctagcattggacgttggacgacgcccaccggtggcctgggcgatgatttatgaggcggctcctccatttgcggctaaagctcacccaaagagaagtgaaaactccgcttcaagggtgtgaaaagtggcaaatgagttgcttgttgtttgcgccagcacagaatcttggataatgcaaaacaaaatgcctgcaaattgtagacacgaccggatctggaagatctggcactggagaagccccactccttccccaccagcactcaagattaatcgccagggctttgaagtgacgccaagtttggtgtcaaaaactgcggcaaacaaaaagaaactcaggcgaacgagcggcgagtgttaatgaagcacaatctctcactggaaaatagttttatctacttaatatatagtcgatagtatactgcttttgttttgtttcaaaccataagatattggagcagactgcgcattaacctctcgttcttatttcctaatcgacgccccaggaaataaatttgattttagtcacatattttttggcagtgcacatatcccaaagtttatctgcactctgcgacttagagcagacccagttggcttcccatgtgggcccacccacgcatctctcttcagcggcactttgcattaagccaagtcgagtgttgaagtcgactcttattttatttgcagctgcggctgcgatcgggatacagccgaataacggcagatccccccattatgttgagccacccactcaagccaggtggagtggaaaggatgaaactccagatcataaaggaaccgtggaggagatcgttgcggagagctggcaacttgaacttgcccctggctgaggatggatggggattgattacaagcggatcacagcggatcaggataaatgaggtaaacatcattagattgaggtgaaaactggtcttcgatctttgtttgccataatgacgaattgctattcttcgtggtggcggagaggcacaggaagaaacgctcgaagattagagtatcatttgcataaatcgatccgattgtcttagagcctcttcggatttgccttaatgatgagatagtcatagtgaagatggaaggcagagaataaaagaaaaaggcaaagtcaaattgctagtgacttgaaatggcctcttctgggaatatttaagactttctctatatttgattatagagcgtaattaaagatattcgtttacctgtgataagtttgtatttatctatactgccgataaaagaaataaattcattgacttttagatgatcagaattttaactgtcttgttttaaattgacaaaatacatacacacagttattatagtgtaatttaaaattggcttattgtagttcactatttacaattatagcttgactctttcacttgcattttctcatctaagcaaaagtgcacatctcaaatatccttagaccctggtaagccactgaccctcgctgacgtttaacgactattaacccacgacaacccttaacacttggcacctatcgcccaccaaaatcctcactcttccgcctttcgagaccaccggctttgatttctcagaagccccacaaccaccgttttgcacatatttctacttagtgcaacaactttaaacggcaacttaccaaagtaaagcaaaactcagatgaggaaaactgggggagcagaaaaaaggaaaacttttaccacaaatcggatttcctgcatcgatttgtggtcttcgcacgcgcctcgaactgaaaactaatgcataaagtagatcatagagcaacgactgccttttaaaagatctcatctcttcgaaacgagagcgaccagaatcccagctcgatatataagaatcaaagacaacgcacaacacgaatgccagagatatttcccaaggaaatagaagagattcttgtgctggccccgcttttccaagaagccatccaaagccagaagaaggaaacgtgtgcgaggctgacaagtttttcccttatttgctatttgtcggccgcgccacaagcatatggatgacatcgacgttaagtccagtttgccaggccggagtgctcttaaagactttgtggagaaagattggaaaatcaatcacatatctgactgagagatggggaggaaaattcgctcaggttttggctttaagttttactcaatggaagtaaaataagtgatgaatgctattgaacttttcaaaaactttaatagttaaaacaggatcatgatctcatcgaactcgttcatagtccttcaacatccattaaagtgcgaactattaaagtcaaaagctgcctgtaacttattctatttatgagcccatcttaactagagagccctgttatattcaatggttactgggtgtggagaacaagtttcgcccgaagtcaacgcctgattccagcattccacctcctgacaacgtgccaaaatagccctgaaggtttctatggaagggcccaactccaaactaattgcctgggcacgcctttaacttcttcacaaaatggggaaggggatctcatcaagcgccaatgcatattcatagtcataacgagatttgaggtctgccatgttcacacaatcttcctcttctccgccgacttgagacataactcataactgcacaattacctgattattttaattagcctaaaaataaaattaaaataaaaaagttgagcaagtgcaggaaaaaattgaggtgacaacacataggaaatgtctaaatatacgaacaaacgctggcgatagcataaatcaccggcgaggggaaacagggaaactgtaactgcaaacaagttaatgaatgtatctgtgggatacatctgcatggagagaaagactcgacaaatagagttggccgaaaagcaaaaggcggctataaaaagcgttaacaagacaacaacagcaattggcgaacaataaaatacacttagcagccgaagaagaagcgaataaccactaaattgctgttaacaattcttggagtgcccagccaagccagtcagcaaaggcaaatacatttttctgtctgccaaaagtgggtcagcaagaaaagcctccccctttccattttatagaagtcttcaatgccagccgcaagcgttttcatcagccaactctgcaaacgcaaactctttctctcgcgtgttagttagattttaactaccgtttaagaagtatcgtacggctactctcaactcttcgcaactgaactccactccgctccgctcctcttggcgtccattaatcaccttcagtcggtgcaaagagtcaattcaccagcgaacagcctgccaaatgtgttccacgcaactgctcaatctccgtatcttttgggtgcctggaacgaggcgcacatttggcttttatcactcgatccgcaccaaataaactacaaagcccctaacgcgaaaacagagaaaaacgtatttgtgttccagattttggcgcatttacggcttgcgtaaaaatttccgatcggaccagaccgaagaaaattctgttgcagctcttaatgggttgttggatacaaaaactcggcgggacatgagaaaataatccgcacacactgcaaatactgcgaataaatcacagaagttgtaaactcatttgaagtgcatttgatttgagacaagtaagtcaaatatgattccttttacaagcataaacattttatttattcccgtgcgatatcgattgagctctttccaaaatttaaccgtggtagatgtggtgtccataggtgggaacagcgtaggacttcagcacagggacatgctgaaccactgggacattcttcaccaccggaacgtgctgcaccactggaacagatttcaccacgggcaccacttgggctacaggaaccacaccgtaggagggctcaatgtaaccaggagcagcaaaagccattgctaccagggcgaagatcacagcgatctaaggagatattttgtaatatgaaaaatcacaaggatttactttataatttcgtgaacttacaatgcggaacattttggtattttcttagtaatttacaaacttgacttggagatattgtcacttggatgcttgtaggacgactggtgatgctgaccaatggatcagttactttatatagccaaaaatcacttcaataacaacttctaaatgggcaaacgtgtttggccataattcttctgtttaattgagagaatggatttatcagttgacccaaaggtgcctcatataggtctttttttgtggacatgaccttggttcttggtgatcatcacaaacgcgtgaagacgatcgatataatgacaatggtcttggaagtaaacaataataagcacacggatctaaaaacagcaaacaattgagaagtcattgaatggggattatgtccaaaggttaagcaataacgaccgataacgggaagttcgccgctggagatggtttcataccaaatagaatgcgcattattcgaagataccaaatttaagataattaaactggtttggcgcgtggcgttcgaacagaagtcatttgtgggctattttcggctgaggtgctaactactatatataatgattccacggatggtcaatcaacaacagtcgtccggctaacacaaacgttcgataaccacaagttaaagtttttaactcacaacaaaataccaaaatgttccgcattgtaagttcacgaaattataaagtaaatccttaggatttttcatattacaaaatatctccttagatcgctgtaatcttcgccctggtagcaatggcttttgctgctcctggttacattgagccctcctacggagtggttcctgtggcccaggtggtgcccgtggtgaaatctgttccggtggtgaagcatgttccagtggtgcagcatgttccggtggtgaaaaatgtcccagtggttcagcatgtccctgtgctgaagtcctacgctgttcccacctatggacaccacatctaccatggttaaattattgtagcacaaccccattagaaattgacccgacataaataaattgccaaccaaatcgaacttatctttattttctggtatagagcgaggataaacttttgggtcatgccatcgggactggcttaatttttatacttacaattaaatgatgcatgttttttcctacatcaaggaaataattctcgtaaaaattacgtacccaacaccctttcgtggtcagcactttccattttacacattttatagcaactaaagttgtccgcagaccccagtggtttccatggctgactgattattttatgggacattttgtaaaatttaatttcacctcgctcattttgttatttgcgaatagtcacacataaagtcgttaacaaggcggcaagcttccaggggaaatttcttcattaatcagcggaataaagtgacgcctctaaactgcagctgcatcttctccacctccccccctcccaccaccccttacccgacagacgttgccattaaaacccaatcccagctcgtctttaatttgagccaattaaagtggcgacaaagcaaagccttacagcccgcttcaaacactctgagccagccgcctttccctttggctttttccccggttgcggttcgatctcgtgtcgatgatgaacctgaatggatcgtacattaatttttcattgttttttatttggggctttattcgggttattaaatcgctggctagaaaaactctcaagcgatttggtaaaacaaaaaaaaaaaataacatcgaaataagcagacaaaaatataaaaataaattgtgttcgaaagtcaattttgtgaacaggctttttgggccttttttgtggcaggttttgttttttctattgccaaaagatttattgttagcgttttcttcttaattttccccacatttcatttcggtttcgattttcagtttcagctttgtttttcagcctgctgctaccattcaggttccacttccttttcagtttaaagtaaatttctcggccagagttgggcaattttattactctattagggggaaaaaatagtaatttgctgctcgattatgacgaaatcatttgatccgcttcacatgtgacgtcgtctttttgttgggcctgtctctccttttgtgtggtttcttttttgtctgtggtaatgacttcatcgtcgcccagctacccaatcctatcctatccgcagctcatttgataaattatccaacagtttgtaataatatttttcgtagccgctcagggggagttgccttcgatgcttttgttttcattttgttaattatccgctataattgttaatttaaattatgaaggaaagtgaaactcaattgaacttgagagacccccccccccccccttcagtccatctctatctcgtgtgttattctcttgtggatttgggcgtgtttccgatcgatgaagcagagaaatgtttttcgatcgtattggatttggagttagattcgccccagtcagccgttttagccgtattaacaaattgtttgtttcaatgtttcgataatagtgtaatcaagttacaaatagcgtagctctttttagtgcaatttcaaacactcgtagctgcttttagtacctcgcgacctttaatcaacacctcaactgctaaatgactgcacgtgactgcacattacaattcagttaggctcaagttcaactgaactacgccaaataaaatggaaagtttatttaaaggttcatttaacgcgaaagttgaactataaccgaaccgaactgggcagcagtcgtaactgaattttaagtggtcttgcacttaaactacttgaactactctccgactgggctaattcggtggtaaatgttttattgccgcccagcaactgcagctggccacttgggccgcatccgagtcgaaattggagtccagactgaagctggagctggagctgcagctaacttattgggcgaaaggttacagtcagcaattgttatgcaaatctggcggagggagattgccgcgaacacaatggacacccattcgatagaatcggacaagcggccagccagtccaggccaggccagcggaccaaatcgcaattcgaaaatccccattccgaatcctatcgaggcgaaacattcaaacatgaaattatgactgccataaagtggagcacttcctcgactcccgcacacaaatcggaattgtcaatgcgattatatggtcgcagcgcttagctaatcgcgcggccagactccaaattgcaccaccttcacttttcctgcggcttttccagggaagccacggcaaccagggaaaacaaactcattccccccgctttatcatgctgcctgctgcttgtcttgaccattttcggaggcccaagttttgcggaaaacaaagacatcctgtcgtttcaggcgacagggaacatgagtgcttacacctcggttgaccagaacagcgaatgcctaaaacactttgcttgcccattagttagtccatcagttcatgtgcttgttaaagagttgatcgtcgattaccataggattgcaaccacttagtggagaaggtacaatgtggttgtcaggaatcttgtattgaagtgttgaaaaattcaagtaattaactttggagaaactgaagtttcttgtcagtttcttgtcctttccaaacttttttccacataatacaaataaatttcaagcatcggaaaaatatataaggagattgcagccagcaccttggggaaccagcaaagatctcagctcgttatggccattgacattgtccggcatctgacaaatttttggattttgcttcacggcgatcatctctcaatctcaattttggacccaatctcgatcgccatcttccccggctgccaatccatttggtctgtggccagtagctgtggggcttgattgcgtcgatcggtttgtgtggaattggaattggaagtggaactctagttaacagttgagacctggacaccgaatgcgtgtctccgcccccgggaactgcagaagcaacaactgcagccgcaaacaattgacagagacaaacgcctaacaacttattggaaatatgtttaaccattttgggcaattgacatttgctgcctagttcgaaaagctccatctgcgcgactctctttttcccatcgacagcgtgacaaaacaattgtcgtaaatcaggagcaggcagccggagtttaagccagctaagcttttgtcttgagcatttttcggctaactgcccacaatgcaatcttaagttttacagagtttcgtctggcctgctgtctttatttactttcatttggctcgtggccggctgcgctttttccttcgatttttggtgagaaggaagagcgaatgtgtgcacggaattccattgaaaaaagcttaaaaggaattttcaattagcccaaaaaaattgaaaataattcctgaatgggtcaagaaagtgggtaatgaaaggcattgtgtacttacattatgtaagcaaagaggaagttataaggcaggtcaacgtatagaataccaaactctctaaagagcatagaaattagtatgtttcaactatgaaattgaccaataattcgagcatttcctccttgcaccgattaacttctgtcacggtcaaagctcaactgcatccaacacaaatcaaagccacaggcggagaccaaagccacagacactcttccgtcttagatttaacgaactcacacacaattacataatgtggggagccaagagccttgttcatagacaatattgttcagataaaaatccccctaaatcatagaaattcgaaaaaataaaaaactgaaaagtgcaaaaacaaatctgtgggcaattcagagactttgaattcagtctcgattgaaggtgttacaaacgtccgaatgccaattatcaagtcggggttcgaggaggttatctcaagaccccttcctctccctcgcaacagttttcactttcagtccaataaattttcgtaacaaaatggggaaaaaaaagagcgaagaaaacaagggaacattgttgtccgattttcgaggggaagccaatagacagacggactgaggggatttaagcagttggcggggggcaatgagaatgactgacggatttggtattttttcgctgtttgagacacaaaactagttgcacaatttcgggacgcactaacggaagccgatggatatggaaaactcaaagaaaaggctccaaaaacgcaagtcattggggcgaatatgaaaaacaatataactaaatgcgtaaaattggtttttttttcgagatgtttacgatttgctacacttttacctcacgagattgtaataatcttgataactatcactatttgtagtttaaagtaaaatttcaaaatatacaaagatttcagcttgttaaggttcatgatttaaaaaactaaaacttgcacaaaattaggcaatgcaattttcaaatatttctccgaccctcaaaatatgcaacataaaagatatcaaatagaaacggctgcttaccgagtgtactgctagatggcgctgcaattccgcgttgccaaacaaagtcagctctgtgattgtcggcgaactctccaatttattctccatttcgcgcagccaacgccgcaactccttgggatcctcacaaagaccctccggtcgttgggtctcatcgagcatctaatcaaatgggtggtttcattaattaacaaatgtttggaaagtactttactcaccttaaaggaacattcactggatttctccaacaccgtggcagcgccctctatctcacagcgcgcctccttgcaagtgtccaaaaggttcgtgtccataatgtagttgtagttcgtttgaatggccgcccagaggtcgtctttgccagacgaacccagacccaaggtggcgctgctgtgcagactggtggaactgcattgactgtttccgcttccccacgaataacggtgcattttattgctatgcgaatttttctgaaagttttaaaaggcaaattcttagctcaaacttggtaaaatgattgtagtgtttgaaaaatatttaaacactacgtatttacataaatattaaaaaaaacccaaaacaaaactcaaccccaaataccaaaccatatttattatattaccgcaaaccgaaaatgttgtcaaatgttgattgacttaagcatctcaaaataaagcctctgaagtggcaaacatcgaaaaatacactcgaacagaggaaggggaaaccgcttaaagtttttaataaatgagtaatttgaggcgtgccaaatacggccgaaacaatatgcttggccatcttgggagctggcgtttcagattcccgactgtaagccaaagaaaactggtttttattcacttcaaattgctaagcgcgcgcaattaattaatgcattttgctcatttgtccaagaaagtctccgattcgcgctgaaatcgtggaaggaaattccttatttacacaatcatattcccaaaagcaaacgaaattgaaaatgaaattgtgcgattgctgtttctgccgatttcagtaattgattaaatgaatgagtagaaaaagaggtatgggttgggatttatcgccgagtgactcgcatttcgggcaaaaactcgcccacagtgactgtgaaaagtctgtcgacaaataagctgtaaaatatgcaagctgtgacacctggaggccttgaaaaatatatctcagtggtctcggtcttgtatacctcaacagatttttatcgaggaataaagtaaataaatctccatgactgtgagaactggaccaaaaaactatttggtatgctgattttgtgttagccgcaagctgataagatttataataaatagccaattttaacacgccctcttccgccactgaactttttttaacactattaacactatttagtgcgcagagtctttgattttttaataagctctgtaacgccaataaaaatttatttgcaatatgatcattttccgactccgtaaaagaagaataggggcctgtttttacattccagttttgagcataaattagtaatttgtgtccatggccagtggcgccaacttagttgcacatttttaaccgttgcaactcggtttcatacaggcatgctaattattaatttattaaagcaatttccgctgacacagacagaaaataagaacaagagagctcagaattctaacggctgcttgtcattttaagagaccaaactcgttagcgtgctaaacgaagtctaaaagtgcaacaggtatgagtatatggaggagtaagttactaaactctatgccgaactataaaatactctagccctgattgctaaaaatctttgagttaagtagagtctcccatctttttttttttttttaatttataaacttttgtataagtttttgtttgtaaacaagttttgtatctctttaactatatattctgagaaagggtattggctgaggcgaagcccactatctcatgatcaatggcaaatttatgcgcacacgatacagccattacctgttgtattcccgacccgtactattcctctcatcgcctctaaaaaacatacccatttttgggatcactcaccttgaggctgttgtagggacgttccaagtgaagtttggcctggatgacgtcacgactctcctgctgttcctcattagaggccttcagtgacgtcatggactgcgattgcttcataaggtcgtttccaacactattggtgccatagtttagctgaccaccgccgggggcgcttcttttgggtgctccatcacccgttcccgctacattcaaattggcacttcctctggatcctcgtctctgctttttgagggaactgctacggctactgctggccgattttgttgttagtccggccctattcggcggagtggctggcatggcaaaaatgccatccaatttaagtggtttcgttgtgtgttctattttttgggtggtggcggtttcgtttggggactccaaatcccttaccgaaccttctttgccaccactaatcatggccgctttttcagtctcttggttacttatcaacgctacttctttctccgagttcgggattaccccttctcttcccgtctcgttttcctgttgcatttccattgttttccaactttatttggctgtattaaccatgtgtgcatggggggatgtacaatgttttatttagagagcgagttatgttaatcgaacccctcaaaagtcgcccaatatttgcatgtctgcctggcttcctcttatttccattgtttcccgtttcgttgccggcgttccgctccctggcaatgaccttcagggcgttcctttcgatttccgttcgtttttatgcaaaatacttgtttcgttattttgataaaatgtcggttagtttgcgtatctaattcgattccactgaaacgaaataagagagtagagaaaattgcacattacttgaaaggaaatcatacgaattagggggaaaatgggaggacagagatgaaatgatgattatgatacgagagggaccacctcatggggcagcataattagcagagcactgcatttattcgtttctcattttccttctactaatgatgggtattattactataggcaagccattaaaatcccaaagcgaattgcacggggtctgtctttaatatggtttcatttcctacagcatttctttacaacaccttctgcaataggcggatctcattagttgatcgcaggtgcatttcgttaacgaagaatttaaatgaccgttgtccattcatccggaaaaggcaaaacatttaaagggggtagtaatggtatatcaaacatattttccattatggatttaatgtttacccaatagtcacactatttaatccgacgttttctgatataacagatgttgcaacaccattgctgtgatgaaactccattctcctcagacttttgaataattatctcccgtagaatttcagccgagtgcagcggccatatcagagcctcatatctcgtatcacatatcatcacacccactccagggtaaacaaaacgaaactgtaaacggcaattaaaagcaactgtgacccgcagaaaacgaactgtataaccacgtatgtatgtaataacggcggtaagtgaaggagtcggcgggagtcgggggaattatagtaattacgtatgcaaaatattacttaattccagaggctttagctttggtcaacgacttccgaacggacagcgaggaatttaaaacaatgaacgcgattctaatcgcgcctgcaatcaaattttcatacgaaatttgtcgcgaaaaacagttgtgggccaaattcgtatgcaaattggttagcgaaaaggcggtggaagttgtccaattccaaaagtggcctgcaagcgttcatttagccacttgagcgccggataccaaagggggaaaaatgaataataaaatcggcaacaaaaagtgggtggatgtggttgtaattgagggaggagggcgtgccccgaaaaaagaaaacaaatcaatgctaagagctgcaaataaagttcccaggtattttggctacaaaaaggagtaaaaaataaaacacacccattaatggcacgattgcctgcagtgatcgatttctgaataatctgtatgtataacaaccaaaagatcgcaaaatttacaaatttagattgcatccaaataattagtagtgtttttgaattccgaagtgaaatttaagttgtttactaaaccttttgagtgagagtttgacttattgcacaccccgtaatttctagcttattttatttttaaatctattttccatttttaggaaccataattttgcctatcatacttattgcttttttcgactctccgacatattaattacataattaagaagttaatgcgaacacttttatgtgctggccataaattcaaatgctttgccttatgactcagaaagtaaaatggggaacgctgtcctctgacgattcccctttggtgcaaattttcactcggcctgcatgcaaaatggaagttcgcattcgcgactgactaacagccgaaaggcagtggaaaaggcgttgaaaaagtagaaacagatattcgaattcctcccctggccaactaactcatttgggaaataccaaatttccagtttatgttgttaaacttccgcatggaaatggcacaagtgtgcggcctatacgtgtaatttctttaatatttaatatttccgagtgttatcattgtaatttccaaattgaaatcaccaatcagtgactctttgacaatcaaacaaagcatttaaagcctttaaaatgtgcacaataaaaccgcgattaaaactccacaaatatgcaaattgattccctcattatgcctatacccaaatatttaacactttcagataataactcactatgctctggacagtttttcttttgaatcttttcttactttgtttaaccacctgttgaactcttgcataagacacctgtaaacattcggtaatagcaccaaagttccaaagaaaaccgatcttcaagcgaaacgaagccaaagccaaaagcccgaccgaaacatgtggaacataaagtttggccacaaggcccacagacctcggagatctgagatccgagaccccagagatcggagaccccacagcagaagaagcagccaaaagcagaggccattaataagcacaaagaggagccgcagtaaaggggcagccaaagggagggctaaaaatatacaaatatttgcgtaaaaataagccaacgaaaccgaaatgaagccaacacacatggggattggattgtggggagtggttccagagcaaggggtcttccagatcgaaggtctctccacattgtccatgccagacacgtagttttcgagacgatcgtaaatgtaccagggctcattgttcatcgctataaaatgccggtagggatgacaatagaatctattttagagggcttacaatcgcatctttttggttaagcaacactttcgattttcaatggagtatctttaaatgttgttgctgccaatcttttgataacaattacttactagaacattaaaacacacttgatttcctcaaagaactattactatttgaaaacgaaaacaaaactttctttgttcttgtttccaaccttagcacttcattttcacttactttgaactccactcacttccgtttcgctctttatcagctaaacatttggtccattacaaaagaaatgagaacagagaatccccgaaaaccggatgtctactcactaaatcgctatttattcacacggtggaaaactgtgtgaccaacttaagcaagtcaagtgccaacaattgggaatccaattattttgtttgccctgattttccgatgaactttactcgtgcctcaagattagatagagttgataaggcaatttcgcgacactcgagtggcccgaaatgaaatcaatttaataagagtatcactatctggggccccagtcgagataagacttcgaaaatcgcatacacttggccacaataagtcatgaaagtccgcgtacttggccataatttagtcatcagctggttctgagtgtgaagtcatgagtacgagttattgtactgaaaatctttaatagaggtggtgctttgctatatggcataaataaatatatggattaaaaataaagaaaataattgctggaatcattacattgacatttttttgataattaaacaattttataacagctcatttggaataccatctctaattgcaaaagctgaaatcgctcgcagacaccaagtcgagcacagtattggacaatcgaggagacccagaccgaggaaatcgacattccgcagaccaaaccgtaattaaaatattgtttatactatattgcagccgtggcagcaacagcagcagctatattttatatgaaccagcagccagccaaccgacttatctgcgaattcttctaagaatcgcgttggcactgcctgcgctgtcttccaccgatttggccattcaagccgggttgaccaggccaaaagccatgattggaggggtctcctccaaaggcaggcagcctgccataagttggcagttgccaaagacagttgctgcagcagcaccgctgcaaactgctacagctgctgttgcagcagcaacacctaatgaattgtcaactgcaggcacacagagaaggggaggggagaggggtgagacgacgtcacttttggcacacgtgagtgctggccaagtggccaaatcgctggcaatctggcgacaatagcaacaataaccatattgacttgtacaccaatttcgtgccaaaggcattggagcagccgccatgcaaccgcaaaaacacagaaacaatcacaatatgtggtccagtgcaacctactttaaattaagtcggtctgcccacaaagtcatattttcctcaaatttttttttttttttgtggcaacagagacaatgaattgtttaatttgttgtggtcgtgtctggctttgacaaacgtttatcgcccagtgatacatgagatatggcggtgaagataactgaatctatcgtagttactgatctagttataaaagggctttcatttcgaactacagtcttttttaagctgaaccggtttctgtttgataatcacttttttctctccttgataagctgacttgattcttcgatgcgcattttcttgcttagttcctcttattttccttcttcatttggtcatctattatcaagtcttctttctccccacttttatggcccacagtagccaacaattattgttcatcgtttttcaccacgccataaacatttcgttcttctctatttatttccatattaatctgtcttagtttgttcattactgtttattttcttagcttttgactaaaacctaaacatatgttcctttgccacgaccccgcaaatgtcaaaagtcctcctccagaaagggggtcaaaaaaaaaaaaagaaattccaataaaatgaactgcaagtgtagtgcgacatatggcgacgtggaacatgtttgtggagtaaagacagtggacagaggaccaactcagccaggccaaaacaaaaggaaacttttttgca

SEQ ID NO: 25217 - DNA, 8405 bp, DROSOPHILA
caactgtctttggcaactgccaacttatggcaggctgcctgcctttggaggagacccctccaatcatggcttttggcctggtcaacccggcttgaatggccaaatcggtggaagacagcgcaggcagtgccaacgcgattcttagaagaattcgcagataagtcggttggctggctgctggttcatataaaatatagctgctgctgttgctgccacggctgcaatatagtataaacaatattttaattacggtttggtctgcggaatgtcgatttcctcggtctgggtctcctcgattgtccaatactgtgctcgacttggtgtctgcgagcgatttcagcttttgcaattagagatggtattccaaatgagctgttataaaattgtttaattatcaaaaaaatgtcaatgtaatgattccagcaattattttctttatttttaatccatatatttatttatgccatatagcaaagcaccacctctattaaagattttcagtacaataactcgtactcatgacttcacactcagaaccagctgatgactaaattatggccaagtacgcggactttcatgacttattgtggccaagtgtcattgccagggagcggaacgccggcaacgaaacgggaaacaatggaaataagaggaagccaggcagacatgcaaatattgggcgacttttgaggggttcgattaacataactcgctctctaaataaaacattgtacatccccccatgcacacatggttaatacagccaaataaagttggaaaacaatggaaatgcaacaggaaaacgagacgggaagagaaggggtaatcccgaactcggagaaagaagtagcgttgataagtaaccaagagactgaaaaagcggccatgattagtggtggcaaagaaggttcggtaagggatttggagtccccaaacgaaaccgccaccacccaaaaaatagaacacacaacgaaaccacttaaattggatggcatttttgccatgccagccactccgccgaatagggccggactaacaacaaaatcggccagcagtagccgtagcagttccctcaaaaagcagagacgaggatccagaggaagtgccaatttgaatgtagcgggaacgggtgatggagcacccaaaagaagcgcccccggcggtggtcagctaaactatggcaccaatagtgttggaaacgaccttatgaagcaatcgcagtccatgacgtcactgaaggcctctaatgaggaacagcaggagagtcgtgacgtcatccaggccaaacttcacttggaacgtccctacaacagcctcaagaaaaattcgcatagcaataaaatgcaccgttattcgtggggaagcggaaacagtcaatgcagttccaccagtctgcacagcagcgccaccttgggtctgggttcgtctggcaaagacgacctctgggcggccattcaaacgaactacaactacattatggacacgaaccttttggacacttgcaaggaggcgcgctgtgagatagagggcgctgccacggtgttggagaaatccagtgaatgttcctttaagatgctcgatgagacccaacgaccggagggtctttgtgaggatcccaaggagttgcggcgttggctgcgcgaaatggagaataaattggagagttcgccgacaatcacagagctgactttgtttggcaacgcggaattgcagcgccatctagcagtacactcggtgttgtaccatgaaattgcatcacacgctcgagtggtgagctcttgcattcgagccgccgaaaaggaacagcaactccaacagcagcagcaactgtcgagtcagcaacccgcctcattgaccagcaactgctccagtgagtcaaccagcgaatcggccacaaagtcgagcagcctgagcagtggtttcgcttccgatccggtgaccacacccattggaaccgcagcagcggccccgccgtcaagtagcacccacccatccaagaagggggagggcaacttggagcgacttagggatcgctaccatctgttgtatctgaaggcgttcgaactgcaattgtgcctggataatctgctcaggaaacgcagttccgcagcgaatggtttggatgacgacgaggacgaagaggaggacaccgaagacgattcctttggctacgagggcgaagccaccgaggacgatctgaacgaggtcaactcggatctcgatctagagaacagcgagtccaagtcggccacccccgcggaacttattctccagcgctgtcagattgcagctacccagattgtgtgcggactggatgagacccaatcccagtcgcggtcacagcaagtcccatcccaagcgaagtcgccgtcagcggatcagccacgcgattgtcttgcacctcaaaagcccggcgatgaggccgatgaagagctagaggaggaggacgaggatcctgatatcggcaccgatgtggtggacttcctgattgccaagcgatcgtggagacaggtgaaccacccgaatcccagtggtacagccaccctaacggatttcgaggcggattcagagagcagtgacttcgagcaggtgcagcagttgagcagaagaggattacccccaacagtgggcagcacccgaagggtccttaacctcattgagatgccccagagcagcaacagcaatatcagcagcagcaactcgttgctacagcaacgaaatcacaatatcggcaacaaaatgctgcccaacaaagcgcacggcaagaacattgccgtggcggtaatcacacccaattcacatggaaacaccagtcacggtcatgggctcggtcacggactcggccacgagctgaacaagtcgcctttggggctgcgcaagacgcgtcatcaccacaatgacacctccaagttcaaccgatccaatcgcaagtcgaagaactgtgcgatcttctatttcaagcacctggacacggacaacgagcagggaaacgcggcgggcagtgatctccagagcgaggatgatccgagcctgatccatcggcgcagagctggaggcgacatactgaaatcggctgatgcctcaacggatgacgacgacgaaggttggctctacacggcgacagcagcagcaacattggaagttgcaacagcagcaactgcagcaccgactgccgcagcagcaacatcgagtgtggatggtctgcagtccacggccgtctcctcgactacggccacgggtggaccactcccgcccagcgacgactctgataaggagaacaaggtggctctggtcagcgccacgacaatcacggcggcagcaaccgcaactgcaacatccattgcaacactgcacagcagcaactacgacagcagcagcgcctgttcctcctccaattcaaattcgaattcgaactccaactcgaacggcaggctcacggagacctcagccacctcgcgagtaacccagctacagatgcaaatccactcgcaatcgcagtcgcagtcacagatggagctccaaatcaatggcaatgccatcgacggcagacacatcattagcaacaacaattgctacagcagcatgcaacatcagccgcaaaacaacaacgagggtgaggcagccgaggatctggccaagatcaagatgggtgacgatgaagcagctgctgatatggcaaatggaaacgccaccaaatctcagcagatgagcaacggtgtgtacagtcgcgcggactcttgcaacttcaccgtttgggcggcagaaactgtagccagttgccacttgcccccgagatcgccggccaaatcggccaagtcctcgaaatcccaggccagcaatgccaccgtgtctggatccacgcttgtttccccagtcaagggcaaggtctcgcatgattcaatcaagcagttggtgctggaagccgagcatttggtgcgcgacgcccaagagaccgcactgaagacgccaaccaagcagaaacattccatcattaagatctcgtcgacggtcaagaagcgcgaggtcactatgccccatcccatcaagcagcgtgtggaggaatggctggagcaccagccctcgaccccacagctgctgacccggagccacacgcacgagctcctgcccagctgcaagccagatgactgtgaggcctccggagaagcatccgaaacagactcggtgccccaagctggagcaggagtaaacggaggagcaccgaatggtgcgggatcggatacatcggagggcttcaccgattccattgccacatgtatgcaaacgagcacgaattcctatgggaattccacggagagaatcggtggatcggctgaacccattggacagcccgtcacgcctttgggctttggcagcagcaaccagagcctgaatgtaaagattgtaaagcgatcgcaaacgcgtcgcaagtcggagagaccatggtcggtctcgtgtctgtcccagttgactacggatgcagcccagttaaccacggcccggatagtggaaaactctccgtccggtctggccagtcactcgatcagtgagagtgccctggactcgctttcgccaggaccaagaccgcgggcagcttcttcctcgggaacgggaagcaatgcagccaagaaggcggatagcaagggctcattgaggaggaggaaggccaggaagaagcgcatttcggccgcatcggctggcaggaaatctgattcaggttccgaactgggtggagatctcacccagacactgatgaagtcctgcgagtccatgtcctcgcagcagctgcaggagttcaccaatgcccttctgagcattcaaaaaggcgcagtagttgctcctttgagtcccaagggcgacgtttctggagtaccttcactggccgatggcgagggaggggaaacccagctgatgctacccaagttccgggtgggctccttcaccacagctggcctattggctactgatacgaggttaggcgctttagcagccctctcaaactacatgaacgaggacgaacaacaagcagaactcagcactgaggaccatcatagcagcatctcggagacggcgtgggacaactaccaagagaaatacaactcggagaactattccgagggctttgattcagatgcggcccggcgtctcttggaattcggcgacgactatcgcaatttcatcgactcgcaatcggactgctgcagttctctgtcggcggccaacaatctggactcgttctcgccgccgcgcatggactcactgcagaagcacgagctgaagaccctccatatcaaccaggacacaatcaccagcaccgtggaccacgcccgccgccagcgcgcccttgaactgcagtacgagcgtcgtcgcaagaccctggaagttcgacgaaagtcttgccaagacatggatgagagcctgatggctagtccccagtcggatcaacagcagcagcaattgcaggtcacgccttcgttgtctgcctccgccaccgccctaatgaccacgcccaagattcagtcgaccagccaccagattagccatcgcgcagaatctgtgggacgcaagttggatttcggcggaatgagccactccgctcagtccctgctgcgtcgcacctcggagagcgatacttcaaccaggagacgacgcactgtgacggcggacgaaagaagacgctcctcccgcaacctggagaagtgcatcaaacttattccagctaccacttcctcgtcgagtggctcggactccgaggacggagagcaggagatgcgatccctgctgcagcagagccgcgacaggctggacgacaccagagccctgaagatcagatgccatctgcttagaccagaggattataacgagatcatcaacacttgccgcgacaacattcgctgcctggaggccgtgctgcgcggtccgcccggcaccgtgttgtccaaccactgcgctggccagacaaaagatctgctcggcgcctgggaggatctacttagctggagcgagaatgcctccgctgcccgcaaattgcagcaggagatgagtgtgttgaagagctcgctgcagcgcctgggagacaagccaactccagagctcctcgatacggagccggccatccaaatagcagtggaggcgctcaagttggagcagacgcaactgaccagctataggaccaacatgctgcgtcttaacgcctccgtccacagttggcttaccaagcaggagcggcgactgcagagcgccttggaggaacaggagcagcaacaggagtccgaacaactcaagcagcaaaaacttgttgaagaggagaagggagctgacgttcagaaggagctggcgtctaccggagcagtggccatcacggtcaccgacagcaatggtaatcaggtggaggcactagccacaggagaagcctccacctccacgccagcctgggatgtgcacacgctgatgtcatcggagcaggagttccataagcatctgaagaacgaagtgagcgacatgtacagttcctgggatgaggcggatgccagaatcaacacgcaactggaaatgcttaccaactcgcttattgcctggaggcagttggagtccggtttgagtgagttccaattggctttgggccaagataggggcactctgaagggtcttgaaggagctctggacaagggacaagccacaccagtcgagctggcccagaatgtaaaactggtggccaagctgctgtccgaaaaggttcacgtaagccaggagcaacttttggccgtccagcagcacctggaccccaaccacatctaccacattacgaagtttacagcctcaaatggctcgctatcagattccggcatctctgatggaggagctacttctgatggtggcctgtccgagagggagcgacgactgggagttcttcgacgcctagcaaagcagttggaactagctctggcgccgggaagcgaagccatgcgttctattgctgcccgaatggaaagtgccgaggccgacctgaagcacctgcagaacacctgtagagacttaattgttcgcactgcagctagccaccagcagaagcagcagatccagcaaaatcagacccagcaggtgtcaccgaaggccaatggacacattaagaagcaggccgcaaagggcaaggcagaaccccagtcgcctggcagacgtggtaaaggagctcgaaaggcgcgtcaggccaagaaggctggagaggatcagcaagtagaggagccaagtctcagcccagaacagcagaagatggtcctgaagcaactcaagaccttgacaagtggcgatggtggggacgacccctctgacgatccctcgttgctcttcaacctggaaagctccgaggaagatggagagggagcggatcctgcacagacctctaagcgagggtgggcgtggcgcatcgcgagggcggcagtgcctatgcaggtggccctgttcacaatcttctgcgctgcctgcctgatgcaacccaactgctgcgacaatctgaacaacctgtccatgagcttcacgccgcagctccgctatatccgtggaccacctccgatctgaggacagagcgcgactaattaagcaggccgctaatcgttgtaggttaccgttacgttatgttaaggcatttaacagctgtaactagagttaaccagcgcaaccagccacttaggcagagccactaagagctcgcctgtggcgcgcgttttccgcgctcgaggttttacaatcccgaacagagcgctctcctccgaaaggtgcgacacccagaggcagcccaattttatatgtctaatttaggtagcgagcgcgaaaggaacgcaatttatagtaaggatgtatttgttatttcggttaatttcctacgagtttaggttgctgttcgattgaacgctgaatatgtacttaggcgaggagcagacgatgcccagccacgtgtaaactgccgcataaaggaacaaaggggcggatcgtcccccagattcttacccagtaaatatgatacaaacacaatgatcaattgagtggcgtttttgtatacttttttgtttgaaaaacactaaagtgcctacaaatgcgaactgtgaacgaggagctaccagcagatgacaaaggatccgtcgaggagtccaaacgagagtatgaatccaaggcaccgaagcaaacagaagctaaaaagccaacagcactaaggagctagcaatggagctcaccagaacagcgatgaagaatcagagtttatatttttatacgcaacgcaactatacacaatcagtgcggagacaacgaatcttcagccaacacacatcatacgttttatgtctattatattaataggataaaccttacacttattttgcaagaaaacaaaaattcaacaaaaaaaaaaaaaa

SEQ ID NO: 25218 - protein, 2262 aa, DROSOPHILA
MEMQQENETGREGVIPNSEKEVALISNQETEKAAMISGGKEGSVRDLESPNETATTQKIEHTTKPLKLDGIFAMPATPPNRAGLTTKSASSSRSSSLKKQRRGSRGSANLNVAGTGDGAPKRSAPGGGQLNYGTNSVGNDLMKQSQSMTSLKASNEEQQESRDVIQAKLHLERPYNSLKKNSHSNKMHRYSWGSGNSQCSSTSLHSSATLGLGSSGKDDLWAAIQTNYNYIMDTNLLDTCKEARCEIEGAATVLEKSSECSFKMLDETQRPEGLCEDPKELRRWLREMENKLESSPTITELTLFGNAELQRHLAVHSVLYHEIASHARVVSSCIRAAEKEQQLQQQQQLSSQQPASLTSNCSSESTSESATKSSSLSSGFASDPVTTPIGTAAAAPPSSSTHPSKKGEGNLERLRDRYHLLYLKAFELQLCLDNLLRKRSSAANGLDDDEDEEEDTEDDSFGYEGEATEDDLNEVNSDLDLENSESKSATPAELILQRCQIAATQIVCGLDETQSQSRSQQVPSQAKSPSADQPRDCLAPQKPGDEADEELEEEDEDPDIGTDVVDFLIAKRSWRQVNHPNPSGTATLTDFEADSESSDFEQVQQLSRRGLPPTVGSTRRVLNLIEMPQSSNSNISSSNSLLQQRNHNIGNKMLPNKAHGKNIAVAVITPNSHGNTSHGHGLGHGLGHELNKSPLGLRKTRHHHNDTSKFNRSNRKSKNCAIFYFKHLDTDNEQGNAAGSDLQSEDDPSLIHRRRAGGDILKSADASTDDDDEGWLYTATAAATLEVATAATAAPTAAAATSSVDGLQSTAVSSTTATGGPLPPSDDSDKENKVALVSATTITAAATATATSIATLHSSNYDSSSACSSSNSNSNSNSNSNGRLTETSATSRVTQLQMQIHSQSQSQSQMELQINGNAIDGRHIISNNNCYSSMQHQPQNNNEGEAAEDLAKIKMGDDEAAADMANGNATKSQQMSNGVYSRADSCNFTVWAAETVASCHLPPRSPAKSAKSSKSQASNATVSGSTLVSPVKGKVSHDSIKQLVLEAEHLVRDAQETALKTPTKQKHSIIKISSTVKKREVTMPHPIKQRVEEWLEHQPSTPQLLTRSHTHELLPSCKPDDCEASGEASETDSVPQAGAGVNGGAPNGAGSDTSEGFTDSIATCMQTSTNSYGNSTERIGGSAEPIGQPVTPLGFGSSNQSLNVKIVKRSQTRRKSERPWSVSCLSQLTTDAAQLTTARIVENSPSGLASHSISESALDSLSPGPRPRAASSSGTGSNAAKKADSKGSLRRRKARKKRISAASAGRKSDSGSELGGDLTQTLMKSCESMSSQQLQEFTNALLSIQKGAVVAPLSPKGDVSGVPSLADGEGGETQLMLPKFRVGSFTTAGLLATDTRLGALAALSNYMNEDEQQAELSTEDHHSSISETAWDNYQEKYNSENYSEGFDSDAARRLLEFGDDYRNFIDSQSDCCSSLSAANNLDSFSPPRMDSLQKHELKTLHINQDTITSTVDHARRQRALELQYERRRKTLEVRRKSCQDMDESLMASPQSDQQQQQLQVTPSLSASATALMTTPKIQSTSHQISHRAESVGRKLDFGGMSHSAQSLLRRTSESDTSTRRRRTVTADERRRSSRNLEKCIKLIPATTSSSSGSDSEDGEQEMRSLLQQSRDRLDDTRALKIRCHLLRPEDYNEIINTCRDNIRCLEAVLRGPPGTVLSNHCAGQTKDLLGAWEDLLSWSENASAARKLQQEMSVLKSSLQRLGDKPTPELLDTEPAIQIAVEALKLEQTQLTSYRTNMLRLNASVHSWLTKQERRLQSALEEQEQQQESEQLKQQKLVEEEKGADVQKELASTGAVAITVTDSNGNQVEALATGEASTSTPAWDVHTLMSSEQEFHKHLKNEVSDMYSSWDEADARINTQLEMLTNSLIAWRQLESGLSEFQLALGQDRGTLKGLEGALDKGQATPVELAQNVKLVAKLLSEKVHVSQEQLLAVQQHLDPNHIYHITKFTASNGSLSDSGISDGGATSDGGLSERERRLGVLRRLAKQLELALAPGSEAMRSIAARMESAEADLKHLQNTCRDLIVRTAASHQQKQQIQQNQTQQVSPKANGHIKKQAAKGKAEPQSPGRRGKGARKARQAKKAGEDQQVEEPSLSPEQQKMVLKQLKTLTSGDGGDDPSDDPSLLFNLESSEEDGEGADPAQTSKRGWAWRIARAAVPMQVALFTIFCAACLMQPNCCDNLNNLSMSFTPQLRYIRGPPPI

SEQ ID NO: 25219 - DNA, 9845 bp, DROSOPHILA
actgacttaccaccagtgaaaattcgagcatcagctctcaggcgcgcgaattattcaaattcaaatattcttccaggggtgccatatgtctaaacttatttagcgtcgcgttgccagacaacagtagggtaatggggtgtacacactgtacttttaatcaactgttaagcttacagttggcgccaaacaaaaaattcaaaacttcttagttatttccagaccccgtatttgaaagccaacaagccacgttagagaaatatgatttatttccattaaatatcagcggttcggtgaccgaaaaatacagattctttgctgacatcaatatgtttttttgaaattcacaataatgtaatgcatatgtaggtacaaatgtttacagtttacttagagatagacttttttaaaaaagaatgcaagtctgtatccgtatcacaaagctgcgccgcggacaaggggacagatacaaaaaataaaaacaaaaccgaactctagcctcttaaatgtgttttttttcctcgcgatcttacaaaataaataacagcaaatagaaagataaacttacatataagcgcaatattcaaatgtttagtggcgtctacgaaatgtttttcaattactgctggtgtaagacacatagataataaatgtgatgtgttttgtgtgtttttttagtttggcctaccagaagtgtgctctaaatatataccaatgtgaatcgaaatcgtagctccttgcgttctcctatatacatgtgcaccgtgagatccagagtcccatcgttttcggtttagttaccctcgggctttggcagattcgtatcataggcacgtataatgatagactgcggcacagctccgccctcctcctgggaaaacgcatagccatctgggaaggtaaacaatgccagttagttagaatcgtatagatcacaaatggtcaagtgattcatgtgtggtatctgttgtaatgtgtgagtgtggtcccagtgtctcatacatatgtatgtatgtagttctacctccaagggagacccccttgccacaaaatggaggccatactccatagcccagccccgggatgcggacctactgctcgaggagtcctaccactaatggctgggttcctgcaactgagtggtactcacgcgatagctcgagatccgtttcgactctcgtgttggcacgacgggtaaagacattacgtagcagccgggccgtttccgtgaatctgttgggttaatttttgagcgggtcgtatatggtttagtaaaggatttcaatttcgtacggggtgaggtcaggcgggtcacttaatagattagtttccattttgaattgttagcactttacgcagagttcttgcaatttacactagaattcaacggaatattgcgataatctgggcttgggcagaggagcatacatatatgtataatcaaatcaggatgagcaataaggtgtgtacaggtgtgtaccaaatcgatagggtcatgcagaatacgtaataaatggagtagagcctctacatactttaaagatggcaaataaaaggaatacgatgcggttctggatatcaaatttacaacgaatctttgacgctacgtaaatcataaggttttgtaccataaagtgttatagttatacaagtttgaggtcctatctacccgtatatatatgtatatatctcccttctgagggaggggaaccctctatatcataaaaaaaaaacaaataccctgtgactgggtgaagtgacaaagtgggtgtatgcgtgttttttgtggatggagtgtgttgtgacagtgtagatatgatttttcagcaatatctactttttttacttacaccgaattatcgatcccaaggcatacatggtactgcgcacacagacagattaacgcagaaaacgttcagagaaatttcaaataaacatttttcagaattttgctgttgactctttgacttttattaaattatatattgttttgattagttattgttgggtgtgtttgggttctgcgagtaggtgttgggtgtgattggttaagtcgctttgttgggtgtcgagtaatacaaaataaaacataagtacatacaacataagtgcagagcatatcgaaacaattcggatcgtatcgtattcagatcggattgaacaatcagcagtcattgcgttagtataaagatagattattggccgaattaaattgcatgcgagctggggaggattgtgcgggatacatacatatattcaaaactgatacatacatatcatctgggtaccatcacattccaataacgttgggatgattatatatatatatcggttggttaatcataaatttgttaattaggatcgaacggaacattcgtgactgggtttgttaacgttatgtaactttacaacctggtaagtgtcttagaagtatagtttaacatccagctaacacatacatatacgattaaggtacgattagagataaataaactcagcttgttgggaatgatgataagaagacgtctcacaagatagcattccctgattattggcctatcctacgtgcctaaacacacctgtctacttcttagacactatcacagttggcaaatagtttgttagcacatacagtatgcgatgtaaaaaatatccgcttctcgggactagcatataaacatgaaaatatgatatatatgatatggatgcggaatcgggaaatagtcccattcggaatgcaattacaatactatacaatgctcacttataaaatacgttttataactagaaaaataattcgatttgatttgccttcgatgagggaagaagtccatcgtccacatcctcacatgtgcagagtggccgtgatgggtgatgtggtgctatttctcgcactccttgcaactccagtggccacctgaccacctcgccacttctgacgctgcctgctctgctgctgctgttccgtgtcggcctccatctccaggttctccacccgcagattcgacgtcctactggattccgacacgggatgatgatcgtgcgaaatcagaatgtggctggatcgtatcaacttgccgagggcgtatccaaaaccggagtcactagtgcgtcgcatgggtgcagggatttcgaatgggtttatggatcgattgaatgcatggatttgggattgaggggacaatcgtcaccgccatgggattgatgggggataaaggaagacagagagattacattttagggatttcaattcattagatacttgctcatggtgatgcagtcgaagattgagtaaatctgaatctgattgatgctttcagtttttgtcttaactcagttaaattgtgtttgtttctttaaatgcgccgattttattgaatgacacagctaggcgagaatacctcaacacagccaatataattttataaatatatatatataaaccaatttatgttttaattgcattcaaaattgttctattaagtctacaaaaggcgtatcaaacttgggtaaatacataacattaggatctaaacatgagtttaaactcgtaaataacattatctaggtgtgctatgtttattatatgcattaaataggtaggttacatatgaaagaacacttgtgggtggatataacaaatgacaagaaaaaatagtgtttaaacttatcttactctagtctctaatattatttacacatttatcggctaatacaatgccatttctcattggtctcagtggtcttattcataaaggtcctttactatttgtgtgttcgattctagttataggtatatttgaagctaatattcaagtagatactttggttttgatataacagcaactaacatacatcgaaagttgaacaaacacaattcgaggaggtgaaagtgcgataaagtaatgatttggatttagtaatgcatttttatgacccaaacaaactctaaataatagctaaggttggtttcgatattggtgcaatgcaaaaactacaagaagcagggtataaagtgcaggcacatatgttcaatcagccttgtttcgggttgtgggataggtttatagaaatatcaacgtctttaggggtctagttaatattcagcaaatgcgcaacaattcaaattgaaagtaggtatagtttgatttcgtttttggacaaacaaaaactaaatacgtatggaggaatgtaggggaacctccggcccggaggaaaagcgtgactacgggggtctggtaggcgattgcttcgatacttacgaagatcgcggttcgttcatcacttcggagatgtcgctgcgtcggatctccgtttcgcgaacagcctccgtcagtgtcttaaacacggtattatgtacgctgaaaaacaatcacaattcaatcagttatattccatggtgaaaaaatctcttttactcacagtttgcagatcacatcgatcagcagcgtggtaatgggcaccagcatcaagcagaaatagaaaactggcgtcgatagcaactgtatgtccatgccgcggaagttgctcgcgaacttgaacattggccacacatggctataaatcagcagaaatccgaaccacaggacaattgagccccaaatggccagatgggtaagccaggtccacgaattggtgatgagtccagccttcaggcaaacggtaacaatcacgtactaaaataggatgtagcttaattaaaatcaattgaatcaatttcgcacacgaaatattcttacagtataaacgaggttgcccatcaataggtaatcactggtcttgccatcgctccagatcacttcctttgtgtatgctgccagcggtaaccagaaaaggaacaccgagtgcagtagcgcattgaatatccagatccaaaacaccttcacattgaagagcttcgcattctgtgatgttttataaagcatcgggtaccggatcatcgtttccgccgtgcagaatttctcaaagagtcccatcgcaaacggcggcatggccgtgaatagcacattgtacaagccaattgtccagcgttcaaacaggatctggcccgaccagccggagtagacggcgaaccacagttcgataacatacagacacacgttcttgtagaagctgtacaggatcagcttggagatcctagcgtagttccaagcaccatggaccaagagtaggcgctgcaaatagcgaaactgggcgatcgagtagtccgatgcgcatgccgcctggagaccctcaactccagatatgccgattcccacgttcgctttttggatcattgccacgtcgttggctccatcgccaatggctagggtcactgcattcgtgctctgggtgaccatctcgaccacctcagccttttgcattggagacactctgcagcagatgaccacccgacacagaatgcacaagtcttggaaatcattgcgcaggtcgcagctaagggcgtacttcagcgtagtaccatcgatgactagtgccacattggcgtccttcgccgacgaactcttgaattctccataatggcgatgaatgacttcgcgggtggcctataaataaatattaaaattttcagtagaatttctatcaagatatttataaaaaatcaactcacatcgaggctctcctcgtttagtattatgatatccatggagtggctaatcagacggcaggagtagccaatattaatggccgtctcctgcttgtcaccggtaaggacccagatatagatgccggcgtccagcagagaggcaatcgtttccggcacaccatcctgcagtctatcttcgattgccgtggcgccaagtagacgaagattgttctcaatcagattggccgcgtcctccaacttgctctcgcgattctgaagagccaccgatgccttgtcgaaagtctggctccattcttggtaaacatccggccgaatgtcagcaactgccaaacagagggtccgcaatccatccgatgcaaactcctccaaatgacgcagcgtctgttcccggaaggcttgaccctgaggagccagacgttcgtatatcaccgtgtccgctcccttgcagaatagcttgatcttattttccggcgtgcgaacaatcaacgacatacgcttacgcgacgaggtgaactccaggacattcagaacttcgtatcgctttcgcacgcctagcgcattgatctccacatactttggcgttcgtgtatcgaagatgtagccaaatttctgggcaccttccaccagagcacgctcatccggactggcagcgtggtagatcatgttgccgttttccttgcgctcgggtattaccgtatggcacaccgataggagttccaggaactcctctatcacggcggacgtctcatgacgaccgaggatattctgcactagctgagattcctccggcgttcgctcagctgtgtatacgtatccggcgatggagcatttcttgaactccatcacgttctgcgtgagggtgcctgtcttgtccgagaatatatacttgaccatgcccagctcttcgttcaagttcgaggtgcgcgccatggcgggcgtgtttgattcctcgtgatacatctcaatgtcgtagtttatgaaaatggcctgcaggaaacgcacaagctcaagcgtcacctgtagcgagatggggatcaggttgttgtacagaatgaagaaggtcagcaggttgtagccaaggctcttggtcttgaagtcggttaggcccaggtaccagtccgtttccgaatgttcccttgtccagaacagattgcacaagccgctgatgatgcacaatgagatgaggatcatgaagagcatgaggatctgggtgttggtcagcttgtctacggttgagcgcttcaatggcgccgaggtagagttcttcatcagcttcgtctcttgcccggagtagaccacgatcccgaacacccatgccgtgttccgaagaatggcgccacgttggagcacctgatcattgcccaaagcagcgggtctacaaaaaaaaaagatgtttttattcatttgaaatagcagtagggtgacaaaagtcacttctgagactacacacattgtttaattagttctcttactgtttacataactatttaataacaaattactcacggctttccagtttccctgagcactccgttaaactcgtataaatgccggttgggcagctcgcactcgatcctgccctccaatcgttgcagatccttcgtctccagcagttcagcggtggctgggagggcctgtcgaatcttcaggttggtctcaccatccaaattggccgtctctatgaagcacatggcctgcggttcactgtggaagcatcagattcgtataaagtatcaaaacaaattggggttaacttgggtgcgcacctggacgacagcagaatcagatcggcggggaagaaggtattgattcccactttgatgatatcgcccaccgtcaactccgaccagcgaactgtgcaccacgagccactatccaggcgctctatcgatcggtgattgatctcattatccgcccgatgtcgtttctgcaaatcatggaaagatatcaacaactcaactggctatatgttactcttagtacttacaatgtcctcgattatctccttaatggcgctcaccgaaaggatgaacatcagtggcactagcgtggtgtaacgacccgtcggcgacacctccgggatttgttgcagtatggcaattagcaggaaaaagcagttggagtaacgccggaattgctcgaacaggaacgcgggcaaaaagctgatgaaactgcatgcaaatgggacagattgttgtttactttgtgtctaatccattcatttaggtcatgatagttatcaggcgctaaatggctcgtactcactcacctatattttgccgtcgttatgcgattattaccgtacttagtgggctgtggcccatttaggtttatgatacgcctctccccatcatctgcatcgtacccagcggacgaggtgaagtcctcgtcatctgaaaatatgtatgaaaacgttgattaataggtgatatcaaaacgtgagaaatcggaaaattacacggcatttattaccgtggacagcgatgtttcaattaagttctcattttttgctgattagtaatcggctattatcttttgaatgctactatatcaatgatttgatattatggctatatataccaaggacatacaagtatgaaattatagtcgtcccaagaactgtattataagaacaagactaatttaaaacttcgagcttttattaattttcatttccatttgaaggttcgaattcatgttccgagacgaggtatgttggtgtccatcgccataaccattccaccagatagaaattggcagccatcggattgccaagcgcatacttccttgcaaaattatggcaattgaaggtgccacgacccttttcctcgccctcgggaacgaaagtctcgtcgaaatcgagctccagatactgcttgaaggccaggaagacgattcgatggatgttactgccgtggatggtccgccggttgtcgtaggccacaagcgtctgacccatggcgacatcgcagcccggaatattaccgaccatccaaatgagccactccgtattattgtccggcggcacgtccaagtcgaccatcatcagcgtgtgatagtgttccggatcggccttaaaccgaatgatcggttgcttcagcgtctcattaatcactaccataatgcccggtttgatgtcgatatcgcagggatatagcacactgatcaccttcgttggcttgcaggcaaagaggcggggtatcacgtggtgcctcttgagttccgtgaccagtttctcaactggacaaaggatcgggcagctcaccagcatggtggtggaatttcaaaattttggttgacaaaacaggaaagaggagctaggcttgctataattggcatataagctttttttattgtttatggaacaacaagaaccgcagatgtctgttgttctagatcaattaaaactgatcaatcgatcaatcgaataaataaattcattgtttggtttctatagtagttactctagatcgcatttcagttgtactattttatagactgttggtcttcaaagaatcccatatttgtgtacacaatttccccatcatttgaaagatttgaatatttttctagtcacttacgactccaacgaatgcgcatcgccttgtagacattacgaaagtccattttggcccggcgaaaaagcgcgggacaacggaagcgtcctgcccgatccctagatggcgccgctaccaccgactccaccgtctcctcctccgcttcctcttcctcgggcccgggtagctcgtcggatccagaatcgcaatcgcccacgggcacgaatgcaatgcactcgccagcggtctcctcctgattccgcttgggaaaccccaggatggagggcagttggtcactggtgacagcctcggcaaggataatcagccacaagtgggcgtggcgattggcaaatggtataagagtagtcctgtgggatggcgcctgcgcctcctctttttcaatcaatgcgtataagaaaacacaattttcatcccgtacggaggattctgtgccatgcacatttgcctatacacacggccaatgaagggattcctacggagcaccatttgaccacctaatcaaagtggttcaccaatgttccttgcgtggccaactggtcgtataactttttcacatccatcacctggcaacgtgcctgcacttttccgtttcaggtatcgatttgtcacaattaagttgaatgcgttaagcacgtgattttccggccaacagatttaaacga

SEQ ID NO: 25220 - DNA, 4013 bp, DROSOPHILA
ttgagaaactggtcacggaactcaagaggcaccacgtgataccccgcctctttgcctgcaagccaacgaaggtgatcagtgtgctatatccctgcgatatcgacatcaaaccgggcattatggtagtgattaatgagacgctgaagcaaccgatcattcggtttaaggccgatccggaacactatcacacgctgatgatggtcgacttggacgtgccgccggacaataatacggagtggctcatttggatggtcggtaatattccgggctgcgatgtcgccatgggtcagacgcttgtggcctacgacaaccggcggaccatccacggcagtaacatccatcgaatcgtcttcctggccttcaagcagtatctggagctcgatttcgacgagactttcgttcccgagggcgaggaaaaggatgacgaggacttcacctcgtccgctgggtacgatgcagatgatggggagaggcgtatcataaacctaaatgggccacagcccactaagtacggtaataatcgcataacgacggcaaaatatagtttcatcagctttttgcccgcgttcctgttcgagcaattccggcgttactccaactgctttttcctgctaattgccatactgcaacaaatcccggaggtgtcgccgacgggtcgttacaccacgctagtgccactgatgttcatcctttcggtgagcgccattaaggagataatcgaggacattaaacgacatcgggcggataatgagatcaatcaccgatcgatagagcgcctggatagtggctcgtggtgcacagttcgctggtcggagttgacggtgggcgatatcatcaaagtgggaatcaataccttcttccccgccgatctgattctgctgtcgtccagtgaaccgcaggccatgtgcttcatagagacggccaatttggatggtgagaccaacctgaagattcgacaggccctcccagccaccgctgaactgctggagacgaaggatctgcaacgattggagggcaggatcgagtgcgagctgcccaaccggcatttatacgagtttaacggagtgctcagggaaactggaaagccacccgctgctttgggcaatgatcaggtgctccaacgtggcgccattcttcggaacacggcatgggtgttcgggatcgtggtctactccgggcaagagacgaagctgatgaagaactctacctcggcgccattgaagcgctcaaccgtagacaagctgaccaacacccagatcctcatgctcttcatgatcctcatctcattgtgcatcatcagcggcttgtgcaatctgttctggacaagggaacattcggaaacggactggtacctgggcctaaccgacttcaagaccaagagccttggctacaacctgctgaccttcttcattctgtacaacaacctgatccccatctcgctacaggtgacgcttgagcttgtgcgtttcctgcaggccattttcataaactacgacattgagatgtatcacgaggaatcaaacacgcccgccatggcgcgcacctcgaacttgaacgaagagctgggcatggtcaagtatatattctcggacaagacaggcaccctcacgcagaacgtgatggagttcaagaaatgctccatcgccggatacgtatacacagctgagcgaacgccggaggaatctcagctagtgcagaatatcctcggtcgtcatgagacgtccgccgtgatagaggagttcctggaactcctatcggtgtgccatacggtaatacccgagcgcaaggaaaacggcaacatgatctaccacgctgccagtccggatgagcgtgctctggtggaaggtgcccagaaatttggctacatcttcgatacacgaacgccaaagtatgtggagatcaatgcgctaggcgtgcgaaagcgatacgaagttctgaatgtcctggagttcacctcgtcgcgtaagcgtatgtcgttgattgttcgcacgccggaaaataagatcaagctattctgcaagggagcggacacggtgatatacgaacgtctggctcctcagggtcaagccttccgggaacagacgctgcgtcatttggaggagtttgcatcggatggattgcggaccctctgtttggcagttgctgacattcggccggatgtttaccaagaatggagccagactttcgacaaggcatcggtggctcttcagaatcgcgagagcaagttggaggacgcggccaatctgattgagaacaatcttcgtctacttggcgccacggcaatcgaagatagactgcaggatggtgtgccggaaacgattgcctctctgctggacgccggcatctatatctgggtccttaccggtgacaagcaggagacggccattaatattggctactcctgccgtctgattagccactccatggatatcataatactaaacgaggagagcctcgatagttcgtcggcgaaggacgccaatgtggcactagtcatcgatggtactacgctgaagtacgcccttagctgcgacctgcgcaatgatttccaagacttgtgcattctgtgtcgggtggtcatctgctgcagagtgtctccaatgcaaaaggctgaggtggtcgagatggtcacccagagcacgaatgcagtgaccctagccattggcgatggagccaacgacgtggcaatgatccaaaaagcgaacgtgggaatcggcatatctggagttgagggtctccaggcggcatgcgcatcggactactcgatcgcccagtttcgctatttgcagcgcctactcttggtccatggtgcttggaactacgctaggatctccaagctgatcctgtacagcttctacaagaacgtgtgtctgtatgttatcgaactgtggttcgccgtctactccggctggtcgggccagatcctgtttgaacgctggacaattggcttgtacaatgtgctattcacggccatgccgccgtttgcgatgggactctttgagaaattctgcacggcggaaacgatgatccggtacccgatgctttataaaacatcacagaatgcgaagctcttcaatgtgaaggtgttttggatctggatattcaatgcgctactgcactcggtgttccttttctggttaccgctggcagcatacacaaaggaagtgatctggagcgatggcaagaccagtgattacctattgatgggcaacctcgtttatacttacgtgattgttaccgtttgcctgaaggctggactcatcaccaattcgtggacctggcttacccatctggccatttggggctcaattgtcctgtggttcggatttctgctgatttatagccatgtgtggccaatgttcaagttcgcgagcaacttccgcggcatggacatacagttgctatcgacgccagttttctatttctgcttgatgctggtgcccattaccacgctgctgatcgatgtgatctgcaaactcgtacataataccgtgtttaagacactgacggaggctgttcgcgaaacggagatccgacgcagcgacatctccgaagtgatgaacgaaccgcgatcttctgactccggttttggatacgccctcggcaagttgatacgatccagccacattctgatttcgcacgatcatcatcccgtgtcggaatccagtaggacgtcgaatctgcgggtggagaacctggagatggaggccgacacggaacagcagcagcagagcaggcagcgtcagaagtggcgaggtggtcaggtggccactggagttgcaaggagtgcgagaaatagcaccacatcacccatcacggccactctgcacatattcacggaaacggcccggctgctacgtaatgtctttacccgtcgtgccaacacgagagtcgaaacggatctcgagctatcgcatggctatgcgttttcccaggaggagggcggagctgtgccgcagtctatcattatacgtgcctatgatacgaatctgccaaagcccgagggtaactaa

SEQ ID NO: 25221 - protein, 1297 aa, DROSOPHILA
MVVINETLKQPIIRFKADPEHYHTLMMVDLDVPPDNNTEWLIWMVGNIPGCDVAMGQTLVAYDNRRTIHGSNIHRIVFLAFKQYLELDFDETFVPEGEEKDDEDFTSSAGYDADDGERRIINLNGPQPTKYGNNRITTAKYSFISFLPAFLFEQFRRYSNCFFLLIAILQQIPEVSPTGRYTTLVPLMFILSVSAIKEIIEDIKRHRADNEINHRSIERLDSGSWCTVRWSELTVGDIIKVGINTFFPADLILLSSSEPQAMCFIETANLDGETNLKIRQALPATAELLETKDLQRLEGRIECELPNRHLYEFNGVLRETGKPPAALGNDQVLQRGAILRNTAWVFGIVVYSGQETKLMKNSTSAPLKRSTVDKLTNTQILMLFMILISLCIISGLCNLFWTREHSETDWYLGLTDFKTKSLGYNLLTFFILYNNLIPISLQVTLELVRFLQAIFINYDIEMYHEESNTPAMARTSNLNEELGMVKYIFSDKTGTLTQNVMEFKKCSIAGYVYTAERTPEESQLVQNILGRHETSAVIEEFLELLSVCHTVIPERKENGNMIYHAASPDERALVEGAQKFGYIFDTRTPKYVEINALGVRKRYEVLNVLEFTSSRKRMSLIVRTPENKIKLFCKGADTVIYERLAPQGQAFREQTLRHLEEFASDGLRTLCLAVADIRPDVYQEWSQTFDKASVALQNRESKLEDAANLIENNLRLLGATAIEDRLQDGVPETIASLLDAGIYIWVLTGDKQETAINIGYSCRLISHSMDIIILNEESLDSSSAKDANVALVIDGTTLKYALSCDLRNDFQDLCILCRVVICCRVSPMQKAEVVEMVTQSTNAVTLAIGDGANDVAMIQKANVGIGISGVEGLQAACASDYSIAQFRYLQRLLLVHGAWNYARISKLILYSFYKNVCLYVIELWFAVYSGWSGQILFERWTIGLYNVLFTAMPPFAMGLFEKFCTAETMIRYPMLYKTSQNAKLFNVKVFWIWIFNALLHSVFLFWLPLAAYTKEVIWSDGKTSDYLLMGNLVYTYVIVTVCLKAGLITNSWTWLTHLAIWGSIVLWFGFLLIYSHVWPMFKFASNFRGMDIQLLSTPVFYFCLMLVPITTLLIDVICKLVHNTVFKTLTEAVRETEIRRSDISEVMNEPRSSDSGFGYALGKLIRSSHILISHDHHPVSESSRTSNLRVENLEMEADTEQQQQSRQRQKWRGGQVATGVARSARNSTTSPITATLHIFTETARLLRNVFTRRANTRVETDLELSHGYAFSQEEGGAVPQSIIIRAYDTNLPKPEGN

SEQ ID NO: 25222 - DNA, 2663 bp, DROSOPHILA
ccgacagcaattgaaaaatcctctgcaattatggacttgcaacacattttcacttcatttgcagctcgctgctttggcaaatttaaatgcaatacaaatacaaattaaattaaatatatgcatttaatatgaatttacgcaatttaggagcatttattttttgcggaccgctgatgtttgcttttataatgcgcgtcttgggccaaataactgcaattacaaaacgcaaaagcgccaaagaccgaccgagtgagaaaaagagaaggcaagactcgcgcgtctcgagcggctgcacatgcaaagtgcggaagggtgaaagagacgtaagaggggtgccacaagtgcctggcacgaaatttatgcaaacaagcagcgaagtgtagaaaggcgtgtaaaaagcgggggcgtcaaaagcgaggacgatggagcgactgcagggaatggagggaggggcggcggtacgaacgcaccgcaaattaaaagcgctaattgtgctcagtgtatgcaaaaaaatgatatatgtacgctgcgttgcgtgccaaaggcgcattaaccagagcgcgccgttatttaaatgagagcgaagctcctaagaattgctggcagtgtagcttatgcacggttcgaatatttgcttacatgctacatgcattgggcgggatcgaaaaacaaaagagaaacgaaaagcatacgacaaaacacacagctcataaagtagaacaaaccaaaaataaatttatatttatgaacaaaattacatttccttcaattagttcaattctaaacaccagttcgcttcatatgtaagtacatttattattatctgaacagtgtaattcctttgtaccaagattcattattcatatgtgtattcatgttaatttatgggtatattatgctttatttgcgatccgaaaagtccccccaattgttttcggcataaaattctgatctaatttgaggctgtagcaggacaaagtatccatttcgctagaaggtcttagaaatcagtatcgaacgctcgagacttaaagttatgtttcttgaaaggacgaggcttgaaggaactattgcgaaaaagacgagacttctgaaaaccattctgcaaggaacgagtcttaaaagtaccattctgcaagaaacgagtcttgaaagaacccatccgcaaggaaagatcatcgacatcagtgcgtttaaaatttcttgtgttttgtacgagatgtaatttcaatcggcgtccatccaaacggactccgtggaactgctcgatgatctggaaggcctcttcgcgatatttgaacgacaagtgagcggtgcccaatgagttaccatcgcgatcatagtgcacaaaacctttctccaccacgccgtcttgattgaaaagctccatgatgtcgtcatcatccactccgtaatccaaattgcaaaccatgacaagagtcggtttttttggcggcttcaaaagggtttcctgtttgaatttgctcttccgaatgaatccagttccgttgcgggacctttgaattcctctaagtccgccttctgaatttcgctttctgatcgatcctccttgaacacgttcatttttggcattaacaaacttgttcttattaaatttcatcttgataatgtcgtcaaggctcattttcatcttatctgacatgttgcgagatagtgctgcgtatgctttggattattaatagtaaagaacaaactcgatagttaccagaaatcctgtatttggttaagtgatcaaaactttaacagacaattcagacgccttcttaaatgttacaaaaaaaaaaaaaaaaaaaacagtaacataacatattttcaaaaaaaccataaggttttgctttaagcaatcggaaagagtacacgaagatggtaagcaggttacacactgcgatttttcaaatatacctcccgatatgataataccatataaaaagtcgcaaaagaagaagcaataaattcacgtttcgcatacacaaaagagcaaaagtcgcaacaataatcactttggccattgtgctgccgttttgtttcgcttatttttggtgcgtagccaagtgatcacaatggtgtagtgatcatcatttcccgattctccagatttgccattgtgtggaatcgggttcttcatcattttcccggccagtgttacagttacactctgtgtgccgaaatacgcagcgggtgtgttgcagttgcaatgggacaaaagccaaattgcacttggttaggtgcaacggctcaacgcattgtcctttgcgcaatgtgcagttcccacgacgatgcagcgtcgttagctcctgtttggctgcggcatagggaatccttgtggaccccagcaacacctcctttgattcccgagttacacctggccttgcggtggaggaagggagacggatggacatcgatcttgggcaggtctctgcggcgatagctgctcaattaaaatccatggctagctgacagaaatttatgagcgtaggaggatccttttctcggtgctgccacttcctcgtaattgtgcaattgaaatgcgctgtcaaacggtaaaaaatctaataatttttagcgtctttgttttcgtccgcctaatgctgcaattcgtttgtagtcgcagttatccttattaagtccctgtcggcttgtcc

SEQ ID NO: 25223 - DNA, 663 bp, DROSOPHILA
atgtcagataagatgaaaatgagccttgacgacattatcaagatgaaatttaataagaacaagtttgttaatgccaaaaatgaacgtgttcaaggaggatcgatcagaaagcgaaattcagaaggcggacttagaggaattcaaaggtcccgcaacggaactggattcattcggaagagcaaattcaaacaggaaacccttttgaagccgccaaaaaaaccgactcttgtcatggtttgcaatttggattacggagtggatgatgacgacatcatggagcttttcaatcaagacggcgtggtggagaaaggttttgtgcactatgatcgcgatggtaactcattgggcaccgctcacttgtcgttcaaatatcgcgaagaggccttccagatcatcgagcagttccacggagtccgtttggatggacgccgattgaaattacatctcgtacaaaacacaagaaattttaaacgcactgatgtcgatgatctttccttgcggatgggttctttcaagactcgtttcttgcagaatggtacttttaagactcgttccttgcagaatggttttcagaagtctcgtctttttcgcaatagttccttcaagcctcgtcctttcaagaaacataactttaagtctcgagcgttcgatactgatttctaa

SEQ ID NO: 25224 - protein, 220 aa, DROSOPHILA
MSDKMKMSLDDIIKMKFNKNKFVNAKNERVQGGSIRKRNSEGGLRGIQRSRNGTGFIRKSKFKQETLLKPPKKPTLVMVCNLDYGVDDDDIMELFNQDGVVEKGFVHYDRDGNSLGTAHLSFKYREEAFQIIEQFHGVRLDGRRLKLHLVQNTRNFKRTDVDDLSLRMGSFKTRFLQNGTFKTRSLQNGFQKSRLFRNSSFKPRPFKKHNFKSRAFDTDF

SEQ ID NO: 25225 - DNA, 3363 bp, DROSOPHILA
gcaggagccactttatcgcgtcgaaacgggcaactatgagtaccgtttgatactgcgatgtcgccaggatgcacgcagcaagttcgccaaactccgcaccgatgttctcgagaagatggagctgctggaatgcaaacatgccatggatctgaacaagcagctgcgaagcctgctcgaaagtttggccgaacttcataggagtttggtggatcgactagactcgctgccaccgctctttcccatcgaagtggacttcaaggagacggactttcagtacaagtcgagtaccctgaagccgcaggagctggacgatgatgaaatcgaggccaacaatcatccgcattccactccttcgcaagtcgattgcggtttcgaggctgtcgaacagccggcggcaattataaatgtggaagcggccaaggcgtccgttgattcgtccaccttacaatccgccagcgagaacgaaacgttgctcaaggagctgggcctgtacgatgtggatctgctctccaatccgcagaccattagcaaccaaaaggactccattgctgcccaaaatgatggctacgatttcgacttgttcttgaaccaggcgactgcagccaccaccagtttggagcgcgatctcatgtcctcgaatgcggaggagatggacctgctactgcaataggctacttagtacaaatattaagtaatgtgttagataaatattaaatgtttcagtatttggtgtagatatcaaaaaatattaaaagcctttcaatttaatagtagcttagactttcatttatgttttatttctgtaaagtttaactttatggaaagcaaattctttgctcaacaactgatttaactttttacctttgtactagtttgtttaattgatggaatttcttatatactatgttgtttgaataaataagatagtaaataagaagtcctgtatttacaaacttgcacatttcgtcctgttttgatttgtgtaaaatcctatattatcttatgttaaagaaaccacattttccacactcgacttgttagtcctgcaaaacagtttcacgcagatagacccaattatggatattccacccaagaccacaaagtagctaccgtaaaccacgtactgatcccgcggctccagagcgaatccaactcgctccacaaccgcaacggtcagaatagtctgcaggatcagacccaccaacgtattgataccgaagatcaagccgaaactgtcctccaccagattctcggccaccacggcacccgccaccgtgatgatgaagaagaatacggtgcagaaaagcacatagttcacgtaggccacccagatcaactgcgtcttggcggcatagatgagcagagcgcccagggcagcggcacagatggatatgcccatcatatacgatccccgtcgcttattggagttcagcaggcccgccagaatggctccaatagcacccagcagcgtggccacggcctccactccgccattgtaaacactgagcttattcggtgccacctctttccacaggaactggatgtaggagatcacctagaggatttaacataattagtttattacacacttaacttcttgcaataaacggccaacttacttgaacttgaccacaggtggccaatgcccaccatatgctccactgcagcacgacgggattggagtaggaactaacgaggtggtaccacagcaggcggcatgcgttggcaaaggagaactttggtgaggtctcttctccgtcggcaatggtaatcttctcggaacccgcgtagaagtagaggctacgcggcacactgggcaggaacagggacacggccagggagattagctgcgtggccagcgagaggtagtgcagctgccggtaatccatgctatcggtggacaccaaaatctgggcaaacaggccgccgaggaacttgccgctcaagatggcagctcgcgtgtggcccgtgactacctgatactgctccttgttgaccttggcgtacatgtacgtgtagtaggccacctcagcggccgtaaaggtgccaaaaaacacttgggccacctgcagcattcccacggtttccgtccagataagcatggagaacagggtaatgccagccagtgccgatagcacgataaccggtttgtacctcaccagatctgtgatgaggaacacaattaccagctgggccagcaccgagtacgtgccgaagggatacacatcctgatagatttgatccgtcgtcaggttgccataatccgaggctaggtactctgtgacgtacggctccgaaggtcgaaactcccggaaaaagccaaacgtgcacagcagcagcgagatcttcagccagctcttcatgtcgtaaattgcgataccaggtgggctgttcgcatggagactcgaaactccaagctccaatccggcgccagttgtttcgccaattgataagtgtcgtaaccaacgcgacgaacgccagccggcaactgatcgcgcgaatcaagagcgcctggtagcccatcgctctccgccaaagcggctacagtggtggccagcagtattcacccacaacaaccggaaaaccagaatcaggtgaattttaaggggttcaaaaaaaatcataagaaaacagcaacattcaatatgacaggcatataaaattatttccaacgattactacaactatacaatcaactatattatcacaaaaaaatatatatttaatatacttaaaaaataaactatcaacaaatagtattatttttagaagaaaaacgctatataaaatatattttacattcaatatttcaaaagttgttggaaaagatatgcacatatgaacttatatccaaagcactgcaaattcgtaaaacaattaatttaagctactgttgggccataaaattcgtatattgtttaatatatttacacacatacatacaaatgtttaaatcatgcgcccaagttcaatgaccgttaactgttaatgctagggccactaaaaaacataacttaatattgattttggtgttattcacaaaattgaacacttcatatatttatggccgctactgtacgagtatgacctcaaaagaccgtgaaatatacatttatctacattcaattaatttggagaatttctataattacaacttgacaaatttatagatttggttacagatcacggagcagtgaaagttgtaaattttaaataagttttatttcggtaattgtcgagtaagcaaatttatcgcacagcaacaaaaattaagattcttggattgttccccatcaatttattgacaattaagtgacgcattaattggaaatttgttgaaagctcaacgtttgctcttgatat

SEQ ID NO: 25226 - DNA, 1299 bp, DROSOPHILA
atgaagagctggctgaagatctcgctgctgctgtgcacgtttggctttttccgggagtttcgaccttcggagccgtacgtcacagagtacctagcctcggattatggcaacctgacgacggatcaaatctatcaggatgtgtatcccttcggcacgtactcggtgctggcccagctggtaattgtgttcctcatcacagatctggtgaggtacaaaccggttatcgtgctatcggcactggctggcattaccctgttctccatgcttatctggacggaaaccgtgggaatgctgcaggtggcccaagtgttttttggcacctttacggccgctgaggtggcctactacacgtacatgtacgccaaggtcaacaaggagcagtatcaggtagtcacgggccacacgcgagctgccatcttgagcggcaagttcctcggcggcctgtttgcccagattttggtgtccaccgatagcatggattaccggcagctgcactacctctcgctggccacgcagctaatctccctggccgtgtccctgttcctgcccagtgtgccgcgtagcctctacttctacgcgggttccgagaagattaccattgccgacggagaagagacctcaccaaagttctcctttgccaacgcatgccgcctgctgtggtaccacctcgttagttcctactccaatcccgtcgtgctgcagtggagcatatggtgggcattggccacctgtggtcaagttcaagtgatctcctacatccagttcctgtggaaagaggtggcaccgaataagctcagtgtttacaatggcggagtggaggccgtggccacgctgctgggtgctattggagccattctggcgggcctgctgaactccaataagcgacggggatcgtatatgatgggcatatccatctgtgccgctgccctgggcgctctgctcatctatgccgccaagacgcagttgatctgggtggcctacgtgaactatgtgcttttctgcaccgtattcttcttcatcatcacggtggcgggtgccgtggtggccgagaatctggtggaggacagtttcggcttgatcttcggtatcaatacgttggtgggtctgatcctgcagactattctgaccgttgcggttgtggagcgagttggattcgctctggagccgcgggatcagtacgtggtttacggtagctactttgtggtcttgggtggaatatccataattgggtctatctgcgtgaaactgttttgcaggactaacaagtcgagtgtggaaaatgtggtttctttaacataa

SEQ ID NO: 25227 - protein, 432 aa, DROSOPHILA
MKSWLKISLLLCTFGFFREFRPSEPYVTEYLASDYGNLTTDQIYQDVYPFGTYSVLAQLVIVFLITDLVRYKPVIVLSALAGITLFSMLIWTETVGMLQVAQVFFGTFTAAEVAYYTYMYAKVNKEQYQVVTGHTRAAILSGKFLGGLFAQILVSTDSMDYRQLHYLSLATQLISLAVSLFLPSVPRSLYFYAGSEKITIADGEETSPKFSFANACRLLWYHLVSSYSNPVVLQWSIWWALATCGQVQVISYIQFLWKEVAPNKLSVYNGGVEAVATLLGAIGAILAGLLNSNKRRGSYMMGISICAAALGALLIYAAKTQLIWVAYVNYVLFCTVFFFIITVAGAVVAENLVEDSFGLIFGINTLVGLILQTILTVAVVERVGFALEPRDQYVVYGSYFVVLGGISIIGSICVKLFCRTNKSSVENVVSLT

SEQ ID NO: 25228 - DNA, 10477 bp, DROSOPHILA
tcgagcactcgccgctgcttccaattaactggcttctctgcgattttttccaacacaacaaacgcggcacaaaaaatgctttcctttccccgaatttttcactgtctggtgccagggttgcaaagcaatgaaagccggctgctcaaaatggtaataagtccgattcgaagttggtatttttattgaaaaatactgagcgtgatagaaaaataccgctattgaattagttaggaataccttgcaataaattattatttatttatattttaagcattatgtcaaatgtgatttgttataaacaacatttgacaaatgtataatttcggttttgattcggtaatattctgaaagccatcttccaaaaaatttctttagcaagatatttatagagaagaagcttactgtataatttcttttcactactatcgtagttaattaaagagctatattttatagtaatatttactaatgaattggttgtattaagtattatattatattacatacatacttacactttcactaccaaagaaaacacacaacctgaaaatattgaatcacaaattcttttgaaaaatgtagaataaaacatgagcacgaaagtcaaaccaggaaaaccaacaaaaaaaaaaaacattacaaaaatctatgaaagttaaatataagctagctgttgcctcgaaaccgctttttaatctacactagtcggcataagtattttgacaaaataagcgcagcacatttgtcagtgtgtaagtaatataaacttaaaaattaacaagcaaaattttttttattgaaacttaaaaagatataaacaacttaataaaatatgatgtttttttctttcgcagtcaatatatgatatcatttgaatatatagaaaatccaatcagcccctttttttcagtttctaataaaattcaagaataaaataaattgtaaaatttgcgcctttattaacattatcacagcgggcattattcatttatgtgcctttttagttactgaacactggaatgcgaacatgaagcatctgaaaaatgggaagaaagaacagaaattaaagatttgaatcctccaaacttggtgcactgcatcaccttggtggtcttatcgaacagagcttgtgcacgatcctgctgcagacggtagttgacgaatttgttgaacacatagccatacttgcgggtttccaccacgatacgatcctcgccgacaaggagactgaactcctgcgaagaaacctgcggattgatgtggtgacataaataaacttctttttctctgtgcatccataataatcttacgtagttgggcaagtagatctcagcatggatttcgtcaacggactcgtcacgaactcgaccacgaagtttgtactgtatatccagaaaaccgccgcctgcagactgtcgactcttccttatggcagcagcatccttctcgtcgatctcctgcaccagttttccggaattttccggtgccacagccccaccatcccggctgttaagagcagcaggaatgccggacgtagactgggcccttttcatatcttcgttgcgcacacgatgagtgaccaaagtgccgatgaacttgcgattgttcagaataatggtcttttccatgttgagctgcacattatacttttcgctcatcgcctcaatcacaatttgcataaagaagttcttgaagagctgcgacttctggatctttaccagaaactttgggttgatagcgatgtcgcagacatcgacggtcttatcggaacgatccttcgtgaatctgggatctgagatgctcatgggcactcgataggagccaggagtagtggattccagtatgccaatcagttcctcctcggtgacatcctgcggtgctggaacttccgctgcctggcacacgttaatgaagaacttttcatcactgtttgtcttgaagcttttcacgcagattcctaatggggaaacagaaaagagttgagtattattaaaatggcttgttatctggaaagtttctggcagctaaaaaaaaaaaatagaaagttgaggcgattcaatcgtatgggccattgcaaaagcaaacccctttgttttattttggctttgattccatatacaatcttatacaatatgcttcgcattcaattatgctttcaagccgggatagatttttttatgatccggccacgcgatctcgctgattgcctataaataaagataaggttcgttgtcagttgaagatagtagaacttgggtttccttaaggttttcagatacttttagctttgggaaatgttgttttctcaccttaagctcatcgaaagcctgcttggctaaccagtgaaagacaggacttttccattctctcgctatggattgaatttccttatcgcttttgaaattattagctgaatgggttttaagagtgccatggtacctttcccaaaggtagaccatgctgcggatcttgtagagccacaagtgatttggaacgccacgtatcaagtcctgcaactgttccaattgctcatcagacaaactgttgaggaacttttcgttcatcagtaggaaaatcgaacgcatattgcggtagtggctaaaggtgttcttctccagacccatgtggcccgatttaaaaatctgattgatcgtctttccggtcatcggtttccggccgatgggggcaaagcggtggcgcagattgcgatcgccgaacttctctagctttttgttaatctcgctgccgcaccacttgaaatcccgccaccaggcgtgccagtccttgtagttattggttctatagatttttgtccattccttgcgcaactgggtgcgcaccttcttcttcgaactgcgtcctttccacttggacagaacaccggatcggttcgagtccagagattcggcatcggacatttcctcgtcgtccccatcaccttcgtcttcatcaacatggccatcgtcgatggcatatatgttggtgttgtagttgggcgtttgctcgaagaaggtcaccgcgtatgactgctcctccggctgtggcagcttcttggtattgctgttgatatagggcagactaatgccgcctataatgaagctgcgatctgttcgatccgctctctggcgttttggcccggctttggtagccccccctaactttggagtagtctcagcttttctttttatccctgcaaaattgaacatgtattgttttttgggtatacccgataatttcggaatgcaaaccaaacaaaagcatatttatgactagcttcttgaagtatgaaatgcagttgataacttcgaatcgggtttgaaaccaagaaaatgtgtttcaaaactggtttatcaaaaattcttgtagctagagtacgatccttaatttaaggcatttgaaaaaaaagggatatatttttaacgggtttgcattccaaatgtggctttaaaatcatttatacactttaaaaccaatacaaaagctctataagctagcttgtaattggtttgtatcaaatttttaatttattaagaattcaaaagtttatcccttaccagcgagcggtttcgccatggccgcgttgatcttggttgcctgtagtttcggtttgattaccgactgaccaggtttggatgcaccaggattggtgttcataggtttgtttggttgcggtgcacgattgtcttgtggaaccgccgacttcttgaccattttgtttggaatatcaggatttagatttcgagtttgagatgtggttgacttggatctgggttgattaggagtcccagcattgatgcgatctggccccttgccaggatttaaatttttattgattctacgatttaaattagttccatcttgtatgggacccccagaatgggccacacttggagcagcttcatcagcatttggtaggcggcttcgtctgttttgattgggacccatgggtctgttagagctcgtatcgcggcaacgatttccagaacccgatccacggagaatagtgtttggatagttcggtggaaaattagggttatttgagccttggaatgtgtcatcctcccttcggggaaagcgtacggtgtcaccgccacgcgaatagttgtttcgctgattgaagttgtcgtttaagttgcgtcgatcgagttctggatcaaactggcgcctaatgccctcaaagttacgatcgttgcgattgcgtccatatgaattacgatcatcgatgttatgatcttggatgtagtgttgattaccccttgagtggtaaccctcatactgatcatcattcataagtgtatcatttgtgtcatcgatgaaatcggcatcatcttcaagaaattcgcgttcatcgggtatatagtcgtctatatcatggtgttctagatctagatcctcttcttcgtcagtccagtcggtgcgacgtagtattatttgattgtcattcacaatacgctgataattgtgcctcttttggggtccacggtttccaacctggtcagcgttcacattacgtggatatggtggttgttttggatgcgcttcaggcgaacggaatcgatctcttggcagctgaatgccgtcatcgcttatagcattacgatccaagttgggttgctgattcgaaacgaagttctgattaccaggcctgcgattgttgtttacttgggaatgatcattgtttggcatctgaacacgatagttgatctggtgatttggtccttgaaaacgttggttattaaagtttgggttctcgtcaaaagttttgcgattgaattgtgcattcgcattacgattgttatggttatgtccttgagggaatgcttggttgttaacattacgagtattgcgattgaattcatcattgactgcattacgattgtgattaaattcctgctcgttatcatttcggatattacgattgaattcatgcggataggcattacgattattgcgattgaaatcctgtggattttgatttctattgggacgattgaaatcctgggggttttgatttctattagatcgattgaaatcctgtggattttgatttctattggaacgattgaaatcctgtggattttggtttctattgggacgattgaaatcctgtggattttgatttctattgggacgattgaaatcctgtggattgggacgtgaaccctcatttcggttgaaattgcgattattttgattgaattcacttctgtccatatttcgattatttcgattaaagtcctgcgcatttgcataacgattgcgattgaactcagcaggattcatgccaggattattgcgatttacgggtccacaattcctattgattggctcccgttgttccacaactccgcgattgttgtttgggaaattttcctctctctgacgattcctagaacgcgatcgatccttattagccggtgagttattcatcctggcgctgtgccaatcaatgttccgcggcggcgacggagtgcgtggccgcgactcgacgtcgtcgtggctagccaccgcttcctcgatggcttggagcacctccttgtccaccacatcctggtgactgtcgcccagctcgacgctgaggcggaacctctggcgctggaaatggcgcaggttgaacttgggcacattgaaggtgcgctgcgccaaggcgttggccaacacccgactggcgcccaggtcacggagaaattggcgccgattgtccagctcgctgttggctattttcatggtaccacatatgaaatttaaaatttaaaaaagcagacacgttttaggttagagctatgtggtcacgtttagcaaaccaattccaatctaatctactcatgacgacaatgctcactgaaaatatgcatacaaattttagtttaaatctataatagatttgctttgttttgcatttcttcccaccctttaattgctttaacaaattgtacaacacaaaaaaaaatgataatttcaattgcattactacttgattgccttttcagtcgttatcaaaatgctgactaagtttgatgtttgattttttgtcaatctataaacactaagcactgccactatctcatattttaaattaaacatctaaattgattagattagaaattctatcacagaattctattctattggtgtgtactttcgaaatgcatagcagcaaatcctgtagttgtagttgttaagaaactactcagtaattatacatttatggcatcaaacacacaataaactgataatcaataggtatggtcatgcttataccaaaatcgtgaagaattcgcaaccaaacacccattaaatgctcttaattgtatgactactgttgatatcgttatcatttcggcccacttttgttgctcttgcgacaacaaaacgtttaagagtcgcgtcgtgtgtccatttcggttcagaataatttcaccagagcaggaaaatatgtttaaatcggcacttaaaatcaggaaagagagtcggtatctttcagctgggttttattctggacaaacttggcattattggagagtcgggtgctttgatggcagggggttttaattgatcgggcggccaccaggcagtcagcgccacaaaaagagccaagttaaacgctctccgaggtggcgctattatctcatttttgttgttttttttttgagcacggaaagcgcggaaaacaaataagtttgttcgcagcgctcgcttcgaattcagtttgcctttttgctcgtaacgagccggttgtccgtcgattttgaagtgctccgccgacgctgccctccatccaaatccaaatagcgatccgacctcaaccgctacggctcgttttgtttcgattcgattctattcactccgatcccccacaaccgattcgtttgaatcgcagcgagtttttttctacgtagaggtaattataagtgacatttcagtcgcatcgataccgccaacaacaaccaccgccgtccatttttgatacccttgttgatatgtggttgttggattccgccaaagcggaacaagtgtgccagtgtgcgttcgtatctatgtgttgtgtatctatctctgtgtgtccacattctttgcctgaaattgtgaaatttccgaaaggctccagaatatcccgcgcaaacatttctcagcaaacgaaagaaatacgaaaaaaaaaaaaaagaactgacgagaaatcgatgattcacattcaaagtagtttgatatggttaagtgttttgtcatgctcgcagctcgattatttaattgataacagaaaaagtgtaaaaattgtggtgcgcaaggttgtcgtactgctgttcgtacgaacaaatttgaagttaattgcctcgtgggttccactgacgtcacaggccttgaaagatggcctacgatctgtgggttcgacagcttctcgcccagtccgatggtaatcaagctccaaggactcagaatcagcagcaagtggagcaaacaagtgtgcgattaggagcaatatagggtttacgatgtgcaattcataactggagcaacgacaaacacaatggaagagtctagtagggggacagcaacaggcagcacacacgataaggttcagctgtggggtccccgataaggagctgctcgtataatcattctcgctatgtggaagttgttttctccagagtttgcacacttggctaaatgcagccagtcagccttatctcagctttttccctattaataaaagtcatcaagtgtcgagtgtcgttgatattctgtaaataaatcactcttctttggcggtgtaaacaatttgtgccggctggcatgatctgatccagaacaaacaaaccgtgtgtgtcagtcaggttgtgaagagagtggcgttttttgctgagaaaattgtcaggttttctccttgattttatggtgcagccaagagatctccatgccattttgcttagcatctcatcgtgagtcgacgtttttgtttttaaagagaaatttcacttgggtgtaaaggcaaaacacacacatttcgtacaattgaaatattaggttttgtaagggggttttttctgccgattgttttgtgcttatataatcgctgcgggaacaggtttcgccgttaattatatcgaactgaaaatactcgtttcagatgtgttagaattttatctaaagtcaaatggcttaaaacacatgcgtgtacggggcaaacaagtttttggcgcccataaaatgtgactagcccaataccttttatgagctccgttcaagattcgcttaaagtttctcattccttctttttagttgtgtgtatctctgtgtaaattagttcttcttcgaggcggggaaacacgttttagtcgctcatttgtcattggcattgtacaatctcgctggactataaactatcgtttcaagtgggcgcgattagaccttcctccaagtggccctggacatgtaaacacttaactgccgtagcgcacaataacgacggctagattacaaaacttcgtactaactacccgctcaaccctctttttgtttcaatacgatagatagtttgtcaaataatagtgtgcataggaattaaactgatttgtttggataattgattttttgcctttgttttgacgaattatccaatagttaagtgcaaaatactaattaataaccattaaaagattggaaatttgaatatacaaaaagtgtgcacaaactatagttaacttacggaattaattaaaaaatttagagcaattgattcaattttaaatacaagtaattcggatatgttttcaatattcgtaattggtttttaaagtcttgtcgaagattcgttaggatgggtttttctgtcctatgacgtgttccattcgcgtgcgtttgttcgccttatcgcgggttcactgtaccaccccgagcgattacgcgcaatcgacgtcgacgtgagatgtttatcaggttgacatggttccgcgctcgcagagattactgtgcacacacaagtgctaagtagaccataaacccagagtcatgcctactactagctggctgtaatctccggttagattctccgcgccaccggcagcgattgctgtgccatgtgaagctccggctgttgcaatggacgccacttacctgcggtcggctggacaatcagcgagtctcgcggcggcggtttctgctgcgggccgctgccctccggatcggcgcctccaaagtactggttaatattgtcctcaaactcgttctgcatttagaaaatgaaaaaaaaaaaaaacaagttcatctttagtggcgcagatagttcctcacatcgaatttctcaagttttgcttacccgcacaaagcgcaggttctggtcgcgaaaattgtcgttgccctcaatgaaattggaacgacgcgacattttgctgcacgatttcaattgccagttacgagttaatccaatgcaaatgctatttttgcgctgagcgacgagcgaaaaacgcaaattttatttgccagaatggagctgtcaactcgattgaaatgaaaactaatgtgacagtgtgaacgccggtggaaaaacatttaatgccatgcgataggctaaaaatactagataggcgttttccctgtacagggtgctcattaataaaaagtaaatgacaagaattttcgagaataattgctatgaatttctatatgaaactttaaaagcttaatccaaatttaagaaattcatttgtatttttgctgttgcaaatgcaattgatttctacttgcttctactaagttttccaagcaaatgtattttaataatttatgtacaaaaattacaagtttcacttaaatcaatataaacaattaaaataacacgcagtgcagaattatacactcattttccatccgacacccactgtgcccgcgaaataccagaaaaatactagcaatcaacttcccactgtcacgattagcggttgttgtagttgtgcggcttgggaaggaacagctgttggcccgaaaatatagatccgtttatttccttgccgctttacagttaccacatcgcccgatatagcatacgcatatagcccaattgcacgtggaggaggttgccgagcagtcgagtaaccatggcggatgacactagttcgccgatggacagattctgcggatccacgttctgggtgagtgcatcagcagtggtgttcaatccgaatgcatagtgtaaatgtatggtttccgtgtgtccaacgaacagaacgcaacagagacatggtataccaacgatccggactttacgccctgctttgagcaaacggcgctggtctggacaccctgcgccttctactgggcgttcgtgatctttgacttttactacctgaaggcgagtttggacaggaatataccgtggaacaagctgaacgtgagcaaagctctggtgaatctgggtctgctggtaatcactgccctggacctaattatggcgctggtcaagaagggcggcgactctgagctg

SEQ ID NO: 25229 - DNA, 3266 bp, DROSOPHILA
gcaaataaaatttgcgtttttcgctcgtcgctcagcgcaaaaatagcatttgcattggattaactcgtaactggcaattgaaatcgtgcagcaaaatgtcgcgtcgttccaatttcattgagggcaacgacaattttcgcgaccagaacctgcgctttgtgcggaacgagtttgaggacaatattaaccagtactttggaggcgccgatccggagggcagcggcccgcagcagaaaccgccgccgcgagactcgctgattgtccagccgaccgcagccaacagcgagctggacaatcggcgccaatttctccgtgacctgggcgccagtcgggtgttggccaacgccttggcgcagcgcaccttcaatgtgcccaagttcaacctgcgccatttccagcgccagaggttccgcctcagcgtcgagctgggcgacagtcaccaggatgtggtggacaaggaggtgctccaagccatcgaggaagcggtggctagccacgacgacgtcgagtcgcggccacgcactccgtcgccgccgcggaacattgattggcacagcgccaggatgaataactcaccggctaataaggatcgatcgcgttctaggaatcgtcagagagaggaaaatttcccaaacaacaatcgcggagttgtggaacaacgggagccaatcaataggaattgtggacccgtaaatcgcaataatcctggcatgaatcctgctgagttcaatcgcaatcgttatgcaaatgcgcaggactttaatcgaaataatcgaaatatggacagaagtgaattcaatcaaaataatcgcaatttcaaccgaaatgagggttcacgtcccaatccacaggatttcaatcgtcccaatagaaatcaaaatccacaggatttcaatcgtcccaatagaaaccaaaatccacaggatttcaatcgttccaatagaaatcaaaatccacaggatttcaatcgatctaatagaaatcaaaacccccaggatttcaatcgtcccaatagaaatcaaaatccacaggatttcaatcgcaataatcgtaatgcctatccgcatgaattcaatcgtaatatccgaaatgataacgagcaggaatttaatcacaatcgtaatgcagtcaatgatgaattcaatcgcaatactcgtaatgttaacaaccaagcattccctcaaggacataaccataacaatcgtaatgcgaatgcacaattcaatcgcaaaacttttgacgagaacccaaactttaataaccaacgttttcaaggaccaaatcaccagatcaactatcgtgttcagatgccaaacaatgatcattcccaagtaaacaacaatcgcaggcctggtaatcagaacttcgtttcgaatcagcaacccaacttggatcgtaatgctataagcgatgacggcattcagctgccaagagatcgattccgttcgcctgaagcgcatccaaaacaaccaccatatccacgtaatgtgaacgctgaccaggttggaaaccgtggaccccaaaagaggcacaattatcagcgtattgtgaatgacaatcaaataatactacgtcgcaccgactggactgacgaagaagaggatctagatctagaacaccatgatatagacgactatatacccgatgaacgcgaatttcttgaagatgatgccgatttcatcgatgacacaaatgatacacttatgaatgatgatcagtatgagggttaccactcaaggggtaatcaacactacatccaagatcataacatcgatgatcgtaattcatatggacgcaatcgcaacgatcgtaactttgagggcattaggcgccagtttgatccagaactcgatcgacgcaacttaaacgacaacttcaatcagcgaaacaactattcgcgtggcggtgacaccgtacgctttccccgaagggaggatgacacattccaaggctcaaataaccctaattttccaccgaactatccaaacactattctccgtggatcgggttctggaaatcgttgccgcgatacgagctctaacagacccatgggtcccaatcaaaacagacgaagccgcctaccaaatgctgatgaagctgctccaagtgtggcccattctgggggtcccatacaagatggaactaatttaaatcgtagaatcaataaaaatttaaatcctggcaaggggccagatcgcatcaatgctgggactcctaatcaacccagatccaagtcaaccacatctcaaactcgaaatctaaatcctgatattccaaacaaaatggtcaagaagtcggcggttccacaagacaatcgtgcaccgcaaccaaacaaacctatgaacaccaatcctggtgcatccaaacctggtcagtcggtaatcaaaccgaaactacaggcaaccaagatcaacgcggccatggcgaaaccgctcgctggaatctgcgtgaaaagcttcaagacaaacagtgatgaaaagttcttcattaacgtgtgccaggcagcggaagttccagcaccgcaggatgtcaccgaggaggaactgattggcatactggaatccactactcctggctcctatcgagtgcccatgagcatctcagatcccagattcacgaaggatcgttccgataagaccgtcgatgtctgcgacatcgctatcaacccaaagtttctggtaaagatccagaagtcgcagctcttcaagaacttctttatgcaaattgtgattgaggcgatgagcgaaaagtataatgtgcagctcaacatggaaaagaccattattctgaacaatcgcaagttcatcggcactttggtcactcatcgtgtgcgcaacgaagatatgaaaagggcccagtctacgtccggcattcctgctgctcttaacagccgggatggtggggctgtggcaccggaaaattccggaaaactggtgcaggagatcgacgagaaggatgctgctgccataaggaagagtcgacagtctgcaggcggcggttttctggatatacagtacaaacttcgtggtcgagttcgtgacgagtccgttgacgaaatccatgctgagatctacttgcccaactacgtttcttcgcaggagttcagtctccttgtcggcgaggatcgtatcgtggtggaaacccgcaagtatggctatgtgttcaacaaattcgtcaactaccgtctgcagcaggatcgtgcacaagctctgttcgataagaccaccaagatgcttcatgttcgcattccagtgttcagtaactaa

SEQ ID NO: 25230 - protein, 1056 aa, DROSOPHILA
MSRRSNFIEGNDNFRDQNLRFVRNEFEDNINQYFGGADPEGSGPQQKPPPRDSLIVQPTAANSELDNRRQFLRDLGASRVLANALAQRTFNVPKFNLRHFQRQRFRLSVELGDSHQDVVDKEVLQAIEEAVASHDDVESRPRTPSPPRNIDWHSARMNNSPANKDRSRSRNRQREENFPNNNRGVVEQREPINRNCGPVNRNNPGMNPAEFNRNRYANAQDFNRNNRNMDRSEFNQNNRNFNRNEGSRPNPQDFNRPNRNQNPQDFNRPNRNQNPQDFNRSNRNQNPQDFNRSNRNQNPQDFNRPNRNQNPQDFNRNNRNAYPHEFNRNIRNDNEQEFNHNRNAVNDEFNRNTRNVNNQAFPQGHNHNNRNANAQFNRKTFDENPNFNNQRFQGPNHQINYRVQMPNNDHSQVNNNRRPGNQNFVSNQQPNLDRNAISDDGIQLPRDRFRSPEAHPKQPPYPRNVNADQVGNRGPQKRHNYQRIVNDNQIILRRTDWTDEEEDLDLEHHDIDDYIPDEREFLEDDADFIDDTNDTLMNDDQYEGYHSRGNQHYIQDHNIDDRNSYGRNRNDRNFEGIRRQFDPELDRRNLNDNFNQRNNYSRGGDTVRFPRREDDTFQGSNNPNFPPNYPNTILRGSGSGNRCRDTSSNRPMGPNQNRRSRLPNADEAAPSVAHSGGPIQDGTNLNRRINKNLNPGKGPDRINAGTPNQPRSKSTTSQTRNLNPDIPNKMVKKSAVPQDNRAPQPNKPMNTNPGASKPGQSVIKPKLQATKINAAMAKPLAGICVKSFKTNSDEKFFINVCQAAEVPAPQDVTEEELIGILESTTPGSYRVPMSISDPRFTKDRSDKTVDVCDIAINPKFLVKIQKSQLFKNFFMQIVIEAMSEKYNVQLNMEKTIILNNRKFIGTLVTHRVRNEDMKRAQSTSGIPAALNSRDGGAVAPENSGKLVQEIDEKDAAAIRKSRQSAGGGFLDIQYKLRGRVRDESVDEIHAEIYLPNYVSSQEFSLLVGEDRIVVETRKYGYVFNKFVNYRLQQDRAQALFDKTTKMLHVRIPVFSN

SEQ ID NO: 25231 - DNA, 3692 bp, DROSOPHILA
aatcaaatgtgagaatttgtggcgggcacaactgcagggagtttacctgccctgaatccaccacccagagtcgccagcactcgtcgatctgggagaaaacgataaatattcatgaaatatcttctgttgggaaaatatgctttattacttacataagtcctaatggctgaggtgatgccggagcaattgttgggtggcacgtgccactcctcgttgggatacggttccagtctgggattctccaccagctcattgtgctccgcaatgacggtggccagtgtgaagggtgtggccatccccagtcgcggaatcgtgagaaaggtgcgatgcctgccctcatcgccgtactcaatgtccacatccaccggcagaaagcgattgcccttggacagatcgtcgcccaaactgaggttcgtccactgatgcagggtgtgcagctccttgaggaccaatgcctggccctggactgcacaaaataatgcgagcaggacgaccaacatggctatcaaatgagaacctgctaagtgacagttccgcgcggttcaaacgattgccgaagactaaagatgtgcaggtaggccctaaagttcttagccttcaatctcaaagtgcactcagagaaacttaagctatgtggtaatagaacaaatgttgcaatacatttaagtcctatcattgctaaatccaaagataagaatctttatttaatgatttattacttataattttataaatgcgaatgaatgtaaaaatttaacacgacctcagcacttattaagtgaaaagaataagaaagctgataaagagtgtttggcattttggtatttatttttgcgagtgtaacatggaccatcaaacccaaagacaaaggtcgtgtacctgtggcggtcaagcaaacactttcgaatcgtcccaagatttatagatggacatcttttatgtcggctttaaaagtatttacacagatctcgagggtgtctgggcattaggaattgggcacctaaaagcagccccgcccctgcaacaggtcatcaacatcgcaccgcatcacccgataattgatttccctgtagtcaatggttccggcgaatatcttctgcagtcgatcggagagcagccacagttcctcccgtccatcagcaggtctgcggacaatcttcatgccactcacaaattgcagcgtagccggattaatagcaagtagcttgacattttcgcgattgtagggccttcgtatgtcccagccgaaaattccgattggctccaggaagccacagaacaggaatccttgtctgcttatcgcatgcgaggcacactgaatccctctcttacccaagacagtgaattccgacagggaggagctcagacccttttgccaattcgtggcattatttaggatatccaaaggaatggccagctccagttcgttggacagcgcgtggaaaatcagatggcggcgcaatcccagtcccaaaggagtcgtcgccaaagccaaaggtccatcgagcagctcaaaactctcaccagccactgtgtgcgttccgaacttagcatccggataggtgaatttgttctcgatgcgccaggagctctgacccacgacatcgtacaccactatggccttacttgtgggatccgccagataggcaaatacatccttgcactgcccacttggcggtgggtccctgatgtctgcaaatatattcacaaatctactgaccttcgccttataggatgtttcgggcagacgataccgatggatcaactgatcggtggccaagtcgaagaccataacctgtggggcacagtgctgcacgaactcaatttcaccgctgtccagcacccacatctgaccacaggcatcgatatgaacccggtacacggacgttagaccatcgcaattcgctccgtggctactgtgccactggtagctaggataggcctggatttcacttccgttctcccgctgcacattggtcacatagcccagggaaaagggaactccctgtccgaagcgaggcgatgtcacaaagtgtctaggtggaccgccattagctggaaaataaggtgaagagtatttagagtacaaggattattaaagtattattttacagaaaacatatttactgggaatttattcccagttcagtaatagacttgtcaggttatatacccattttcgaaatgcaaattaaatgttactaatcaatcgtaaagcaacaattttttcacatactatgagcttattaattattcattgtaaaaaatcaatattttggttattcctgcaatacttctttgtgatgcttacgtggataataaacatcgatgtctatgggtatgggactatccggattatagcgaccattccggagcacctgatcgcgttcctgttcactggggaagccgtactgcagattcttccattcaaaaactatgggtgtatccctataatccgagggaaacttgaagtccggaaagatggtcttgggaggattaaggtggtactgggccaagcaaagatttgggtaagcgagccacacaacaagggctagaataagccttgaaggaaatataattgttatcactgagttttgtcaactttttggtggtttaatgttatacattttaagaggtgtttggcacgatgagagatccttacgcgagggctctcgctattatactgaaccatcacacaccaaaaaaccatacgaaattgggaaataacaaaaccagaagccattttaagatggtatatcttacttgctccaactggtttttaaattgtattttgagtctgctgtgttgtttatatacgctcatttctctagaggctcttcttttgttatcttacccttgctacgggtatttccctttgtatagacgaaatatataaatagatatatagaatgtataaataagttattagcaatggaaatatatagaggtattttattttgtttaatattactttaatataatagccatgccataatgcaaatgaagtgaaatatttttcgttaggatatttggctaataaaaatcctataatttaatagattaagattcaaacataacttaaacagaattcaacggacacataagtgttgattttatgtgctgacattgaaaaaaaaacacgaactagtcagggactgatttatgtcaaagctcttatcacctgtcttgctaagcaagcttatgaatatcgaaatgcccatgaatcactcagtggacttaatagtttatagttaatgggttcctacagatctggtctaccgatacagtcgttcctcgcttatagaagatccttacttagagttgataaatgcaattaaaatgcaagtaatcgtgcttaaaatgtacaaatgtgatgggaaattattgtgttttgctaattattaggttatatattttatttcctagatttttaaagaaaataaaaataattgaggctttggtgtttacagcaaatgaagtatgtcggatatgtctttttggattaaacgccattgcaactgaaaagaggaaatttaaaattggcactgcaagtaaaactcaattgcctgaatgactttgaaattttcggaagcaaattatggtacacaataatcttaaacatgctaaatgaacacatagtgcccaataaataaatcatcgggtgcttatggctttatgatcggaatggccta

SEQ ID NO: 25232 - DNA, 1281 bp, DROSOPHILA
atggttcagtataatagcgagagccctcgctaccaccttaatcctcccaagaccatctttccggacttcaagtttccctcggattatagggatacacccatagtttttgaatggaagaatctgcagtacggcttccccagtgaacaggaacgcgatcaggtgctccggaatggtcgctataatccggatagtcccatacccatagacatcgatgtttattatccacctaatggcggtccacctagacactttgtgacatcgcctcgcttcggacagggagttcccttttccctgggctatgtgaccaatgtgcagcgggagaacggaagtgaaatccaggcctatcctagctaccagtggcacagtagccacggagcgaattgcgatggtctaacgtccgtgtaccgggttcatatcgatgcctgtggtcagatgtgggtgctggacagcggtgaaattgagttcgtgcagcactgtgccccacaggttatggtcttcgacttggccaccgatcagttgatccatcggtatcgtctgcccgaaacatcctataaggcgaaggtcagtagatttgtgaatatatttgcagacatcagggacccaccgccaagtgggcagtgcaaggatgtatttgcctatctggcggatcccacaagtaaggccatagtggtgtacgatgtcgtgggtcagagctcctggcgcatcgagaacaaattcacctatccggatgctaagttcggaacgcacacagtggctggtgagagttttgagctgctcgatggacctttggctttggcgacgactcctttgggactgggattgcgccgccatctgattttccacgcgctgtccaacgaactggagctggccattcctttggatatcctaaataatgccacgaattggcaaaagggtctgagctcctccctgtcggaattcactgtcttgggtaagagagggattcagtgtgcctcgcatgcgataagcagacaaggattcctgttctgtggcttcctggagccaatcggaattttcggctgggacatacgaaggccctacaatcgcgaaaatgtcaagctacttgctattaatccggctacgctgcaatttgtgagtggcatgaagattgtccgcagacctgctgatggacgggaggaactgtggctgctctccgatcgactgcagaagatattcgccggaaccattgactacagggaaatcaattatcgggtgatgcggtgcgatgttgatgacctgttgcaggggcggggctgcttttag

SEQ ID NO: 25233 - protein, 426 aa, DROSOPHILA
MVQYNSESPRYHLNPPKTIFPDFKFPSDYRDTPIVFEWKNLQYGFPSEQERDQVLRNGRYNPDSPIPIDIDVYYPPNGGPPRHFVTSPRFGQGVPFSLGYVTNVQRENGSEIQAYPSYQWHSSHGANCDGLTSVYRVHIDACGQMWVLDSGEIEFVQHCAPQVMVFDLATDQLIHRYRLPETSYKAKVSRFVNIFADIRDPPPSGQCKDVFAYLADPTSKAIVVYDVVGQSSWRIENKFTYPDAKFGTHTVAGESFELLDGPLALATTPLGLGLRRHLIFHALSNELELAIPLDILNNATNWQKGLSSSLSEFTVLGKRGIQCASHAISRQGFLFCGFLEPIGIFGWDIRRPYNRENVKLLAINPATLQFVSGMKIVRRPADGREELWLLSDRLQKIFAGTIDYREINYRVMRCDVDDLLQGRGCF

SEQ ID NO: 25234 - DNA, 3432 bp, DROSOPHILA
ttaaacataaacatattccatactttttcaagcatatcctttcaaaacctcaacataatttggccaccaaacttccgacacctggggaaatcagcccccaacaacgcgtccgcccacacaaaatgcggtctagagtaaatttgcgtaatttttgtttttataaataatggaattacagattaacatgcacaagtcctacgagctggaagtctcctaatctcgaaaccgaaatcccttggctatcaaatccttgcgagcctcctgaatttcatcctgcagctccttggcggcctcgggacaatcgttaaaagtcagagttctatatagaacagtccaaacggaatatatctgtgggtaatatatagtagtagtcaataagaggtgttatctgcattgattcatatccaaaaactcactccaaaaatcacgaggagcaaaagtggtaaaagctgaatgtgcaggaaatacttggtagttagtggcgtttgcactgttcccaaaacaacggagagatagggaatcgcaaagagcgatgcgtaaaatagccagcgttgtagatttgtcatagctaacgaaatttattggtaaacaaaactaaaccgaaaataaagttctacacgtaaacatagagctggaacttaagccgatggtcacccggtaattcgatatcgatatttaccggctactatcgataggaggtttacctattcaaatctagttagaggttttcctattcatgtctagttggagattttctaattagtaattcgtagcctgacggcttccagttagacattgtttacttttctaattggctaacttaagtgtgaccaagccctaagcacgtgccatagcacaaagctatccacagtcagcaaatcaaatgccatactactcagctaaacacagtcagcaatttatcgatagatcaaagttgcgccataacagccagccttctacagccagcaatttaaatcagagtaatcgattgacgcagtttcaaacttgttaaaactaagttttaattaaacgttggtgggcgtggtttctgcggcgcccactgtacacggcgtgttggcaagcaggtcagcggttcggcagccaattatttggaacttgacctcgttcgcgggcaagtcgccgccaacaaagagtttcggctggctgctcaaggcccacagctcctcctctcccttggaattcctgttgatcttgaggcccgtgacgaacttgatcttgtgcggattgtaggccaccacacgcaggtcatccgccgtgtagttggacacggactcctcccatttcaccagcgcccctaaactgatgaggctgcagtagagattccccgactgatccatcacctccgattcgcactggattcctcgggtgcccaggctgtggaagctatccctgctggcattcgcagacttccagaaggtctcgttgttgatcagggagagcggaaccctcatctcattaaaggagttcagcgtgtgaaagtacagaaagcggtctgtaaatttgcattggaaattataaataatttttgagtatttagaatttaaattgaatagctaccttccacttcgctgggactgaggctcactgtaaatattcccgcctgcgagttgctggagcgtcctaatctcagcaagggcgacggcttcatggactcatgctctatgcgccaggatcgtcccgtcagggagtcaaacacgattagaccataaccccaggcatcggctatatacgctctgccgccaacacatcggttgggtgtgcccctctcggccagatccaccaccaaagccgtgaagatggatacgctgggaatgtaggaatcgggcggaagtgcgtgtcgttggactagttcgtccttcaccaaatcaaatgtgagaatttgtggcgggcacaactgcagggagtttacctgccctgaatccaccacccagagtcgccagcactcgtcgatctgggagaaaacgataaatattcatgaaatatcttctgttgggaaaatatgctttattacttacataagtcctaatggctgaggtgatgccggagcaattgttgggtggcacgtgccactcctcgttgggatacggttccagtctgggattctccaccagctcattgtgctccgcaatgacggtggccagtgtgaagggtgtggccatccccagtcgcggaatcgtgagaaaggtgcgatgcctgccctcatcgccgtactcaatgtccacatccaccggcagaaagcgattgcccttggacagatcgtcgcccaaactgaggttcgtccactgatgcagggtgtgcagctccttgaggaccaatgcctggccctggactgcacaaaataatgcgagcaggacgaccaacatggctatcaaatgagaacctgctaagtgacagttccgcgcggttcaaacgattgccgaagactaaagatgtgcaggtaggccctaaagttcttagccttcaatctcaaagtgcactcagagaaacttaagctatgtggtaatagaacaaatgttgcaatacatttaagtcctatcattgctaaatccaaagataagaatctttatttaatgatttattacttataattttataaatgcgaatgaatgtaaaaatttaacacgacctcagcacttattaagtgaaaagaataagaaagctgataaagagtgtttggcattttggtatttatttttgcgagtgtaacatggaccatcaaacccaaagacaaaggtcgtgtacctgtggcggtcaagcaaacactttcgaatcgtcccaagatttatagatggacatcttttatgtcggctttaaaagtatttacacagatctcgagggtgtctgggcattaggaattgggcacctaaaagcagccccgcccctgcaacaggtcatcaacatcgcaccgcatcacccgataattgatttccctgtagtcaatggttccggcgaatatcttctgcagtcgatcggagagcagccacagttcctcccgtccatcagcaggtctgcggacaatcttcatgccactcacaaattgcagcgtagccggattaatagcaagtagcttgacattttcgcgattgtagggccttcgtatgtcccagccgaaaattccgattggctccaggaagccacagaacaggaatccttgtctgcttatcgcatgcgaggcacactgaatccctctcttacccaagacagtgaattccgacagggaggagctcagacccttttgccaattcgtggcattatttaggatatccaaaggaatggccagctccagttcgttggacagcgcgtggaaaatcagatggcggcgcaatcccagtcccaaaggagtcgtcgccaaagccaaaggtccatcgagcagctcaaaactctcaccagccactgtgtgcgttccgaact

SEQ ID NO: 25235 - DNA, 1303 bp, DROSOPHILA
gtttgaaccgcgcggaactgtcacttagcaggttctcatttgatagccatgttggtcgtcctgctcgcattattttgtgcagtccagggccaggcattggtcctcaaggagctgcacaccctgcatcagtggacgaacctcagtttgggcgacgatctgtccaagggcaatcgctttctgccggtggatgtggacattgagtacggcgatgagggcaggcatcgcacctttctcacgattccgcgactggggatggccacacccttcacactggccaccgtcattgcggagcacaatgagctggtggagaatcccagactggaaccgtatcccaacgaggagtggcacgtgccacccaacaattgctccggcatcacctcagccattaggacttatatcgacgagtgctggcgactctgggtggtggattcagggcaggtaaactccctgcagttgtgcccgccacaaattctcacatttgatttggtgaaggacgaactagtccaacgacacgcacttccgcccgattcctacattcccagcgtatccatcttcacggctttggtggtggatctggccgagaggggcacacccaaccgatgtgttggcggcagagcgtatatagccgatgcctggggttatggtctaatcgtgtttgactccctgacgggacgatcctggcgcatagagcatgagtccatgaagccgtcgcccttgctgagattaggacgctccagcaactcgcaggcgggaatatttacagtgagcctcagtcccagcgaagtggaagaccgctttctgtactttcacacgctgaactcctttaatgagatgagggttccgctctccctgatcaacaacgagaccttctggaagtctgcgaatgccagcagggatagcttccacagcctgggcacccgaggaatccagtgcgaatcggaggtgatggatcagtcggggaatctctactgcagcctcatcagtttaggggcgctggtgaaatgggaggagtccgtgtccaactacacggcggatgacctgcgtgtggtggcctacaatccgcacaagatcaagttcgtcacgggcctcaagatcaacaggaattccaagggagaggaggagctgtgggccttgagcagccagccgaaactctttgttggcggcgacttgcccgcgaacgaggtcaagttccaaataattggctgccgaaccgctgacctgcttgccaacacgccgtgtacagtgggcgccgcagaaaccacgcccaccaacgtttaattaaaacttagttttaacaagtttg

SEQ ID NO: 25236 - protein, 409 aa, DROSOPHILA
MLVVLLALFCAVQGQALVLKELHTLHQWTNLSLGDDLSKGNRFLPVDVDIEYGDEGRHRTFLTIPRLGMATPFTLATVIAEHNELVENPRLEPYPNEEWHVPPNNCSGITSAIRTYIDECWRLWVVDSGQVNSLQLCPPQILTFDLVKDELVQRHALPPDSYIPSVSIFTALVVDLAERGTPNRCVGGRAYIADAWGYGLIVFDSLTGRSWRIEHESMKPSPLLRLGRSSNSQAGIFTVSLSPSEVEDRFLYFHTLNSFNEMRVPLSLINNETFWKSANASRDSFHSLGTRGIQCESEVMDQSGNLYCSLISLGALVKWEESVSNYTADDLRVVAYNPHKIKFVTGLKINRNSKGEEELWALSSQPKLFVGGDLPANEVKFQIIGCRTADLLANTPCTVGAAETTPTNV

SEQ ID NO: 25237 - DNA, 30143 bp, DROSOPHILA
gcgctggcttatttacataagagtaatagggaattcaccagtttagttaccttttgtttggttgcgcttttcaagtctaggttttcctaagaattgttctccattccttattttcagcatgctggaaaccatatgctctcttttgatcctttggtggaaaagtaccccccgtaccttttctttggctcggctaaaaatgtgttcaatccacgcagccatttccatctcgttctatatgtgtgtaattaagtctgtccacgacgcaagttttcctcagcgcctctttttacccggcggctgcccaactaaaccactttggcccattcgcacatcgcaaccccctctcctcgacccacctcaacaaaaaacaaaaaaaaaaaaaaactatttcacaaggtgcccctttgccggttcttggcctcccttttggctttctccgccccttccttctgctttctgctgccgacgcaaatccttacgtgtcaaatggagcccctcacacttttggatggcgcccgaacagggacatccacgtaagcaatcaagcacttaatcggctatccgacgaaggattaccccttactggaattattcataccggatcataaatttgtacagataagaccagtttagagacagtactatatagtatagtatagtaagtgaaaatccctaaacatttacgttaaggtcgaagcagaggatacccaggatattatagggtagcaagggaaggaaaaaccaaaacaacaaccacagagaaagtaagcaaaaataatttcgcgattcgtcccccgggcagagccctaaaagtcgcaatttgaggggtggagcccttctctggagcggcaggaagtgggtagtggaagagcggagaccgggcttgcgcaggcgcctggaagaatccgaagccgagaagagcggcgagtgtccgctctcttttttcggctctgtggcaacaaagtttcggtgcctcaattcttcgattcagagtctccacaaacggcttcgcgagcggacgttgcagccacagaagatacagccacggccgtcgaggaagtggcagctacagaaagccaagatatatatctgcatatacatatgactggcgaagctgctgcgaaaaaggtgcaaaacaaattaagatgcataaataaacaccggactcgctggcaggtgtttgtgaactctgcttgtgtgtgtgtgagtgtgtgtgcgagtgcggtgctgtgcggtgaaatattacgaaagaaaaccttttatgttttgcaattttcccgcaaacaaatcaacgagcataaatattaattttggctacacccaaaatgagatgatggacaataacagcggcaagaagaagcgctttcagaaacttgttttagcccggtttcggatttctccgtcttcctcttctcttctcggcgacgtagttaactaagagccgtcgtattagacgttagttagagagtgcgtgtaaattgtcgaagggatattgtgtttcccaaagccccatctgaaatatgtattctcactgttcatctctgtaatgaaagctgtgaatttatcaagttactaatcggtattgtgcggataatggccatcaaaaccttttgagctacgtttttcgattttacattaggcaagggtatccgtaggatccatttactcgccagctgcagaacgaaaatccattcagcaaaactgtctctcccttttccactcgctgagcaatccatttaataactttggaaccggcttgtgtttgctttaatttgttgttgttttttgtggatttgttttttgggtttggcaacgaaagttgccaattaggtttaattttagggggcttcgtagaattttcagcaaagtgcgtagaaaagggtttcgtggtgtgtatccgtgtgggccaaaagtgcgctagtgtgcgtgttgtttgtgtgcggggccaagtgcgtatctcccaaatgtttttattgttgtttgcttttttcgttcttttgtggttttcatttttcgacacccgaaatgtgtttgtcttgtttttatagtttgctctctttcacgccgctttttgcgtagtttaaaagtggaatcaagtaaaaaacaaaacaattacagtagagcctagatgaggaagttctgcgtgcaagaaacataaagttaccaagttgctgtacaagcctttccaaggcattacaaaattacttaaagcaaaataaagttatttagttcactagttagtctccactgtcaatatttggacaacacatttgaatggaaagtttcaaaagcgaattaaaatataaacgtatgaatgccgggcaggtgtgcgagtgtggtgatatgatatttttggtacgtgattttattcgaccatgctaatggctattgtgttctccctctacttgcagattctcttttaatttggcataaattgtatttgtcttgaaaaaagcatattcttgtaaatatatcctcttcgtaaaatattttacttaaaagccttaaaatattgaattcacgtgaaatttcaaacggtgtcactcgaaattcgccagtgactcgccgccacgttttgtacaaacatagtttgtaaacataagtttgtaagcggccggaaaaaggcgaacggaacccaaaaaccccaatgcaagccaactgagtgcaagggagacagccgaccacgtcgagcgggatagcatgcgccaatgaaaacgtcctaccccccaaaagcgtccgatttcgttgactacgccgttgccgggggcgggggatccggattctgttcgggattaggagcgggactttcagtcagggcgacgtccttctacggcgatcaaacggtaacggcaactacggacgggacgcgtcaccaggaacaacaacaacaacaactgcagcagcagcaacagcagcatatcctaaggcaacctgcaacatccgcatcgacttcatcggtagctgcagcagcaaccagcaagcgaaaacgtcaaacaggtgagttttttattagccatccaaatagttactacagacgtgcactagctttatttgtgactaggctttcgaaatccccacctataggtgtcaaaaggtttgaattcgatgtcgataacatgtgaattcgatatattatgttatgcaggcagttttcagtgtaaatcggattcggataaatataagttatcggataagtttttgcttagctaagcaccttcagcaaccacacgaatgaatcatgggtaatatgtccggttgattgccccttcccgtggtgatagcactcatcgattattgtgacaatcgcttaatttgcttgagttatcgttatcacacacgcgccgtgggcaaatgcgccctgttgtttagtaatactaggcgcaatatttattattattggttgccgtgccatatttctgcctcttctgggcactcttatcgcccgatttcccccagcgcctcccctttttattgttgattatcacaatagacgccatggcaacttttttcttctttatttttggtttggttggtgagagtgcaaggaagcgataattcgcatggtggtttgtcgccgttttgtattttttgggtttgtggacattcttagactttgttttgtacttcggttggtatctttggattttccacgctatccgcgattacgcttgcatgctcgagcatgtctgtcttggcgcttgaagaagattcccttccataatccctttaaaatttgcgatgatgttttcgctgctcgacttgcctggcttcattcacattatctgctctgtgaatagtatgagttattgtttgatatctcacaaggtcccccgcacccctgttccccgagctcattgaaaattccagcggacgcaattaccaccccaattgtctcccaatctaagttttcgcttttgagcggctccgcctctttgctcgactgtattttcagtgtttccttcgctttatttatttttcgcttattgcgacttataaaaatatttcagttgttgtttgcgctccccattcgccagtttgccagttcgcttgttgtcgtcatcagagtggctggaatttgttgtattattttctttttcggtaatttttccaccatattttctgctgttctcttctgcgaaatgtttatcttgttttgtttggctggcccctaatcgagataatacttttatttttattattttttttttatacgagaatacgattcttttatttctgggtttgctccgaatatctcgaaaatgtacggggtacgggtatagccaaaaatattagtttttgcgatatgaacatgttgattttgtgtgtggcacttgattttctggctgtcatcggttagatatttgtttatttccacactcttatcgtttgttatgaatttctgacaaaaaaaagtttttggggataattgtttcagctaattctgatacctcaaagcatataaagtttatacgccttgcctatcaagtaggtgaaaatgtccgtagatttcagttcagctttcttctcgtgtcttttcattctgccctaattaacttctcgctcagcattctcgacttcatctgcggtttttcacatacatacacatttctggtttttttctctgcctgtcgatcagcggcatcaaaaagtttccgcttactttgttgccttttcattactgatagccagctgcacgtatactttcgcccataaatctccgccggttgctaataatttcagccgactgtgagccctaaccccgcagaagatttcgccacggatcacgttggttttgagtgggtgaaaggagctcaggcagctgtgcacccagcccagtcttcctcgggtccaggtctcctatgtcccccgtttcgcctcttctctataacccgcttttacccctttctacgtctgcctgtgtaggcgttctttttctttgcaatttcacccggctcacacagatacacaccaacacatgcccataaccggtgcgccttgtctgctctccttctcctgcatttgactttatgcggggtatctctgttttctgcttgaggatgttacagcttttaaatctttattcgaatatttaacaattgttttatctttatctgattgataatcagattaaagtaagtattaagagagaattgtacattctcttataatgaagatttagtatggaacttctaaagcttaaagaaaaacctcttcacaagggtatttaatacaacttgttattaaatctttgtctactgctcttatctgctccccttcttcttgttttgggcatctttaataacgagaatctttcactttgcctcgttgtttctgctgcagcctgacaccgttattctatactctagagatggcaacgtgagtgtctgtgtgatgagtcaatgtggggtaatcacaattaaacaatattcgtttatggaaaaccagatgcacccggttctcgaagttacctggattgggctgagacctcactgggaacaggttccaccgtctgggttcccgaaaacaaacaggttccacatgtcgaacgtgtccaaaatggattcccaaagggaaattggtacacgcgtgcatctctcattaagactcagacggctccctattctccgcccgcctttcttctccttctcctccattcttttgggcccctttctccgcttctctagctacttgctacttggttatgtgatacattaatggcgtttgtgtgtgcgtgcctctcggtgttcccttttgcgacacacaaaataaagccaaaagcagcaaaggtttcttcaaaagcattctaccaagcccacgcactacagaagccccagagagcgaaagagagggaaatacgtcggtgagcgagacggggcacgggtgggcaagctcacatgtcaatcagtccctttctgacacgttctacaatacgttgtttctgctgacgagagaagttcaatttagttttaaataaatatttcatatttttcccagctcatgattcccttcaaatccattagagcttaaaaattaaactgtgcttgtatgtacaattattattattattattatgacaattattcattaaattatgtacttgtagtgtatttattttgtgattttaaaataccctttaaattcctgatactgatacaagtttttaatttaagcaaatgttgagtaatttgcaatgatattattgttgatttggtttttatttttggcccgaccgaaaatatatttggctgctcggttgacatgtgaggaaaagacgagaagcagacccaaagagacatgcgaacgagaaatgtaaatgaaatttccatgcaagacatcacgtaggctcaaagtgcagatacaacgaaaaccgaaagacgggtaaacaaaatttagatttggtttcggaatggttaaatgagccaacgactccgacccgctgcaaattcatgaatatactcgtattcatggctctctggggtgaatatcttacggactgaaggatcctacgatcgatagggcgagatccgcacaatcgatggcagaaatgaaattgttttttcacaactcaaaactcgggaaggtcaaactggggttgggcgggcacttaaagggtccgccactcagggaaactcgtgaaaatgacagctgtccgtgatgactgtatgtatctgccagatgcacagacacttagatactcagctcaagtcgactatggcaaacatttcaattaaccaaaacgcaaggcagcagtaaaaacgaggggccagatactagatacagtggataaaagaggacaggcaccaaattatcttaatgatgtgtatttattttgcttagcttttccctcaattatttctgacatgccaccaaatttgacttctggtgttgtcatacgtggcctgtatattggctaatatatggtggatggggtcagctagtcgaggccaaatggatggtattttcccagatgtatgaaaactagtttaaaatctatataagtttgtcaataccttaagtggaattccattacaattccttcaaattcaatacccaaactgtaaattcattacacacacaccacactattttattattagacattaaattaactgataattgccatactttaattacatattcattctcttccgttgcaggtaagccaaaaaatagatttgatgatccccacgaagtgattaagtgagtttcaatttgatgtattcgaatatgataattcccggggagatctgaactttgtgtactgttcctgaggctgttttcgttcatggttagatgactttcagccgtctctttctcatcatggatgtacatacattgatttcaactcagtttcggttgtttttcgttgatttttgagcctgggtctcggtgctccgaaagatcttcgccgagcggagcagcaactctgagaaatcggaccagtttctttagtctgagaacttgtttcgcgtgtctgtagacgttcattgcgcatacagttggcagttttaattgagtttgcagtccccgaaaaacaagtgagaattatgggtatgtgtgagtcgactaaaggataccttgtacgtgcaggagaaatcatacatttggatatgggatagattgcaaaatatagatagctttataataatgttgctggacaattatggtacccattggtaccataattcaaatggcctatgaaagagtaactctaatttgccattaagcgccacgtccttcgattctcatctcgctgctactcttttggagtctccgctctttagtttgcagctttggggaacggcgacaaatggaggtcaacataaaaatgataaaaaaaaaaacttaaacaagaaaaaacaataaacgcgctaagaagcagtataaagaaaattcgccaacacaagttggtttaaaagcttaacttccctcgtacagctgcggacattatgatgtagaatgggttgggctatagaaatgcctaaaaaagttatctttgagtaatatgcctcagatattttcaaatccatgctacgaatactgatgcatacatgtgttgttggcatccatagattttttgcttaacccatttactgctattgtgttgacccccggtgtgtatcccctttaaactgtagagcggtaagccttgaggttgctgccattgtagagcgggctgtcaatgtctgcgtcacttgttttattgcccgtctgttcgctgtgtatctgtgcgtgtgacaatgcagggccttttactcgaattgtattccacaacgttccagcatacgcggcgacccgagatacagatacttttacagttgcagatacagatacgtgcgtcgtctatggaaattgagactaaattgggttaacaagtgttaatggacagagatctggtacctccctgccgctcccactgttatttaaacgaaaaattgcatcgacatgggaaaagggaacaggaattcaacagcgaacgaaaagatacattgggagcactgtgggaaagagcaccgaaattttgttgggtgccgcaagtacagtaagctccaatgaaaggcattccttaatctaataatggcgaaattatactccaatttgggaacagaatatttaagaacttgacaagatgcaaaggaatttgtttgtattaaataaaatttgaaatgaactcgccgtatcaatgtctcgcatttcgctttcaatttccatttcgatcaatcaattttaatgaaatttctcagaactttttggcagcgctacatgccggctcttattttagcacccgcctcgaaacacctttcgaaaaccaccgccgcccatcacccacttacacgcaaatttacattgcgacagattacgcaaagcaaagagcaggtaaacagattagaagggaatttgaaaagaatgagatgaatgaaagtagcattaaaagtaaatacagtgaaagcttgttttgagtgccagattcgattctaaaagcaacttgtaaagtaagtttcgaatctgttcttcgacattaaattcgagctagagaaattctttagaaaaatcttagaatgtgttaagccagttgctgcaactgtaacagcaaattaaataatatcaaagctgtttaagccaaggatgcaaacagtgggtgttgggggtgtgttctcatggggcggtgctgaatgggcgataggtgcaagaaaaagcaaaagtaaatgcagagaacaccgggcacagaaatagaattctcggacttacacaacaagctcaacgaaggtggcatacacaagggatatacatacatacatttagttgaagcagtcgggtggtggcaataattggcgggtggcaccgggtggttgtctttgcctccgtcacaacacattaaacgcaattatagaaagtcaattgaagagcaacaagaacagagggaaaggcaacaaactgtgcgcgggcgttgaaaggctgcacaaaaaaagccgacagcaacgtcaaatgcgacttggtttacacacaaacagaagatacatttagatacatcctgcgttggcaggagagaggaaagccaccgcaacacgtgcctctatttgcctgttttgtccagattgggtcgtttcccaattacactgtaagaacttcattttactctatattctattgaaattttgtatatgattaattgtatctatcagatacttttttgaacaaaatctcttctaccatttttgaagcattaggtagttgtatcgtcattttccagtattttagagtttttctttcagtgtgcatttcatgcagaccccacagatttccctctgcttctcaccgctttttgctaattccattttgcatgctgggacgccctgcagagaagtttctattaaaatcctttcctcgccgtgggaataggtaaacaaagtgggtggacggggcggtgcgggttgggaaaagcgggtaaaggaggagagtgaaaatgcgagaaatctatgaaaattcaaatagtgcctacaggaatacttgcggagaaaactgtagcaggcgaatgagacatttgctgagctttcacctcacagattttgctccatatgccggagatacatttatcggtttcagctcaccattgccagattcacttctcgtgggctcactgtagccggttttcaggccttaatttgcaaagtctgtcggcttagcagctaaaatccagaaattgctccaccaccctcttttttttactgcttttcctaggtttttgattcgcttatcgaagtatctggccgtagtttacctgttattattgtcattttcgctttctacaggtgtgtagatgtttgttgttgcttcggggctgaaatcgtatgactaatgggagattttactgtgttgctgctcgctatttctatacctttttgccttctgctgcgttttaaagccaaaacaagtttactcgccattattaattgatgttgttgttttcattcgttcgtgtcggggcgttccacacaatacccgccaaaaaaaggcaacaaagctagtgttttttttatatacaatttttgcctctccatttgtcttaaaacacagctctgttctccgctgatatgcggatataagtagatttagattagacaaatttgtttagccgccaaggttgtgtggagcgtctgtttggggaacacaaaaccgtcgataatactggctttaatttatcaattccgttttagtgtagtgaatgttcctcatagactcgcttgatcaaggtgttttgaattgcaaagtttaggttccaggaaattcggcccgtgcacttttggaggttttgaattgagaccaaagtatcaagttgcccgcgtgcgcattatgtgcattatgtattaaaggcgattttcttggcaattggctgtgttgttttcgttctacttttgttttaaattaccacgcccagttccttcaatcttaaattttgcatttcaagcgattcaaccagagagccagaagaaacccagcaaaacgaaaatattgaatatgcaaaaagacgttttcgacgttgttgatgttggcaggcataaataagagaaggaaaacataaaaaacacacggcaaagttatgcgacagaaatgtggacccccgccctctcctccaccaacctatctgcaatttgtgctggcggaaaagcggggaaaagcgggaaaagccgacggaaagggcaaacattcccgtgtaaaactcgtccataaaatgcagataagaaaagcaaaaagttgcagccaaagtgcagttaggcaacattgtggtcggtctgcttttcttttttgttttttcctcttggttttccccttttgtttcggcctgttttgcctttaaggcggcgcacttacatacatacgtacatatatttattttgttcttgtcttattacagattaaattaaatatttaaaatgaaattcgcccgtcttctgggcggcaaaaggtgaccgcgctcgtttttctcgtttgctaatttctgggcaattaagttgaaaatattctttcggctttacattccctggtttgcgattcttttttggacattgcatgcatttcacttacatattttattttcgctgctgttgaccgctgagtggggcaattgttttaattttaatttcagtctgccgaaaggttgtatgcttcgccggtcattaaaatagaaaatcggtaggaatactgtttattaagtttacctatcttttttaatttcctgcaaaaatcctatttattctcgtctgattgctgaaattcaatgggatttataggaccatatatgtatatatatattgctttataggccgggcttatctataagaactgtttctgtttatgattgataataaagtgaagataaaaatttgtgtgcccaaattaaagattttgccctagctctgactacattttgtgggtggtttccacccgtcgttctgttcacaccccttttgcaagcagtcaactgacaaattcccgagctcgtctcattaaactcgtttgaaagcgttcataaatctaagctggaactcacaattcactctctgctggttcgtcattgattaatacgtgcaaaaagcggaattaacgacaataacgacaggccactctaacattaattatgcatttttgtataatttatgaatttaatgttttacatttttgtattattaattaaatgaatgcttatttgtgtgatgaattatgataatagccttcgccgctgtctgttcgtctgtccctcttctgggtttctctgctgattcagttcgcaattgctgagggggtgggccgaccatgggcggcgaggcggttgccaggaggggatcgggcgtagctgctgccaactgtcagcctacactagcactcgcactcacatttgacgacgacggcgccaaacttctcccccagcccactcgacgagccaagtgaaacttgtcgttgccacgtagcgtctgtggctgctgctgccacatcacgccccctttgccacgcccctgggcccctgggctcgactgcggcactgagtcatagtttgccatgagtttgtttgctcgctgcctccatttgctgcgaaacagtttgcataccctgtcccgaatagggttgcctctggacaagtgattcatctgccggagacagtttcaaatcggattaggaaaaaatggttaaaaattcgcttatttggatatatttcaaaccgattaatggcaagtataagtatcacacttattaggcaatgtgaaataaccctttcatcgatcttacgacagtttgaagcaaaatttgtatctgtgcagaagctttgaaggcagctcccttgatactgcattaaaaagagtttacttcctaagcaatttaacagtgatttcccttctataagggctgactgctttataatcccaaaagcgtgttacatcttcgactaagaacttccatcggttgatggcattctggtgttgctagctgccagcactccttccacttctattagtcattggccattcgttcggcgaaatgttgcaacataaactcactccgcagttgtggatattggcctggtcggtcgagccaccctaggaatggattatagagcggtgatgtcagcggggtccgctgtctctagtagtagtatagtacatcccctttcatacccttaacctagcccaatgtcactgctagttttcaccccaaaacaaaaacatgaagtttgtgttttgtttgggtttttgtcttggcctcttcgcttttgcttctcctggctatctgagctgtgttttgtctgggttttctcggaacttgggtactattatgagaagtggtcttccttctggcgttccctcatttcactagttgttctcgtatgaaatttcagaggctttttgctgcttttccttttctgttcatttttatgttaatttatgaacaattttcccttttttatgtgcttttattgctggccactcaatttctcagccttctcggttttccccagccttctttcttattactcttttttcctaactctgttcctttttcctggcatgccatatgcttacaattccatttgaatttctagcgctcgacttgaagttttcatttccgttgaactattttcgggggtaaactttcacgcccgcttttatggcaatgttcgttataggggggatcttcggtattggcttcctttcgggtctttgaacttgttttcgtgcgtttttgcggctcataacattaaatgtggccttttgttgttctttggcgctttgagttcttcagctggctcgactttatggctgttgcctgaaatgtaacacatttcgtgcgttttacgcgtttgcctggcgtatgagtaatattttgtgtttttattgcgtatacgtcgtgtggtccccttttcgctcgcgcgtcttgttaacgaaacgtatcgtgcacctcaattcatttgaaattatttaatacaagatgtagttagatgcaattaacgaaaagaaaattgcaatggtgaattggccagaaagatacataaataaaaatatatatgctataactgtttcccttgcccgatctcttaggaatttataaactttcattagtgtttccctcgaatttaaggccttttctgaaaaatcgtttcgaaaaatttaaaatgcccatgcaaaggaggcgtgtcaattacattaactagagcacgccattccgggccaacaaccaatcaagcagctatacgaaattcctactttgcttcccccccttgtagccataattcatattgcatcgattgatccatattttataatgcccgaacacaaacagcgagcggaccaacccaattggaattggcttattttcgttttccacgaggttgggcgtctaaaaacgaggctaaactaatcgggggcggggtgaataattcatcactcaagtgtcgcactcacgacccataactcatgtccacttcaagccgattacaatgggaattttcgaaatttttctacgcatcaagaatcgcactgaaacaatagttctgccgactttaccgataactagcttcttttattggaagtaagcttgcgatttcgttatctcacgcacaccacagctgataaaaccagagtgcaccatccttatcaatcgttctaaaatgaaatgcattttgtttatcgccatgtgtttgaatggaatattgtaagctggtggtgatacgacgatttccttcacaatgtgaacaactatatttctgcaagtgtatagtacaaggatgaaggggtagggggataacataataatgtcattgcactcttgaactcgtctctgcgtcattgtgggcaaaaaacaacaatgacaattccagcagaacaacaatcatgcatatatatatatatacatatgtgataatgatgctgttaatgatgaggcaggaacataatcctaacgaaattaaaccaaacgagagacttcagtgcaggtggacagcattaaattctattttcgcacatgcaaaataaaaacagataaccagaatcaaaatgtttcctcaaattagcttaaaccagaaatatttcaaatatttcaattgggaatgctgcaaataagcgaaaggtttcatcacacttataatgaataagtttatgttttgaacaaaatgttttaatttgaaaataattttaaaactgacaaattttggggacaaagtcgaatttccgccaagaaacgaagcggcaaatcaatggaatgtgaatgaataatcgaataatagattgcctttggccactggttttccctttctgcttacagtgcaatcgacacttattcgatttctaatttgcagtgcggtttttattattatttttcttgactactactggcttttcctttcgtttgtgtccaaccccttcgactcgttttgcctatgttgtgtgttcaatcaaattgacacgctttccctttttgcttcatttcctttggccgtcttcttttgcagcctgtttgcatttgcatttaaattacattggataccgaaatttgaaaacgattcgccgggtttttctctctcgatttggggtctgctgggaacgcggattgtgggattggcttgaactttgcacagactcgatgcaaaaatgtgatactttgcggtaacgatccccaagagctgcaaatcgcgagagagggagtatgatactcgaactttttagggattgagaaaaggaaagagtataataaaaacattaattaaatacatggcttgatattgcagggcttgaagagggttgtgtgtttgctttatgattgcttatcaagaattcaaattttcacttttccagtcgaataacataatatttttgcccatatgtgtagcccacgaagtgaatgattttaatcagcgactgttgtccatttcagtttgtgtttatgttgtttttccatactttattttatttgcgctgctttcatgcgtcaaaatattttccagttttagtagctgttgttgcctccgactgtagactgactgtatgtagtatcgttgttccagttctcccgatgatgatcattatgatgaagacttgttagacttgacgcacggccgaaagagagggaaaacgttgggcgaaagagacggacggcggcctgcctggttagctgatgctatttttatttggttgctgttgtttttgcagttcttgtcgcgtctcacccctccatagaatctggcacggacttctgcgccctcttcaccctctccaccgcaacccatatcactccactttccagtgcacccgcgtttgaccccaattgaagttaactccgcttggctgggcgctactcaaagtgtctgttacgaaaataccctgcaatgtggagtgcatgttcttatcggtatataatcaattcacagagttcatccacttttaaatctatatttatcatttaagagatccatcataattgaaaccaaaattatgttagattagataatctagatgtttaatgcgctggcacatgtatggcacaattgaatatgaataatattcaaataatattttgtattcttttggttcgtgttcaaaacattcttaaattattgattcttaaatttttttgacggttcaaattaatggcgaccatacattggcaaattagttttattctttttgaacctgtcaatggtctctgtgccgcacagtcatggctatttcttctcgattctttttgtgccaaagttgttttccaagtgaaaaacccacccactgcctgcccacttgtaccagcacacctgaagagttatgcggccacgcccacttccgtcggctgtcctctcacgcccctgcgccctcttctcgtcgcattgtgcaacactcttgcgtctctctctgcgattctcagtcgggttactttaggtcattgcagctggcgttacgcttctaatgctcgcttgaaggacgtcgagtcgacgtcgactgcaactgcgagagttatgtgccccgatgtttatacttttgtttgtagttgtcattctatagccagactaaaaaaaaaaaaatccaagcgacctttaagcggtcgtcaacattttgtttacttcaacacaaagtcgtttcgctagtctagccacatggaaaaacgcaaacaaaactgagaaaaaattttgaattcctaattacaatgggttctatcagataaacaagtacgcgaggaatgcgggaacttagggtgataagagccgcttgtgggaaatgttttcaggggttagatgaaagaacttgataaaagattgcatacagttggcttatgccttctaagaagctctttacaattttcacaaagactttttagggttatattatttatattttcataaactgaaaagcaaacaatcgtttcggggctatcgaatgccaataatctacaagtatacaaacctatattagtttaaaattcaaatgttttgtgtttcggcagtagtctggcaattttagtttcgaaaccattcagatataataatgattctgcaattctttcattacatagcctcccattcatcgtccaatttcaagtttctgtgcaatttgccaatttcaattcggttcatttcgaatggttgatcttaatctgcgaagagcaaaactttcacccgatgaaaagtggacggcgaacaaatttccctttaattttgtattattttgttggtttgtttcggttttgtgtcgggtattttcggtttcttttgccatgaattacgtttaatttgaaatgattttgttgctattgccgctgtcgacttgtcaactgcatgcaacatttaaccgaaaagcagcaaaaagcaatcgaaaaagcgatcaaaaagtggatcgttacgaggcgggtttttgagtgggtggcagaagaagggggtgggatagtgggtggaggtggaggtaaacgccacccgccatcgtatctgttgctcagtcagcatccacaagctttcgcggagcaaaagaaatccacttgcgatccacaagcaatgtgtgggcaaagcgttctacactcgcggccaagagaatagtatcgagacaaaaacatgaagaaaactaaaaaaaaacctatcgaggccattagttttttcgttttaccagacctttaatatgtacagcacaacaatttttttcaagaaatgtttaattcatacattatctacgccactgcatttgtggatcgtgttgtgggtgcctgcttttacctaatttttcattttgccgctctagctgcgccgagcaatagcctggaaaactcttagaaaccatgctgccgtagatccgcgcaatttaaattgaaattgcaatggaaatttcattgctattgctgtttttgctgtctgtttggcagatccgcaaagcggcaccaaaaaaaaaaggcagtacaacacagctctttaaaggccattttgtgttattgtgtttgctgtaattgaatcttgtttgttggttgcattgttgtggctccgcggcaataatggcaatattcgaaagaaacccgattcgagcattaaccaatggcagtgtcagcttgagctttccacgcagagaaaatatctcgtaaatatcttgcaaaataataataataagagtgtctagaccctctttatcatctgataaactgatctgcccacaatttcttgctgtgcaccgagagaaatagcgatatcgaatggaaaaggggagcgatcgttggggatttgttgttgctgggcgctggctttattggcgtcactgcagcggactgcgctgcctcagtcgacgtcttgaatgcaatcaagtgtgcaatgcaattacacaaatggaaaagcaacaacagcaacggcagctgtaggaaaaacttaaacaattaaagcaacaacaattgcagtaacttcagcattattcagcaccttgttgttgctcactctggatacccctggaaattcgtctagaaatcgggctgtttcgaatgttgttaattacagaaattattctttttagttacattcaaagaagactttcgtagaataagtaatttcaaagaaatgtgctcaattagaatgtaacaagttcacttatgagaaatcgccaagggcttcgtagaaatatcctgcaatcaagggtatttttagcttcgttattgccattgtggcctcggcttttggtcatattgttgccaagctgcaaaagcacacaaatcaaaacgagacgaaatgagggggattataacacacatacatacatatataaaagtagcaactcttattttgcgctgccagctcgaagcaagaaattcactgaagcgttgttgttgccgccgttggtgcatttgatttattgcattttccatttggctaagcgtggaaaatgcgaaaatacgaacttccgattgccatttggaaaatatgtaaatggcgtttctcggcaacatgttgcatgcagcgcccgttgttgccgggccatcgattcaatcatcattagccatcgatgccatgtccagctgaagctaacgatgcactttggattgagtcgagaacccgtctaacgtggtcgatagccactaactgagatagaaaatcgatttggtgggagaacctgaaaccattgcgctgattaaaaatgagcagaagcttagcaaacgagttgatcacatactaatgactttttagtatatcttaacaccgatcgggggatctgttaatatgaaacgtagctttttgagcgcttctcctttatctcttgctttttgtacatctcctcttgcttgaagttgtgaaagtaccaatgggattttttctgcatcgttttttagaaaggcgacagtttgtttccatgccctgcttcttcgtgcagcagcaacatgtctctgcaatttgttgcacgagtgccatatctgacattatctgcaatttttaagatcgtcgccgcttccttcttgctccttttccccgagataacttgtcttctgattgtggttgggaacatcacagtggtttggtgggtggaaaggggggctagtggcgggtggagtatgcaaatgagtgtaagattgccatcgggtgttaaatatgcaacacaggccatgaaatatgcaacgacagcagtagcagcaaagtcagatacataatcagaagaatcagcaacaataagtgcacaaatatatgaagctggaacagccataaaagcaacgtctctagcacgaaagtgcggcaacatcaggcatacctatgtatggaaaacaagctgcaacatcagtgaaaacacttgagacaaacaaagctgtgtctatgcaacataagtcccataagcggcagcagtagtataacccacatctatgagaaacgcaggagaagcaacggcagtaataaaattagaaggaaaagcaacacaagcagatccatcgactatcggacatgtggcaagcccgcagcaacattgacaacagcagcaacattgacaacagcagcaacatacataacaattgatggccagaagaagcagcagcagaagaatcacgaaagcttctgggtaattgctctgccttccacgtctctttcttctcaggtttcaacgtcgactttctccgttgttcttgcacgttctgcctgttcccatttcatactgattgcaagggagttgtggaaggggggggggggcttaaaaggcgggaaaaggtggaaagggggcggagaggtcgccggcaactttgttggccgagcaattgtcgctgctgctgctgtttttctgctgcttttggaacttgtttttgttcgtgtctgtaggttcatgttttgtaggtgccacctatgttgttgttgttgttgttgttgttgctgctggcttcgtcaggtgcgttgacaagtggaaatgcttgcccgtgcattgctctcattgcagcgacaaatatttatactgccttccccgccagccgcccacttttcgcccaaacgcccatcccagccaccccgaaagcccctcgtcgtgattgctatacacagaaaaagaaattatagtgttacagcaatgtgattcccaagttttctatatcatatcgtgctaatgcatattcattataatgcggttaaagtttgcaatcatacacattggttggctacaacttgtttggtagcttctaattggtagttacaacatttcaatatcaacttttaactattcgagcaaactccattttaaacatgaaattaaaaaatgttagctggcacttctttttatttcagtgtaagcttctcccggttcttgtcctcgttttttccgatccgccactgcacttcttccccgtcccttgttcattgtttgcgtcgattaatcagcgcatttaatatgcggcaaacgcactgcaacagcaacagcaacaaaaacatccatatcaacggcaaccatataggaggagctatagaccccaagcacgaagctatagctaaagccggagttcagacaagttgggtccaagccaactaacctgttgctttcacagtgttttcccctcgcacctctgttttttatgtgtgtgttttttttttgtatttagcccgtttgctgccttccctctttttcatttagcgcctttccgcttccgttttgtaaataatttattttgaatttctcgatggtatataattatgctcgtttttcgctttgttcaacttccgctgcaaggtttttggctgcattttaacaaaagagcacataaaccaaagtggtgaatttgcattttcgttttgaaacaatattaccatacatggggctaaaaaccaacgcggcgtgtaagttaaatgctaaaaagtcacaccacccagccaaagagttctcgaaactttctctaaaactcgaaaatttataactttattagcttccgaacatcggacttattcccctcgagttagcttgtaattgctaactagcattctataggtgtgcttatgtgattactggaattaccacaaaaatctatgaagagaaacccttgtgatgccaagttgacttagaacccaaaccaatattacattcagttacacatcccggtgtgtttatcagttttctgcttaaaaaccgcaatgaactcgttgagcgatcaaccattaaccgataagaaacatcagagataatggtaactcggaaccattcgggcagcaaggggttaacatgaaacatatatatgttagtataagtaaagaaaaaaaaccaaagaaaaccttggggaattctacatttctaaagaagtggcaagggttttataagtcttatatggggatattttgccaacaaatatttagcaccgacattcgtatgtataatggaagtttggaatatttgtttttgtacaattcaatcacgatatttctttgaataagcgaatccaattcattttggatccccgagagcagatcgcttgcatcgggggcaaacgcccccgcaaatcattcgatacgacgcccccttttaggttcatgcaccccgctgccccacctccacccccatttacagttggctgaatcttttatgcaacagacacagaaattggaaaagctgaggagggggcaactaaaacacaaatacgagtggaaaccgcaggcagcgcagattcgttttgtttgctaaaactgcgtcacgttgcaagtttgcctcctccccctcccccgcaaatcctcctcctccgcatctctatatttcagctactgctgccgagatttgcgtaaacaaatcggttttattatattttttctctttttccggagctgctgcgttgtgtaacccgagggacaaatgatgtcaaagcattggcaaacttttgtgctgaatgtgcagtgcacttacttgcacggaaaattgtcttaattttcagacaataaaacatatgaactagcaatttatgttaaattgcatataaaacatataaatatataactgcatacttttaattaatacttttatattgagtattaattgtaaactagaatgttttctgcaagtgtttccatataacttgttgctggtggcaggatgatgcagccactgctgttgccacgtgagcgttgtgcaagaagtccttgccaggagcagaactggaccacgagagagagagagagagagcaatcgaacttgtgggctggctgggaggaccgaggcggcagaggagacttggaaactgggcaaccttcgatttgaccttcgctgcctccgccggcgacttttgccttcgcggcgacctccattagctgcctgcctttccatttcaatttcggttttcaactggtgttcaagttttttctctttgctccgttttgcataatttattgcatttatttcatttcatattattttcatttcatttactactggcgccgcctcaagtttcgccataaatttcccaccgcacgtctcagttttcatcgcgtgtgtccttaattttagcattgattgccgctcactcctcgccgatgtccagttagcttttccaagctgaccacgcccacgtcacccttctactaggaagcccagtaaaccagccgcagccgttcctttcctggtgtatataaatacccgaagtgcgtggatgacgctcctcctttcgcctttcgcccctttaatgccctgcgctcccattcatatcaaatgtcctttgacgtaaattaattaggttatgtgaatacgtgaagaagtagcaatcgatgttgggacgttgctatagacctgcctagttagttaactgcatctatttttagttgcctaactacgggcaagtcgtcccaagtagatggcatggaactcaacatgtgttggccataatgatgttatgccatcagtttcacattctttaagaaccataaatttcacaattaaaatatttaatgtgatgttttactttaaaataagttcagctgatttgaagcatgagctgaaacattataactttcgaaagcatcatgacttctgcaatagcgttcataaagccataatatcacttcctcgtcatctacatgtcaacctccactccctgttcacccattcacttagtcatctttatcattgttggccaattcccatgttttccttttttcggcgctttcttcgccgctttgttgggggcgttgacaagtcgcaaatgctgatgagagtgcagtgcacagatacagattctataggccatatagccatgtgggccccgggctgaatgtgcaggtagaactgcgttcagttgcattttatcggctagattgcgaggtagcgaaattgcctgaaaccgaaagaggtggcgacaggaaattttccttgacaaagaagcggaagaaacacgtatacaaagaacaatgatctccttagtcataagaagactttttagaaaaggtggaaaataagcttgagtcgtgcgatttcaaatgaattgcatactaatacactttggttctttcgaatcttttagattgtgattgcggctgcgtcgactcatataactccagccacggcccgccagtgcagcaggactcttcagcagcagcgggagcgggatctgtgggatcgaaagcgggatcaggaccaggaccagacggaatcgggcccatcagcagcctcaaaacggcgcacacaaaggtcgccacctcggggggtcatgccaacacgcagccccccagcaaaaggtcgagcagtggagcggatggcgactaccagctggtgcagcacgaggtgctctattccctatcggcggaatatgaggtgggttctgctttatataatgtatatcgtcggatacttaaacgccgctttcccgtttgcaggtccttgagttcttgggccgcggcacctttggccaggtggtcaagtgctggaagcgcggcacctccgagatcgtggccatcaagatcctgaagaaccatccttcgtatgcgcggcagggccagatcgaggtatcgatcctttcgcgcctcagccaggagaatgccgacgagttcaattttgtgcgggcctttgagtgctttcagcacaagaaccacacctgcctggtctttgagatgctggagcagaacctttacgattttctcaagcagaacaagttttcgccgctgccgctcaagtacataaggcccattctggagcaggtgagtcacaattactaaaaagccacaggaattccgcgactaattctgtacttcatatcttaggtattgactgccctgttgaagctgaaacaactgggtctgatccatgccgacctgaagcccgagaacatcatgctggtggacccagtgcgtcagccctaccgcgtcaaggtgatcgactttggtagcgcctctcacgtgagcaaaacggtctgcaacacgtatctgcagtcgcgctactatcgtgctcccgaaatcatactgggcctgcccttctgtgaggcgatcgatatgtggtcactgggctgcgtggtggcagagctcttcctcggctggccgctctatccgggcagctcggagttcgaccagatccgctacatctcgcagacacagggattgcccacagagcacatgctgaacagtgcctcgaagacctccaagttcttctaccgcgacgtggactcaacgtatcccttttggcgcctgaagaccaccgaggaacatgaggcggagacaaacacgaagagcaaggaggcgcgcaagtacatcttcaactgtcttgatgacattgggcaggtcaatgtgcccactgatttggagggcggtcagttgctggcagagaagacggacaggcgagagtttattgatctgcttaaacgcatgctgaccattgatcaagagcggcgactcacgccagcagaagcgttgaaccactcgtttacacggctgacccatctggttgactatgtctactgcaacaatgtcaaggcatccgtgcagatgatggaggtgtgccgccgaggcgatttccacacgtaagtagtgaagctaggcagcaaattattctcttatattaaccgaatcccttaatctctcacagtgtgcagcctgcgtcgacgctggtgactaattttgtgccctcgagcacagagaacatgacgttcacgatcaacaaccagttgaccagccaggtgcagcgccttgtgcgcgatgggcgtcctttggcttacgagggactctaccagatctacaacggacgcagcgtggcccgacagtatccgcagacgcggactgatagcttccagcaccagctggtctcgaacatcctgtgcccgccctcgtaccagacgatgcccagtcccactaaacatgtggtggtgggcagtgcaaccatgcagccaccgttgcaggtcccgccgcagcagtacgttaatgtgcccgtaccagtttccatggtggagccaacatctggtcagagaatgcttctaacgaaccgtgtgcaggccagcggagtagcctggccacaaactggacggcagatggccttggtgccgtcgtggccccagcaggcgcccgcccactcgctcatcgtggactcgacgcctctttttaatgtggaggagatctatcccaagcaccacctcaacttgccacgcaacgatctcaagaaggagtcgccggctcatcatattgcgtgagtgttaactagtagcgccttaaagaaaccccatcctcatgttctacttaacgtttttgttttagcaaggggaactcttatcgcgtgccgcgccacgagaagaaggagcaccagcagttgtcgccggtgaagaagcgggtgaaggaaagctcgccgccccaccagcagcggtaccagcgcgctgcacacgtttcgccgcagtatcacgcgcaccacaactgcaactacgggaatggcagtggttacagcgccagtgccggatcggtggtggcctcctcggctgcctcctctagcagtgagtccagatgcaatatttctcagaccattctcatttttatctaaaaaattaatggaaaataatgcatgatatctactaatttgatattttccctctcctccagacattgtgaatggaagctcgtcgagttcgcaccatcatcacgtccccgtcgcccatgcccagccctacagtagctcctcaggtcaccacattgtaagcaactgcaacgccaacggaggagcaggaggagcagtggtttaccaacagccaccggctcatgcccatcagcagcatgggcagcagccgcatccgcagagttcgcagcatccgcagcacgtcaagcagccgacaataaccatccacgacacgccctcgcccacggctgtgataacgatctcggacagtgaggacgagggcggagaggctggaggagctcaggtaccggtgctaaagcaacgggcgcatgcccagtcgcagaccagtggtagtctgctacagcacgcaccaagctcgtcctgtagcaggagcagcgcccaccagcagccgcatccacatccccagcagcaacagcagcagcagataaactatggtaatgcccagactcagaatccgaatccgaaccaactgggaagcaacagcggcaagggtagccagcatagcagtagccatagcagtaacagtagccacagtagcagtagtcaccacaaccaccaccacccacatcatctgaatccgtctcatcatctgaatccgcctcatcagccagcgagtggaagtggaataggaacgggagcgggatcggcagcgggatcgcagcttcagcatcagcttcagtcacagcctccgactcatactcagccggcgacgcatcctcattaccaagccacgtccacgtcctcctccacgtctgcttccacttccagtcaccatcaacatcatctccatcattccgtccccacttcttcctcctctgtcatgccttcctcttccactcagtttggtgcccctgtcctctgccccagttcctcccaatctcagtcgcatctcagtcgtcataagccatcgcacgtccagctagtaattccatgcgtaaccgtaggtgatcatgatccggaagatgcccgccgtcgtcatcatgccgccgccgcagccgccgtgggaagtcccaagcatcaccatcatcagcagcaacagcaacctgctcctcctccacagcagcaacagcagcagtatcagccacagccaccgccgcagcaggtgttgccccagccacagcccagcatcaagtatgagcccggccagtcgcaaaagaaacgcatcttggccatggctcaaagcgaatgtggctaccaacctcaggttcccagccagccgtcgtcttcggccagtttgccgcacattcccaccaagcaggagccagccgaattttatccggagtatgcagctgctccgccgcaacagttagacacaaagcgctcctcctgggcacctacatcttcgggatcaggagtgtccgctctcccgcttgctcatccaaagcgagaggccccctctgtagctcccataagctatgtagccccgtctgtggctccgccattagcccactccaagagcagttccgcatcatcatcgtcgtcgataagcgctgcgactgccgcagcagctgctgcagctgcagcggcggcggccagcgttggtcctccatcgtggggtcctccacaggtctatcgtcagccatcacagccgcctccgggcagcgtgggactaccaggaagcactcagccgccgccgtcgagtgtggccccgcatccgcatcaccacagtcatggacatcatcatcaccaggccggaacaccgctgggcggatcgccatcatcaacggcggcggccgctttgttgcagcccgatatttatgcgcaaggcgacatttaccgccggcccacagttttcgtatcacaggcggcccccagctatgcctacgccaaccgggcggtggtggctccacctccggcccacaacagctccagtcgtcaggtgagatcggttatacatcataccttttattttttcgtagctaaccaacatgttactgttttcccaggtgataccatcgcatccgctgccagctcacattcagatacccacacagtacagccagtttggaccgctcagtcctgcccaggtagccgccagcaaacacgcggcgcactttgcgcccaccaacatatggtatggggctgagtagaccgacgatgggagttgacggggagaggggcgatgaggagagacgcgggacgaggatgtgcacccacccagaaccaagaaccacccaactacacaccgcacaacaccaccatcaccactgttgttatgatcttgagctagagcccgatcgaatgattcaacgctcgagtgagtcgaaaatgccgggatgccgagccgaattcagacttctgcttcaaatctaaatcatactgctaatgattgtatatcctttttctattcgcagatcttttgtagcctcgggcgaggcaggcgacaatccggagcaaagccaagagctgcagcaacatcagctgcagctaactcagtgctggtggttcatgctactcatgcagcagactataatccagaacaactccatattccaagcgggcagcgacgacgccgcagcaacggcagcagcatcctcagacacaaccacaacacgtaaagcacgacggcaacattaagcaaagtccaagtcccctaactcattgccacttcttagcttattttttttcggggtcccgcgggatctcatttctgctactattaatttttattattttttttaaataatattaaatataaatgtaaagcactcctacacgcagctgggtgtacagtgctcaggcaaacttttggcaagttgtgcatcagcacaatttcgcacccacacacactacagctatagcttctataccctcgaaatatgccagttagatgcatatcgagagatgtttttcttcgaaacgaaagcgttttataaatgtgtgttttattgataatttccaaataatattctctataatctacttatatattatatacatgcatatgtaacactattattatgaatactatatatcaagagaaagctaaacaaaactagagtttacggcacgtcgacaactgcaacattaggccagagagccagtaagagaaagcttcgaaattccctagcaagtacctcagaaaatcaaaaacctagcagc

SEQ ID NO: 25238 - DNA, 4400 bp, DROSOPHILA
aaacggcttcgcgagcggacgttgcagccacagaagatacagccacggccgtcgaggaagtggcagctacagaaagccaagatatatatctgcatatacatatgactggcgaagctgctgcgaaaaagattctcttttaatttggcataaattgtatttgtcttgaaaaaagcatattcttgtaaatatatcctcttcgtaaaatattttacttaaaagccttaaaatattgaattcacgtgaaatttcaaacggtgtcactcgaaattcgccagtgactcgccgccacgttttgtacaaacatagtttgtaaacataagtttgtaagcggccggaaaaaggcgaacggaacccaaaaaccccaatgcaagccaactgagtgcaagggagacagccgaccacgtcgagcgggatagcatgcgccaatgaaaacgtcctaccccccaaaagcgtccgatttcgttgactacgccgttgccgggggcgggggatccggattctgttcgggattaggagcgggactttcagtcagggcgacgtccttctacggcgatcaaacggtaacggcaactacggacgggacgcgtcaccaggaacaacaacaacaacaactgcagcagcagcaacagcagcatatcctaaggcaacctgcaacatccgcatcgacttcatcggtagctgcagcagcaaccagcaagcgaaaacgtcaaacagattgtgattgcggctgcgtcgactcatataactccagccacggcccgccagtgcagcaggactcttcagcagcagcgggagcgggatctgtgggatcgaaagcgggatcaggaccaggaccagacggaatcgggcccatcagcagcctcaaaacggcgcacacaaaggtcgccacctcggggggtcatgccaacacgcagccccccagcaaaaggtcgagcagtggagcggatggcgactaccagctggtgcagcacgaggtgctctattccctatcggcggaatatgaggtccttgagttcttgggccgcggcacctttggccaggtggtcaagtgctggaagcgcggcacctccgagatcgtggccatcaagatcctgaagaaccatccttcgtatgcgcggcagggccagatcgaggtatcgatcctttcgcgcctcagccaggagaatgccgacgagttcaattttgtgcgggcctttgagtgctttcagcacaagaaccacacctgcctggtctttgagatgctggagcagaacctttacgattttctcaagcagaacaagttttcgccgctgccgctcaagtacataaggcccattctggagcaggtattgactgccctgttgaagctgaaacaactgggtctgatccatgccgacctgaagcccgagaacatcatgctggtggacccagtgcgtcagccctaccgcgtcaaggtgatcgactttggtagcgcctctcacgtgagcaaaacggtctgcaacacgtatctgcagtcgcgctactatcgtgctcccgaaatcatactgggcctgcccttctgtgaggcgatcgatatgtggtcactgggctgcgtggtggcagagctcttcctcggctggccgctctatccgggcagctcggagttcgaccagatccgctacatctcgcagacacagggattgcccacagagcacatgctgaacagtgcctcgaagacctccaagttcttctaccgcgacgtggactcaacgtatcccttttggcgcctgaagaccaccgaggaacatgaggcggagacaaacacgaagagcaaggaggcgcgcaagtacatcttcaactgtcttgatgacattgggcaggtcaatgtgcccactgatttggagggcggtcagttgctggcagagaagacggacaggcgagagtttattgatctgcttaaacgcatgctgaccattgatcaagagcggcgactcacgccagcagaagcgttgaaccactcgtttacacggctgacccatctggttgactatgtctactgcaacaatgtcaaggcatccgtgcagatgatggaggtgtgccgccgaggcgatttccacactgtgcagcctgcgtcgacgctggtgactaattttgtgccctcgagcacagagaacatgacgttcacgatcaacaaccagttgaccagccaggtgcagcgccttgtgcgcgatgggcgtcctttggcttacgagggactctaccagatctacaacggacgcagcgtggcccgacagtatccgcagacgcggactgatagcttccagcaccagctggtctcgaacatcctgtgcccgccctcgtaccagacgatgcccagtcccactaaacatgtggtggtgggcagtgcaaccatgcagccaccgttgcaggtcccgccgcagcagtacgttaatgtgcccgtaccagtttccatggtggagccaacatctggtcagagaatgcttctaacgaaccgtgtgcaggccagcggagtagcctggccacaaactggacggcagatggccttggtgccgtcgtggccccagcaggcgcccgcccactcgctcatcgtggactcgacgcctctttttaatgtggaggagatctatcccaagcaccacctcaacttgccacgcaacgatctcaagaaggagtcgccggctcatcatattgccaaggggaactcttatcgcgtgccgcgccacgagaagaaggagcaccagcagttgtcgccggtgaagaagcgggtgaaggaaagctcgccgccccaccagcagcggtaccagcgcgctgcacacgtttcgccgcagtatcacgcgcaccacaactgcaactacgggaatggcagtggttacagcgccagtgccggatcggtggtggcctcctcggctgcctcctctagcaacattgtgaatggaagctcgtcgagttcgcaccatcatcacgtccccgtcgcccatgcccagccctacagtagctcctcaggtcaccacattgtaagcaactgcaacgccaacggaggagcaggaggagcagtggtttaccaacagccaccggctcatgcccatcagcagcatgggcagcagccgcatccgcagagttcgcagcatccgcagcacgtcaagcagccgacaataaccatccacgacacgccctcgcccacggctgtgataacgatctcggacagtgaggacgagggcggagaggctggaggagctcaggtaccggtgctaaagcaacgggcgcatgcccagtcgcagaccagtggtagtctgctacagcacgcaccaagctcgtcctgtagcaggagcagcgcccaccagcagccgcatccacatccccagcagcaacagcagcagcagataaactatggtgatcatgatccggaagatgcccgccgtcgtcatcatgccgccgccgcagccgcccagcaacagcagcagtatcagccacagccaccgccgcagcaggtgttgccccagccacagcccagcatcaagtatgagcccggccagtcgcaaaagaaacgcatcttggccatggctcaaagcgaatgtggctaccaacctcaggttcccagccagccgtcgtcttcggccagtttgccgcacattcccaccaagcaggagccagccgaattttatccggagtatgcagctgctccgccgcaacagttagacacaaagcgctcctcctgggcacctacatcttcgggatcaggagtgtccgctctcccgcttgctcatccaaagcgagaggccccctctgtagctcccataagctatgtagccccgtctgtggctccgccattagcccactccaagagcagttccgcatcatcatcgtcgtcgataagcgctgcgactgccgcagcagctgctgcagctgcagcggcggcggccagcgttggtcctccatcgtggggtcctccacaggtctatcgtcagccatcacagccgcctccgggcagcgtgggactaccaggaagcactcagccgccgccgtcgagtgtggccccgcatccgcatcaccacagtcatggacatcatcatcaccaggccggaacaccgctgggcggatcgccatcatcaacggcggcggccgctttgttgcagcccgatatttatgcgcaaggcgacatttaccgccggcccacagttttcgtatcacaggcggcccccagctatgcctacgccaaccgggcggtggtggctccacctccggcccacaacagctccagtcgtcaggtgataccatcgcatccgctgccagctcacattcagatacccacacagtacagccagtttggaccgctcagtcctgcccaggtagccgccagcaaacacgcggcgcactttgcgcccaccaacatatggtatggggctgagtagaccgacgatggg

SEQ ID NO: 25239 - protein, 1320 aa, DROSOPHILA
MKTSYPPKASDFVDYAVAGGGGSGFCSGLGAGLSVRATSFYGDQTVTATTDGTRHQEQQQQQLQQQQQQHILRQPATSASTSSVAAAATSKRKRQTDCDCGCVDSYNSSHGPPVQQDSSAAAGAGSVGSKAGSGPGPDGIGPISSLKTAHTKVATSGGHANTQPPSKRSSSGADGDYQLVQHEVLYSLSAEYEVLEFLGRGTFGQVVKCWKRGTSEIVAIKILKNHPSYARQGQIEVSILSRLSQENADEFNFVRAFECFQHKNHTCLVFEMLEQNLYDFLKQNKFSPLPLKYIRPILEQVLTALLKLKQLGLIHADLKPENIMLVDPVRQPYRVKVIDFGSASHVSKTVCNTYLQSRYYRAPEIILGLPFCEAIDMWSLGCVVAELFLGWPLYPGSSEFDQIRYISQTQGLPTEHMLNSASKTSKFFYRDVDSTYPFWRLKTTEEHEAETNTKSKEARKYIFNCLDDIGQVNVPTDLEGGQLLAEKTDRREFIDLLKRMLTIDQERRLTPAEALNHSFTRLTHLVDYVYCNNVKASVQMMEVCRRGDFHTVQPASTLVTNFVPSSTENMTFTINNQLTSQVQRLVRDGRPLAYEGLYQIYNGRSVARQYPQTRTDSFQHQLVSNILCPPSYQTMPSPTKHVVVGSATMQPPLQVPPQQYVNVPVPVSMVEPTSGQRMLLTNRVQASGVAWPQTGRQMALVPSWPQQAPAHSLIVDSTPLFNVEEIYPKHHLNLPRNDLKKESPAHHIAKGNSYRVPRHEKKEHQQLSPVKKRVKESSPPHQQRYQRAAHVSPQYHAHHNCNYGNGSGYSASAGSVVASSAASSSNIVNGSSSSSHHHHVPVAHAQPYSSSSGHHIVSNCNANGGAGGAVVYQQPPAHAHQQHGQQPHPQSSQHPQHVKQPTITIHDTPSPTAVITISDSEDEGGEAGGAQVPVLKQRAHAQSQTSGSLLQHAPSSSCSRSSAHQQPHPHPQQQQQQQINYGDHDPEDARRRHHAAAAAAQQQQQYQPQPPPQQVLPQPQPSIKYEPGQSQKKRILAMAQSECGYQPQVPSQPSSSASLPHIPTKQEPAEFYPEYAAAPPQQLDTKRSSWAPTSSGSGVSALPLAHPKREAPSVAPISYVAPSVAPPLAHSKSSSASSSSSISAATAAAAAAAAAAAASVGPPSWGPPQVYRQPSQPPPGSVGLPGSTQPPPSSVAPHPHHHSHGHHHHQAGTPLGGSPSSTAAAALLQPDIYAQGDIYRRPTVFVSQAAPSYAYANRAVVAPPPAHNSSSRQVIPSHPLPAHIQIPTQYSQFGPLSPAQVAASKHAAHFAPTNIWYGAE

SEQ ID NO: 25240 - DNA, 3475 bp, DROSOPHILA
gctgctaaacgcactggacgacactaaggcgaccaagaaggcaatttacgatcacctacacggagatctaaaggcgctaatgagcagcccgtacggccgacgagtgattcaatggctggtggctccgggtgatacgacatgcttccatccagagttcattcgcacggtggaggagggtctagcctttggaaaaaaggagaaggagctgcgtcgcaaggagatccttgagcagatagaggcgccgattgcacagtccatcgccgaggatgccgccttttggctgtccaacagccacatcggcctggtcaccggcgatattcttaatcacagtaagtgcacacttctgaaagccatagcagaaacatacatatggatttacaagaatatgttcacgatattaatgtacgtttgcatctctgccttttagttcaaggcgagtcctatgagaaggctgcttcggcccttgcccaagtcgtcgtccaaccggagtggcgcatttcagcagacgccgccggtccgcagccgcaggataagaagaagcctcacaatgacgtggaggccattatagcccaggccaccaaacagcgcagaaaactgctttatgtcgagagcagcagcgacgacgaagatgaagatgaagatgaagatgaggagagcgacgatgaaggagacgagaaggagcagaaggaggcggccgcagatgatgccgaacccaaggtgaagaaagccaaaaaggagcccaaaaagccaaaggcaaaggaggaggagccggcggctccgttggtctccggaatcgaggaggccggcatgcacattgtattgaagaagatactcaagaacgatggcaagcgagagggcaccccgttcagccaacagctactccaaaacttgtcctccgatgtggtaagtacccaaaaatcatgccatccggtaaccgagggtatcttcctttttcccagtcatgagaaacgcatcgtacttttgagttttttcttttatttaatgacgtttcgacattcctttagctttagtctaataaataagtagtcgcaaagtaaacagcttcactcagattccaattcctaattgcgattccctttcccttttcagctgaaagcctggctgggcgtcaaccgggcctgttttgtcctgctcaagctggtggaggagtgtcccgcactgctggacgactgcaagaaagccatcgcggcggagaggagccttagccagatactcgcggaccgtaagacgcccggagccaagctactggccgccaaactggacattggcaaatgagaaacgcttctagcctagacaagacctaacattttaaaatacaataaataattctatattgaaatggctgggcattccgttttattcatgtgaagggacgcgagttgtgctgtgggtcggtgctcgatgagtctatgccttgcgcaggatgatgtgcaggccggagtcgctgtcgacgatgcccgacagctggttgacgttcaatttgaaggcagcgtcctcgaaagccgcctgcatctgacctgtgagatgtgaaatgtaattagaagcagttgcaggtcggttgggtggcctaaactctacgattgcaagtagctcgcgaagttataggtacaaaaatgtgtaaggtaaggaagattaaaaaagaaatgccgcggagccaattgcaaatagtgtttgtctataactatgcatctataatctattagtggtcgatatatcttctcttctcttctcttgaatattgaaaacaatcagagcctctagtggaagtaccaatctgtttctggattgcgcctcaagtgggaagcgccttattcctaaacggacacacatcgaggaccactcgatcctggacgtgtgacaaatgcacagtggggagatatacatacctctgccgaactttcccaggtcgccgcccctcttggcggagctgcagtcggagtaggagcgggccagctcgtcgaatgtggcctcctgctggacgattttgttgcgatagacctcgaggagcagctgggcctcctccttggtgcgcgtgatgttcgcctcgcgccacgagctgggacgccgactgcccttgtgcttaaccagcagatgcaggcaatgcacctcgtccggtgcatctccgccgccggcggatcctccgcccgccttcttcgccggctctgtgggctgatcccactgcgactcctttgtgtacatattgagataatagctcattcctgcaaaatcaatcatgatcaatcaagtgcaggttcagtttagcgtgccggttccgcattccgccggaaaaccgccggcatggcacgagcgggactgcacacgatgcttacctgtggagcggctagtgcgcttctcccagccgtccggtagttgctcggcatctggcatgctgttttcacttaatttgagttaaattacaaatagttttcggaataaaataaaccaccagtgtgaccgcgccgaacacgctttgagaacatccatcaaaatcgatagcgcctgccatcgacatatcgatacacatggtggcgaattcgccaaataaggtgctggcacgtgctaactgcggtgggtgcactcgctaaccgcagatacagctgaggccaatataatagcagcgaactaacaataatgtgctgatatgggctattctgatatgttatatgtatcttttgccgaaaaattagcacataacttaattaaatctattccaatacctccttcaatccgcgacacgaatagaggaatttcaatttttctaatgtttattcaggggattaataaaaataaaataaatacgtgggcatttgtacaattagttttagtgcttccttgactttattacaggctagctttaagtaggttaacatttaaaaggactagcacaggggagtaatcctctcagctcagcgtatgtatatatatatatatatatatatatatattgcgtatttgtaggcatatgtgatatacatacatatgtatgtatatttgcattcaatatactcatgtggttttctcgcagggagtgggcgaatacttggcgttcttggagttagctaattatttagttaggggcgggagcaagtgagctaataaaaaaatttaaattaattatacaaaacaattaaatacattttataaaagtacaaacacacgatcttcactcacgacctgaaggaagggcttggcttggccctttcattctttttccctcgatacaattttgctttgtcatgtcttctggggcagctactctgtcacggcagctgcccagcgcatcttcccagcgaacaacattcgcatccggctaacagaggtctaacttaatgcttaatgaccaatttacaactcgatggggctcctctaacgggctaagattagtgggtaacacctctaaggtgcctctattcatttcataaaactaaactcacattgcaggcgtgctcttcga

SEQ ID NO: 25241 - DNA, 995 bp, DROSOPHILA
tcacactggtggtttattttattccgaaaactatttgtaatttaactcaaattaagtgaaaacagcatgccagatgccgagcaactaccggacggctgggagaagcgcactagccgctccacaggaatgagctattatctcaatatgtacacaaaggagtcgcagtgggatcagcccacagagccggcgaagaaggcgggcggaggatccgccggcggcggagatgcaccggacgaggtgcattgcctgcatctgctggttaagcacaagggcagtcggcgtcccagctcgtggcgcgaggcgaacatcacgcgcaccaaggaggaggcccagctgctcctcgaggtctatcgcaacaaaatcgtccagcaggaggccacattcgacgagctggcccgctcctactccgactgcagctccgccaagaggggcggcgacctgggaaagttcggcagaggtcagatgcaggcggctttcgaggacgctgccttcaaattgaacgtcaaccagctgtcgggcatcgtcgacagcgactccggcctgcacatcatcctgcgcaaggcatagactcatcgagcaccgacccacagcacaactcgcgtcccttcacatgaataaaacggaatgcccagccatttcaatatagaattatttattgtattttaaaatgttaggtcttgtctaggctagaagcgtttctcatttgccaatgtccagtttggcggccagtagcttggctccgggcgtcttacggtccgcgagtatctggctaaggctcctctccgccgcgatggctttcttgcagtcgtccagcagtgcgggacactcctccaccagcttgagcaggacaaaacaggcccggttgacgcccagccaggctttcagctgaaaagggaaagggaatcgcaattaggaattggaatctgagtgaagctgtttactttgcgactacttatttattagactaaagctaaaggaatgtcgaaacgtcatta

SEQ ID NO: 25242 - protein, 166 aa, DROSOPHILA
MPDAEQLPDGWEKRTSRSTGMSYYLNMYTKESQWDQPTEPAKKAGGGSAGGGDAPDEVHCLHLLVKHKGSRRPSSWREANITRTKEEAQLLLEVYRNKIVQQEATFDELARSYSDCSSAKRGGDLGKFGRGQMQAAFEDAAFKLNVNQLSGIVDSDSGLHIILRKA

SEQ ID NO: 25243 - DNA, 5289 bp, DROSOPHILA
tcgagccaactgaattcggggatcgttgacgcatatgaatttatttacgttcattttcgtgtgtgtgtgtgtgttgcttttttggtcacatcgacacactgatcgcagggaacgcataccctactcgaaccgcatccatcggtcgctcgatcgcatttggttatttgacggtcaatacccggaaatgtgcagctgaccagatggcttacaagctggaattttgtatttttgcacagggtcaactatttattactctatatgcctaagaaccacccatttttagcatataattttatttttaagcgaaacaattgaattgaaacgctaatggaaatcaatttaacatcttctctacctgcataaatgaccgctagatggctctgcagatcaagatcactaaagaatttgcggcattaaaactgtaattatacgataaataacattgtttttctttttttttaatagcctttgagtattcttaagagttcgcttacaaatacatagaagcatttcctaattcttccaagatttcgatgtaatctccaagtcatctgatacaggtgacgccttcaacacagttgatcaatgcgcggcctgaagaattcgcgtggtgcacattaagctagggcatctggccagcggttttccggtcctcgcccctggactttcttgtttttgtgccattacatctctggctcgcctttcttcgtcgcctttggagccccggctccattccattcccatatccagtccagctccagccgcagctcgtttggcctggctcggtttcgtgtggtagtagtagtagtagtggtggtggtggtggtggtgatggtagtggcagtggcagtggcgggggcggtagtggccccgcccattggcatcactctgccgcagccgacggcgtcgtcgcgtcgtcggcgacgtcgagcagagccggtaaaaagtcttgaaaagtgcgcctctttggcgttccgttgttagtttagtttaaccatcgcagcgcttgagtcgcgattagttgctcaagtatccagttgccaggatcgttgctctgctttttttttctcagaccccgagtccaaaatgaagttatttttatgtgccattgctgtgaccctgtgtgtggcgacaagtgagtgtgaatcaatggatccgtgggaatggatcaatggatcgttcaatggatcagtggtgcccagttcaagtgactgacgactgactggccagtgccagcccatccgccaagtcagagtcgcaaattgttgctaattactttgacactgacaccgaaatcaagactcgatctcgatctgctgccgctgtgtgttttggccagctaagtagctaagtagctaagagctaagagccataagtagctaatcatatttagccgtctcgcaagactgggcctcagacgcaaatgttgaatctggtcgcgattgcggatctacaggccacatgcagatcgagatggagggccgttttccgtctggaaaaactggaatgctggccaagcccaagatgctgtctggctgtctgggccgctggggttatgcaactcatgcagtttgttggccaagtggaaaacggctcttctgggccgcaagagaagtgcattgaacccggaccgaacgtcgtaatcttggcattatgctgagtatgaagccttctctgacatttaaatttcgacatttcgaatcacttaccggtgtgttacggaaatccaaagaattcgcgtagtttgaattcccaatttcggttgtagaagatattgtcagcatagcgaatgcaaaggtgtatagaagtatgcagtgattttcgcattgtatacattttttatagctatcctttaggcgcccaagtaagagatttcacattggttgagtaaatagtactaacctatatctagcttaccgaagtcagtgggattctggtcaaatgtatcaagcgatagcaacctgttccaatggaaaaccactgatcatttcttgggccaccgggagtggtggcaaccaggaaaccgcaaatgcggaattgccatcggtaatcgaacgtcgttcgatctgttacactttcgagtgcgactgggggtcgccaggaaagtgaaagtgggaaaaccagttgactgaagtgcttgtttctttcctttgttttaccccaacaccagccgtgtccgccgccaacttcgagtgcccgaagcccaatggccagttcgccgatgaggtgcagtgcgacaagttctacgtctgcgacgacggagtggccaaggcgaagctctgtcccgatggcctggtcttcgatccactcaaccgcaagttcaacaagtgcgaccagcccttcaatgtggactgcgaggaccgcactgagctccgtaagtagcccatcccatcaccatttctatttctaggctattgttaccgaccccttgggaatggtcacgaaaactatgtcaaggcagagcgctaaacaggttattccaattacatcattacatcaccattaactatgtagggagttaaatttaaattcgcctcttaagttcaaatttagcttactaatgaaagcatcagttgaaaggatgaatttgtagcatacttttggacatctctatatttaaagcaaatacaccactacaatgagctatccaaaagttatgtagttgtgtagctcctttggtagacggaggaactaaccctgttcggtttccccttcacagaggagccgaagtccagcaagtactgcccgcgcaagaacggcttcttcgcgcatcccgatcccgccgtgtgcaacatcttctacaactgcatcgaaggcgacgccctggagaccaagtgcaccgtcggcctccacttcgacgagtactcgggcacctgcgtgtggccggataccgctaagcgcgagggctgcaatccggagcagagtaagtggaccgattgagtcgccgtgcggcggagtgggctaatggtctggcatgtggtgtgtactttcaggaacctccgagaccggcttcgtgtgccccaaggatcagccaaagaccgacgatcgcggccaggtggtgacccaccccaagtatccgcatcccaccgactgccagaagttctacgtgtgcctgaacggcgaggatcccagggatctgggctgccagctgggcgaggtctacaacgatgccaccgagatgtgcgatgctcccgagaatgtgcccggctgcgaggactggtacaaggatgtggacgacaagaaggactaagccacttccggtcgcttctacttctcctcatcacatccacactcacaactcatgcacatgcacacgcacacacaagcacactgaaagaaattatcaatcaaatcaaatcgaaacaattcgaaacaaatcaacacacagattcgcgtcttagtcacttaaatttagtagttctagcccatttcctatagagcgtatgtgtagcagttaaacttcaatactctgacctatctatttcttaactatctttctctatatctgactacttctaactacttttctaactacccaaatctccatttctgtgcccaaccaaacgctgccaaattgttgtgtatatatttcccgctttcagactttcgccttattattatacaaaaagaataaactgaattttttataaactatctatatctatctatctactataaactatcttcccaatcccaagactactactattccatatactgtttcagctatcctatgtgatcttcgcctaaaatttcaatttccctcatctctacgttactctacttaacttcttatcatattccaaaaccaattttctgtctataaggaaacccactctttacaaacttttgtcctcctaaaattttcaaacttgaatcttttccgttctcttttcttgatttctttctttctatctttaaaatttcaatttagttcgtgttttattgttttgcgaactgttacgctacagtttattattcctaaaatgctccttttttaagcatttcaatcctgtaatcttgtatttcacttctacctcaagtttcaaatctaaatcttttctatacattctatcttcctcataaatatttccttgtatttcgattatacctactgtataaatactcttttagactatgctatatgttatttattaataaacatcttgacttgcctgcaaaatccaaacgataagaaattttcacgtaccttatttaagtaatcattcaaccgactgtaaacccatgacacccaaactcacttcccattctccgatctttctcgaattaaaaaaaactatgtatttcgaatctatacaaaactagtgtgcatctcgtggggaaatagcaaaaaaagggaggggggggggggggggttgagtggtcgattgaccaatcaatcaaacctttcactccacacgcaatatcggataatcgccgtggacgggcgggatcggtgcatccattatccatcatagccctttgtccctccatcggttgcaaagagtctttaattggccgagtggccaagcggaccgcacatttacacatgtaaatgaacacaaaaagcaggcaagagtgcttatgcaatcgccgcagcacgagcaaagcaaagcaaaagcaaaagttttgcaatagttaacaatgtaacggcaatcggcaaacggggcccaatcatgaatgaagcttatggtctgcgcgagctttgccttttactttcaatcacacatgttgccagagaagctcgatttccgccttggcgtgtttttctttttcaagccaggaaatggacccgaactagctaggaaactagctaaatcattggcagtgtggagcgaaagcgaccttgtgcacagcgtggatgctggatgcatccttttagatagcgttctaagttttatctgattttatgcagtgtttccactgtttgtggataacctaaatttcagctgaattcgccatagctcgacaatcttgcaactgggaatcagtagaagctaaagtacatttcgctgtactatagaagtttattcttcatttcgctgtactatagaagtttattcttcattgcatacaacattataagagatgtagaagcactagagatttctgcaatgggatgcgattgatatgaaactttgtattccgaataccaccgaactgtaagtcctcagatcgaaaataaatcccataaattccgtctgttataggctctcaagttgggaagatgtggcgagaaaatggattcgagcgatataacatttggtatatggtttggtatcaaacata

SEQ ID NO: 25244 - DNA, 1383 bp, DROSOPHILA
cagcgcttgagtcgcgattagttgctcaagtatccagttgccaggatcgttgctctgctttttttttctcagaccccgagtccaaaatgaagttatttttatgtgccattgctgtgaccctgtgtgtggcgacaaccgtgtccgccgccaacttcgagtgcccgaagcccaatggccagttcgccgatgaggtgcagtgcgacaagttctacgtctgcgacgacggagtggccaaggcgaagctctgtcccgatggcctggtcttcgatccactcaaccgcaagttcaacaagtgcgaccagcccttcaatgtggactgcgaggaccgcactgagctccaggagccgaagtccagcaagtactgcccgcgcaagaacggcttcttcgcgcatcccgatcccgccgtgtgcaacatcttctacaactgcatcgaaggcgacgccctggagaccaagtgcaccgtcggcctccacttcgacgagtactcgggcacctgcgtgtggccggataccgctaagcgcgagggctgcaatccggagcagagaacctccgagaccggcttcgtgtgccccaaggatcagccaaagaccgacgatcgcggccaggtggtgacccaccccaagtatccgcatcccaccgactgccagaagttctacgtgtgcctgaacggcgaggatcccagggatctgggctgccagctgggcgaggtctacaacgatgccaccgagatgtgcgatgctcccgagaatgtgcccggctgcgaggactggtacaaggattcccaatcccaagactactactattccatatactgtttcagctatcctatgtgatcttcgcctaaaatttcaatttccctcatctctacgttactctacttaacttcttatcatattccaaaaccaattttctgtctataaggaaacccactctttacaaacttttgtcctcctaaaattttcaaacttgaatcttttccgttctcttttcttgatttctttctttctatctttaaaatttcaatttagttcgtgttttattgttttgcgaactgttacgctacagtttattattcctaaaatgctccttttttaagcatttcaatcctgtaatcttgtatttcacttctacctcaagtttcaaatctaaatcttttctatacattctatcttcctcataaatatttccttgtatttcgattatacctactgtataaatactcttttagactatgctatatgttatttattaataaacatcttgacttgcctgcaaaatccaaacgataagaaattttcacgtaccttatttaagtaatcattcaaccgactgtaaacccatgacacccaaactcacttcccattctccgatctttctcgaatt

SEQ ID NO: 25245 - protein, 248 aa, DROSOPHILA
MKLFLCAIAVTLCVATTVSAANFECPKPNGQFADEVQCDKFYVCDDGVAKAKLCPDGLVFDPLNRKFNKCDQPFNVDCEDRTELQEPKSSKYCPRKNGFFAHPDPAVCNIFYNCIEGDALETKCTVGLHFDEYSGTCVWPDTAKREGCNPEQRTSETGFVCPKDQPKTDDRGQVVTHPKYPHPTDCQKFYVCLNGEDPRDLGCQLGEVYNDATEMCDAPENVPGCEDWYKDSQSQDYYYSIYCFSYPM

SEQ ID NO: 25246 - DNA, 24419 bp, DROSOPHILA; identical to SEQ ID NO: 13264

SEQ ID NO: 25247 - DNA, 5205 bp, DROSOPHILA
gaaggaacagctgttggcccgaaaatatagatccgtttatttccttgccgctttacagttaccacatcgcccgatatagcatacgcatatagcccaattgcacgtggaggaggttgccgagcagtcgagtaaccatggcggatgacactagttcgccgatggacagattctgcggatccacgttctggaacgcaacagagacatggtataccaacgatccggactttacgccctgctttgagcaaacggcgctggtaatcactgccctggacctaattatggcgctggtcaagaagggcggcgactctgagctgccgctctacgacctggatgtttggggtcccatcatcaagttcgccaccttcctgttgctcttcatattcatcccgctgaatcgaaagtatggcgtgcagaccacgggatgtcagttcatcttctggttcctgctcactgtgctgtcgattccccgctgccgcactgaagttcgactggacgcggagcgccagaagattctgaattcgcaacagccatccgagcaggacttttcctgggaggagtatcagttcgttagcttctttatcttcttcaccttcaccagcattatgctgatcctgaactgcttcgcggacggaatgcccagacaaaccaagtaccagaggggtgagaacgagattcccgaactgtcagccagtttcctttcccgcatcacctatcagtggttcgacaaaatggccctcaagggctatcgcaacccgctggaggagaaggatctgtgggacctgaggccgcaggacagctgctccgaggtcatgcccatcttcgcccaccactggaaccagaacgtgcgcaagaactacaagaacaaggcgcgcgtagaacccaaggcgcagtttagcaatggcaacgtgacctttgagaatccccacggtgagaagaatggccgcaagaagggcatggccagtattatgccgccaatttacaagtccttcggaggcgtctttctgttcggcgccctaatgaagctgttcaccgacaccctgacatttgcccagccccaagtcctgagtttgatcatcagcttcgtcgaggcccaagatgccgagcccgaatggaagggtatcttatacgctgtcctgcttttcgttttggccgctgcacagacctttattctggggcaatatttccaccgaatgttcattgtgggcctgcgaatcaggacagctttgatcaatgccatctaccgcaaggccctgcgcatttcgaactccaccaaaaaggagtccaccgtgggcgagatcgtcaacctgatggccgtggatgcccagcgattcatggaactgacaacctacttaaacatgatctggtcggcgccactgcagatcggtctagccctgtatttcctttggcagcaactgggaccgtctgtgctggccggtttggctgtgatgattatcctgatccctgtgaacggagtgattgccagtcgcatcaagacctatcagatcagacagatgaagtacaaagatgagcgtgttaagttgatgaacgaagtactgagtggcattaaggtgctcaaattgtacgcctgggaaccgagtttcgagaagcaagtgctggacatccgtgacaaggagattgcgacgctgcgctccactgcctacttgaacgcgggcacttcgttcttgtggtcctgtgcaccgttcctggtttccttggtcacgttcgccacttacgtgctaaccagcgaggcgaatcagctgagcgtcgagaaggtgttagtctcaatcgccctcttcgacctcatgaaactcccgctgaccatcctgcccatgctgagtgttgacatagccgaggtttcattagttacattcgccacttacgttttaattgatgaaaataacgtgcttgatgccaccaaaacctttgtctcattatcattattcaacattctacgatttccgctaacaatgttgcccatgctgatcaccaacctggtgcaaacgcaagtttccgtgaatcgtatcaataagttcctgaacagtgaggaactggatcccaacagcgttctccacgattcctctaaaccccatccaatgagcattgagaacggcgagttctcgtggggtgatgagatcacgctgcgcaacattaacatcgaggtgaagaagggcagcctggtggccctggttggcacggtcggttccggcaagtcgtctgtagtgcaggcattcctcggtgaaatggaaaaacttgcgggcgttgtcaacactgtgggcaagttggcctatgtaccgcagcaggcgtggattcagaatgcgacggtgagggacaacatcctcttcgggcagacctacgaccgaaagcgctacaacaaggtgatcgacgcctgtgccctgcgtgccgatatcgacatcctgtcagccggagatctcacggaaatcggtgagaaaggcattaatttatcaggtggccaaaagcagcgcatctcgttggctcgtgctgtgtacagtgatgccgatctgtatctgctggatgatcctctcagcgcagtggacgcccatgtgggaaagcacatcttcgaggaggttatcggacccaagggtatattggcacgaaaatcccgcgtgctggtcacccatggtgtgactttcctgccccaggtggacagcatctatgtgataaagatgggcgagatcagcgagagcggcacattcgatcaattggtcaagaacaaaggcgcctttgccgacttcattatccagcatctgcaggagggcaatgaagaggaggaggagcttaatcagatcaagcgccagatctctagcaccgcagatgtccctgagctgttgggcactgtcgaaaaggccattaagttggcgcgcacggaaagcttgtccgattccatctccgttacatccgctgatagtttaatgggcggaggaggaagtcttcgccggcgaactaagcgacaggactcccacgattccgttgcctcagccgcttccctgaaaaagaagcaggaggtcgagggcaagctgattgaaactgagaaatcgcaaaccggtggcgtggagttcgcagtgtataagcattatatcaagagcgttggcatttttctatcggttgccacattggtactcaactttgtattccaagctttccaaatcggctcgaatctgtggctcactcagtgggctaacgatcaaaatgtcgccaacgacactggcctcagggacatgtatctgggtgtttatggtgccttcggatttggccaagtcgcgacgaacttcttctcatccctcgccatctcattgggttgtctcaagtgctcgcagttgttacatcagaccctactatactacaatctccgctggccaatggaactcttcgacacgacaccactgggaaggattgtcaatcgcttctcgaaagatatcgatacaatcgataatgtgctgccattcaacattcgtgtcgtcattggtcaggcatatatggttctggctaccattgtggttattagtctgtccacgccaattttcctggccgtgatcgtgcccatcgccttcctgtactacttcgcccagcgtttctacgtggccacttcccggcagctgatgcgtctggaatccgtatcccggtcaccaatctactcgcatttcagcgaaactgtcaccggagcatcgactattcgtgcctacaatgtgggagatcgctttattgaggaatctgatgccaaggtggacaagaaccaggtttgcaagtacccgtccgtgattgccaaccgttggctggccattcgtttggagatggtgggcaatctgattattctgttcgcatcgcttttcgccgtcctgggaggtcaaaccaatcccggcctggtgggtctgtcggtaagctacgccctgcaggtgacccaaaccctcaactggctggtgcgcatgtcatccgacatcgagacgaacatcgtgtccgtggagcgcatcaaggagtatggcgagacaaagcaggaagctccctgggagctggagcaggacaagaacaagcccaagaactggccacaggagggacgcgttgagttccagaacttccaggtgcgctatcgcgaaggcttggatctggtgctgcgcggtgttagtttcaatatccagggtggcgagaaggtcggcattgttggtcgcactggtgccggcaaatccagtctcacattggccttgttcagaataattgaagctgccggtggtcgcatctccatcgatggcgtggacattgcctcaatgggtctgcacatgttgcgttcccgcctgacaattatcccccaggatccagtgcttttctctggttcgctgcgcatcaacttggatccctttgaaatcaaaaccgatgacgaaatctggaaagctctagagctgtcgcatctcaagtcctttgtaaagagtttggcagctggtctgaatcacgagattgccgagggtggtgagaatctgtcggtgggccagcgccagttggtttgcttggcgcgtgccctgctgcgtaagaccaaggtcctggtgctggacgaagccactgccgctgtggatctggaaactgatgatttgattcagttcaaagaatgcactgttctcaccattgcccatcgcttgaacactattttggactcggacaaggtaatcgtgctggacaagggccagatcatcgagttcgcctcgcccacggagctgctggacaatcccaagtcggccttctatagcatggccaaggacgccaatctagtttaagatccatgaatgttaacttgaaactccacgaaactcaaacggaagagtgagtgccccaaaacaacaaactttaggaatatagatgtacgaaaagaaaatcattcaacggtagctttaagccatttggcactgacagctctacctcatggctagaacaagcaactatgagacaaagcaagcaaacaaacacaacaatggaacaataagcgaaagaaattagcaaataccaactaaatgttcattagactaagcgaaataattcaagccagttgcgccttcgtcggttacgctatgttcgtttttattatgtatatgtatgtatttacatagtcaagtgtatttttctattgtctattgtacttagttttctatgcaacaagaaccggtaacagcaggagagatggcaagttggagcattataccgtaa

SEQ ID NO: 25248 - protein, 1547 aa, DROSOPHILA
MADDTSSPMDRFCGSTFWNATETWYTNDPDFTPCFEQTALVITALDLIMALVKKGGDSELPLYDLDVWGPIIKFATFLLLFIFIPLNRKYGVQTTGCQFIFWFLLTVLSIPRCRTEVRLDAERQKILNSQQPSEQDFSWEEYQFVSFFIFFTFTSIMLILNCFADGMPRQTKYQRGENEIPELSASFLSRITYQWFDKMALKGYRNPLEEKDLWDLRPQDSCSEVMPIFAHHWNQNVRKNYKNKARVEPKAQFSNGNVTFENPHGEKNGRKKGMASIMPPIYKSFGGVFLFGALMKLFTDTLTFAQPQVLSLIISFVEAQDAEPEWKGILYAVLLFVLAAAQTFILGQYFHRMFIVGLRIRTALINAIYRKALRISNSTKKESTVGEIVNLMAVDAQRFMELTTYLNMIWSAPLQIGLALYFLWQQLGPSVLAGLAVMIILIPVNGVIASRIKTYQIRQMKYKDERVKLMNEVLSGIKVLKLYAWEPSFEKQVLDIRDKEIATLRSTAYLNAGTSFLWSCAPFLVSLVTFATYVLTSEANQLSVEKVLVSIALFDLMKLPLTILPMLSVDIAEVSLVTFATYVLIDENNVLDATKTFVSLSLFNILRFPLTMLPMLITNLVQTQVSVNRINKFLNSEELDPNSVLHDSSKPHPMSIENGEFSWGDEITLRNINIEVKKGSLVALVGTVGSGKSSVVQAFLGEMEKLAGVVNTVGKLAYVPQQAWIQNATVRDNILFGQTYDRKRYNKVIDACALRADIDILSAGDLTEIGEKGINLSGGQKQRISLARAVYSDADLYLLDDPLSAVDAHVGKHIFEEVIGPKGILARKSRVLVTHGVTFLPQVDSIYVIKMGEISESGTFDQLVKNKGAFADFIIQHLQEGNEEEEELNQIKRQISSTADVPELLGTVEKAIKLARTESLSDSISVTSADSLMGGGGSLRRRTKRQDSHDSVASAASLKKKQEVEGKLIETEKSQTGGVEFAVYKHYIKSVGIFLSVATLVLNFVFQAFQIGSNLWLTQWANDQNVANDTGLRDMYLGVYGAFGFGQVATNFFSSLAISLGCLKCSQLLHQTLLYYNLRWPMELFDTTPLGRIVNRFSKDIDTIDNVLPFNIRVVIGQAYMVLATIVVISLSTPIFLAVIVPIAFLYYFAQRFYVATSRQLMRLESVSRSPIYSHFSETVTGASTIRAYNVGDRFIEESDAKVDKNQVCKYPSVIANRWLAIRLEMVGNLIILFASLFAVLGGQTNPGLVGLSVSYALQVTQTLNWLVRMSSDIETNIVSVERIKEYGETKQEAPWELEQDKNKPKNWPQEGRVEFQNFQVRYREGLDLVLRGVSFNIQGGEKVGIVGRTGAGKSSLTLALFRIIEAAGGRISIDGVDIASMGLHMLRSRLTIIPQDPVLFSGSLRINLDPFEIKTDDEIWKALELSHLKSFVKSLAAGLNHEIAEGGENLSVGQRQLVCLARALLRKTKVLVLDEATAAVDLETDDLIQFKECTVLTIAHRLNTILDSDKVIVLDKGQIIEFASPTELLDNPKSAFYSMAKDANLV

SEQ ID NO: 25249 - DNA, 11357 bp, DROSOPHILA
agctggctggaaatgctctattcaaaaaggttcgagcctccgtaaacatggccatgaacaggaagtccgttgccgaaaccagcttaaccagcaaccaaccaggaggagcttcggccaagcctcaaactgaagcagaatactttgcagccaccgccgcccgactggcggattccaattcggtgagctgtgaggacctgctggagttctctgacaagaagcccaagggctgcgaacgaggcgtggactcggacgaagtgcgaatcatggtaaaagtgctcggcaaagatgtgagttcactgtgcactaagaaccaaatatcatataatcaaatatttatttcacagagcactcccaatcgttgcttgggtgccctggagttcatcaactgggacgtgcacaagtctattaagctcatcaagttgcagaacctggttagcgaggcaaatctcagcctggaagcctcctttgaagcgctgcagcagcacgaatgggatctgcacacaacggcccacaaactaaatggccttaaactttaaatactcctttaaggcccccaattctggatcgccatgatttggtttcaacgaccgccgttgccttaacctcataactatcgtttctaatttgtaggctaagcatgggataggcttaagtaatttggaactaacgtaatcactgctcgccattggctcccttcttcattcggatcgatagaatctcagcatgtacttattcacgcatgcttggtctgcatgcaagtaaccagcatcaaaatacacatttatgcacatatgtggacattttcaataaattataaacatttaatatacggccatcagttagtttcatgttaaattatttaacgatttatttaaactttatactactacataatttacacatattttacacaaacaaacgggtacgcaacttaacgctaacgaacgaacacagaacacacaacgtgaaactaaactatcagaatgagtttgggctgacgctatttcctcctgctgcgcttgccgtccgtgctcatggacaaagccactgcccgcgtcacgcgcttcggcgtggacacttgcagctggccgccactgaggttcatctcgagagacattcgcttacgggtcatgactttggaattcatccgctgtgcgcgcgcctcgtttcgcgtggtcacctttggggtgctggagctggggcgggatcgtattagaggtatcgtctttttgagcggctttttaggcggcgttgattctggtttagcgttggactctgactctgtatcggagtccagctcaataacaatcacaggaggtatttggttctccttgaccgatgaggtgctgtctgtgggactgttcgtgtttttggtcatctgctgtcgccgggtactcctgttgtctaggcgttgctgcttccgccgcggcgaaacgcggggcgaagagagagccgttgaatctcttgaccgcagtgatcgggagttggaatttgaaggacttctcctcagcactcgtttgcgtccgtttcttagaggcgtttccagatgaacgacctttcgctgatgataattaaaacaaaaaaaagaatgtaaaaaaagacccttctgcgatgtgagattattgtgctttctatagtacagctttccaattgcaaagcgaagcaagtggtgcatcattaattctaaagttcttaaaggaaactacaatttgtgtttagttttaaaaacatttgttgattgttaatgccgattgcaacttttctcttaaactaaacagcgagtaggtggtgcgtgtgtccattgggagtggctagagctgcaagcgcaagcgcctcatactcactttgctaactggcttgggcgtggtctgggatgtggaagtgctggcgacttttctgatgcgcagggagcggatgcgtaggtggctggcttcgtgtcctgctctgggactgggtgaggcggcagtgggcgatgcttcgatcacctctgaatcgtttgacttaaagagaaattaaatgttaaagactgtgactgtgccacattcggcattccacagtcttcgggtggagacgtgtttctttcaagctacgaatagcaagttctaaaaactacaacagtatagtgaaagttaaacacaaagtgtaaagtgcagtttgcacaactaacaattattgactatagtaattgtttactggaataaataattattccatattgttctggtaattgttatatgtggacttggaacaatgaatcaaagcgacatacgttctcagcgacaatgtgaacaagacgagcgccggctctctttacaacgcaacaatgcatacttttctttcgtctcaccgcaaatcggtgatcgagcaacctcaccttcaactaactcgaaacttttgccctcagcgaacgacagaccgcgttcttgctctccctctctgcctgcttcggctcacaagtcgtggagcgaagagaccggctctcctaccccgctcctctcgcagcgccaaacgaccgtcccgggtaactgtaacactgcaataacgagtgcagtgacctcactggcaactgccacaacatcaacttcgtcagcggcccaactaattatcgctgtgccagctgtaaataattcagcagcactgaccgtttgcaacaacaataatgcacgtaaagaagaatcaaaacaaaagcagaagtcgatttcgactgtgcagactggcatggatcgctacatccaaatcaagagaaagctcagccctcaaaacaataagggaggtaatcaacccaaaatcaatcgaaccaacaacggcaatgaaaactctgcagtaaataattcaaaccgatatgctatcttggctgattctgcgaccgaacaacccaacgaaaaaacggtaggggaaccaaaaaagaccaggcctccaccaattttcataccgagaacaaagtacaaatgcacttgtaataaactcgttgctttgattggtgacagcaagttccacattatcccacttaaaaaaggaaatattcatgaaataaaactacagatccaaacagaagcagaccaccgtatagtgactaaatacctaaatgattgctggtaaaaactactacactaccaattaaaaagttgcaaagggctcaggtagtacttaagggcattgaagcaacagtgacaccagctgagataattgaggctctgaaggccaaaaacttttctgcaaagacagctattaatattttaaacaaagacaaagttcctgcagccactattcaaaatagaactcgaaccagagctccaggcactaaagaaaaacgaagtgcacccaatatacaatttacagtacttgctacatcgggaggatcaccgtggaggagccgcacaaacgtatcaatccagtttaatgtactaattgccaagaatacggccacaccaaggcatactgcacccttaagtccgtatgtgttgtctgtagcgaacctcatactaccgcaaactgccccaaaaacaaggacgataagtctgtgaagaaatgcagtaactgcggggaaaaacatactgcaaactacagaggctgtgtggtgtacaaagaattgaagagccgcctaaacaaacgtattggcacagcacatacatacaacaaagtcaatttctactctccgcaaccgatttttcaaccacccctaactgtcccaagcactactccaacaatttctttcgctagcgccctaaaatccggactagaagtgcccgccccaccgacaagaactgctcattccgaacatacaccgacaaacatccaacaaacacaacaaagtggcatcgaagctatgatgctatccctacagcaaagcatgaaagactttatgacgttcatgcaaaatactttgcaagagctcatgaaaaaccaaaatatcctgattcaacttcttgtatcttcaaaatccccataatggcttccctacggatatctctgtggaacgcaaatggcgtttcacggcatacacaagagctcacacagttcatttacgaaaaaaacattcgacgtaatgctactatcagaaacgcacctcacaaataaaaacaattttcatataccaggatacttgttctatggtacaaatcatccagatggtaaagctcatggaggcactggaatactcatcagaaatcgcataaaacaccaccacttaaacaattttgacaaaaactacttacaattctacgtccatagccttacaactcaacaatggttcaacgactctagccgcagtctactgcccaccggcgctttccaatctttgagaatcaattcatggaattctttaacacactaggtgacaggttcatcgcagcgggtgactataacgccaagcacacccattggggatctcgacttgtgtctgccaaagggtagcaattgtacaatgcgcttcgaagccagaaaacaagctagactatgtatccccgggtaagcctacatactggccagcagacccaagaaaaatcccagacctgatcgattttgcaattactaaacatgtcccccgcacatggtcaccggccgaagcactagcagatttatcatcagatcactcacctgtttttctaaatatgctaactcgcccccacatcgtcgacccccgtatagactcacaaattttagaacaaactggccaaggtatcaaaagtatgtctgttcacacatagaactaacgacggcattatctacaaaggaggatatagacaagtcaacggaaactcttgaaaacatttttagtttcggctgcaaaggcttaaccccgccagtgacgttatgcaaaaccaaactacatcaaaactaatcgcgaaatcgagcgggctggtattagataaacgacgcctacgaagggattggcagtctaatagatcaccaattactaagcacatgcttaagatagccacacgcaggcttaccaatgctctcaaacaagaggaaaaaaacagccaacgttcatatatcgagcaactctctcccaccagcactaagtaccctctttggagagctcacagaaaacctaaagactccaatagcgccaattatgccactccgaagtccctctggcacctggtttcgaagtgatgaagaaagagccagtgctttcgctgaccatttacaaaatgtattccgaccaaatccctctaccaacacatttattctccctcctttaatagcagccaatctagatcctcaagaaccctttgaattccgaccatgtgaactagcaaaggttatcaaagagcaactgaacccaagaaaatcgcctggctacgacctaataactccaagaatgctcattgaactcccaaagtgtgctattcttcacatctgcctgttggtcaacgcaatcgccaagcttggatacttccctcaaaaatggaaaaagtcgaccatagtaatgattccaaagccaggaaaagataaaacgcagccatcatcatatagaccgataagcttactaacatgtctttcaaagctgtttgaaaaaatgctactccttcggattagccctcatcttagaataaacaacacacttccaacacatcaatttggctttagagaaaaacatggaaccatcgaacaggtcaaccgaatcacgtcagaaattcgtactgcttttgaacatcgagaatactgcacagccatttttctagacgtcgcgcaggcatttgacagagtgtggctcgatggacttttgtttaaaataatcaagctgttgccccaaaacacacataagctactgaagtcatacctatataacagagtgtttgcaataagatgcgatacaagcacttcacgcgattgcgcaatcgaagctggagtgccgcaaggcagtgtactgggtccaatcttatacaccctgtatacggcggatttccccatagactacaatctaacaacctccacgttcgctgatgataccgcgatactcagtcgctcgaaatgcccaataaaagccacggcactcctatcccgacacttaacatctgtagaacgatggcttgcctgactggagaatttcaataaatgttcaaaaatgcaagcaggttacctttaccttaaacaaacaaacatgcccaccactggtcttgaataacatatgcattccacaagccgacgaggtaacatatctgggagttcatctggacaggcggctcacttggcgcaaacatatagaagccaaatcgaaacatcttaaacttaaagcaaggaacctccactggctcataaatgctcgctctccacttagtctggagttcaaagctcttctatacaactccgtcttaaaacctatctggacttatggctccgagctgtggggcaacgcatccagaagtaacatagacattattcagcgagcacagtcaagaattctgagaattatcactggagcgccgtggtaccttcggaacgaaaacatacacagagacctaaaaatcaaattagtaatcgaagtaatagctgagaaaaaaacgaagtataacgaaaagctgaccacccatacaaatcccctcgcaagaaaactaatccgagtatgcagtcaaagccggccaatgcaccgcaacgacctcccagcccagcaataaacttattagggcattaatgaaaaaaaaaaaaactatcactaagtgaaagttaattaagttagattaagatttgaacacttattgttagtctcttaacacaaagggaagattcaataaataataaaaattaaaaaaaaaaaaaaaaaaaaaaaaaagactgtggttgtctgccgaatagccttactcttaccttgtttgctgcatttggactttcgcttatctcctcgtcggatgattcctcctcagtggagggctgcttttccggtgtcttcgacgaccgggcaattgccatttcgaggcgacgtctcatttgcggctggcgtaaattttgtttggatgtctctaccgcttcagactcagtggattcctctggattgggcgactgcggtcctaataaactctcggcatctgaatggcttatggccattgagcgacgcaggtgacgtattcccacaatgttatctttcccaaaggtggttacaatgggttccgggactggcgctggcggtgcggctgcctttggagtttcagtagcgtctactgcggttatggcagcagattgcgtcacatcgttcggagattcttcggtaacaggaggttgcgactgtgctggcactgcagtttccgattctgcagtggtcacagtagccgtttcatactcttcatcactttcgccttcatccggattccgacgaggtggcggattgaaactgccgtttaccaccagcttgaagttctgaatgcacttgatcatgcgcggatctaattcgctctgaatcagattctccgccagcgcaagcagttcagccttcacctccggaccgttcaatacgtttattgatagatttgttagttccttggccagtagacggcacatatctttgcgctccgtaaagtagttctgaatgtattgcagaaaacttatcgctattttgttgtggatattcgtttgtggcgtgctcatctcctgcactgtcatttcgaggaagaacttggtcaagtgttcaggttggacgccgtgaagcggcgagtcatagttgcaggtccaaacggtgggtaggaagcacggctgtaggagactatgcttgttcaggcgtctcagctcttcgaagaataagcccagcacctggttgataataggctcggtgtttgggttaaagtaccgcttgagcagtagctccagcacatccgtgcgatcgtcgacgtggccacggagcactaagcgacagaggccgcgaacgattgccatccctacacctctgtgctgcactcgctccaaatagtggcccagtaccacgaggatgtcactattctgctcgttgttctgcgactggctgccatcgtcgtcatcgtatagctcctgcatcgtgtacagttgtcgccgcttcgtctttgacagtgaacctccggtctggttaagatcgttgaagtaatccactccatagcgatccaatagctctaaaatgcaattggccgacgcttcgcacagacggacgttattgtttttgcaaaactgcaccaccactacctcgaagacctctctgctgtaggcctcgtagaaaatgctaaaggtggtgccgcatttaatggaccactcaaagatgtctacttcggcgcacggtaggtaacggcaaatgaagtccttgtacaactggcaaagacttggcgtcagcttgtggacgtgcggcgaggcggtcatgtagtaggagatgtagagacccttcagcacgcgctcttgcttggagagcttcggtcgggtgggcatttcaatcacgccgtgcttctccagcagcggccttattagctcggtgtactcttcggtgacagcgatcttttcatcgtttacggactgcgcccgtatgtactccctctggcgcacataattaccctccagttcttccaattcaagaattttaactttcagggaagagatcttcatttttagcggagtgtccaagtcgtccagcaacttattgatcaaacttcgatcgtgaatcaggtcgttctgcttggtgttcagttcgcatagctcgtatatgatctcgataaaatattgtatacgatcgttagtgtcggtgatcagttgctccatgcagcgcaccagcacgcgcacgatcttgtggtccaatagacagtcttttagcagattggtgatcagcagacgcatatttccgcgtccgatctcgtcgcctagatcgtaggtctctaatatctccaccagcgagaggagcatgttctggaactccacctgggcaaacttgtccatatcgggcttttgaaactggcagaatctacaaaacggaatacatttagtaccaactggcggtaaggattagattccgtgacttacttatccatataggtgcagaagacactaagttccggcaacagcgattcgatttcgggcgcttccgtctccagatattcgctaagacactgccaatataacaacagctctacggttactgaatcgtgtgggatgcagcggtgcagctcgcagtcttcgcttaacggcagttgatcgatgagttgcttgatgtccgtttgctggaagatcactctaagcatttgcttggccacgcgtcgaaagcgcagcagttcttcttcattcgagtccagcttgagagccgctatcagagcgacgtagttttgctgataggattcaatccacgtctttagcatgaagttgatcactgttttgcgcacggttgccgatgtatcgttaagtccctgctccagcagggtaagccgctgggcaaccttgtaagagcgcaccggatagttgcacatgttgacgtaagtgtgtcggcgcaccttctcgtcgacatcccaaagacgctccaggatgtgcggaatggtaatataatttcggcccatgcacgtgatgatgcactgacgcacgttgggcgagggatcggatgtgagatggtacatgtacgcgcccacgacgacgtcgctgggattgtctggattttgaaggcgctgcatggccaacacggcctgtttgcgaacactggcggacacatccttcacccggtccagcattgcttccagtatatcatcgcactggtggtcatccaaggcggcattgggtccgagctccttaagtataagattcacaaagtaacagatgcgataacgtatgtgcgggttgctcgaataggtctgtgggggcggagaaaacaaggcactagcattaggaacacaattcgtcagcacagtaggtacagtagacactcaccgtaagcagccaatgaaaggtttcggccagcatgggctcagtaccatccgaatctgagctggtgacgaaagtggcgcagaagttgagggccatgtttgcgttctcattgccctcctcagcccctaggacggctttcaacacgttgatgaaggccttgcgaaaggactcgtgtcccatctgtcgataatgaacagtgttagaccctgaaatcccaaatttgatatacaataatttcgacgccactcacctttgcgtacagttgctgcatctcctttgagtagcgcttgtgcagggattccttgagctcggcttgtcgcattatcgcgtacatgagttccgcggatgtgtctgaggtggtggccacgctctgatcctcgttttccttctcaccatcctttttcgtctttttggtggccgccagacgcttttttcctcccgctgccttggttttgggtttttccgtctcgcccgccttcgcctttggtttggccattccgaatagtttattccgttttttgtggtccgcagccaatactagatttccgtattttacggtttaatcttaaaaactgttttcaaattgcatcgaacgatggcgaaacaaacaagcgtcgcgttattgctatttcctcattccacccccgttcgcttgttaaattcaaatgatgcgtatgtattttttagtgtgtttctagtgttaagatcgataaatgtgaatgaatgttgcctatcgattgctgtgctccattttaaatttaacggaattatgtatacatacacattttcgtttcaacaaacattccgatatttaaatgacgtataaagatcatcatttgctgcgttaaacctttttgtaaagactgtgaaatatcatagcatctgaagccatatttaatatcatgtatacgattttttgcactactcatcattttctagaagcggcagttgggattttacgaagggtgggttttcaagaacataagggggatattacaaaacagagatttatctttcaaaatacccgttgttcaataggaaatacagctggcagataagaaattgcccagagagagttaatgttaatgtacgttcatggtaaatttcagacacgttttacgttttgatgctcaaatacggattacgtataagtaaataaagatttccacattttcggaacttctttttccgaattccgaaaactgatgtaccattagagtttacacaattattaaccagtcaatcatatatattgttgcatactttcaggcgcttaaatgaagaaggcgcaaatttaaaatcaaaacaaaagcctaatgtaataccaaaatcatatagttaaaataaaagctagctagagagaaattgtcatttgataaatgtttattttcatatataaaatatacaaatagatactgtcgcgaaatctcttcaaacatgtcgcgaatttcgaagcgcgtctatgaggcgaagtccacttacccggatcgcaccaa

SEQ ID NO: 25250 - DNA, 4041 bp, DROSOPHILA
atggccaaaccaaaggcgaaggcgggcgagacggaaaaacccaaaaccaaggcagcgggaggaaaaaagcgtctggcggccaccaaaaagacgaaaaaggatggtgagaaggaaaacgaggatcagagcgtggccaccacctcagacacatccgcggaactcatgtacgcgataatgcgacaagccgagctcaaggaatccctgcacaagcgctactcaaaggagatgcagcaactgtacgcaaagatgggacacgagtcctttcgcaaggccttcatcaacgtgttgaaagccgtcctaggggctgaggagggcaatgagaacgcaaacatggccctcaacttctgcgccactttcgtcaccagctcagattcggatggtactgagcccatgctggccgaaacctttcattggctgcttacgacctattcgagcaacccgcacatacgttatcgcatctgttactttgtgaatcttatacttaaggagctcggacccaatgccgccttggatgaccaccagtgcgatgatatactggaagcaatgctggaccgggtgaaggatgtgtccgccagtgttcgcaaacaggccgtgttggccatgcagcgccttcaaaatccagacaatcccagcgacgtcgtcgtgggcgcgtacatgtaccatctcacatccgatccctcgcccaacgtgcgtcagtgcatcatcacgtgcatgggccgaaattatattaccattccgcacatcctggagcgtctttgggatgtcgacgagaaggtgcgccgacacacttacgtcaacatgtgcaactatccggtgcgctcttacaaggttgcccagcggcttaccctgctggagcagggacttaacgatacatcggcaaccgtgcgcaaaacagtgatcaacttcatgctaaagacgtggattgaatcctatcagcaaaactacgtcgctctgatagcggctctcaagctggactcgaatgaagaagaactgctgcgctttcgacgcgtggccaagcaaatgcttagagtgatcttccagcaaacggacatcaagcaactcatcgatcaactgccgttaagcgaagactgcgagctgcaccgctgcatcccacacgattcagtaaccgtagagctgttgttatattggcagtgtcttagcgaatatctggagacggaagcgcccgaaatcgaatcgctgttgccggaacttagtgtcttctgcacctatatggataaattctgccagtttcaaaagcccgatatggacaagtttgcccaggtggagttccagaacatgctcctctcgctggtggagatattagagacctacgatctaggcgacgagatcggacgcggaaatatgcgtctgctgatcaccaatctgctaaaagactgtctattggaccacaagatcgtgcgcgtgctggtgcgctgcatggagcaactgatcaccgacactaacgatcgtatacaatattttatcgagatcatatacgagctatgcgaactgaacaccaagcagaacgacctgattcacgatcgaagtttgatcaataagttgctggacgacttggacactccgctaaaaatgaagatctcttccctgaaagttaaaattcttgaattggaagaactggagggtaattatgtgcgccagagggagtacatacgggcgcagtccgtaaacgatgaaaagatcgctgtcaccgaagagtacaccgagctaataaggccgctgctggagaagcacggcgtgattgaaatgcccacccgaccgaagctctccaagcaagagcgcgtgctgaagggtctctacatctcctactacatgaccgcctcgccgcacgtccacaagctgacgccaagtctttgccagttgtacaaggacttcatttgccgttacctaccgtgcgccgaagtagacatctttgagtggtccattaaatgcggcaccacctttagcattttctacgaggcctacagcagagaggtcttcgaggtagtggtggtgcagttttgcaaaaacaataacgtccgtctgtgcgaagcgtcggccaattgcattttagagctattggatcgctatggagtggattacttcaacgatcttaaccagaccggaggttcactgtcaaagacgaagcggcgacaactgtacacgatgcaggagctatacgatgacgacgatggcagccagtcgcagaacaacgagcagaatagtgacatcctcgtggtactgggccactatttggagcgagtgcagcacagaggtgtagggatggcaatcgttcgcggcctctgtcgcttagtgctccgtggccacgtcgacgatcgcacggatgtgctggagctactgctcaagcggtactttaacccaaacaccgagcctattatcaaccaggtgctgggcttattcttcgaagagctgagacgcctgaacaagcatagtctcctacagccgtgcttcctacccaccgtttggacctgcaactatgactcgccgcttcacggcgtccaacctgaacacttgaccaagttcttcctcgaaatgacagtgcaggagatgagcacgccacaaacgaatatccacaacaaaatagcgataagttttctgcaatacattcagaactactttacggagcgcaaagatatgtgccgtctactggccaaggaactaacaaatctatcaataaacgtattgaacggtccggaggtgaaggctgaactgcttgcgctggcggagaatctgattcagagcgaattagatccgcgcatgatcaagtgcattcagaacttcaagctggtggtaaacggcagtttcaatccgccacctcgtcggaatccggatgaaggcgaaagtgatgaagagtatgaaacggctactgtgaccactgcagaatcggaaactgcagtgccagcacagtcgcaacctcctgttaccgaagaatctccgaacgatgtgacgcaatctgctgccataaccgcagtagacgctactgaaactccaaaggcagccgcaccgccagcgccagtcccggaacccattgtaaccacctttgggaaagataacattgtgggaatacgtcacctgcgtcgctcaatggccataagccattcagatgccgagagtttattaggaccgcagtcgcccaatccagaggaatccactgagtctgaagcggtagagacatccaaacaaaatttacgccagccgcaaatgagacgtcgcctcgaaatggcaattgcccggtcgtcgaagacaccggaaaagcagccctccactgaggaggaatcatccgacgaggagataagcgaaagtccaaatgcagcaaacaaggtgatcgaagcatcgcccactgccgcctcacccagtcccagagcaggacacgaagccagccacctacgcatccgctccctgcgcatcagaaaagtcgccagcacttccacatcccagaccacgcccaagccagttagcaaacgaaaggtcgttcatctggaaacgcctctaagaaacggacgcaaacgagtgctgaggagaagtccttcaaattccaactcccgatcactgcggtcaagagattcaacggctctctcttcgccccgcgtttcgccgcggcggaagcagcaacgcctagacaacaggagtacccggcgacagcagatgaccaaaaacacgaacagtcccacagacagcacctcatcggtcaaggagaaccaaatacctcctgtgattgttattgagctggactccgatacagagtcagagtccaacgctaaaccagaatcaacgccgcctaaaaagccgctcaaaaagacgatacctctaatacgatcccgccccagctccagcaccccaaaggtgaccacgcgaaacgaggcgcgcgcacagcggatgaattccaaagtcatgacccgtaagcgaatgtctctcgagatgaacctcagtggcggccagctgcaagtgtccacgccgaagcgcgtgacgcgggcagtggctttgtccatgagcacggacggcaagcgcagcaggaggaaatag

SEQ ID NO: 25251 - protein, 1346 aa, DROSOPHILA
MAKPKAKAGETEKPKTKAAGGKKRLAATKKTKKDGEKENEDQSVATTSDTSAELMYAIMRQAELKESLHKRYSKEMQQLYAKMGHESFRKAFINVLKAVLGAEEGNENANMALNFCATFVTSSDSDGTEPMLAETFHWLLTTYSSNPHIRYRICYFVNLILKELGPNAALDDHQCDDILEAMLDRVKDVSASVRKQAVLAMQRLQNPDNPSDVVVGAYMYHLTSDPSPNVRQCIITCMGRNYITIPHILERLWDVDEKVRRHTYVNMCNYPVRSYKVAQRLTLLEQGLNDTSATVRKTVINFMLKTWIESYQQNYVALIAALKLDSNEEELLRFRRVAKQMLRVIFQQTDIKQLIDQLPLSEDCELHRCIPHDSVTVELLLYWQCLSEYLETEAPEIESLLPELSVFCTYMDKFCQFQKPDMDKFAQVEFQNMLLSLVEILETYDLGDEIGRGNMRLLITNLLKDCLLDHKIVRVLVRCMEQLITDTNDRIQYFIEIIYELCELNTKQNDLIHDRSLINKLLDDLDTPLKMKISSLKVKILELEELEGNYVRQREYIRAQSVNDEKIAVTEEYTELIRPLLEKHGVIEMPTRPKLSKQERVLKGLYISYYMTASPHVHKLTPSLCQLYKDFICRYLPCAEVDIFEWSIKCGTTFSIFYEAYSREVFEVVVVQFCKNNNVRLCEASANCILELLDRYGVDYFNDLNQTGGSLSKTKRRQLYTMQELYDDDDGSQSQNNEQNSDILVVLGHYLERVQHRGVGMAIVRGLCRLVLRGHVDDRTDVLELLLKRYFNPNTEPIINQVLGLFFEELRRLNKHSLLQPCFLPTVWTCNYDSPLHGVQPEHLTKFFLEMTVQEMSTPQTNIHNKIAISFLQYIQNYFTERKDMCRLLAKELTNLSINVLNGPEVKAELLALAENLIQSELDPRMIKCIQNFKLVVNGSFNPPPRRNPDEGESDEEYETATVTTAESETAVPAQSQPPVTEESPNDVTQSAAITAVDATETPKAAAPPAPVPEPIVTTFGKDNIVGIRHLRRSMAISHSDAESLLGPQSPNPEESTESEAVETSKQNLRQPQMRRRLEMAIARSSKTPEKQPSTEEESSDEEISESPNAANKVIEASPTAASPSPRAGHEASHLRIRSLRIRKVASTSTSQTTPKPVSKRKVVHLETPLRNGRKRVLRRSPSNSNSRSLRSRDSTALSSPRVSPRRKQQRLDNRSTRRQQMTKNTNSPTDSTSSVKENQIPPVIVIELDSDTESESNAKPESTPPKKPLKKTIPLIRSRPSSSTPKVTTRNEARAQRMNSKVMTRKRMSLEMNLSGGQLQVSTPKRVTRAVALSMSTDGKRSRRK

SEQ ID NO: 25252 - DNA, 2695 bp, DROSOPHILA
actgcctgaacaagctgcccaaggagtccctcaaatcggacctgctggcctccgtctccacgtacaagacgaagctgcgggcctattttcacgcctggagccccaacgactgttcgaggaatgtgtacattaagccgaacggattcaccctgcatcggtaaggtattcggtttgcttgagtcggcgttatatgtatgtccctccattcccgcagcaatcccgtggcgcagagcacagacgcggcccggggcaagataggattccgccacggtcgtcacacctgggaggtgatatgggagggaccgctgggcactgtggccgtcatcggcatatctaccaaggaggcggctctacagtgtcacggctatgtggctctgctcggctccgacgaccagagctggggctggaatctggtcgagaaccacctgctgcacaacggcgacatgcagggcagttacccgctgctgaacaatgctcccaagtaccaagtgggcgagcggatacgcgtcattctcgactgcgaggacaacaccttgtcgttcgagaagaactacgagttcctcggtgtggccttccggggtaaggggaaatagtttggtgataccagcgatacgaacgattctatgcactttcaccttgcaggcctgccggacaaaaagctctatcccacagtatccgctgtctacggcaataccgaggtctcgatggtctatctgggcacgccgttggacggatagctttgcagagggcctacaacttggttaacaacttccacggatccattaggttattgtgtacatttgtatttatctcaattatgattgcttcattccacctgaaactcagttcgataaatttagttaatagtttcgtttttttgtacaaaattatgcattttgttgatttacgctaagccaaagttcatatccacctcggcactatctcacatggcaatttaccttagttatacgaaccaaatgaatataataagcgattaaacaatagttgaagcaattttttatacaccaatgatcgctgattgtgcaagtaaaattacagacagaagaacgagtcgcgaatacaaatctttcaatccatttattgcgtggtggcctctactgtttcccatcggttttcatcttggcccagttgtcttcatcgaacagatcatcaaaatcattgtagaagtcagcgtggacgtgcttatcgttggagggcaggtggtccatcatcattcctgtggctccgccggactaaaggaatacaatataaatatatacatatgtatatgagcgtatggtggcaggtttttaacatttatgtaggatattgccatgagcattgatgaaaactctggacatgggaacaattaatataataaataaagtcgccaaaagatgaaatgaaagatacatattcctgttttgcggggaaacactacttctaaagaagattgtagatttatctgattgttgtttacttttaattgcaatgttggctacaaggataaacaaagttttcgacgaccatattcttcgatgggaagctatgttgaggacttacctcgtccatttccatgtagccggggccttcggaaaacatttcgtcggcagccagagacggtttcatgtttaaatccatacttatttctattttagcttccaattatcttttttgttattttttttagcgcagaaaaatctttacttgctgaaggcgttgccactgcaatgacacacagaaaataggtacccgtccggcaaccctatgaaacagctgattgccgctaagaacttcaatataaatattaactattgtaaaaatggttcgtgtgggccttcagatttccgccacgctggagaacgtggacaagctggagacgtctcatccggactactccttcttcttgaagctgaagtgcagcaactgcggcgagcagtcggacaagtggcacgatatcacggaatccgaacgtgtgcaacaggattcgcgcaatgcggccggctttaacttcttcatgaagtgcaagatgtgcagccgggagaacagcatcgacatcgtcgacaagtcgaatggtaggctggctttgagtaacgtatccccaccaaactactgagtgcatccatccacacagctccctacacggcggacgattctggcgcatttaagaccatcgtggtcttcgagtgccgcggcgcagagcccgtcgaattctcgccgcgcgtcggttggcgcgtctcatccgctgaaaatggccagcagttcgaggaggtggacctgtccgaggacgactgggtggagtacgaccagaagaacaacaactctgtgggcatttatgaattcgcctcgaagttcattaagctgaagaagtgaatcctgctgcactttacctaggattttcttgatattaggctaacgcctcaaactgataaatgtacactacacggcacccgaaaacaaatatcctttaagcatataaaggcatttcgaattgttttgttaactataaatcaccattgtcaagtaattcttccaaaatgcttttctaattcacccctcctgctcttaaacaatacagaagtgttctagatatatttaaaactttatttgtgatcatcatgcgattctcttagccgctctcccaaactctctcgatatcgattttcatgtgccggctactttgaattgagattga

SEQ ID NO: 25253 - DNA, 385 bp, DROSOPHILA
ctgcgctaaaaaaaataacaaaaaagataattggaagctaaaatagaaataagtatggatttaaacatgaaaccgtctctggctgccgacgaaatgttttccgaaggccccggctacatggaaatggacgagtccggcggagccacaggaatgatgatggaccacctgccctccaacgataagcacgtccacgctgacttctacaatgattttgatgatctgttcgatgaagacaactgggccaagatgaaaaccgatgggaaacagtagaggccaccacgcaataaatggattgaaagatttgtattcgcgactcgttcttctgtctgtaattttacttgcacaatcagcgatcattggtgtataaaaaattgcttcaactatt

SEQ ID NO: 25254 - protein, 71 aa, DROSOPHILA
MDLNMKPSLAADEMFSEGPGYMEMDESGGATGMMMDHLPSNDKHVHADFYNDFDDLFDEDNWAKMKTDGKQ

SEQ ID NO: 25255 - DNA, 3076 bp, DROSOPHILA
ttataattttagccgcgaagcaacgaatagtgacttggcgaagaatatggtccagttctgagcggacttattgacaaatgctagtcatttggcttattagtggttttatttagctctcggcactcaactacaatacaattaccaccgcctttcggcaataaaattgttgaaatcaacgaccctcgtcattcgagttttccctttgatgaaacgttacgttgcaggggagtagtctgaatgttttccgtggggactgcaaatatattccttatagaggataaggaattttaggaaaatataaaacttatatttttagcttgcaagaggttaagttttcagtctaaacccacttggtaacatcttaacatattcatacaacttactaacaggctaataaatgtccaatcatttttgtaggaggtaaactaattgaattatttacatacataggtaatcaaagggaaataatatttcacaaaatcctaacatatttcaagcttggcattgttaaatagtactttttgctacaaatgtaagctttttattttggtggataagttaaacgtaccccttttcgccatcactgcattgctggtttcgtggcgccaatttgcaatttcattacaatgcttaatcatcattacgtcgcgaaaactccatatgtgagcgagacggagcgagcgggagagtgtgtgtgagtgtagcagattcacgatattgcgttcgcacttccggtgcacacgcacacacacacacacgcacacgcgaacacttacggggactatgaaaatccgtcggaaaaatggcattctcactgcaatttcgtgcctgccatgtcaccgttcatatggctgggcgatccggtagtatcctcgcatttgttgccactatttgattatatgtgtagccgccatatcatgcacagcccactctttctacagagagaaatacctacatggagcgaaagagagaaagcacgaacgagagcgagacagtcgcgtcaaatgcagtttatgccccggtcataaatcaaaatttttggttttctgctgtcaggcgatggcatagctccatgggcatctgcaatggccaacatcctacaaccaaagtgcaaactcgaagctccaagcttcaaactccaaactcctgtttccaggaacccatagtgcacattgcacaatgcaaactgcaaactgcgcacggtttctggcttttcgcgtaactcgtttattttcgtggtcataatttgccgatgcggccaacgttcactggcattcctccacaacctcaatggccataaccattccacgggagcaggcgtcccgtcccgcagcttgcggctctcctaaaatattggtttagattgtgtcaaacaaattgaatttgcgattttatgatgaatccaaacgatagctcgagggcttagctcaatggagcccggggccaggaataattagtgctgtgacctggacagacgattatcgtagtcatgaagagatcaatgggtttgggtaatgagataaaggaagtgagttattttggggcatttcagactactatgggtcaaaactcacgcacaaatgcgtttaaataacgtggttaatacaatttttacaccaataaattaaataacttaaggttgaatcaatggaaacattgaaatttaagagcgcaatctgtagtttcatgcttgaaacatccctactttaatgttactcattctgggcttggttcgttttctgtttaggaagggataagctctcaacgtcctccaccatatcaccattaaccccttctgtggccgatttgatggtgtggacacaataaccatcatcttatatatcttactcgcagccctggttattattatatctgtgctggtggccctcccgaatcgttggctttgtttgccaccatcacattggccaggctttcatctcacgagttggttacgacagcttaagtctaatggtcacagcgatgtggctccaatttggcccttactgccactccccgtttcagtgtgatgtgggcgagctggacgacacccgattcctggctgactttccaactcatcatcggccaggtgaaccataccacatgggtttttttttagccttcttttggatctgcacgtgatgcaagttagtgcgaacggcgaattaggttctgccagtgaaatttcagtaactgttcaggcctgtctgcctctttatttaagcataaattgctgcacaatgcactagacgaacattttccacatgaattgtaaatgatttcgaccactctctggcacacgagcaccaattgagattttccgagcgattgtaacgggtggaaatacttttttatcggctgccatcgatcttgggtccttgcgtttgacagatcgaaattagaaatcgccgctttatagctgcgacggcagctaactgtgcacttgcggctaattgaatgtggcaagtttacaaaacacgaaatgcggctaagtgcaaaaattgtatcgcactttgttgcgagtcagccgtgcaaccaatttgccagcaaacagccatttccggtcgcttatcgcttatcgcctatcgagtggctgctggaaagttgaaaagtcaaaaaagaaatccactccccttcccctgaaaggtaattcctcagcggttttatacgttctctgtttggcctttcatatgcaaaggagccgggagcacttgacttgacttggagcgtgccgaaatattgcccgtttagcggtttattttaatggcaggcagcaaaggcaacaatttatgccaggtggggaagtgattttcccgcccactttccgctcgtatgttttgtgccacttgaacgctgtttacaaatttgattttcgtgtttgatttgatggcgtttggcgttcgaacgggcctgcggtgtgtgggtgaatggtgggttcgtggcgggggtttcgtgtctgcgaaatggaaagccccgaaatggcagcccatgtctggcggcaaatgagcgcgactatttatagtctgaccccgactaaatgaaactgtaaattagagccaggagacaaagccagcgcata

SEQ ID NO: 25256 - DNA, 417 bp, DROSOPHILA
atgagttggaaagtcagccaggaatcgggtgtcgtccagctcgcccacatcacactgaaacggggagtggcagagagccgcaagctgcgggacgggacgcctgctcccgtggaatggttatggccattgaggttgtggaggaatgccagtgaacgttggccgcatcggcaaattatgaccacgaaaataaacgagttacgcgaaaagccagaaaccgtgcgcagtttgcagtttgcattgtgcaatgtgcactatgggttcctggaaacaggagtttggagtttgaagcttggagcttcgagtttgcactttggttgtaggatgttggccattgcagatgcccatggagctatgccatcgcctgacagcagaaaaccaaaaattttgatttatgaccggggcataaactgcatttga

SEQ ID NO: 25257 - protein, 138 aa, DROSOPHILA
MSWKVSQESGVVQLAHITLKRGVAESRKLRDGTPAPVEWLWPLRLWRNASERWPHRQIMTTKINELREKPETVRSLQFALCNVHYGFLETGVWSLKLGASSLHFGCRMLAIADAHGAMPSPDSRKPKILIYDRGINCI

SEQ ID NO: 25258 - DNA, 5110 bp, DROSOPHILA
attgtagttttggatttagttctatcagccttgatgcaccacacacacgcacacacagaggcacagacacacacgctcgttctctgctctttctctctaactctctttgaatttctctctcactcactactcagtgctgtggaaatgaaaacgaaacgagacgaatccgcgattagttagcgcacattatataaacgataaatcatggatattcggcagtgcgcttttctcagttcggttaataataatatatcttgtgcgaaggcaagggaagaaagcgattaaaaatacaccgacgacgacgacattcccaggcggagcagcaacagagaatgaacacagacacgagccgctctctccacggcggccactgtgtgggtgtgtgtgcgtgagcgtggcagcgttgccagcagcttgcgatttggaatttcggggaaaagcaggtaccgcaaaagcaattagacgatgtttggctattacttgttgttatgcgaagtaatttgccttaaataatatgaaatgtgtcgcttagaacacaattaacatttggcaatctagggcgtgggtgcttgctgttggcaatgctgccgcggtgacgttgttgtttgttttattttttgtaaccccaataaacacacacacacacacacacgcggcgcttatatttctatatgcgtaagttgcggctaactattttcgagtctctggcacgtgcaaagaggccgccgggcttacaatttcaaagggctagggtggctgcaagcttaagcgacactaattaggcgcgggagcggtttggctaacatattactactgctaaatttgtaattcacttttattttcatagcagcgtgaccgtggccgggtcgctttattattccaagaaaatatactgaacacaacactgtgggagaggcataccgcagggctttcgtagttttccttcacctggtcacaccgcaagacgcttcgccattttaaaaatcaaaacaggagacgcttcgccggaaaagtcagcattacgtttcattcccaaccggacacttcagtttgactcgcccatccgtcacagcagtcgccatgcagcgccacaaggaactgtacaaggagcaatcgctggtgctgagtccgcgcaatcactgccaggagaacagggatcggttgcaggcggcgcgcgccaaaaaacgagaggattgtttttatcagaaccgcatcatcagcgtgagcccgacgcccgtcaaaataaagcaattggcggcggcccaagctgctctgacccaggaaaatgtggcacccaaactggagagtccggagcggctggacacgaagcccgcagaactgctgaaggaatccaacccgaaggtctcccgccagaagctctacttacaacgctacatggagtggaagatagccaagaccaaggagcataagcagcaagaccagaaacgtcgaggcgcagccatcaatgtgccgacagtaaaacaatcaaaggccttgcccaaatcacaaacatttcgggttcccgataatctggcttctgcaaagcagaaggaggcggctcccatgttccagcctcccaagcggtgttctctctacatgattgccaatccgacgggcaagggaaaagccgcagaaccgattaaaccttcaatacccaagccaacgtcagcagcagctcctccgtcatccaataccgtggctgcatcttccgccttggccaggcataaatcagctgcttctgcaacaaaaatagtgcctgcaattcgtcagaacaacaatccagtggccttggccaggcaaaaagcagctgcacgacccattcccaacacaacgaagcaaactaccagtgtaaggcagcctgggattgaagcgaaaaagatcactaccaccatacccagacccaccccagcgacagtcacgaaagcgaaaacgccaggcatacgacaacagccaccagtggtcagcacaaagccaagattacctgagccgccagcgccacggacagctagactgcccaatgtgttgtccaagccgttcgagaaacctttaggaaacaaggcaccagtgacacgacgggcgaatgtcgtgaaaccacagcctatacgtggcggaggtggtgccgcggccaagttcaaggacacagctggagcgaccagcaaggcagcaagtcactccatacgaatgaaggccaccaagataaagagccagtacacgaggcttcaggacaacgtgcgaaagcttcctcagctcaaagccgagttgctgcacgcagccacgctagatataccgcctctcacgccgctagacgatatccataatccctttatcgaccaggccacatcaacgcagtgcaagtcgaacaatagcagcggtcatcttttggaggcgtttggcgacaccatcttgttgagcccggtggcaccggtcaaagctgaaggagaaagttcggtgaaaaggcagttgctgccggaaggtaagaaagaggcgtcaggtccggtggcaaagaaaaagttcgactttacgcgttactcagtggcgaattcgccggcggaggactcgctcatcttggatcctcagcagacgacgggtgagtttgggatacgccttctccaatcttaaactcaaactcacattttcctttcagttaaagaagacactggagattccactttggtgccagagggtacaaagacaccgccacgtcgcgaatccaatggaatgcccaactatctcagtccgtttgttagtgtctcgcggggaaaggtgaactcgcgctgtgagaaggagaaacgcaatagcttctacctgtccaatgaggaatcgcccttggaagttcgccgtgccattgaatcggttctgtacttccgactgcagctggaaaacgagatcacgcgcctccaagcgctttgcgctgaatgggaggcgtacagcaaggagaatgaggcacggctgcaggaaacgggcggcattgacatgatcaacgtgaccatcggtcaaacacgtctgctgaccacaaaaaagatgatgcagttcagcggcctgatcgatcgttgcgaggctggagcgaccggcaagaacagtcagccaaacgatggcagtgaggattcgaaaccggtgcaggctgaggatctggagggctggtgggacatgctgcgcctgcagagcgagaacgtggacaagcgtttcgataacctgaaacgttggaaggccaacgactggctggatccggatgccgtggccgaggaacccaaacagccgaagcccaagcccaagataagtcgcaacatgaagatcaaatcgaaggccaagccgagcagcaatctgcagcagttcctccgcaaagcccatgccaacatgaagaagaccaaggtggaggagccaacgctggaggatggcctgcccgccacgtcctcgcgccacagttcgccgcgagtaatcgtagttcgcaaccgccgatccttttcgcccgcccgcacagtactccgcatgtccaccggcgagggccgtcagtcgattgcgccaaatgcgctcctgaaatcagcgattcttgcggccgccgagcagaacgctgccaagacgccgccgcctaagccgcgcacctccatcctcaagacgcccggcaccacgaaacgccagaaccgtggcgtgctcttcagcgccaagaagagcgtacgacgattccagttcacctacgaggagggaaacattagcaacgacgagacagtgggcgccgacaagttggaggactgcgaggaggacatgtcgctggaagcctccacggaaagcggatccctggaacagaatccgggaagggattccaatcaggagaatgaagcaactcctcgcacgtacacgctgcgcaatcggcgggtgaatctgcgtccctcctccgagtttatgtagttttgtctattgacagtaattgtccgttgtggaattgtttatacttttatcttcttagtttaatatttttttgcggatgccattaagtgttaatttattaagatgttgaaaattacatttggcgttttaaatgttcgacgagtatgttctgtgaaaatgaaagcttattttatttttaattatctatcttaccttgattataatttagacatagttaaaggaataaaaaagagaagaataaataaatttgaaatgcttttcttattgaaaggggatcgaaatttaaaattaacaatttaatatcacaacacagaaatttgattacgcgactcaactagtaaaacttgaattttggagttccagaaaattaatattaaaatatttgcatttttcaagttgtctaaataaattttaagaatttagttttggtatgagtctttgctaacatattacccaagtcattcaccttcatggctccgtataattttgaagtattttccagtatttcctaaggaaatttcagtatatctgcgtgtgtatggcggtataatttaacggtagcgacacggtctcaccctgattcataaaagtaaaggaagaccactcgacggcaatttaaattgaattttgaattttgctgttgcactcgattgtaaatactcgttgataaggccgccaaatgaaagtgcacatagctgtgatatcgcgacgcgcatctcaccgcagtgactaaccgcctcgcgaccgtttcgttcgcccgcgacgccctttgagttcaacgcattcacatttcccagtgtgcagattttctttttgttttgtccgcagtcaccgcgcactgcattcaaaacagcgcccaacacacaatacgcgaaccacagcggcacagcatacacaatacacacccagcatggacacgagtggcggaaatttgggtaaggatctggtcatttcgtatttcaaattgaattttcaacctctggtacagcgtgtactcgccatggcagttgggccattcgctggcgcgcaaattgatctcctcgatttgcggctcccccttcgcttgtctacccccctgccacaacaccggcaagctaacttatgagtgcgtattgcattgcggtgtgcatatatctggcaatgggtctgaatttagatttttcgtaagtttgtgcactctgctgacgaaacgaaaaagtgcttttaa

SEQ ID NO: 25259 - DNA, 3053 bp, DROSOPHILA
ttcgccggaaaagtcagcattacgtttcattcccaaccggacacttcagtttgactcgcccatccgtcacagcagtcgccatgcagcgccacaaggaactgtacaaggagcaatcgctggtgctgagtccgcgcaatcactgccaggagaacagggatcggttgcaggcggcgcgcgccaaaaaacgagaggattgtttttatcagaaccgcatcatcagcgtgagcccgacgcccgtcaaaataaagcaattggcggcggcccaagctgctctgacccaggaaaatgtggcacccaaactggagagtccggagcggctggacacgaagcccgcagaactgctgaaggaatccaacccgaaggtctcccgccagaagctctacttacaacgctacatggagtggaagatagccaagaccaaggagcataagcagcaagaccagaaacgtcgaggcgcagccatcaatgtgccgacagtaaaacaatcaaaggccttgcccaaatcacaaacatttcgggttcccgataatctggcttctgcaaagcagaaggaggcggctcccatgttccagcctcccaagcggtgttctctctacatgattgccaatccgacgggcaagggaaaagccgcagaaccgattaaaccttcaatacccaagccaacgtcagcagcagctcctccgtcatccaataccgtggctgcatcttccgccttggccaggcataaatcagctgcttctgcaacaaaaatagtgcctgcaattcgtcagaacaacaatccagtggccttggccaggcaaaaagcagctgcacgacccattcccaacacaacgaagcaaactaccagtgtaaggcagcctgggattgaagcgaaaaagatcactaccaccatacccagacccaccccagcgacagtcacgaaagcgaaaacgccaggcatacgacaacagccaccagtggtcagcacaaagccaagattacctgagccgccagcgccacggacagctagactgcccaatgtgttgtccaagccgttcgagaaacctttaggaaacaaggcaccagtgacacgacgggcgaatgtcgtgaaaccacagcctatacgtggcggaggtggtgccgcggccaagttcaaggacacagctggagcgaccagcaaggcagcaagtcactccatacgaatgaaggccaccaagataaagagccagtacacgaggcttcaggacaacgtgcgaaagcttcctcagctcaaagccgagttgctgcacgcagccacgctagatataccgcctctcacgccgctagacgatatccataatccctttatcgaccaggccacatcaacgcagtgcaagtcgaacaatagcagcggtcatcttttggaggcgtttggcgacaccatcttgttgagcccggtggcaccggtcaaagctgaaggagaaagttcggtgaaaaggcagttgctgccggaaggtaagaaagaggcgtcaggtccggtggcaaagaaaaagttcgactttacgcgttactcagtggcgaattcgccggcggaggactcgctcatcttggatcctcagcagacgacggttaaagaagacactggagattccactttggtgccagagggtacaaagacaccgccacgtcgcgaatccaatggaatgcccaactatctcagtccgtttgttagtgtctcgcggggaaaggtgaactcgcgctgtgagaaggagaaacgcaatagcttctacctgtccaatgaggaatcgcccttggaagttcgccgtgccattgaatcggttctgtacttccgactgcagctggaaaacgagatcacgcgcctccaagcgctttgcgctgaatgggaggcgtacagcaaggagaatgaggcacggctgcaggaaacgggcggcattgacatgatcaacgtgaccatcggtcaaacacgtctgctgaccacaaaaaagatgatgcagttcagcggcctgatcgatcgttgcgaggctggagcgaccggcaagaacagtcagccaaacgatggcagtgaggattcgaaaccggtgcaggctgaggatctggagggctggtgggacatgctgcgcctgcagagcgagaacgtggacaagcgtttcgataacctgaaacgttggaaggccaacgactggctggatccggatgccgtggccgaggaacccaaacagccgaagcccaagcccaagataagtcgcaacatgaagatcaaatcgaaggccaagccgagcagcaatctgcagcagttcctccgcaaagcccatgccaacatgaagaagaccaaggtggaggagccaacgctggaggatggcctgcccgccacgtcctcgcgccacagttcgccgcgagtaatcgtagttcgcaaccgccgatccttttcgcccgcccgcacagtactccgcatgtccaccggcgagggccgtcagtcgattgcgccaaatgcgctcctgaaatcagcgattcttgcggccgccgagcagaacgctgccaagacgccgccgcctaagccgcgcacctccatcctcaagacgcccggcaccacgaaacgccagaaccgtggcgtgctcttcagcgccaagaagagcgtacgacgattccagttcacctacgaggagggaaacattagcaacgacgagacagtgggcgccgacaagttggaggactgcgaggaggacatgtcgctggaagcctccacggaaagcggatccctggaacagaatccgggaagggattccaatcaggagaatgaagcaactcctcgcacgtacacgctgcgcaatcggcgggtgaatctgcgtccctcctccgagtttatgtagttttgtctattgacagtaattgtccgttgtggaattgtttatacttttatcttcttagtttaatatttttttgcggatgccattaagtgttaatttattaagatgttgaaaattacatttggcgttttaaatgttcgacgagtatgttctgtgaaaatgaaagcttattttatttttaattatctatcttaccttgattataattta

SEQ ID NO: 25260 - protein, 921 aa, DROSOPHILA
MQRHKELYKEQSLVLSPRNHCQENRDRLQAARAKKREDCFYQNRIISVSPTPVKIKQLAAAQAALTQENVAPKLESPERLDTKPAELLKESNPKVSRQKLYLQRYMEWKIAKTKEHKQQDQKRRGAAINVPTVKQSKALPKSQTFRVPDNLASAKQKEAAPMFQPPKRCSLYMIANPTGKGKAAEPIKPSIPKPTSAAAPPSSNTVAASSALARHKSAASATKIVPAIRQNNNPVALARQKAAARPIPNTTKQTTSVRQPGIEAKKITTTIPRPTPATVTKAKTPGIRQQPPVVSTKPRLPEPPAPRTARLPNVLSKPFEKPLGNKAPVTRRANVVKPQPIRGGGGAAAKFKDTAGATSKAASHSIRMKATKIKSQYTRLQDNVRKLPQLKAELLHAATLDIPPLTPLDDIHNPFIDQATSTQCKSNNSSGHLLEAFGDTILLSPVAPVKAEGESSVKRQLLPEGKKEASGPVAKKKFDFTRYSVANSPAEDSLILDPQQTTVKEDTGDSTLVPEGTKTPPRRESNGMPNYLSPFVSVSRGKVNSRCEKEKRNSFYLSNEESPLEVRRAIESVLYFRLQLENEITRLQALCAEWEAYSKENEARLQETGGIDMINVTIGQTRLLTTKKMMQFSGLIDRCEAGATGKNSQPNDGSEDSKPVQAEDLEGWWDMLRLQSENVDKRFDNLKRWKANDWLDPDAVAEEPKQPKPKPKISRNMKIKSKAKPSSNLQQFLRKAHANMKKTKVEEPTLEDGLPATSSRHSSPRVIVVRNRRSFSPARTVLRMSTGEGRQSIAPNALLKSAILAAAEQNAAKTPPPKPRTSILKTPGTTKRQNRGVLFSAKKSVRRFQFTYEEGNISNDETVGADKLEDCEEDMSLEASTESGSLEQNPGRDSNQENEATPRTYTLRNRRVNLRPSSEFM

SEQ ID NO: 25261 - DNA, 3647 bp, DROSOPHILA
gccattttggcaaagtataacttacgtaagatgatacgctttcataaatattttataaaaaaaaaacaaactctcgtggaaaataatttaattatataaaatataatactgtatagtaaaaaccgaatttcagcagaatttcgttcagatcttgacagcaatgcaaactcattaaagttaaacaaacagatgagccagcgaatttgttatcgggtgtttatggctgataagacaggatcctggacaggaacttaatatgacttgcaagctgtttatcacgccagattgttcagttggttatcatgttgttttcgcgcatgaggaggatgaagtcgattattactgctggctattagcacgtatctgcagatattttatcgttcagatgcaagccaaaattaagttcgttgcctttgtggcgaaacaatactaataataccctggaaaggcagtgctacaaataagattccaaatcaaaaaccaaaaacattaactttagtttgagatatttttttttattataataataaaatatatgcgtttcatatatatttcatacgtttctaagtctacgtaatacacaatctgtttttgaacaagcaaactatccataaaattacccccctaggtgtacgatctacgcttaacgtctatgcagattcggccatgtcagcagtagagaccctggccctcgttctgctccacgtggtagtagcagtactgccgctgggtgggcgtcagacccatggtctccgcctccgccttaaactgctcgatgccgccgactccggccaggtagccattcagtttggtggccacatagctggtctgcagcagtttggggctgagatttagcgatgaggcgagatccttgtggccctgcaacctatacttctggtggtacctatgaacaaacaaggaaattcatatcaacgcactcagattttcttagttaaaacttacgcctcggctgggtaaaagttctccttggatgcaatctcagtggttatgatctccggtgcacggcgctcttgctcctccaatttggaggcgtgtgccacctgcttctgctcctcatcgtggtacagaatcaaggaggcgtactgcctcttgatgggcgtggtcaggccatactcatggttgttccagaacagatccagcagctccttaaagctaatgaccgtgggatcatagtcgatttccagcacctccgtatgatcgcccctgttgagattggtggttagtaccggatccgaaaggattatgggatgcaacatgtagggacgtgaaaggaagacatatggatgattaatgctctcaacttgctcccttacattttacggtacgttggcaaatccgagctgcctccggcgtagcccacggtggttctcaaaactccacgggtggctccatacagggattctgcgccccaaaagcaacccatgccgaaagtggccgtggctttggtgacattcacatcgtgaaccggcgaaatgttcagttccttttgttcattgcgaacggtgctctggaagaagaagaagaagaagaaaggggagtatgagcaacagatttctaaaatttgaaatattagatttattcgtattgagcgcacaccaaaaacagaaacgtaaggccgtaaccatagcccggcaaacagcgcattttaagcacaaaattttatatgtatataataaatgcaatattcggcaggttttaagttttttaagtattttctttggggctttgttcgcgtctgatgtcgtcagcaaaataataatgcactttgtgcgctcattttaaactctctctcgcgctcttttcggttttcgctctgttcgccttgcacttgcagctgtcgaacagctgattgaaaatactatctctctcgcacacactattgcaaaatcaatttcaaaatcaaggtcaatggaaaaactgatttaaagaaagtaaaagtcgttggctaacagcgcttcacttcgcacagcaaacaactaaattaatcctagcttaaatcacttttaaaaccatttaaatatgcggttttaggtgagcaaaactcgccttgaaattacgaaacagtcgcgaaaacattattatgtgtaaactgctcaactgttgggaagcaactgaacctggccaaaacaaaccgaattcctctagccaacaaaaaggtgctcacatgagctttaattattctgaacattagatgtcggaaactggcttttatgactaagcacatcaaagttttggccacccggccttgggggttcaagaaactttaagactcttcacaaattacttatgtcttgtacatcaaataatttaattgcatatatttgtttatttatatttgtacactgtttaaaggtgtattaaagtcacgattcggcaaaaaaaaatttaaaatatatttcattagctatcatagcattttttaatttacatttaagctcgaattaaaccgcaggacatttgaaatcactagtcacaggattaggcaccaatcactagaccaattacttaccagatccttgagctcaggatgagtgacactggaagtaatagtcagagacatgatttcactagttaaaattgttatttatttaatgtgtcgcttttaacatttaaagctgaactgatgcatctgcagaaaggtcggtccaatttatactgccgcctctcccgctttctacgcgaatgtggagagtgccgcgctatcgttatcaattctcccgctcttcagtcttctggcggccggccccgtctctttctccctctcccgattctacgctgattaaaactgcgcagcgctacaggtttcttggggccacaattgatcgtacagctgggacatttgatcagggttataatttaattgcctttaatattctaatttgaacaagtcaagtgcagtcttttgtgttctccggattgtggactaactgttatttgccgggctcgtattttagccggctcaaacgcaaaatgaagtccaacaggaacatttgtatttttatctccttgggattctcggtgacatagaagccgggaacgccggccttttgaagtgtggattgttggtcattaacctgcgtaatgatattagatattagttcaacatcaagaaaaaacaaagaaagttaaagtagtaaaatctaatttcgtattcccatataagcatttaaagttatgattagaaataatttgtattacaaaagaaaatatctttagtgataatttcatttcaattataagaatctgcagataaatatatacctaaaatatacctaatctatagatccatccataatcaaactatgtatcatatttgaatttaattttaaataggattaggattatctaagtttgagattcgactattgtttttaaagaaatttggatggtaagaccaactaaaagtgcgtggaatggaacgactcaaaaggatattgaattcttcaccttttgatctagtatttcgataatcttcgtatccgactcgtgtagtttcttagtgtgctttattttcatgagtcccaaaatgtggcgcaactcctcgggatccttgatcttgctcctccactcggccacttctatttcatactcgttctccgcctgcatccgtattttaattaagtgtc

SEQ ID NO: 25262 - DNA, 645 bp, DROSOPHILA
catcagttcagctttaaatgttaaaagcgacacattaaataaataacaattttaactagtgaaatcatgtctctgactattacttccagtgtcactcatcctgagctcaaggatctgagcaccgttcgcaatgaacaaaaggaactgaacatttcgccggttcacgatgtgaatgtcaccaaagccacggccactttcggcatgggttgcttttggggcgcagaatccctgtatggagccacccgtggagttttgagaaccaccgtgggctacgccggaggcagctcggatttgccaacgtaccgtaaaatgtaagggagcaagttgagagcattaatcatccatatgtcttcctttcacgtccctacatgttgcatcccataatcctttcggatccggtactaaccaccaatctcaacaggggcgatcatacggaggtgctggaaatcgactatgatcccacggtcattagctttaaggagctgctggatctgttctggaacaaccatgagtatggcctgaccacgcccatcaagaggcagtacgcctccttgattctgtaccacgatgaggagcagaagcaggtggcacacgcctccaaattggaggagcaagagcgccgtgcaccggagatcataaccactg

SEQ ID NO: 25263 - protein, 82 aa, DROSOPHILA
MSLTITSSVTHPELKDLSTVRNEQKELNISPVHDVNVTKATATFGMGCFWGAESLYGATRGVLRTTVGYAGGSSDLPTYRKM

SEQ ID NO: 25264 - DNA, 7920 bp, DROSOPHILA
cgtgggtatctcgccgcagttggagatcaccacgggttccacggggaagtcatccgtatcggtttttacctggaacgaaaaatgtgtcagaaaaagtttcttacatttctgtgtggtggctatgcgtttaagccacgattgtggttccggtttgcttgaatactcacatcctcaatggcatagatggtgtccattccctccagcaccttgccgaaaacggtgtgctttccgtccagccacttggcgcccacggtggtcacataaaactggcagccattggtgtccgggccccgattggccatgcccaagtaaccgggtctgttgtgctccaccgccagagccttatcctcgtccggaaagtagtccccatagatgctaatggagccagttccgtcgccgttcacaatgtcgccgccttggacgagaaagcggtccaccacgcgatggaatcgcgagcccacgtagctggtcccgttgatgccgcgcaagcaaatgtgccggaagttggccaccgtcttgggagccagcttcccgaacagtccaaacgtgatcctgcccaccggcttcttgttgtgcttcacatccatgtagatccgagacgtgaccgtgaagctcagaccactggccacggccagaaaggcgctgcacaggattatccgattgagcaatgacttcatgattttacggacctaacgcgctgatgaaatacacgtaactgaaacgaagactggactgtggaaactatacgagtagaaagtcaattctgggtcgcgggcctggaaacggaagccacaaaagtttcaggttaagtgcaagcaccgcatgatgatggcataccctctgcagacatcgatttcagcacccggcagcaaacatcttgttcggtttaatggcaaacgtaatgtttggctcaactatgttaataactaaaacttcaaaagtatcgtttctaaaagtgcattcaattcgtttcactaaataaatcaactgcattggctttgcatcatatgacttgatatttaattgtgtaaatttaaacttataaatatttaaccttatggtaatcagcataataataaagttagcggggcagggaattgaacccagatcttaggctaaaaacttagggatagactgcgtctacacaaaaatataccgaatacatatatacacttagattaacttgcggcggctaacctggatacagtcttcatgtggggactcgatttcggaaatcttggcctccgttgcgcgtctgagatctatgcagctgaatcttccgcagaagattcgggtaggtcctacaagcgcttcttctgcggatgcacatacttgcagttcttgcccatgttgcagtgtcctcgcatgaactgcttgcagacgccggtgttgccattgcctcctccacctcctcgattggggccagatcctgctgagcgccagttgccgccggagttctcctggaagttgttgcccccgctgcgccagatgccgccgccgttgtttttgttcctgttgttgttgttgttgttattcctaggtccgcccatcatcagtcctggccccattccattgggcggcccgttcatcatgggtccattgggtgggccgttcatcatggggccgttgggtcccatcactggaccattgggtcccattaccggtcccggacctggtccattcatcatcatgggcgggtactgattgaatccaggtggtgggccgcttccgaatggagacactggacttccaaactgattgcccataaagttttgcggtggcatgttgttcatgttcatattgctcatatccattccggggccaccgggtccgttcatcatgggcggtacaccgggcggcccacctaccggacccatttggttctgccagatttgcggcgttccgttgggcacttgatttggcatcatgtttggtccgggtggcattcccgtgggagcaggcatgcctcccatgaacggatcgaatggattttgcattaggttcggtccagctcccagtccggtcaacatattgtcattgaagcccatgtccgatccgctgatatttgctccgactcccgagctaggcgcgtatttcttgggctccggccacgccaaggcactgtagtcgttgacagcatccggattccccgtcaggtcatccatgggtatcacgggaatgtcatgagcaaaatgcggttccagttccgcctccgcaggactgtcgggaatcatgtcgggcgagaagtacagggctcttagagtggtggcctccctgtccatctgcacctggcgctgcttggagaggtttccgttcgggtggtcgggcacattatcgacttcgagtagtggccgccactccatttgcggctccatggtatcgtcgaatccacgccgagcaatggtcagcgcgtcccgctcgctgaatcgctccatgttcttcatttccaggaaggtctgcttcatcacatttacgcgctctgagcgatcgacctcgaagtatcgtatctgggtgagcttttcctctgactgccaggttagcttctttttcgggcccttgcggcggtgcagcgtgagcactcccggtggtccatcgggtccacagccaggtccaggcttcttgggctcctcgggaagatcttcagcgttgtcagaggtgttacccgcttctccgccttctccgcctgccgcagccttcgccttctgcaccttttgctcgatgtcctccttgaccctcttaaggggaatgtcgtcgtcatcggcatccgtgtccttgccaggtgacgaggagcgcgcatcatcgttttccttgctgctgtcgtccgacttctcctcgctcttcgactcgtccagagtatcctggtagaacttaagcggcgccagtggcgcgtccttgtccgtgggcgatgttgcagacgtacgcttgcgcttcaccacctttttgggttcgatggaggcggccagggcgtccgagaacaggttggtctccaccagggtttgaactggaaaaatgagggtaaagtaagtaatcgctccagtaattggtttagttaagaaaatgtttaagtggccttcgttgaatggcccattggctttggtggattttgcttttgctggaaattgctagaagtaaaaaagttatggaaagaaacaatctgatctggacacacacatttgttgtgtttatgattgattgattaagtttacccacatttcgataattaatgaaatgggagtctctctactggaataagcaccgaatatataccaaaacctagaactactaaacaattcatgaattttccccaaaagttctttaaaagttttggcttgctcgactttattcggtataatttcatatataaatgtcaaaatgtaattattcgacttttttttatttaactagtttttcaacacaaatagtgtttaatcatcataattaaaatagttataagctctcattgcgattgaaacttgagaagtacgcttattaaaagtgtattgctaagactactagttatacgcaatagttaaacctctttaaactttgatgcttttagtatatttatgtcagcacatcgataagtgtcattgggtttcctcagcactaatctacccaaggaacccgacactgcgatcagattacgcgcaccgtgcagcttactgccaaggtgacgcatccgctgatgacgcactacgacgaggatgtgggtaaactagggttgcctgctctagcgaggcgaacaattgtggagaccctcggtgacgcacgacagcaaaatcgaggccaaagcaaagcagctgggactcaagcccacggtggtgatcgaaccacctaccaacttatagaaccgccagcttaagtcaatattttcgttttcgtttcttttgcgctcaatgcatttttttattcaatagaaaaatcgtatttttctagaggaaaccgtattttatttgtaagtctttaaggtgggctgctcgccaagtgaatctacataccttatagctaagctaagctaaatacgttcaagatttgaggtttgaatacttaacatcaggcagcgacaacgacgacgacgacggcggcggcggcatcgtctgtgcctcagatttcgttttcgttcggtctcagcgcatgcgcagtgcccagatttcgggattcaactccattcaacttcatccgccgtcatccggaattgaggtcatagactcacactcgggcagcttgcagttcaaactcgatccggggataacaccgccacgattgatacattataatgcaaagtacccacactaaaaggccccacttctgctctacaatttaagacccgccccaagcaaaattaaacaccttgagaatggaatggagatcaacaaataatacggcggagttcgacattcgactccgatcgaaaacaaaagcaaaagccaccaaagttcttgggctgtggaataaaatagagaagagcattaatagtgattctagcatctgttgcttactctttttgggcgctatcagcttggcggctccgggcctctccacatgtcccgcgacgttgttgatgtcgatcttggccttcttgtcggtggacaaatccctgggtggcggcgatggtcgcttcagtgaagacgggactgccattaaagcgggtgaagcggcaaccgccgacgatgtgggcttctttaggcccttgcgagatgggggaggcggagcctcttccgtcaggccatgcgatctgaatttggactggtacgtctttacagtggccgtcttttcggtgtcccggcgaatttctatcgaaatggaggccttgcgggacatgataggaatcgatctgggcttctgtgcgtcgctctcctttgccgaagctgtaggagatgtacctgcagcatttgatgctgccacagctggcggaggcattagcttgttgtccttgtccttgtcctgcctcgaggatgaggatgatgacgaagttgacgacgacgacttgcgatctttggacgaactagaaccagagctgctcgacgacgacgacgacgacgacgaggaggactttgaggacttgtgtttattcgaggaagaagaagacgaaccgctgctgcgctcccggtccttgctcgagctggaggagccggaacttgagcgagccttgtctttatcgcggtatttatcgctagaactgcgatgggaagaggaagaagatgaggagctcttggaagaactgctcttcgaagaggaggatgacgaggaagaggacgacttatggctagatgaggaggacctatgacttgaactttccttctttctatccttctcgcgctccttctcggaccgtttacttttgtcgctctttgagctcttatgcttcttattatccacgtcctccccagacttaacctccgccgcggagctactatcatctaacccggactttttccccagactagcatctgctaataagtgggttgcggaggagcccttttccagatgttccacctcgttgtctttcgattgtgtgccagaatccgtttcgtcgccaccatctgggttgtccaacaaaggcttccacttgatggtaatgctgttggaattgctactgttggccgccgaggtgatggtatacgtcacaggtgctccggcgctatcagtgctgtctgaagaagaggcagagtccggaactgaagcggagccagctccagaaacggatgcaggaacctgagaggcagtagtggctgcaatatgtggcgcagcaccttggatcgtcatgcttgtgttttccgtcacaatcttcagccactgctctaccaaacgcttggctagaatgcgtacacctggaaaacggggtcgagaaaagccaattagtaatccctaggtaattaaaagcataaaggacagcccaaaacatgacccaaaaacactaatctacgactagagtaagacttatcaaagaaaacttaccttcgttgccgccatccttgcacagccccttgaccagaataggtgctgagtttatcttgaggcgattgacatccacgggagaaaggagcagcagttccaggatctcctgtaccagcggccagttcatggccctgatggcatcatttaaccaggtgtagaccagcgaccaaccgcccaccgccataaagtcgcccaatagttccgtctttgtggatttcagaatttgtacatacacacatttcgagacgagtttttttgaatacttggccatcaaactgtgggcgaaaaacttgatattagcaaacgccgataggtgtcgctgctgacaagtggtgaacttaccccgaaatgcgtttcacctccactgcacttaaaattccaccattattgtccaaaagcacccgcaggcacctcagcaattgcagtggaactatacgaggctgtcgaataaaaacattaaataaagcacaactgttgttgcatttcctagccaatataactcaccattttctttgttagtcgtgcgaaagaagaaaatttatctggcaacgctaactccctatagccgtctctcttccacacttgtaggtgtgaccatacgcaacgtgtgcgcgtgtgttggatcgtgcgtgtgtgcaccgacactcgcttttgttggtatgggtgtcttaatagatactaaatttccactgattacgtaattccataagaattcgctttttcaaggactgcaatagtatctaaaataggagaaaacaccagtctgagaacaaatttagcaggataaaattttgctatatccctacaattcacttttaagacgagtattaaataaattccagcagcagcgccaaaatatgataaatgctgttattttattgtctcaactggcagtaaaccaataatccctccgcttgaatgttttgttttttgttttggagctgcagaaaacgtgttttacgcgttgcgattttttcaggcactgatgaaattcggacgtgtgctcgcggctatcggtaatcgataagccagtgcagccctgaaggctgtccactctcagaaaaccgaaaattatatattacgacgtattggtattgatacgaaaacatgcgttcgtctgaacgtttgtagcacaaatgtctctctacctcgtttttggttacaacccaaatttgactttaggtacaagcaaaatgtgaaagttacttagtttttctgttaaagcaggttggcagcgccttgccacgcacacaacaatgacgccattttgattttcacaatttttcacaaaggcgtaattaaatccgcagccaagggaaatgctagaaaattgtcttttaatagcaacttcaacaatatcggccactttatattgatttttctttgtttaatcctaattatcggctttcgttcacgtccacgccccaaaattggacatgcggttaggtccgcacacttaggtcgagcaaatcggtaataagccttccagaaaatatatattaaatgtacaattgtttatcggccttacaatttgttaaatatttaattggcgacgatttttctatctctccgaaaactcctgcgtgcgctttgcttaggctcacaaaatcgtgtgacctttccttgcttgaaaataaaagtttgtttagaaaataccaaaacgcatagtcggaatatggtaatctaattaatacccctattttgaaagtacaaacaataattatttacttaaaaacacttttaatataaatggatttagtttcccgttaacagtttcaaaaactatccacggtggataatagcgaatgctataaaaagaaatttattgaattaagattttaattcatcttaattattctaacacatataatggcataagttatagataccctgagctctttttcaattaaataaaatttgtgaaggtgtcagggctaaatcatgtattgtttgacttatttc

SEQ ID NO: 25265 - DNA, 4098 bp, DROSOPHILA
cgtaaaacacgttttctgcagctccaaaacaaaaaacaaaacattcaagcggagggattattggtttactgccagttgagacaataaaataacagcatttatcatattttggcgctgctgctggaatttatttaatactcgtcttaaaagtgaattatactattgcagtccttgaaaaagcgaattcttatggaattacgtaatcagtggaaatttagtatctattaagacacccataccaacaaaagcgagtgtcggtgcacacacgcacgatccaacacacgcgcacacgttgcgtatggtcacacctacaagtgtggaagagagacggctatagggagttagcgttgccagataaattttcttctttcgcacgactaacaaagaaaatgcctcgtatagttccactgcaattgctgaggtgcctgcgggtgcttttggacaataatggtggaattttaagtgcagtggaggtgaaacgcatttcgggtttgatggccaagtattcaaaaaaactcgtctcgaaatgtgtgtatgtacaaattctgaaatccacaaagacggaactattgggcgactttatggcggtgggcggttggtcgctggtctacacctggttaaatgatgccatcagggccatgaactggccgctggtacaggagatcctggaactgctgctcctttctcccgtggatgtcaatcgcctcaagataaactcagcacctattctggtcaaggggctgtgcaaggatggcggcaacgaaggtgtacgcattctagccaagcgtttggtagagcagtggctgaagattgtgacggaaaacacaagcatgacgatccaaggtgctgcgccacatattgcagccactactgcctctcaggttcctgcatccgtttctggagctggctccgcttcagttccggactctgcctcttcttcagacagcactgatagcgccggagcacctgtgacgtataccatcacctcggcggccaacagtagcaattccaacagcattaccatcaagtggaagcctttgttggacaacccagatggtggcgacgaaacggattctggcacacaatcgaaagacaacgaggtggaacatctggaaaagggctcctccgcaacccacttattagcagatgctagtctggggaaaaagtccgggttagatgatagtagctccgcggcggaggttaagtctggggaggacgtggataataagaagcataagagctcaaagagcgacaaaagtaaacggtccgagaaggagcgcgagaaggatagaaagaaggaaagttcaagtcataggtcctcctcatctagccataagtcgtcctcttcctcgtcatcctcctcttcgaagagcagttcttccaagagctcctcatcttcttcctcttcccatcgcagttctagcgataaataccgcgataaagacaaggctcgctcaagttccggctcctccagctcgagcaaggaccgggagcgcagcagcggttcgtcttcttcttcctcgaataaacacaagtcctcaaagtcctcctcgtcgtcgtcgtcgtcgtcgtcgagcagctctggttctagttcgtccaaagatcgcaagtcgtcgtcgtcaacttcgtcatcatcctcatcctcgaggcaggacaaggacaaggacaacaagctaatgcctccgccagctgtggcagcatcaaatgctgcaggtacatctcctacagcttcggcaaaggagagcgacgcacagaagcccagatcgattcctatcatgtcccgcaaggcctccatttcgatagaaattcgccgggacaccgaaaagacggccactgtaaagacgtaccagtccaaattcagatcgcatggcctgacggaagaggctccgcctcccccatctcgcaagggcctaaagaagcccacatcgtcggcggttgccgcttcacccgctttaatggcagtcccgtcttcactgaagcgaccatcgccgccacccagggatttgtccaccgacaagaaggccaagatcgacatcaacaacgtcgcgggacatgtggagaggcccggagccgccaagctgatagcgcccaaaaagattcaaaccctggtggagaccaacctgttctcggacgccctggccgcctccatcgaacccaaaaaggtggtgaagcgcaagcgtacgtctgcaacatcgcccacggacaaggacgcgccactggcgccgcttaagttctaccaggatactctggacgagtcgaagagcgaggagaagtcggacgacagcagcaaggaaaacgatgatgcgcgctcctcgtcacctggcaaggacacggatgccgatgacgacgacattccccttaagagggtcaaggaggacatcgagcaaaaggtgcagaaggcgaaggctgcggcaggcggagaaggcggagaagcgggtaacacctctgacaacgctgaagatcttcccgaggagcccaagaagcctggacctggctgtggacccgatggaccaccgggagtgctcacgctgcaccgccgcaagggcccgaaaaagaagctaacctggcagtcagaggaaaagctcacccagatacgatacttcgaggtcgatcgctcagagcgcgtaaatgtgatgaagcagaccttcctggaaatgaagaacatggagcgattcagcgagcgggacgcgctgaccattgctcggcgtggattcgacgataccatggagccgcaaatggagtggcggccactactcgaagtcgataatgtgcccgaccacccgaacggaaacctctccaagcagcgccaggtgcagatggacagggaggccaccactctaagagccctgtacttctcgcccgacatgattcccgacagtcctgcggaggcggaactggaaccgcattttgctcatgacattcccgtgatacccatggatgacctgacggggaatccggatgctgtcaacgactacagtgccttggcgtggccggagcccaagaaatacgcgcctagctcgggagtcggagcaaatatcagcggatcggacatgggcttcaatgacaatatgttgaccggactgggagctggaccgaacctaatgcaaaatccattcgatccgttcatgggaggcatgcctgctcccacgggaatgccacccggaccaaacatgatgccaaatcaagtgcccaacggaacgccgcaaatctggcagaaccaaatgggtccggtaggtgggccgcccggtgtaccgcccatgatgaacggacccggtggccccggaatggatatgagcaatatgaacatgaacaacatgccaccgcaaaactttatgggcaatcagtttggaagtccagtgtctccattcggaagcggcccaccacctggattcaatcagtacccgcccatgatgatgaatggaccaggtccgggaccggtaatgggacccaatggtccagtgatgggacccaacggccccatgatgaacggcccacccaatggacccatgatgaacgggccgcccaatggaatggggccaggactgatgatgggcggacctaggaataacaacaacaacaacaacaggaacaaaaacaacggcggcggcatctggcgcagcgggggcaacaacttccaggagaactccggcggcaactggcgctcagcaggatctggccccaatcgaggaggtggaggaggcaatggcaacaccggcgtctgcaagcagttcatgcgaggacactgcaacatgggcaagaactgcaagtatgtgcatccgcagaagaagcgcttgtaggacctacccgaatcttctgcggaagattcagctgcatagatctcagacgcgcaacggaggccaagatttccgaaatcgagtccccacatgaagactgtatccaggttagccgccgcaagttaatctaagtgtatatatgtattcggtatatttttgtgtagacgcagtctatccctaagtttttagcctaagatctgggttcaattccctgccccgctaactttattattatgctgattaccataaggttaaatatttataagtttaaatttacacaattaaatatcaagtcatatgatgc

SEQ ID NO: 25266 - protein, 1071 aa, DROSOPHILA
MAVGGWSLVYTWLNDAIRAMNWPLVQEILELLLLSPVDVNRLKINSAPILVKGLCKDGGNEGVRILAKRLVEQWLKIVTENTSMTIQGAAPHIAATTASQVPASVSGAGSASVPDSASSSDSTDSAGAPVTYTITSAANSSNSNSITIKWKPLLDNPDGGDETDSGTQSKDNEVEHLEKGSSATHLLADASLGKKSGLDDSSSAAEVKSGEDVDNKKHKSSKSDKSKRSEKEREKDRKKESSSHRSSSSSHKSSSSSSSSSSKSSSSKSSSSSSSSHRSSSDKYRDKDKARSSSGSSSSSKDRERSSGSSSSSSNKHKSSKSSSSSSSSSSSSSGSSSSKDRKSSSSTSSSSSSSRQDKDKDNKLMPPPAVAASNAAGTSPTASAKESDAQKPRSIPIMSRKASISIEIRRDTEKTATVKTYQSKFRSHGLTEEAPPPPSRKGLKKPTSSAVAASPALMAVPSSLKRPSPPPRDLSTDKKAKIDINNVAGHVERPGAAKLIAPKKIQTLVETNLFSDALAASIEPKKVVKRKRTSATSPTDKDAPLAPLKFYQDTLDESKSEEKSDDSSKENDDARSSSPGKDTDADDDDIPLKRVKEDIEQKVQKAKAAAGGEGGEAGNTSDNAEDLPEEPKKPGPGCGPDGPPGVLTLHRRKGPKKKLTWQSEEKLTQIRYFEVDRSERVNVMKQTFLEMKNMERFSERDALTIARRGFDDTMEPQMEWRPLLEVDNVPDHPNGNLSKQRQVQMDREATTLRALYFSPDMIPDSPAEAELEPHFAHDIPVIPMDDLTGNPDAVNDYSALAWPEPKKYAPSSGVGANISGSDMGFNDNMLTGLGAGPNLMQNPFDPFMGGMPAPTGMPPGPNMMPNQVPNGTPQIWQNQMGPVGGPPGVPPMMNGPGGPGMDMSNMNMNNMPPQNFMGNQFGSPVSPFGSGPPPGFNQYPPMMMNGPGPGPVMGPNGPVMGPNGPMMNGPPNGPMMNGPPNGMGPGLMMGGPRNNNNNNNRNKNNGGGIWRSGGNNFQENSGGNWRSAGSGPNRGGGGGNGNTGVCKQFMRGHCNMGKNCKYVHPQKKRL

SEQ ID NO: 25267 - DNA, 7672 bp, DROSOPHILA
caaggccactgggaattaaacgacaatgaacgatccccattcattgggttattaatatacaatagcacactctacgtatctgcaagatcatcggggaatcgattccggaagcggctgcagttgccgtccacatttctttcttcccattcttgcctttcttctcgggcccattcaggtaaactcatttgacttttattaattacaactagatttttatttataaccagcaaatagtttacaatttatcaaattggcttagtgatgcaaccgtgtacgcgcatatgtacacctttatagatacataattatcaacatttcgatgttttcccgttcagagacgatcgctgtatttgagcttctgccatccggccctttgtcgcttcatttctctgtagctgttgggcagtccgtagaaaaagtatatggaaagtcctatgcgagtggagaagtgattagtttacggatttggggtatcttaggcatgaacttcgttttgacacttataatacctctttgtttaatacttttacgactagtttgagttagcttggcatgcgggctagtttatgtgacactgtgagggactaggtctaagtcttggatttagtttataatatattgcatattttgacgatttttcactaaggattatatagatttactttaacacctaatttcctttaaattgtatgtatttatttaactttaagatgtcaaattatatttttcaaatctatattttttaaaatctttaaaggacctccaaagttaccctcacagtccaccgtgcacttattatctaagattctaactaccgactagtaactacagctatgctaaatatgtacaggaccagttacgtttgcattccgattcacatgctggacctaactacttttaactgggggtaaaatggcaccctctttggtttcaccaggggctattgggtttggatgggtggcatgggggagcgtaatgtacaggtacgaatggcaccccctcagctctcgacctcctccatttctatgtaggtagactgcggacgttggcgacgcaccaggtccggatgttgctgggttcggtgtgagggaccccgctgcaatatggcctccaatttggctttgaatggcaacggctccggctccggttgctcgccaggatccggacgcgtctccgtctgcgattccggtcgcaaaagcgccgggttcttggcatccacgatatgctggcgattcaaactgggtcgctgtttgcgtagactaatgctgttgatggtcttgtacagaaccggatcgaatttaggtggacgcggtatgttgctaccacccgccgctgcaactggagctgcaataggacctgcaccgggaactgggtcctttgaggggtttcctgtggtggtggacacttcggcggggacctcatcagcattaccagtctcattacggtcgattttcagctcgctgatggccttgagcattaagcgacgcacatcggtttcgcttttcgattgctttagcagcggccttgttttgggctcctcatccggcacaggctccagctccacctcgccatccacgtcctcggatctcttggccactaccttcacttggtgggcattggcattcataatgatgtggcttaatcggtctttaaacttggtcgaatgcagcggatcctcaatggtagaggcctgggatatgatggaagtctgtgagcccaaacgctggaacagaaacacaggcttggaagcctcgtcgtcatttacagattcagcttccccctccaatttatcccctttcaccaaaggaacctctttggccttaactttctccaactgttcatagaaagcctcgctattgaacatctcctccagcatttgatgggcgaccagcttgcattcatcgtatctactcaacttaagagtaatcccactttggacttcatcatcatcgctgctactgtgaacggtggccacaatcacggtttctataacacttggatacatttcagagtccaggctgaaatgcctctcgaaaatcatctgttgttgcaggtccaagtcctgttggccttgctgtgtatcctgggcattcaggacatcgtccaacattgcgattaccgactgttcgtcctcacgcgatggagattctgggttggagcccaaggtggcagtggaattctcactcttgttatcctccacataaaaaacctttccattggcgttctttatttcgaccaactcgtcgccgacatcactaagattctgaatacgattcaggctactgctcggactcttcttcagctgcgtttctagggtcaaaacactctccttggatatgcaatgatactcctgctctcgactttcttgtaagccttttagcgccttgtagaagtcccatctctcggggtttctcttcgccggatttttgcaatcgtataaataccagcatgcaagaaatacgggtatacctaggacatttaagttagtacaacggtgcaacatgcattacattctaccacatgcaaaaggactttaatgtggactgcgactcacccacaatcatccagactccaaatcgtatccacgtccaggtatccagttgaagcattagatatatattgatgaagatactgatagcaggaacaatcggtacaaagggaactctaaataatctacgacgagcttctctgggctgaaggcaaatcagacagatcaccagcaacatcagcacgactaacacaatcaggagggtcaaggcccatacttctttggaggcgattaaaagatgagcctgcataattagcactcctatgcccaaggaaattaggcctaaataacacagaaagagtcattataaactgaaataattacatttaatctaatatatacaatactcacaaaacaatgttgaaagcactcccacaattcttgacgatattgcattgggctcctggactcgatgaacattaaacagttgtgtgcatactgaaccgaacgtgaatcgctcggaactcgaagttaaagaagtggtttccgatgctctgacttccctctgccctggattctcgtcaacctcacaatagtccatatatcgcaaaagcattatggatatggccacaacgctgtaggccaataaagtgccgattgagagcaggctgaccagttgggacaaatcgaagagtccggcaattgcggccgtgaaaagagctgccacaatagatccggtgactggaactcggaatctcggactcactttgcccagaaatttaaacaaaagaccatcctgggccatcgagtacataaccctgggcagtgggaacagtgctccaaagagactggccagcagacccaccaaaccacctacggtgacaatccacatggccactggccaacccacatactcgaaggcatatggcagtggtgcgttaacatcctggatatagtatggcagcatcaatgtcagtacagtggacactccgaaatagcacaaaaagataatcagcagtgagagcagaatcgatttcgggatatttttccgaggatttcggacctcttcccctgtggtggcgatgcaatcgaatcccacaaagccaaagaagcaggtggctgctccacgaagagtgccttcaaatccaaaggggaaaaacccaccagatccgatagtagaattcgcactcacagtactcggatccaccgtccagttggaatagtcagctggggagataacaaacaaacagagaacattaattaattaaaaaaacagaattgggaatcagagaatatgattaatctattatgattttggaacttttgcttttttcatggtgctattttgagagatactaatggttttccaattaggtgagcccatttgaaaaatgcagcactttatgcatgaatgcattcaacaaaccactcacaattttatatttacttaaggtttattaagaagtgagtaattgaaactatatttaccttttaaagcgccagcgattatgacaaatcccaaaataaatatatttaggcacgtcacaaaattatttgccatagtcgatgtctccacgccaaaggccagtgcaactgaaacatttaacgcattttaaatttattttctatttaaattatttgaatttattagtgctcttaccgccaaacacaaccactaggccaaaggccaaaaagtcaaagtagctgcccaagaaactgacattcataggagcaacctcggcgaatgtgtatttcagggtatcatttagtagggagtccaggtacaggctgatacccctacaaacactagccgttccaataacgtattccaatatgagattccatccaatgacaaaagctacgaattccccgatacagacataactatatacatacgccgatccagccttgggaactcgagcgccaaattccgcatagcaaactcctgtaagaaaacatgaaagataaaaaaaaaatatatatagagtcagttatatagtttgttaaccttgccataactatatgcaaaaacaaaacttctgaaatattgtatctcaggggtttttattatatgggttttactttagtccaaatcgaactcacctgccagcaaagatgccagtgccgcgatggcaaacgatatcatcaccgatggacccgcctgatccttggctatctgtccggccagcacgtagaccccagctcccaaggtcgatccgacacccagggccgtgaggtcccatagacccagaactcgattcagcttcgtttccccctcgctgccatccgcttggagattcttgcgccgggtgagaactttccatggcgagatctggcgaaccattgttcagtatctatctccctcgattggtggaaagttcagtaaactctagaattttggaacgaacaaaattcaccaagtgtctttcagaggtttagacaaaatcataatgcacttcgatccgcgtattgtcttatcttgtaacgccgtttgattgtataatgcaaataatggaactcaaaatgtaatcgtaaatggcggggctattgtgagtctgaactcgattgttccacttagaattcattataggtgatgatatatacatatgttgggtgtgctatgtacgaaggttttagaggtgtagaagtttgaatggaaaagttttcgaaaccgcctttcacaaagaaagtttgataagaaaacggtggtggtcttaaaataatggaaataattaaatttggctattaatttcatacattagtagggtcttgaaaaaaatagctacacaaataataataaaggtagaatagaatagcatgatttgcaatcaaatttctatgaacttaaaaggatcatgatttcgttattttaaatacaatttttaccgacaggtgtgcaaacaaaactcgtatgttttttgagaattaacttaagtatgcactgcatccgctgtaaatcattcattattatattttttctaagaggtgactaaccaaagcacccacaccttttccacactttgataagaatcagatgctcaagtttttacgtagaatatcttgtgcagctttgtttgcctttctattattaacgttataattcgtcgtttgctctgccctaaacgaagataattaagtgggtctaggtgagtttgccggacttgtcgaatgcgaagttatgctaagtttatataattatggtaaacttgattctgcactcaccgactttgagacactgccgtccgtcctcacttacatatattcgattccaagtgcagttgttgctccaatgcactctaagttaatattgtcgctccgcctttgtctgtttcttattaatgaattggaagtctattattaattttctctcactcaaaacaatagaaaacggaaaacaagactgtgaccgacatacttggcgatcagggagcgtctgtctgcagcctgttggtgtcgtcttacagccgcgaattcttcgcacactcctcctaagataagaccaccaccaggccggcgagccgaactcgaatctcctccgccacccgacgagattgactgcttgccatggacgaggagagcggggtacacggcgagaaaaatgtatcttcaattataggggtaaaaataaatctttagtactaaacaacttttattaatagataacgtgacaaaacaattggtcaaaaattataatttgaaatccattagaaagttatatcgaacattaattttaaactttctgtaaacaataatttgtagcttaaatatagatcaaaatttattttaaaaatttaatttaaaaatttaaaaacttttcttaaaaaaatttcttttataacgaaatcagattctatgcaatccatatgaaaataatatttttttttgttttttatccttaaaaacaaatattgtataacaatttaaaaacgaaacacaaacatattaaatgtcgatcatgaaataaaaaccatttttcacaaattgatatgtaggtccgaaatattaataaactgcaagcagcttactcttttaaatagacgtggaaaatcgatgtctaaaataggcgtattttctctcagtgcacatccgaagcaaaactgataagagacgaaggcgacttcaattcgtcgggatttagtggtgataaggcgctactcgggggatcgcagggttttcgagatgatctgggttgtaattagagcgaatacaaaaaaattagcaggtgtgcgagcgggaggggcgttggtgcgagggagaggatctgaatcacactgtgtgacgtcgcattttgttggttttggttttgatgttgctgctgtgatatgactgctgctgtgtttgcctctgttgttgttttccgactttcggttttatgatcttgcgatagcgaaacaacagatttttgttctgtgcttgttgttcttgtttttaccgccactacaaggcaattccagaattttgttatttatgttgctttagataacactgtttgtattcacgtttttgcttcatttccgatctgccggtttttttggctttagatttggagcattcgtacttttctcccgctcgtgctgctatctttttctcgcaccgtatcgctctctcattcgcactggcacgcagctcgcttgttgacggtttcggtgtatagcgttaactgaaagtgtaagataatattgtggcccctatatatggagagcgctacgagaactggccgtctatatagagtggaatgcagtaataatatcgcacagacgaacacaattataaatgctttctgcgctcgtcttcgcactgctattgtttcatattgtttttggtctagatgttgatgtttttattgtcgttagctgtcgagtgtcaatttttcaattttaaaaattggttaagtcggttgatcatctccgcttcatattagaattctagtattttgctatttctattgattgatagaatcaaaactgcattcggtttaaagagtcttatgagtcttatctcgatgaaatctacgattacgtaaactcaggccatataagaaggtgaatgaatggctggatttcgtaactgcagatatgatttgctgataccagataagccgattaaacaaatctggttcggttgcattgctcaggtgtgtgtgtagatattctccgtataaccgattatttctacctgcgattg

SEQ ID NO: 25268 - DNA, 3064 bp, DROSOPHILA
atcatctcgaaaaccctgcgatcccccgagtagcgccttatcaccactaaatcccgacgaattgaagtcgccttcgtctcttatcagttttgcttcggatgtgcactgagagaaaatacgcctattttagacatcgattttccacgtctatttaaaagaatacatttttctcgccgtgtaccccgctctcctcgtccatggcaagcagtcaatctcgtcgggtggcggaggagattcgagttcggctcgccggcctggtggtggtcttatcttaggaggagtgtgcgaagaattcgcggctgtaagacgacaccaacaggctgcagacagacgctccctgatcgccaaacaaaggcggagcgacaatattaacttagagtgcattggagcaacaactgcacttggaatcgaatatatgtaagtgaggacggacggcagtgtctcaaagtcgatggttcgccagatctcgccatggaaagttctcacccggcgcaagaatctccaagcggatggcagcgagggggaaacgaagctgaatcgagttctgggtctatgggacctcacggccctgggtgtcggatcgaccttgggagctggggtctacgtgctggccggacagatagccaaggatcaggcgggtccatcggtgatgatatcgtttgccatcgcggcactggcatctttgctggcaggagtttgctatgcggaatttggcgctcgagttcccaaggctggatcggcgggtatcagcctgtacctggactccctactaaatgataccctgaaatacacattcgccgaggttgctcctatgaatgtcagtttcttgggcagctactttgactttttggcctttggcctagtggttgtgtttggcgttgcactggcctttggcgtggagacatcgactatggcaaataattttgtgacgtgcctaaatatatttattttgggatttgtcataatcgctggcgctttaaaagctgactattccaactggacggtggatccgagtactgtgagtgcgaattctactatcggatctggtgggtttttcccctttggatttgaaggcactcttcgtggagcagccacctgcttctttggctttgtgggattcgattgcatcgccaccacaggggaagaggtccgaaatcctcggaaaaatatcccgaaatcgattctgctctcactgctgattatctttttgtgctatttcggagtgtccactgtactgacattgatgctgccatactatatccaggatgttaacgcaccactgccatatgccttcgagtatgtgggttggccagtggccatgtggattgtcaccgtaggtggtttggtgggtctgctggccagtctctttggagcactgttcccactgcccagggttatgtactcgatggcccaggatggtcttttgtttaaatttctgggcaaagtgagtccgagattccgagttccagtcaccggatctattgtggcagctcttttcacggccgcaattgccggactcttcgatttgtcccaactggtcagcctgctctcaatcggcactttattggcctacagcgttgtggccatatccataatgcttttgcgatatatggactattgtgaggttgacgagaatccagggcagagggaaagaaaccccgagagatgggacttctacaaggcgctaaaaggcttacaagaaagtcgagagcaggagtatcattgcatatccaaggagagtgttttgaccctagaaacgcagctgaagaagagtccgagcagtagcctgaatcgtattcagaatcttagtgatgtcggcgacgagttggtcgaaataaagaacgccaatggaaaggttttttatgtggaggataacaagagtgagaattccactgccaccttgggctccaacccagaatctccatcgcgtgaggacgaacagtcggtaatcgcaatgttggacgatgtcctgaatgcccaggatacacagcaaggccaacaggacttggacctgcaacaacagatgattttcgagaggcatttcagcctggactctgaaatgtatccaagtgttatagaaaccgtgattgtggccaccgttcacagtagcagcgatgatgatgaagtccaaagtgggattactcttaagttgagtagatacgatgaatgcaagctggtcgcccatcaaatgctggaggagatgttcaatagcgaggctttctatgaacagttggagaaagttaaggccaaagaggttcctttggtgaaaggggataaattggagggggaagctgaatctgtaaatgacgacgaggcttccaagcctgtgtttctgttccagcgtttgggctcacagacttccatcatatcccaggcctctaccattgaggatccgctgcattcgaccaagtttaaagaccgattaagccacatcattatgaatgccaatgcccaccaagtgaaggtagtggccaagagatccgaggacgtggatggcgaggtggagctggagcctgtgccggatgaggagcccaaaacaaggccgctgctaaagcaatcgaaaagcgaaaccgatgtgcgtcgcttaatgctcaaggccatcagcgagctgaaaatcgaccgtaatgagactggtaatgctgatgaggtccccgccgaagtgtccaccaccacaggaaacccctcaaaggacccagttcccggtgcaggtcctattgcagctccagttgcagcggcgggtggtagcaacataccgcgtccacctaaattcgatccggttctgtacaagaccatcaacagcattagtctacgcaaacagcgacccagtttgaatcgccagcatatcgtggatgccaagaacccggcgcttttgcgaccggaatcgcagacggagacgcgtccggatcctggcgagcaaccggagccggagccgttgccattcaaagccaaattggaggccatattgcagcggggtccctcacaccgaacccagcaacatccggacctggtgcgtcgccaacgtccgcagtctacctacatagaaatggaggaggtcgagagctga

SEQ ID NO: 25269 - protein, 870 aa, DROSOPHILA
MVRQISPWKVLTRRKNLQADGSEGETKLNRVLGLWDLTALGVGSTLGAGVYVLAGQIAKDQAGPSVMISFAIAALASLLAGVCYAEFGARVPKAGSAGISLYLDSLLNDTLKYTFAEVAPMNVSFLGSYFDFLAFGLVVVFGVALAFGVETSTMANNFVTCLNIFILGFVIIAGALKADYSNWTVDPSTVSANSTIGSGGFFPFGFEGTLRGAATCFFGFVGFDCIATTGEEVRNPRKNIPKSILLSLLIIFLCYFGVSTVLTLMLPYYIQDVNAPLPYAFEYVGWPVAMWIVTVGGLVGLLASLFGALFPLPRVMYSMAQDGLLFKFLGKVSPRFRVPVTGSIVAALFTAAIAGLFDLSQLVSLLSIGTLLAYSVVAISIMLLRYMDYCEVDENPGQRERNPERWDFYKALKGLQESREQEYHCISKESVLTLETQLKKSPSSSLNRIQNLSDVGDELVEIKNANGKVFYVEDNKSENSTATLGSNPESPSREDEQSVIAMLDDVLNAQDTQQGQQDLDLQQQMIFERHFSLDSEMYPSVIETVIVATVHSSSDDDEVQSGITLKLSRYDECKLVAHQMLEEMFNSEAFYEQLEKVKAKEVPLVKGDKLEGEAESVNDDEASKPVFLFQRLGSQTSIISQASTIEDPLHSTKFKDRLSHIIMNANAHQVKVVAKRSEDVDGEVELEPVPDEEPKTRPLLKQSKSETDVRRLMLKAISELKIDRNETGNADEVPAEVSTTTGNPSKDPVPGAGPIAAPVAAAGGSNIPRPPKFDPVLYKTINSISLRKQRPSLNRQHIVDAKNPALLRPESQTETRPDPGEQPEPEPLPFKAKLEAILQRGPSHRTQQHPDLVRRQRPQSTYIEMEEVES

SEQ ID NO: 25270 - DNA, 6013 bp, DROSOPHILA
aattaattatcttcacctgaatggaagctatgcttggggcatgtctccaggtttatggttcttgtcggggagttcttagataccagtgcagttatgtatcttagattgccttaccgaggcttataattttcccctatttacagatgcatagatacatatgtgtggattgcaaatatttcaagattatagaagtacaaaagtagtaatacttatattataaacatatatgtatttcatttagcataatgtttttgtagatgtttatgatgacttaacttaacttcaaatcacccagcagctttagtactttctctaaagcatgatttatgcaagcccaactatttccatgttacccaagtgcgataatgtttatcgcgtttcgtcattggcctctaagctgctgtagagttaggagcgaaaacacaaatctgtcaaattccacaagtgtgatgcaatttggggcttgtacgaacagtaaaacgctgaaatataacacagcggcgcaacttaacgaaaacaaaacatttccaggggtgtagtgggtcagtgttttcttttttacgtgcacttcgcttgtttgtttactgcgattttggcttgtacaagatcgtaagcagatagtgcctccagctgaccccctctgcagtttctctttcacctgtttgcaagtacacaagcacccaacaccccctttcccctgtccattgaccctgcgacactgctggattgatacactgaaaacaatcgacaaacttgggggtgtttctatcatggaaaatgttgttaacatttaaaaatggttagaactacattctagagactttctcgccataggattattataatgattttcaatatctttataaaaacagtagcgatttttgcttagtgtagataggtatgcgacaccgctgcccgcgtcgcagtcggcgtctgagcccagcctaaaacagcggaaaagttgttgctgtcacttgagtcgagggagcggtttggatagagtctgcgagggttagagcgagagggagcgagaaagtgtgtttgcaaatctcagttttacgtgtgtgtgtgtgtcttttgcaggtgtgttcactggctacacagaaaaaataagagagatttatccgagtgttgaaaagaatgttactgtgacatagaaccatagttggcctaatttttgaagataagagctattactctacaattactctctattacatctacaatgcaatacaatttgctgctgttaatacaaataagatgaatataatcggaagtaaactatccaaagatattctctgtgtagtcaaagtggagacaccgagcttagaggagaacctggggaagtggaagtagcgcgatttttgaattccaatgctgatccaagccaacaacgaaatgttaaagtttgagaataattgcggccatgtgcggatcgcttggagtgtgtatgccaacgctagtggaggcttggaatcggaatgcggtctgagtcagagacgattggctgcgcaatatccaagtggcttggcgggattaggggccttcggatgcagagggacttagtctcagctgcacaaaataaacacagcataatgatctaacacatactttaggaccaattttcgtattcgacactcataagatttcagctcgaagactcggtcagcggaggctttaaggtcttgagagaccaaattgggaaccagacttccaaggggcttaaccacacccctgccaataggaaatttagttttgggaatactattctaatcaagttaaacatgtttttcgacagcagtcacgatataatgttttagtcattggaataagcgattaaatgggattattaaaagcatacacataattctaaatattattttcaaatgacgatagttcaactcgacctaagaagcaaaagtataagttggtaacgatcaaaacttttaatcaatgtttaagctactaagttcatcatttaaacggtaacttatattttaaacgaatcaaagaccgatatacaaaattgttgacgatgatgatgatgtgaaaaaattttatttttagacggagcttcagacgtcgatcgaagcctgtaccgggattgggagacaccatggtgaaccaccactcgaacggaggcggcagtgctggaaacagtagcggaagcctaagaggaggcggtgcccatggaggcggcggcggaggaggagactattccggagacgatcgcagcggaggcggcgaggagcgggagcgtctggagagtgacttgcacgacaagcccacctacctgctggaacacctggccaccttcacggtcaacaaggagtccggcattgtgtatccggcggacggaatgcgtcgcctccttcagctggagaagaccacgggtatttggtcgcagaagatgcagctctgcctggactatcagtgggtgctaattatggactatgaaacaggggtacgtttcacaaactgggaaagatccttatggaactcatcttcatccttgccttacagaacataatcgaaagattccccgcctccttggttcaggagcccaccgcattcacctcgaatgacgccatggagctatacaacaacattctggtctttatcgtatccggaggcggtggttctcgctccgagatgcacatattccaggtgagaattagtgaggcttctgtctcatgacagtttcattcaaatgatttatccctgcagtcacaaagtgtgtccgccgttcacctggttgaggatctgaagcagctgagaagcggcaagatgataacgcagcagcgcggtgccacacccactcaatcaggaggcggaggagcctccagcatggccatgatgatgagcaaaacctcctcgtcctcgtcgcatagtagagtggagctgcaccagcacagggagcagcgggcagagcgcgagagggagcgtgatcgagaccgtgagcgcgaaagccaccatcacatgcaccaaaggagcagcatggaacagtatggaatccgtgccggagtaggagtttctggcgatgacgttgcccacattagtggcgagacggattcggaacacggtgggattgggggcggtggcgcaacggagcgcgatgagactagctccacgtccagcgagaagtacgagcgggatgtggctgtgctgaatcactgtttcgatgacatcgagaagttcatagctcgtcttcagcacgccgccgccgcttcccgggagctcgagcgccgtcgtcgcaatcggaagtcgaagaaaagggatccgggggagggattgctcactttgaggacacggcctccccacgagaaggagttcgtggacatctttgccaagtttaagctgtcatttaacctgctggcaaagttgaaggcgcacatccacgatcccaacgctcccgaactggtgcatttcctcttcacgccgctggctctgattgtggaggcctccagcgacacgtactacgagtcacagctaccggcccgtgtggttaatcccctgctgaccagagaggccatcaacctgctcatcaactgtgtaaccagcaaggaaacggagctgtggcgctcgttgggcgatgcctgggtgatcccgcgagatcagtggaaggatgacgttggatcctaccatccggtcttcctcgatggctggtcaccggactatttgatcaacgatgaactggagccaccaccaaattccccgcccgctcatgtgagcaagcgcagactcgaggtccaggctggatccggactaaatggtcgtgggggaggcggatacgatgactacgactcggggaacgggatgaacatggccatgggtatcgagaagtacaccatccaccacggcaacgacggtttaagggagcgggaaagggagcgcgacagagagcgggcgggcgcaatcagtgcgtctgactttaacgcccgcagcgagctgtcgttcgactcgatcgaaggcaggggcggcggagcagcgggacatggccatggtcatggccacggaccaggagctggaccaacccttagcgccatcacagctggtctgcagaatctgcatacgagggaatctcgcagtggaaacgggtacggagcaggagctggtccggggccttcgtcggagttgggcggtggaggcagaggcctgccgaatgtcagcgacgaccagatgctcgagtcctggctggaggatctgcaggcgacgggcgctaagattgtgctggtcacctatccgcgaaccgccaacaacgacaaggagcttagcgtgatgcgaggcgaatacttggaggtaaggccagcacccacgttaccatccttcgttctgtcctataaccatctcttcgaaactttagatccttgatgatacccgaaagtggtggaaggcgcgcaacatgcggggtcaggtggcccacgtgccgcacacgattgtaacccccttcaatttcggggatggagatggagcccagttctacgggcaacagcagcagccaccgacgggtcccacaggtccgggcaacaaatcgcgatcaggggtgagtaaggctggtcactcaattcatgatgggacttgctaaccgctctacattacccaggataatcccggcatggaacagcgatcgccggatcccaccgacatgatgcgcagcaagcatctgggcaagaagggcgagttccgctacttctaggatcgagatgcgatcaccatatacatatacacatattccgtagtgaggatctagcgttatagagagacagacatcagcagttccgtctaggatgctagtcctggtcactagcgatcggattggctccaataccttgcactcgctcgcaggagtgtgcaaaccagaactaaccttaagactaacctaagtggagctccagacgggagctgttgagcagcacgtggctcctgctgaggcggatgcttaagctgatgctcatccaggcgaaaaggggaggcgacggcaataatttgttttaataaaattatatccaaaggaacctgcctattggttgatgattattgaggagattgtagtttggagagctgctttgctttatttggatgctcacaagaagaagttaactggtgctgtacggtgatcaaagccaacgattgaacaaagagcatactacgagaactcgaatcgattaaatgatggacaacttctccacgcgggccagaagcggagaatcggagtggtactccaggctccgcacggcgaagtcgcccacttcgttggtgaagcacttcagagtggatatggagaaggggcgtccgggaaagttgtagtaggtgaagtactgcccgttgacggcgatcaggaaagcccgatccccgagcccaaaagcgatcttgaagagctttccgcgcacaaatgggaattcgccctcggtctcctcgtcgctcaaggcaaaactagaataagtgagtaaaggtgaattctcttggaggaactttgcatattggagtctcggactcctttatacctgttgtcttcacgctggtagctgcgtgacacggttgtccgatcgaagttcacgtggaaccggagcaccgtacgcccggtgtcgttgcactggaagcagatggagaactccgtggtcggcgggcccttggcgatgcactccatggccaccactgtgccggtttcataccgcctgggcacgtcgctctggaaggccaccttgtccggacacatgagcgttctggggaagacgagcggaaagagcatgcggtggtggaactgggtgatcttctcgaagtcgccgtaggtgcgcacgtagttgatttgcttggggaacttgacgaactcgaaggacccgtacagctggtcgttcacgtagatctcgaagcatcgctgcagcaccgccacccggaaggtgaagctctggccaggctgcagcgggttctttgggccgtcgcacttccagttcttcgagatctcctcctgctgccatcccccgcccggctggaacatgctgcggatgatttggcc

SEQ ID NO: 25271 - DNA, 2922 bp, DROSOPHILA
agtctgcgagggttagagcgagagggagcgagaaatcacgatataatgttttagtcattggaataagcgattaaatgggattattaaaagcatacacataattctaaatattattttcaaatgacgatagttcaactcgacctaagaagcaaaagtataagttggtaacgatcaaaacttttaatcaatgtttaagctactaagttcatcatttaaacgacggagcttcagacgtcgatcgaagcctgtaccgggattgggagacaccatggtgaaccaccactcgaacggaggcggcagtgctggaaacagtagcggaagcctaagaggaggcggtgcccatggaggcggcggcggaggaggagactattccggagacgatcgcagcggaggcggcgaggagcgggagcgtctggagagtgacttgcacgacaagcccacctacctgctggaacacctggccaccttcacggtcaacaaggagtccggcattgtgtatccggcggacggaatgcgtcgcctccttcagctggagaagaccacgggtatttggtcgcagaagatgcagctctgcctggactatcagtgggtgctaattatggactatgaaacagggaacataatcgaaagattccccgcctccttggttcaggagcccaccgcattcacctcgaatgacgccatggagctatacaacaacattctggtctttatcgtatccggaggcggtggttctcgctccgagatgcacatattccagtcacaaagtgtgtccgccgttcacctggttgaggatctgaagcagctgagaagcggcaagatgataacgcagcagcgcggtgccacacccactcaatcaggaggcggaggagcctccagcatggccatgatgatgagcaaaacctcctcgtcctcgtcgcatagtagagtggagctgcaccagcacagggagcagcgggcagagcgcgagagggagcgtgatcgagaccgtgagcgcgaaagccaccatcacatgcaccaaaggagcagcatggaacagtatggaatccgtgccggagtaggagtttctggcgatgacgttgcccacattagtggcgagacggattcggaacacggtgggattgggggcggtggcgcaacggagcgcgatgagactagctccacgtccagcgagaagtacgagcgggatgtggctgtgctgaatcactgtttcgatgacatcgagaagttcatagctcgtcttcagcacgccgccgccgcttcccgggagctcgagcgccgtcgtcgcaatcggaagtcgaagaaaagggatccgggggagggattgctcactttgaggacacggcctccccacgagaaggagttcgtggacatctttgccaagtttaagctgtcatttaacctgctggcaaagttgaaggcgcacatccacgatcccaacgctcccgaactggtgcatttcctcttcacgccgctggctctgattgtggaggcctccagcgacacgtactacgagtcacagctaccggcccgtgtggttaatcccctgctgaccagagaggccatcaacctgctcatcaactgtgtaaccagcaaggaaacggagctgtggcgctcgttgggcgatgcctgggtgatcccgcgagatcagtggaaggatgacgttggatcctaccatccggtcttcctcgatggctggtcaccggactatttgatcaacgatgaactggagccaccaccaaattccccgcccgctcatgtgagcaagcgcagactcgaggtccaggctggatccggactaaatggtcgtgggggaggcggatacgatgactacgactcggggaacgggatgaacatggccatgggtatcgagaagtacaccatccaccacggcaacgacggtttaagggagcgggaaagggagcgcgacagagagcgggcgggcgcaatcagtgcgtctgactttaacgcccgcagcgagctgtcgttcgactcgatcgaaggcaggggcggcggagcagcgggacatggccatggtcatggccacggaccaggagctggaccaacccttagcgccatcacagctggtctgcagaatctgcatacgagggaatctcgcagtggaaacgggtacggagcaggagctggtccggggccttcgtcggagttgggcggtggaggcagaggcctgccgaatgtcagcgacgaccagatgctcgagtcctggctggaggatctgcaggcgacgggcgctaagattgtgctggtcacctatccgcgaaccgccaacaacgacaaggagcttagcgtgatgcgaggcgaatacttggagatccttgatgatacccgaaagtggtggaaggcgcgcaacatgcggggtcaggtggcccacgtgccgcacacgattgtaacccccttcaatttcggggatggagatggagcccagttctacgggcaacagcagcagccaccgacgggtcccacaggtccgggcaacaaatcgcgatcaggggataatcccggcatggaacagcgatcgccggatcccaccgacatgatgcgcagcaagcatctgggcaagaagggcgagttccgctacttctaggatcgagatgcgatcaccatatacatatacacatattccgtagtgaggatctagcgttatagagagacagacatcagcagttccgtctaggatgctagtcctggtcactagcgatcggattggctccaataccttgcactcgctcgcaggagtgtgcaaaccagaactaaccttaagactaacctaagtggagctccagacgggagctgttgagcagcacgtggctcctgctgaggcggatgcttaagctgatgctcatccaggcgaaaaggggaggcgacggcaataatttgttttaataaaattatatccaaagg

SEQ ID NO: 25272 - protein, 778 aa, DROSOPHILA; identical to SEQ ID NO: 8352

SEQ ID NO: 25273 - DNA, 9071 bp, DROSOPHILA
tgattcaagcagagaatttccacttgtaagtaagggcttttccaccggaggtttactttctacaccatttgccgcttttgagccattacttttgagtgaagacgcaattgcgtctggagattccccttgatcctgtggcacctggttgatcttgttgcgctggcgattccgaatccttggcttctttttgtggacccccgactgaatcatgttagctgcgtttctcttatttcgagtgcaaaattagccagagcacgttgctcaattgaacgaacaatgaagaatgcgcattgttcttggttgggagtcttgcggtccgcctcgattcaattggccgctagccatcgcttctcatcgcggccgcaagcccaaatgtatgccctggctatttttgttgggcacgggcctgacgatgtctgacaacgccagccggtatctgaatccgcatcccgcatacgaatctcaattcgcatgggctagcgtccattattattctcgagtaccagcgtttgattaattctctgcctatctcaactaattgcgtcaacaagcagaaaattacactgaagtccactctgtggtgctctttaaaaatatagttcttggcagaaaagggattatacataatcccttaatatatttgtaagaatttagaaaaaacagtcagttttttaataaggtatcagttgccaaaaagtattgatggaactgtcgttaaaaatagaagcaacaattgttttcaaagtattccaatagtttatgtgtgaacaaaatcataacaattggtatggatatcttgaaaagcgatttttccataaattcggaaacaaataagcttatttagcatgtttcaattccaatttcgaaatttcgcgcccaatttgaaaagagagaaatagcacacatttactttccacgcactatttccaataccgttcttgctgcccgctaagttcaaaataaaacacaaacatttgaaattgttccattagttattttttttttcgcatccaaaaaatatatatgaattaagattttcatataaattaaaaatgtacggaaagtaacatcgtagtttacttaagcttaggagaaattataaagggtttcttattattaatgcctctttcataaaaggtcaaaattttcaattcgcaaataccgtattatacccacccagtaatacttaagttatcccaaacttttggggttttgcgataacaaaagtacgtctgataatcggatgttaaacactttaggatataagataccgttcactagtttacttatggccattggtaggatcaacgcctccgcaggcaccttcgctgtcggaagtgcttatgctaccattgcaactttttgatattccatttgtgggtgtaatgggaattttcaaggagctcagcgattttgttgctccggccaagcccacaacactgtcctcctcatccgaggatgcgtcggatagctggcggggcgacaggcggcaaccgcgctgaatatattggttcaatcgatccactgaggccaggatcaggccgaggaaaggaggcgacggcttcagaggccgcgacaagtactctggatgatattgggtggcaacaaagtagggatgaccgctgagctcaatgatttccatcctagttttgtcgacgtcggtgcccacaaatcgcatgccttgctcttccagcagatgcacgtatttgggattaacctcgtaacgatgccgatgacgctcctgcacgcttttcggattgccatacaactggcgaatgacactaggaccatcagagaaaacagttattcgcttgcccaagcgcatagtgccgcccaattgacccgtgtgatgctctggcatatcgatgaccaaggcattagctgtgttcggatcgatttctgtggtgtttgcatccttgagaccaagtttatttcgtgcgaattcaatgaccgccgcttgcagacccaagcagatgccaagcaatggcttttgattctctcgcgcccattggcatgcacgaatcttgccctccattccacgggaaccgaatccaccggggactaggatgccatggctatcgcatagcttctgccactccttgtggtacttgctcggctcagaatgcaaagtttcctcctccagcaggcacgactcgataaagaccagttccagtttgcgattcactgccagggcggcatgttgcagggctttaactacggaggcgtacgaatccgtgaacttggtgtactttcccacgacggcgatgcaaacttcacggcgaacggtctccgttcgacgcgccaaatctcgccattgctgcaagcatctaaaaataacaaacaatttgtgattaacttactttcagggtttaaatatagaccttaacttacttggtcctcttgctcatgtcgatattaagctgtaggcgctcatttaggtattcaataacaccattctgctccatcagcagcggaacatgataaatggagttcaaatcgtggatgcatatcacctgatccggccccacatgacaaaagttgctgatcttctccttgacctccagtccaatgggtttctccgatcggcagacaatcaaatcgggactcaggccacatcctctcagttctctgaccgaactttgtgtgggcttggtcttgggttctccggtagcctttggcaacggaaccagcgacacatgggccaaacagaagttctctctctttacgcggaactgaaactgacggaaggcctctacgaaaggcatgccttcgatgtcaccaatcgttcctcccaattccacgatgcacacctgtggctttgaagatccctgaacgggtgtctgggccacgcgctccacccattcctgaatggcatcagtgatgtgtgggacaactgcaagggacagaatgttaaatcaaccaatcttcccaatctcaaaggttttctagttataaaggataataatgggatatgatctggtttgctcactcaccttgaaccgttttgcccaagtactcgccagtgcgctccttctcaatgaccaacttgtaaatttttccggtggttatgttgttgtcccgatgcagggtaacatccaaaaaccgttcatagtttcccagatccagatccacctcggcgccatcgtccaaaacgtaaacctcgcctgcgaaaaaaattataacaattaattcgtggtttcagcataatgtggaccacccttcttagtaaaaatgaaaagaactgaaaatcattttaatgttacatttttatttccagggtatttgtgcttaggcgtaaatggcgcactcccagctttccttggagtggcgctcaactagaaatcaatcaaatagcatggcatggacacgaactaagtataatgcttacgatctaggctagtgggcgtatgtacagtcttgagcttaatctaggcattctgagctgttccactacttggactcctcaagatcttctttgtagagttccttgaagatgagcttttgtatcttggtgcgtatgcgcagcttctgggctgcggtcagctgcttcatgtacggatgtaggctgagcaagtagtggtagtcatcgtcctctggtacgagcggagtgtccattgtcgaggaaccattaaaattgctatcctcggagagacgcgggcgcttcagcttaagggcgggtatcagtccattggcgtaggagtgttgagtgaagctcaggtgatctccgtttcctcctacagcagaggtgggtccgaaatcctcatttcggtctttggccgcaagatgtgctgctgccagagtggccagcggatggtgtgctttgttgtatagaggcggtggcgacacagatctcttgccgcccattggcgctccattcgaggatacagatgacgcggatgtggtcgttgccggcgccagaacagctgctgagcccggttgttgtacttgtgcggatgtggtggtcaccattggcggtggagaacagtgtgcggctggtggttccactagcacttgtagtgagggtgccactggagatgtcatttgctgtggcggaggtggctttctgctcaagtcctccgcctccttttccagctccatcaactgagcgcggagtaatcctgccttaattaaagcgtgctgatgtgcctcttcttgggctcgcaaagctccggtggccagtggtgtggtgctaacttgattcatttgatgcgcagccggtggcgtgggcatcgtttcctccatggtggcttcgctagcctctccgtccgcctccatttcctcctcgtcgtaatcctcgtcgctgtcctgcagacgacgtattagaccgtttgttaaatccggctccaccactgtcttttcacagtcctcgctttgctggctgaagtaaaatgactgatcctgttcgttctttggcaaacgatgacgcatgtgatcagctaaaaaaaagtaattcccatttataaaagtaagtaatcacatgactcgaactcacttaaaaacaacaatgcatagtagtgcagccacttggactcaaaggtggccggatccaccataaaatcaccgttatccgcccgcggtatccttttgtactccacacggaaattgtctcgaagtcccttccatttggccttgagaacgatctctgggagagagagtgggataacgatagaaatcgctttgttcgcgcttggagtcattgtcagtgttgccaacttggctttttgttcgccaaatctgattcgaataggaaactttttaatttagctaccttttactttttacgaactttttaattaaatttaaaatatatttctttatgtgcttttaaagtttttaaaagacaaacaaacacagacactcacaatttggtaatctcatgtaaagctaatactgtttacataaaaatttaatttaattcatatttatatttatttacactattaaaattaactttttaacttttttttttttggttggcaacactgttctgggaactcttttcatccacatgctccacttacttggcagtttgtgcgctccgctcagctcgtcccacatctgctcgaggaaggccttgttgcagtggaaattgcggttccagatggccgggcgctcctcgatgtcgtgaataaactgctccacattgagcacaatggtggacttttttggcgccatcttagcgctctcaaagtgattgagtgagttttatatattttatttcgcacttttgtctctattttgcgggcacactttatttaataagtaactcctgctgtctcacttgtccgctcagctaacggtgaattgcaattgcatgctccaacggcacacacacgcactcacgcacaccactatacaaactcactgagagaaatgagaggaacgaagagcattagtcggcttcttgaccactcactaaagccatcccgctcccacccacccacgagttagttgcgatccccgaccatcaatgagcagccagtactctccaaactgttaacacaataacttcattaagattccttccttgggcttaggcccaaaatcgagctgggcgacaggaaatgccgcactgctcgctctgctccccatcgtccatcttctccctccctcgcattctgctccccagccagaagcaaatgaagaagaggacgcggcaggaaagaagcagcgaaatcaaattataaacacgccagggcggaggagagggcacgggcagacaggaacagacggcgatgagcgacgaccgagagaccaaccagccaacggttactccacgagcctgcctgccagccactctgccccgctgcaccccgctcccactaccgataacgctgccggttccgctgactctgtctctccctgctcaccgcccgccctcaatgcactggatacacttgggaaaacaggtcaatgatttaggtatttcatttcagaaatcgtcattttcaaaattactttataacttaagaataacataataatcaataatttatatgtagcacttggcagcaaaagaaaatgaaaactgtcaaatctaatcaatttaatattttttttggaaatattactgataagaaagtttacttgttactccttcccacaactaattaccaatacagtattcccaccctcatatttctccgagtgcatcgtctggccccagtgcatcggtgtggatgtggacatgtggtgattgtgtgtgtgagtcaggcgcaggcggcggcattcagtcagtcatgcaaaaatgtttgccgtgcacagagtgcgaaatactaaaaacggcagcgtgcggagtgtggagactttggattgtgtgaggggaagggggcagggggcgcaaggggagcggatgcgaaggcacaggccgcaaagcacacacattcacagacatacatatacatatgtatgtatggatattccagcgagcaaaagcaatttctggcggcagctacagctttgctgcaggcacagcacggcagagcagagcagagcagacaagagaccgaccagaagaccaagccaagccaagccagacaaataatgcgtcacgttgcgcagtcgttaaattttcgttttcgtcgttgccgttgctgtttttatgggcaaaaactgccggcgacagtgtgtttcactgctgttgttgttgttaggcgagggcagggtgaaaaatgtagggaagggggctatcggggttggaaaagcgggctgaaaagctggcccagctgctgtcgaggtgattgggagctgggtaactaacagctcctctgctggtagccaagaatttcacaagtttcgacccgccgtggaaagttatgaggccttacacatacacatacacgctcgatgcttttttttttttgaactggaagctgtttggctaggaaattggcagctaagtggactaacactgtggggatttggaaatcatttccttaattttgatttcccgctgcttatcagcaagagtcaaggaaacaagagataagagagttgctttggctgaataactatactatttataggtcagatcttgcataaaggcgatgtattgatcgaaatgaaagaaataatgattactttttgcttaacccatgaaaagccgaagagtgtggagagttcagattacattaaatgtgggtaagttacattaacatgttaaattgatagcttactcgaaactacttatggcttatcataaatataaaaaactgtaaaacaatttgaaatacgcttagaattgaagaacatatggatgaagcagaattcaagaatttaaatttaatttaaacctggacttttattttaaaccaattgcaaaacgtggatgtttttcatatataagttaacttaggtcatttgcatatgcgtttaaatattaactctttgttttcttcactcccttttaggctttaaagtttcaactgtattcattgtttttttccctttcctgaagatttacattcaagttatttactccttctcggtttataaagctctaatatcttttctcttagcttcaaattaccaggccacctgatctgtaaatcatacacatatcggttccttatcatcaaactcccactctcttttaggaaaaattattctctttctttttcctcaccaaactttaatatccatcactccctccccctctcgctaaaaactgtcattgaaattggcccaggaatgaagagcaaagaaagatgggctcaaaggggggtgggccataaaccatatagtttcctctataaaatcaataaaacccacgcacacacatgtgcgtgtctcattcgctaacacacatatgcaaaaattagcgcgccaggagtcgcaactagcgggacatgtgagtggtttccagagggtggcgaatcagtggatgtgtgtgtgtgtgtatgtttctgttaccgccaagtttataataatcgaaaagtttttttttgcgctcggtcagccgcgccggcccgtagattccgttatgtcccgagagcgttttccacgagcgcgaatgaaaagtcgagaagccgaaatgcggaattgcgaattcccgaaccaaaatgcgaaccactgctgattgcagtcagcttacaactgaaattgaaaattcagcagagcaaagtgcgaagcgccgctgcttctgctgctgctgctggctgtcgcagcgttgttgctgttgcttttgcctttgctgccgttgacgcgccgccaccgctgccgcacacagaccgctctgcccctgccccgacccctccccctttctcacactctctcgctccccacctccctctgacccatcggctatttgccactgcgacaggctgcagtcaagccatccgccatcaggccgagagccatgagccatgagccagccagtcagccagcaggccgtgttcaggcccaggcccagtcgcagtcgtagcagtcccatttccattcccactcccgctctccctaccgttcccactccaaattcgaatccccggccaggtccacaagccccccaaaagccaagcgagccagccagagccaccagccagccagccaacaaaacgtgccaactagcggcggcagctgaaacgacgccagccaaacagccaacagccaccagcagcagcaggcaggcaaaataatatgaaaaaaaaaaaacaaaaaagtcctaaaggccttctaaagagaacgaaaatgatgatactcttgccttgaatataagaatgcatatcagtagcgttagggtctttagctatgtatgtatgtatatgagaaaatcaatctattaatctgaagcaatgaaaagtatcatgtgaagaatttacgcagttaaacgatgttaggtggaagatgaaatcctagtattcttctcgcaaccgactgtccaaccaaccactcgtcgaactggcaataccctccgtagaagagagggcatgagaagcgcacactgaaacgcaaaaaacgccagcgaggaggcgcaggcctccaatgggcggagtgtaggtgggaggggcagtggggcagagcagtcagcaggctggcagttaagttcagtttcaggcgagagccaaagccacgcc

SEQ ID NO: 25274 - DNA, 2372 bp, DROSOPHILA
gtggttcgcattttggttcgggaattcgcaattccgcatttcggcttctcgacttttcattcgcgctcgtggaaaacgctctcgggacataacggaatctacgggccggcgcggctgaccgagcgcaaaaaaaaacttttcgattattataaacttggcgagacaaaagtgcgaaataaaatatataaaactcactcaatcactttgagagcgctaagatggcgccaaaaaagtccaccattgtgctcaatgtggagcagtttattcacgacatcgaggagcgcccggccatctggaaccgcaatttccactgcaacaaggccttcctcgagcagatgtgggacgagctgagcggagcgcacaaactgccaagcgaggtttacgttttggacgatggcgccgaggtggatctggatctgggaaactatgaacggtttttggatgttaccctgcatcgggacaacaacataaccaccggaaaaatttacaagttggtcattgagaaggagcgcactggcgagtacttgggcaaaacggttcaagttgtcccacacatcactgatgccattcaggaatgggtggagcgcgtggcccagacacccgttcagggatcttcaaagccacaggtgtgcatcgtggaattgggaggaacgattggtgacatcgaaggcatgcctttcgtagaggccttccgtcagtttcagttccgcgtaaagagagagaacttctgtttggcccatgtgtcgctggttccgttgccaaaggctaccggagaacccaagaccaagcccacacaaagttcggtcagagaactgagaggatgtggcctgagtcccgatttgattgtctgccgatcggagaaacccattggactggaggtcaaggagaagatcagcaacttttgtcatgtggggccggatcaggtgatatgcatccacgatttgaactccatttatcatgttccgctgctgatggagcagaatggtgttattgaatacctaaatgagcgcctacagcttaatatcgacatgagcaagaggaccaaatgcttgcagcaatggcgagatttggcgcgtcgaacggagaccgttcgccgtgaagtttgcatcgccgtcgtgggaaagtacaccaagttcacggattcgtacgcctccgtagttaaagccctgcaacatgccgccctggcagtgaatcgcaaactggaactggtctttatcgagtcgtgcctgctggaggaggaaactttgcattctgagccgagcaagtaccacaaggagtggcagaagctatgcgatagccatggcatcctagtccccggtggattcggttcccgtggaatggagggcaagattcgtgcatgccaatgggcgcgagagaatcaaaagccattgcttggcatctgcttgggtctgcaagcggcggtcattgaattcgcacgaaataaacttggtctcaaggatgcaaacaccacagaaatcgatccgaacacagctaatgccttggtcatcgatatgccagagcatcacacgggtcaattgggcggcactatgcgcttgggcaagcgaataactgttttctctgatggtcctagtgtcattcgccagttgtatggcaatccgaaaagcgtgcaggagcgtcatcggcatcgttacgaggttaatcccaaatacgtgcatctgctggaagagcaaggcatgcgatttgtgggcaccgacgtcgacaaaactaggatggaaatcattgagctcagcggtcatccctactttgttgccacccaatatcatccagagtacttgtcgcggcctctgaagccgtcgcctcctttcctcggcctgatcctggcctcagtggatcgattgaaccaatatattcagcgcggttgccgcctgtcgccccgccagctatccgacgcatcctcggatgaggaggacagtgttgtgggcttggccggagcaacaaaatcgctgagctccttgaaaattcccattacacccacaaatggaatatcaaaaagttgcaatggtagcataagcacttccgacagcgaaggtgcctgcggaggcgttgatcctaccaatggccataagtaaactagtgaacggtatcttatatcctaaagtgtttaacatccgattatcagacgtacttttgttatcgcaaaaccccaaaagtttgggataacttaagtattactgggtgggtataatacggtatttgcgaattgaaaattttgaccttttatgaaagaggcattaataataagaaaccctttataatttctcctaagcttaagtaaactacgatgttactttccgtacatttttaatttatatgaaaatcttaattcatatatattttttggatgcgaaaaa

SEQ ID NO: 25275 - protein, 623 aa, DROSOPHILA
MAPKKSTIVLNVEQFIHDIEERPAIWNRNFHCNKAFLEQMWDELSGAHKLPSEVYVLDDGAEVDLDLGNYERFLDVTLHRDNNITTGKIYKLVIEKERTGEYLGKTVQVVPHITDAIQEWVERVAQTPVQGSSKPQVCIVELGGTIGDIEGMPFVEAFRQFQFRVKRENFCLAHVSLVPLPKATGEPKTKPTQSSVRELRGCGLSPDLIVCRSEKPIGLEVKEKISNFCHVGPDQVICIHDLNSIYHVPLLMEQNGVIEYLNERLQLNIDMSKRTKCLQQWRDLARRTETVRREVCIAVVGKYTKFTDSYASVVKALQHAALAVNRKLELVFIESCLLEEETLHSEPSKYHKEWQKLCDSHGILVPGGFGSRGMEGKIRACQWARENQKPLLGICLGLQAAVIEFARNKLGLKDANTTEIDPNTANALVIDMPEHHTGQLGGTMRLGKRITVFSDGPSVIRQLYGNPKSVQERHRHRYEVNPKYVHLLEEQGMRFVGTDVDKTRMEIIELSGHPYFVATQYHPEYLSRPLKPSPPFLGLILASVDRLNQYIQRGCRLSPRQLSDASSDEEDSVVGLAGATKSLSSLKIPITPTNGISKSCNGSISTSDSEGACGGVDPTNGHK

SEQ ID NO: 25276 - DNA, 16818 bp, DROSOPHILA
tgattcaagcagagaatttccacttgtaagtaagggcttttccaccggaggtttactttctacaccatttgccgcttttgagccattacttttgagtgaagacgcaattgcgtctggagattccccttgatcctgtggcacctggttgatcttgttgcgctggcgattccgaatccttggcttctttttgtggacccccgactgaatcatgttagctgcgtttctcttatttcgagtgcaaaattagccagagcacgttgctcaattgaacgaacaatgaagaatgcgcattgttcttggttgggagtcttgcggtccgcctcgattcaattggccgctagccatcgcttctcatcgcggccgcaagcccaaatgtatgccctggctatttttgttgggcacgggcctgacgatgtctgacaacgccagccggtatctgaatccgcatcccgcatacgaatctcaattcgcatgggctagcgtccattattattctcgagtaccagcgtttgattaattctctgcctatctcaactaattgcgtcaacaagcagaaaattacactgaagtccactctgtggtgctctttaaaaatatagttcttggcagaaaagggattatacataatcccttaatatatttgtaagaatttagaaaaaacagtcagttttttaataaggtatcagttgccaaaaagtattgatggaactgtcgttaaaaatagaagcaacaattgttttcaaagtattccaatagtttatgtgtgaacaaaatcataacaattggtatggatatcttgaaaagcgatttttccataaattcggaaacaaataagcttatttagcatgtttcaattccaatttcgaaatttcgcgcccaatttgaaaagagagaaatagcacacatttactttccacgcactatttccaataccgttcttgctgcccgctaagttcaaaataaaacacaaacatttgaaattgttccattagttattttttttttcgcatccaaaaaatatatatgaattaagattttcatataaattaaaaatgtacggaaagtaacatcgtagtttacttaagcttaggagaaattataaagggtttcttattattaatgcctctttcataaaaggtcaaaattttcaattcgcaaataccgtattatacccacccagtaatacttaagttatcccaaacttttggggttttgcgataacaaaagtacgtctgataatcggatgttaaacactttaggatataagataccgttcactagtttacttatggccattggtaggatcaacgcctccgcaggcaccttcgctgtcggaagtgcttatgctaccattgcaactttttgatattccatttgtgggtgtaatgggaattttcaaggagctcagcgattttgttgctccggccaagcccacaacactgtcctcctcatccgaggatgcgtcggatagctggcggggcgacaggcggcaaccgcgctgaatatattggttcaatcgatccactgaggccaggatcaggccgaggaaaggaggcgacggcttcagaggccgcgacaagtactctggatgatattgggtggcaacaaagtagggatgaccgctgagctcaatgatttccatcctagttttgtcgacgtcggtgcccacaaatcgcatgccttgctcttccagcagatgcacgtatttgggattaacctcgtaacgatgccgatgacgctcctgcacgcttttcggattgccatacaactggcgaatgacactaggaccatcagagaaaacagttattcgcttgcccaagcgcatagtgccgcccaattgacccgtgtgatgctctggcatatcgatgaccaaggcattagctgtgttcggatcgatttctgtggtgtttgcatccttgagaccaagtttatttcgtgcgaattcaatgaccgccgcttgcagacccaagcagatgccaagcaatggcttttgattctctcgcgcccattggcatgcacgaatcttgccctccattccacgggaaccgaatccaccggggactaggatgccatggctatcgcatagcttctgccactccttgtggtacttgctcggctcagaatgcaaagtttcctcctccagcaggcacgactcgataaagaccagttccagtttgcgattcactgccagggcggcatgttgcagggctttaactacggaggcgtacgaatccgtgaacttggtgtactttcccacgacggcgatgcaaacttcacggcgaacggtctccgttcgacgcgccaaatctcgccattgctgcaagcatctaaaaataacaaacaatttgtgattaacttactttcagggtttaaatatagaccttaacttacttggtcctcttgctcatgtcgatattaagctgtaggcgctcatttaggtattcaataacaccattctgctccatcagcagcggaacatgataaatggagttcaaatcgtggatgcatatcacctgatccggccccacatgacaaaagttgctgatcttctccttgacctccagtccaatgggtttctccgatcggcagacaatcaaatcgggactcaggccacatcctctcagttctctgaccgaactttgtgtgggcttggtcttgggttctccggtagcctttggcaacggaaccagcgacacatgggccaaacagaagttctctctctttacgcggaactgaaactgacggaaggcctctacgaaaggcatgccttcgatgtcaccaatcgttcctcccaattccacgatgcacacctgtggctttgaagatccctgaacgggtgtctgggccacgcgctccacccattcctgaatggcatcagtgatgtgtgggacaactgcaagggacagaatgttaaatcaaccaatcttcccaatctcaaaggttttctagttataaaggataataatgggatatgatctggtttgctcactcaccttgaaccgttttgcccaagtactcgccagtgcgctccttctcaatgaccaacttgtaaatttttccggtggttatgttgttgtcccgatgcagggtaacatccaaaaaccgttcatagtttcccagatccagatccacctcggcgccatcgtccaaaacgtaaacctcgcctgcgaaaaaaattataacaattaattcgtggtttcagcataatgtggaccacccttcttagtaaaaatgaaaagaactgaaaatcattttaatgttacatttttatttccagggtatttgtgcttaggcgtaaatggcgcactcccagctttccttggagtggcgctcaactagaaatcaatcaaatagcatggcatggacacgaactaagtataatgcttacgatctaggctagtgggcgtatgtacagtcttgagcttaatctaggcattctgagctgttccactacttggactcctcaagatcttctttgtagagttccttgaagatgagcttttgtatcttggtgcgtatgcgcagcttctgggctgcggtcagctgcttcatgtacggatgtaggctgagcaagtagtggtagtcatcgtcctctggtacgagcggagtgtccattgtcgaggaaccattaaaattgctatcctcggagagacgcgggcgcttcagcttaagggcgggtatcagtccattggcgtaggagtgttgagtgaagctcaggtgatctccgtttcctcctacagcagaggtgggtccgaaatcctcatttcggtctttggccgcaagatgtgctgctgccagagtggccagcggatggtgtgctttgttgtatagaggcggtggcgacacagatctcttgccgcccattggcgctccattcgaggatacagatgacgcggatgtggtcgttgccggcgccagaacagctgctgagcccggttgttgtacttgtgcggatgtggtggtcaccattggcggtggagaacagtgtgcggctggtggttccactagcacttgtagtgagggtgccactggagatgtcatttgctgtggcggaggtggctttctgctcaagtcctccgcctccttttccagctccatcaactgagcgcggagtaatcctgccttaattaaagcgtgctgatgtgcctcttcttgggctcgcaaagctccggtggccagtggtgtggtgctaacttgattcatttgatgcgcagccggtggcgtgggcatcgtttcctccatggtggcttcgctagcctctccgtccgcctccatttcctcctcgtcgtaatcctcgtcgctgtcctgcagacgacgtattagaccgtttgttaaatccggctccaccactgtcttttcacagtcctcgctttgctggctgaagtaaaatgactgatcctgttcgttctttggcaaacgatgacgcatgtgatcagctaaaaaaaagtaattcccatttataaaagtaagtaatcacatgactcgaactcacttaaaaacaacaatgcatagtagtgcagccacttggactcaaaggtggccggatccaccataaaatcaccgttatccgcccgcggtatccttttgtactccacacggaaattgtctcgaagtcccttccatttggccttgagaacgatctctgggagagagagtgggataacgatagaaatcgctttgttcgcgcttggagtcattgtcagtgttgccaacttggctttttgttcgccaaatctgattcgaataggaaactttttaatttagctaccttttactttttacgaactttttaattaaatttaaaatatatttctttatgtgcttttaaagtttttaaaagacaaacaaacacagacactcacaatttggtaatctcatgtaaagctaatactgtttacataaaaatttaatttaattcatatttatatttatttacactattaaaattaactttttaacttttttttttttggttggcaacactgttctgggaactcttttcatccacatgctccacttacttggcagtttgtgcgctccgctcagctcgtcccacatctgctcgaggaaggccttgttgcagtggaaattgcggttccagatggccgggcgctcctcgatgtcgtgaataaactgctccacattgagcacaatggtggacttttttggcgccatcttagcgctctcaaagtgattgagtgagttttatatattttatttcgcacttttgtctctattttgcgggcacactttatttaataagtaactcctgctgtctcacttgtccgctcagctaacggtgaattgcaattgcatgctccaacggcacacacacgcactcacgcacaccactatacaaactcactgagagaaatgagaggaacgaagagcattagtcggcttcttgaccactcactaaagccatcccgctcccacccacccacgagttagttgcgatccccgaccatcaatgagcagccagtactctccaaactgttaacacaataacttcattaagattccttccttgggcttaggcccaaaatcgagctgggcgacaggaaatgccgcactgctcgctctgctccccatcgtccatcttctccctccctcgcattctgctccccagccagaagcaaatgaagaagaggacgcggcaggaaagaagcagcgaaatcaaattataaacacgccagggcggaggagagggcacgggcagacaggaacagacggcgatgagcgacgaccgagagaccaaccagccaacggttactccacgagcctgcctgccagccactctgccccgctgcaccccgctcccactaccgataacgctgccggttccgctgactctgtctctccctgctcaccgcccgccctcaatgcactggatacacttgggaaaacaggtcaatgatttaggtatttcatttcagaaatcgtcattttcaaaattactttataacttaagaataacataataatcaataatttatatgtagcacttggcagcaaaagaaaatgaaaactgtcaaatctaatcaatttaatattttttttggaaatattactgataagaaagtttacttgttactccttcccacaactaattaccaatacagtattcccaccctcatatttctccgagtgcatcgtctggccccagtgcatcggtgtggatgtggacatgtggtgattgtgtgtgtgagtcaggcgcaggcggcggcattcagtcagtcatgcaaaaatgtttgccgtgcacagagtgcgaaatactaaaaacggcagcgtgcggagtgtggagactttggattgtgtgaggggaagggggcagggggcgcaaggggagcggatgcgaaggcacaggccgcaaagcacacacattcacagacatacatatacatatgtatgtatggatattccagcgagcaaaagcaatttctggcggcagctacagctttgctgcaggcacagcacggcagagcagagcagagcagacaagagaccgaccagaagaccaagccaagccaagccagacaaataatgcgtcacgttgcgcagtcgttaaattttcgttttcgtcgttgccgttgctgtttttatgggcaaaaactgccggcgacagtgtgtttcactgctgttgttgttgttaggcgagggcagggtgaaaaatgtagggaagggggctatcggggttggaaaagcgggctgaaaagctggcccagctgctgtcgaggtgattgggagctgggtaactaacagctcctctgctggtagccaagaatttcacaagtttcgacccgccgtggaaagttatgaggccttacacatacacatacacgctcgatgcttttttttttttgaactggaagctgtttggctaggaaattggcagctaagtggactaacactgtggggatttggaaatcatttccttaattttgatttcccgctgcttatcagcaagagtcaaggaaacaagagataagagagttgctttggctgaataactatactatttataggtcagatcttgcataaaggcgatgtattgatcgaaatgaaagaaataatgattactttttgcttaacccatgaaaagccgaagagtgtggagagttcagattacattaaatgtgggtaagttacattaacatgttaaattgatagcttactcgaaactacttatggcttatcataaatataaaaaactgtaaaacaatttgaaatacgcttagaattgaagaacatatggatgaagcagaattcaagaatttaaatttaatttaaacctggacttttattttaaaccaattgcaaaacgtggatgtttttcatatataagttaacttaggtcatttgcatatgcgtttaaatattaactctttgttttcttcactcccttttaggctttaaagtttcaactgtattcattgtttttttccctttcctgaagatttacattcaagttatttactccttctcggtttataaagctctaatatcttttctcttagcttcaaattaccaggccacctgatctgtaaatcatacacatatcggttccttatcatcaaactcccactctcttttaggaaaaattattctctttctttttcctcaccaaactttaatatccatcactccctccccctctcgctaaaaactgtcattgaaattggcccaggaatgaagagcaaagaaagatgggctcaaaggggggtgggccataaaccatatagtttcctctataaaatcaataaaacccacgcacacacatgtgcgtgtctcattcgctaacacacatatgcaaaaattagcgcgccaggagtcgcaactagcgggacatgtgagtggtttccagagggtggcgaatcagtggatgtgtgtgtgtgtgtatgtttctgttaccgccaagtttataataatcgaaaagtttttttttgcgctcggtcagccgcgccggcccgtagattccgttatgtcccgagagcgttttccacgagcgcgaatgaaaagtcgagaagccgaaatgcggaattgcgaattcccgaaccaaaatgcgaaccactgctgattgcagtcagcttacaactgaaattgaaaattcagcagagcaaagtgcgaagcgccgctgcttctgctgctgctgctggctgtcgcagcgttgttgctgttgcttttgcctttgctgccgttgacgcgccgccaccgctgccgcacacagaccgctctgcccctgccccgacccctccccctttctcacactctctcgctccccacctccctctgacccatcggctatttgccactgcgacaggctgcagtcaagccatccgccatcaggccgagagccatgagccatgagccagccagtcagccagcaggccgtgttcaggcccaggcccagtcgcagtcgtagcagtcccatttccattcccactcccgctctccctaccgttcccactccaaattcgaatccccggccaggtccacaagccccccaaaagccaagcgagccagccagagccaccagccagccagccaacaaaacgtgccaactagcggcggcagctgaaacgacgccagccaaacagccaacagccaccagcagcagcaggcaggcaaaataatatgaaaaaaaaaaaacaaaaaagtcctaaaggccttctaaagagaacgaaaatgatgatactcttgccttgaatataagaatgcatatcagtagcgttagggtctttagctatgtatgtatgtatatgagaaaatcaatctattaatctgaagcaatgaaaagtatcatgtgaagaatttacgcagttaaacgatgttaggtggaagatgaaatcctagtattcttctcgcaaccgactgtccaaccaaccactcgtcgaactggcaataccctccgtagaagagagggcatgagaagcgcacactgaaacgcaaaaaacgccagcgaggaggcgcaggcctccaatgggcggagtgtaggtgggaggggcagtggggcagagcagtcagcaggctggcagttaagttcagtttcaggcgagagccaaagccacgccacaagcttttgcttttgcttttgccggcgcgacacacatacatacgtacacaatgtgtgaatgtgcatgtgtatgcggtgatgataggggagggggaggagagtgcgagccagagggaggtggagaagcgcgcacaaacgctaaaaacggccgccgccatttgcttcgctctgctcgcttctggctccccgtgttgttgcttttgcttctgctgcttttgggcatattattgccggctatccagcacacgcacaccaacacactcacccagagccgcacggccacacaaacacatgcgagagagagccagccgagctgtctgtgtgaggtggagccggtggcctgctctcctccagccgtgcttcctcactcttccttcgctcttcctgtcctgcctgcctggctgcctactgcatgctcagccaacaacaatcgacgcgcggaagcgagcgagctagcgagcgaaaagcataaaccatgaagagagcgagagcggggtgtaaggggagcgggtgctggtgagggcgcgggcggaagagaggaggctcgttaaaatcacgcgacaggaggcagcggcggcagcagcagaagaagaagaagaaccaacgggggcggtgcaacaaacgccgggcaaagcgaatcgatgtgaatttggctgtggctccacggctaccgctgttcctctttcctctgcgctctcctcttcacacttcctccccctcgctccaaccgctcatcacttctctgcttctccagctcacacttcttcttcttctggcgcctgtcgctcagacaccgtaagtgtgaggtgggtggcgttgggtggaacaacggaggtggctggcagcgaggtcgtaatacaacgctgtattgtaaggggcaagtgcgattggccagccgcaccgaactttccgatttaatttctcacaattaagcaacggaatcgcgcccccagttgcataatcaccgtaagcgattcttatatgaatattctttaagactgacatgactatatctatgtacatacatatgtatgtacatatatttagtttcttaatcaatttgaagaatttaaacattcttccgattcccgattcagattttcatttgctattatttgctactattgataagaaacgatacttttttccctacgttattcataaatcaaaatgttataattgtatgtatttcaagaataggtttgcagttgaagtactcaacaatgttttggaaagatgaatcaacggttttggtaagataattttgatactttgataaataaaatccacaggggtgttataactagggcaacattattaaaattttacataaagatttatttgaaactatataacaaatttattatctttttttaagaacaagttcatattaaccttcattattaataaacattttgattaatgagagggttttatgatagctggctgaagctaacttctggaatgctaaagattgctagtcttgtagaaacatacctttgccatttacatatcagtaatcagtaactaagttgctgggaccaacaaaaatgagaataatttaactaacggctactgtgttccgtaacttcccggcgatccataagctatgcttaaagttatggcaagtgggcaaactttcgaccagacgcgagattgaagcttatgaagccatagaacacacacgcacacacagacacgtgcgggcccatcagttaaccgtagtgggtgtgtgtgtgtgctcttgtgcctgtgtgcgtgtgccagcaaatgagggggcgtaacggtggcaggcgtggacgaggggcggcattgggaggcagccactcaactcagacgccagcaacgcgtagcaacggtcacatcctgctggcgagctgtcgttggagagttgggctggagagccgccacagcggaatggtattttccatttaatttttgcacactcgcacacacgcacaaaagcgtgcacacgcgggccatatgtacatgggtacagtggagcatcgataagtgcaattaagcaaatttcgaacgacatacttacaagtatggtccatattaataaaggaaatctaactgtcatctcttaatgacagtttaatggttatttttactgggtaattccagcataaaatatgtatttacatgtttactatttattattattactatttactattaaatcgtttagtgcgttactactgtatgtataaaagatgtatgtataaaagatttaaataaatcaagactagcatgcttcaattccaatttcgaaatttcgcgcctaatttgaaaagagagaaatacagagaggtgttagcacacatttactttccacgcactatttccattaccgttcttgctgcccgataagtttgaaataaaacacaagcatttgaaattgttccattagttatccaaaaaatatatatgaattaagattttcatataaattaaaaatgtactaaaagtaaaattgtactttacttaagcttaataggacaaattataaaagggttctcattcttaatgcctcttccataaaacgtcaaaatttctaattcccaaataccgtattatacccaggtatacttaagttatccccaacatttggggttttgcgataacaaaagcacgcctgataagcggagcgtcgataagtgcaattatgcaattttcaaattaaatacatacaaatatcgtctatattaataagggaaatctaactaagggatctaacaaacaattagatctcttaatgacagttatttcgttatttttagtgggaaattccagcatacagtatgtaaatatttacatgtttactatttatcgcttttgaagtccatataatcgtttagtgagttactactgtatgtggcagcacacgcacaaggcggagcaggagtgtgagcaaaaaaagggaaagaggagcatcagagcagccagaggtgggagcaatatcaacaacaacagcggcagcagcagcaacagcaaaggcccaagcattattgtcgtcgcgaaacgaaacgtgagcgtaacgaatgcgcaagcagaaatccagcaacaaagcaaatgcaggccaaaaaggcggtggaagagagctggtgccagagggttggggggtgcagttaatggcgcacaggcaaagagcaacagctgctaacgatgttgacgcgccgatgacggccgcaaccaaatgggcagacagagctgcgaaagagaggacaaagaggacgatgagcagcaggcggaggcggtggacggcggagagcacaagagcttggctcttttatggctaaaaacgctaatgtgaccgatggaccgatgtagggggaagtgggaggggcagggatagggaagggagcatgacggagcgcaaagcacacgcaataagcccaggcagcaagaacaacaacagcagccacaaagcaacacaagcactcggcagctagaagaagacaccctcaaaagatggaacaccgcagcggccactatggcgacccttgccatttcccatttcccattcctctttccctaccccccatccttaccgcccttcttcgcacccactcacacttacactaccgaaattaacgcacaacaaatgaagcacacgcatgtgccgccgtcgcagtcgcagtcgacgtcggcagcgaactcaagcgcacatcaacaactacagacacaacaaatgagcagaattgcattttgtgcatttcgacccgcaaaaagtgtaagctgggcacaaaaatgcaaatgacaggcggcagacagtaatcccctatggatgaatgggctagcgggggcggtggtggttggtgcgttgcgcgagggagatgaactggccgcccatttcattcatcgaagttgctagggcccatatacaccaatcaaagtgagtcataattgataaggtgagtagaaatacttttaacttaaataatttcatttcaaggggtattaaaccaaaaaaaaaaaccttaataaccttttttaactatatgttcagcaactgtgtagatatacgcttttatattaattaaagtgtaaatattaacctaacctaataaaccgtccaactaagagtactttgttacatgttcaagtatctaagttttattcaagcatttcaattatgaacgaatacttctagttattttatgtttggctagaaaatcatattaacagtatccgtttggttcacgcataaactaaccacaataaaatgtattaatgcattcccacctcaatcctttgcagatttggagttgtttcgtcggatgccaagcataccatgtactactgctaggtgaccgatgtggacaaggcaataggtggcggcggcgtggacgacgagatcatcgaggtggtgaagctgtccctggagaaggccaagcggatgatccaacaggcagccgtcaacaaaagcccgcccagcttgtttgatgtgcccgatgcgtaggcctagaggcgaacgttgtgttataacactcaacactaaccaatacgaatgctttccagctgacccgcattgtgagggcgcctagcgtacacgatataatattgaaattcccgtgcccgtcgaggcttagcttatgatatgtataccgtgtaatatataatgcaccctggccagatgtccgcttatgaattcggtcagacgtgtcatctcagctgcgagttccactcccaccgcggctgccaagtgcataagtcgcctataaatcaaaatgccgcaaaacgggttcctcttttctccgatcaaaacccatccgatccgattcgatgtgatgggacctggtactgtggaggaccaatacccatacgtacccatctcatcctatccgaagcccctgtcgggcagatcattaaatgatcattaaatatattataaaatccatttttgtgatagaacgttgtctaccgacatttttttttgctttcgctttaagttactacataaatacatatgtatttaatcgcacgcgcagagcggccaagcaaatcctgcaggtcaacgctgcggcacatgtcgcacacacatacgcacagtggtaggcgcccaccacccaaacacactcgcacacacacgcatgcaaataaacgcatagtaattgcattggcacgttgtataaataaatttgcaagtgtgtgtcgctgctgccgtttatttattaaacgttgttgttattgtagctatcatcaacttgccaggggaagtacagagtgagtaaaacggatcagtgagaaagtgcaagagagtacaatcaatttcgtattgtaaataaaaagagagagataaaataaatttcccaactcacacggtatcattaaatgtaagtaaggaacaataagttctatttgtcagttataattgagccgccagtgggttcggatcagtttcaatttattagaagtgcgcctgtgtgaaaagtttcccttctccactaacagaggcaaaaaaggaaagcaaaacaaaaataagaaaataaccagcaaggcagagcaagtgaaacggacagaaaaaactttcattttcaatgtcaagcaacaataaaaacgtctgccggttgggggaggcaattttgtgatgagagagccaaaaacaaagagcgggattaagaaagagaaaggaagaaggtgagagagatctaactttcattgtacaagagcatgagcattggtagcaattgcttgctatctctgttgccagcagaaaaagcgttaatttcttttcgatttccgactcaaagattcaagaacacgtgcaattgttgctggttatcagagagcgagagaaatagagagcatgaaaaacagctgacgactgcctttctatgcatctctgttacacatcctcttgtttatttacactgagaaaaacagttttaccatttactttaaatgcgattttgataccatctcattctttttataagcaccctgtattaaatcaaattaaacaaatcgtaaaatttagtttcactttacatttattattgaataattattattatatattattgtctttatagatttgaaaagttttcccatatcgtaagtgatgtattgttactttatttatttgttattaaacgtttgtttttgctcagattatttattttggcgggagagcgccacaccgctctctccttttccgtcacctcacaccatgtggttataaccagacgcgtggctttacaacaacaatagtcttacaacaatagatgcacatactgacactcgccgcacacttacactcgcacagatgggcaaaatattgaaaaattgccaaaataagagaccagacatttttcgaatgtcgaaagcaagacatactatagacaccatataaaataatgggaagacctcttgaaaactcaccatgctcataaggcgaaaaggttccagcatctatattgatataggggtcaatcttgatcgaggttacatccagaccacaggatttcaaaagcgttccgaacgaggaggcaatcactccttttcccacgccactaatgacgccaccagttaccaggatgtatttcatcctttcgtctcgaatgtcaatctttgggatcaccaaatgtggaggattatcgtgttatcggttcaattcgcggtggacactcaatctgaggcaatccgagccacaatttattgtttatttgcctttgctgcacgtggttttagaaattggattcgtttaatatctcatacgtatttatggtatgaccaccgctcatttcattgagaataccagtgactcaccgtgtgttgttaaacgtcacaaaaaccgcgcggtttcctatgcattaaaattgagttcccgcaaaaataaacaagaatcaaatgtaattttagcatagcagtgaggactggttacatatttatttggaaacttgcgatttaaatctaaagaaaaaatggcctataattcgtattactttcccttgtttatatttttactctttgtgtatagtttgcgtttttaaaaggaatttcacgttttatattaccaattttaagtgtaaataaatcataatatccggtaaatttgaattgtcatagatccaaacaactttaaatgtgcatatttaaaattatattaaataatttaaaaagaaatttcaccgagaaaaaatattttttgaaaataaacatcaaattcatattgaagataaacacactcccatttcaaagcgcaaagcattaaatgttgcatatttattgaattttataagaaattattgaattattgaattttatttatacaaaaataagaaaactttgaaactctgtaaatgcgtgccaagcgaaagaaactccttgatcaaccagttacttgctggcctcctgctgttcgaacagaggatactgttcggtgacactctcccaggtggttctcgccgtcgacaagtccttgacgacgcccacaacctcctccagaccgacgcgcacctgtttcatagtattccgatctcgcagagtcaccgtatgcggttcctttagagtgtcgaagtccacggtgatgccatagggtatggcaatctcatccgtgcgggcataccgcctgccaatggatccactggagtcgtccaccttgtgcgaaagttccgccttggtcagggcagaagacagtttctgagtataaggttgaaagtcggtgttgttggacagcggaaggatggagcacttgatgggcgccaccagaggcggtagcgtaaagtagcaccgct

SEQ ID NO: 25277 - DNA, 2355 bp, DROSOPHILA
gtggtcataccataaatacgtatgagatattaaacgaatccaatttctaaaaccacgtgcagcaaaggcaaataaacaataaattgtggctcggattgcctcagattgagtgtccaccgcgaattgaaccgataacacgataatcctccacatttggtgatcccaaagattgacattcgagacgaaaggatgaaatacatcctggtaactggtggcgtcattagtggcgtgggaaaaggagtgattgcctcctcgttcggaacgcttttgaaatcctgtggtctggatgtaacctcgatcaagattgacccctatatcaatatagatgctggaaccttttcgccttatgagcatggcgaggtttacgttttggacgatggcgccgaggtggatctggatctgggaaactatgaacggtttttggatgttaccctgcatcgggacaacaacataaccaccggaaaaatttacaagttggtcattgagaaggagcgcactggcgagtacttgggcaaaacggttcaagttgtcccacacatcactgatgccattcaggaatgggtggagcgcgtggcccagacacccgttcagggatcttcaaagccacaggtgtgcatcgtggaattgggaggaacgattggtgacatcgaaggcatgcctttcgtagaggccttccgtcagtttcagttccgcgtaaagagagagaacttctgtttggcccatgtgtcgctggttccgttgccaaaggctaccggagaacccaagaccaagcccacacaaagttcggtcagagaactgagaggatgtggcctgagtcccgatttgattgtctgccgatcggagaaacccattggactggaggtcaaggagaagatcagcaacttttgtcatgtggggccggatcaggtgatatgcatccacgatttgaactccatttatcatgttccgctgctgatggagcagaatggtgttattgaatacctaaatgagcgcctacagcttaatatcgacatgagcaagaggaccaaatgcttgcagcaatggcgagatttggcgcgtcgaacggagaccgttcgccgtgaagtttgcatcgccgtcgtgggaaagtacaccaagttcacggattcgtacgcctccgtagttaaagccctgcaacatgccgccctggcagtgaatcgcaaactggaactggtctttatcgagtcgtgcctgctggaggaggaaactttgcattctgagccgagcaagtaccacaaggagtggcagaagctatgcgatagccatggcatcctagtccccggtggattcggttcccgtggaatggagggcaagattcgtgcatgccaatgggcgcgagagaatcaaaagccattgcttggcatctgcttgggtctgcaagcggcggtcattgaattcgcacgaaataaacttggtctcaaggatgcaaacaccacagaaatcgatccgaacacagctaatgccttggtcatcgatatgccagagcatcacacgggtcaattgggcggcactatgcgcttgggcaagcgaataactgttttctctgatggtcctagtgtcattcgccagttgtatggcaatccgaaaagcgtgcaggagcgtcatcggcatcgttacgaggttaatcccaaatacgtgcatctgctggaagagcaaggcatgcgatttgtgggcaccgacgtcgacaaaactaggatggaaatcattgagctcagcggtcatccctactttgttgccacccaatatcatccagagtacttgtcgcggcctctgaagccgtcgcctcctttcctcggcctgatcctggcctcagtggatcgattgaaccaatatattcagcgcggttgccgcctgtcgccccgccagctatccgacgcatcctcggatgaggaggacagtgttgtgggcttggccggagcaacaaaatcgctgagctccttgaaaattcccattacacccacaaatggaatatcaaaaagttgcaatggtagcataagcacttccgacagcgaaggtgcctgcggaggcgttgatcctaccaatggccataagtaaactagtgaacggtatcttatatcctaaagtgtttaacatccgattatcagacgtacttttgttatcgcaaaaccccaaaagtttgggataacttaagtattactgggtgggtataatacggtatttgcgaattgaaaattttgaccttttatgaaagaggcattaataataagaaaccctttataatttctcctaagcttaagtaaactacgatgttactttccgtacatttttaatttatatgaaaatcttaattcatatatattttttggatgcgaaaaa

SEQ ID NO: 25278 - protein, 627 aa, DROSOPHILA
MKYILVTGGVISGVGKGVIASSFGTLLKSCGLDVTSIKIDPYINIDAGTFSPYEHGEVYVLDDGAEVDLDLGNYERFLDVTLHRDNNITTGKIYKLVIEKERTGEYLGKTVQVVPHITDAIQEWVERVAQTPVQGSSKPQVCIVELGGTIGDIEGMPFVEAFRQFQFRVKRENFCLAHVSLVPLPKATGEPKTKPTQSSVRELRGCGLSPDLIVCRSEKPIGLEVKEKISNFCHVGPDQVICIHDLNSIYHVPLLMEQNGVIEYLNERLQLNIDMSKRTKCLQQWRDLARRTETVRREVCIAVVGKYTKFTDSYASVVKALQHAALAVNRKLELVFIESCLLEEETLHSEPSKYHKEWQKLCDSHGILVPGGFGSRGMEGKIRACQWARENQKPLLGICLGLQAAVIEFARNKLGLKDANTTEIDPNTANALVIDMPEHHTGQLGGTMRLGKRITVFSDGPSVIRQLYGNPKSVQERHRHRYEVNPKYVHLLEEQGMRFVGTDVDKTRMEIIELSGHPYFVATQYHPEYLSRPLKPSPPFLGLILASVDRLNQYIQRGCRLSPRQLSDASSDEEDSVVGLAGATKSLSSLKIPITPTNGISKSCNGSISTSDSEGACGGVDPTNGHK

SEQ ID NO: 25279 - DNA, 5004 bp, DROSOPHILA
ttcctggtcaacggaaccagctgtgtgcgcaacttctgtggcaagaatcgcctgtacttcccagcggaagattcttgctacaggattggatctcaaggcccgtgtgccctacatcaggtggtgatcttcgacttcaccgccaggccatccatcgatggcatctcctacaatggaatgtgcggttgttccggtgtcctcaccaatctggatcagcagtgcacgggagatggagcggataaggaacagaatatatgcgagtccacgcccggaatggtggagatcaatgggcagtgccacaagctgtatagccgaggaccctgcggcgcgggtcagtggctagagccactgaaatcgcaaaccacgaatggcacctcaattttggtccacgccagtcgggccaagtgcgtctgccgaccgggttatacgccctcggagtcggatcaacgcggcatgagcaactgcagcgctccaagtgtcagcctggcgaggtatttaaccaacgagcgactcaactcgaagtttctcaatgatctgcaccttggtgggaccacctaaaatccccaatcttcaagctattttctgtccggttgtgatgacttttattcttctttcaccgcatgcccacctaatttaccctatattacctccattaccctttgtttttgtgtttgcatgctcagtgtttattgatcgatgcgatcatttgttattcaattaaccattttgttctcttttaggtggtttttagaaatattcggttaacgtgttcgataggatgagacagtgccattaatgtattacatcgactaatgtacgagttgtatttaaggaaaatcacgataagggaaataaaagaatttgaaagactaacaatatagagtctagaaatgaaatataacatatttttcattttagcagaaaaattgagttgtaaataggtcaattattctgaaactctttggtatcgggttctgaagcacaaactaaacaattctcacacttaccgcaattgatcctccaggtccttcacattctgctctagggcattccgtttttctttgcaatcctttagctcatactccagtttgtatacccgctcagttttggtatccaattgatgctagtgaagcaaataacaatattgttaatatctctagaaaatatattattaaatgaagttaccagaagcgtatccttctcgtgttctaacgatatataggtctgccgcagagctcctaagtccatgcggagttgggtaacctcgctgcgattggattcccgactggagtccaaggtgctggcccgaacatccgccgactgtcgttgacgctcggccaccaaaagtttactctgataatccgctatgatgcgctcgttttgatcgttgagcatgctgccaataaataaataacaaatttataaacgatatgaaagcttagcagcaattccattgttactaacgttatttgatcattttcggtctttagttggtcaatttcggtttgcatagatgccacacgctgcctcatttgcaacaagtcctccttaagcagcaccagattcgtttcagttggcagacgagccgagttaagttcccgattatcgcgttccatttgccgcaggcgatcgttaagctcttcgtttcgcaggcgcagagcctgtagctcatcggcatgaagttgaacagtgctcagttgcttctccctcagcgtatcccgctcgcaacgaaccctttctagctcggtcctggcgcaatcccgttcccgctccacccttgcaatggccgcctggacgcagtcactcgtattgctagtaacggtggaggtaatggatgaagctgtggggggcggcagtgtctcatactgcacacttttttgtggggaaaattgctgctttcctccatgaaacagttcagatcgcagggcctttaactcctcgtccttagatttaatttgggcatgcaagaaggcgatctccgactcggatccggtcttgctcatcagacgcagatactccttctggaagaagtcccgctctgatgacaggcgtattttctcttcatccagggtgacgttggaatgtttattctgatctttgagctccttctgcagttctaatatctttgcttgcattttctgaattttcttcttatgcttttcatttgtggcctgtagttcctcttcacgacgagtcaaaagatttaagcgttcattaagattatgcttgtcactttgattggaagcaaagccaccggtcagtcggtgatcctttcccttcttcttaagctccaactgcagttgcctaagttccgattccttggcatcgatttccgcattggcctgctgttccacttgcaacgcagcttccttgagctcctccagctgcgtttggagctttattttatcctcttcggagcttagagcccgctgcatagcatcgtgcatcttgtcctggaattctcgaacttgcatcattaaatcgctcttctcgcgttgcaacagatcgatgtcctgggagagggcgcccacgtccttgtaacagcaatccttggccaaagccgctaaaggacgccctcctgctagcatgtcgtttaagcggcgaatctcccgatttctggcctccactttgcgcttgaagaactccagttgttctccggctgccgtaagatcattctgcatcttgtctaactcctcctgtccactggtttgcgtcactgtcacaccgtctttggtcgttgtggtggtcttctggaataccccagcattgcattttgtgcatttaagagcactgctgctagtgcccagtgtagttggcatcgcaatgcccgaacgcactgtggttataaagggttttttggctggaaagcagaacattttaataaaaccaacgtgaatcagatagagatagtatctcagggagatccaattctagttaaatatctttcttagacctactctgacgtccaatgccagctgtcgcctttttgttcgtgactgatgaaaccatttgcttggtaagcaaagcgtccagttgcctttgaagtccatcgttgtgactctgcaaatgctgcttgtccaactccagatttcggatctttcgctcggactctgaaaaagtttaaggcagcaatagagttaaaaatcaaattaaaatcgattacaacataccacacaggcgcagctcgtagtcctccctgtccctcaaaaactggagatgcagttcattgcactcggccagcaggcgagagttgtcacacttgtagggttcgacgcccagctcccaacaggtcttttcctgccgaaaggaaagccacaacagaaggattgcttagcaaccaattgaaaaaccacaacatataagaaagaacgtgggcttaaaaagctaacgtgtaaatatccttgcaagtatttcacgcttaattttagggattcaattgaattgtatagtctgcccttaaaaatgaagcatatttggcgtatatagaataagaatactgaaaagaagtttctcatgggatcctcacaattataatcatatttagattgacaaattcttttttatcttaacagcaccaacctgaatctcttcagtaagaaattgtgataatattatagttacacatatataatcgagaaaacccaaaggtcttgtactctctactggtatacccacctccagcagctcggccacctttttcttggtatccctcaaacattctgtggtcttgattaggtccccgaaaacagcctgcaatgtaaaaggtacaggattatgccaaaaaattaatattacagggtatgaatattacctgaaccagtggaatggccaaaacgggcagcgtctgtgtgaaacccatgatgtccagtttgcagcggaggtctttaaagtcaccatcgttgatattcatgggaaaacactaataacagcaaaaaaatcacaagttttctcctaaatgccctaaatttcagaaaatgcgcaatgaaaacaatgctattcaatcaaatcaaaacaaaaccggacttcaaccgatatttccttaaatatatcggttatcgaaagtgaccatcacacctcagcaaggaaatcaatcgaaaatttgttttagtattttattatcgaacgcaaatgtatcgaaatcagtatgaaaaataacatcgattgcccagaaaaaacgttacattcaaaataaaatataaaagctgaacaaaattttatattttttatgaaaattcatagattttaccaggtatgtactgcaaccgaaaagaagttaccgaatatttcaatataataattttattattgttcatgtgtctatggctatgtctaaaaaaccaaattataatacaaattttttaaacttttagaattgtaccaggctttactaaataattgaccttgtccaaatcagaattgttcgatatttgtctttttattaaaaaaaaactaaggtgtggactgcgattaatcaacaacaaaacagtaaaagttcttaaacataaaagacgcttcattatctgatataaaattacgttctggcttttccgaggaaaacggatttacagttggcggcattacgacatttaagtgtcgattcgattggttaataaattgaatcatatccaaaggggcctcgtattttgtataggaagtaactacgatggggcagttgagattgagtgcagcttgaatggtatctggccaagtatcctccagagcgaaaccagttgatcggtacagaccgcagttaaagaagcaaactatgaatttatgtataataattattattagtttcgcttaaatgagtgttaacttactcaaattcggctgaagaaagtgcgattctctgcagtaatcgtgatataaactattctcaaaatgatagttaaccgttctctgggcttttctgcagaaacggcagcatctaaatagattgataatctttagactaatgtttaaactactaactaaaagtgtaactcacttgattttctttagctgttc

SEQ ID NO: 25280 - DNA, 2278 bp, DROSOPHILA
atttgattgaatagcattgttttcattgcgcattttctgaaatttagggcatttaggagaaaacttgtgatttttttgctgttattagtgttttcccatgaatatcaacgatggtgactttaaagacctccgctgcaaactggacatcatgggtttcacacagacgctgcccgttttggccattccactggttcaggctgttttcggggacctaatcaagaccacagaatgtttgagggataccaagaaaaaggtggccgagctgctggaggaaaagacctgttgggagctgggcgtcgaaccctacaagtgtgacaactctcgcctgctggccgagtgcaatgaactgcatctccagtttttgagggacagggaggactacgagctgcgcctgtgtgagtccgagcgaaagatccgaaatctggagttggacaagcagcatttgcagagtcacaacgatggacttcaaaggcaactggacgctttgcttaccaagcaaatggtttcatcagtcacgaacaaaaaggcgacagctggcattggacgtcagaccaaaaaaccctttataaccacagtgcgttcgggcattgcgatgccaactacactgggcactagcagcagtgctcttaaatgcacaaaatgcaatgctggggtattccagaagaccaccacaacgaccaaagacggtgtgacagtgacgcaaaccagtggacaggaggagttagacaagatgcagaatgatcttacggcagccggagaacaactggagttcttcaagcgcaaagtggaggccagaaatcgggagattcgccgcttaaacgacatgctagcaggagggcgtcctttagcggctttggccaaggattgctgttacaaggacgtgggcgccctctcccaggacatcgatctgttgcaacgcgagaagagcgatttaatgatgcaagttcgagaattccaggacaagatgcacgatgctatgcagcgggctctaagctccgaagaggataaaataaagctccaaacgcagctggaggagctcaaggaagctgcgttgcaagtggaacagcaggccaatgcggaaatcgatgccaaggaatcggaacttaggcaactgcagttggagcttaagaagaagggaaaggatcaccgactgaccggtggctttgcttccaatcaaagtgacaagcataatcttaatgaacgcttaaatcttttgactcgtcgtgaagaggaactacaggccacaaatgaaaagcataagaagaaaattcagaaaatgcaagcaaagatattagaactgcagaaggagctcaaagatcagaataaacattccaacgtcaccctggatgaagagaaaatacgcctgtcatcagagcgggacttcttccagaaggagtatctgcgtctgatgagcaagaccggatccgagtcggagatcgccttcttgcatgcccaaattaaatctaaggacgaggagttaaaggccctgcgatctgaactgtttcatggaggaaagcagcaattttccccacaaaaaagtgtgcagtatgagacactgccgccccccacagcttcatccattacctccaccgttactagcaatacgagtgactgcgtccaggcggccattgcaagggtggagcgggaacgggattgcgccaggaccgagctagaaagggttcgttgcgagcgggatacgctgagggagaagcaactgagcactgttcaacttcatgccgatgagctacaggctctgcgcctgcgaaacgaagagcttaacgatcgcctgcggcaaatggaacgcgataatcgggaacttaactcggctcgtctgccaactgaaacgaatctggtgctgcttaaggaggacttgttgcaaatgaggcagcgtgtggcatctatgcaaaccgaaattgaccaactaaagaccgaaaatgatcaaataaccatgctcaacgatcaaaacgagcgcatcatagcggattatcagagtaaacttttggtggccgagcgtcaacgacagtcggcggatgttcgggccagcaccttggactccagtcgggaatccaatcgcagcgaggttacccaactccgcatggacttaggagctctgcggcagacctatatatcgttagaacacgagaaggatacgcttctgcatcaattggataccaaaactgagcgggtatacaaactggagtatgagctaaaggattgcaaagaaaaacggaatgccctagagcagaatgtgaaggacctggaggatcaattgcggtaa

SEQ ID NO: 25281 - protein, 709 aa, DROSOPHILA
MGFTQTLPVLAIPLVQAVFGDLIKTTECLRDTKKKVAELLEEKTCWELGVEPYKCDNSRLLAECNELHLQFLRDREDYELRLCESERKIRNLELDKQHLQSHNDGLQRQLDALLTKQMVSSVTNKKATAGIGRQTKKPFITTVRSGIAMPTTLGTSSSALKCTKCNAGVFQKTTTTTKDGVTVTQTSGQEELDKMQNDLTAAGEQLEFFKRKVEARNREIRRLNDMLAGGRPLAALAKDCCYKDVGALSQDIDLLQREKSDLMMQVREFQDKMHDAMQRALSSEEDKIKLQTQLEELKEAALQVEQQANAEIDAKESELRQLQLELKKKGKDHRLTGGFASNQSDKHNLNERLNLLTRREEELQATNEKHKKKIQKMQAKILELQKELKDQNKHSNVTLDEEKIRLSSERDFFQKEYLRLMSKTGSESEIAFLHAQIKSKDEELKALRSELFHGGKQQFSPQKSVQYETLPPPTASSITSTVTSNTSDCVQAAIARVERERDCARTELERVRCERDTLREKQLSTVQLHADELQALRLRNEELNDRLRQMERDNRELNSARLPTETNLVLLKEDLLQMRQRVASMQTEIDQLKTENDQITMLNDQNERIIADYQSKLLVAERQRQSADVRASTLDSSRESNRSEVTQLRMDLGALRQTYISLEHEKDTLLHQLDTKTERVYKLEYELKDCKEKRNALEQNVKDLEDQLR

SEQ ID NO: 25282 - DNA, 6934 bp, DROSOPHILA
ttacttattaatagatatgggaaggtattcgagggtggtaaagaatatgctactcaaggggaatcgatctctggaataaaactcggttggtctacgattactttggattacctataaaaaatttatgattcacttcccagacgaatgtgtgcagtccaaaggagaatccactcactaatttcctttaaaaatatttatactttaaatatttatgttgagaggactcttaaaactccccacaaatctcgtgcaggggggtggcctaacaacagccgcgatgcaggaggaatcaagggcggtcagggcaaacggttgatatatggaccttggaccccggcaaagcggagagaccgtgaactaacggtgtcgctctggaccttggactccagctgtccaagggcgaagaggtcgaccggtaacggtgcgtgcacaaagaggacttcaacttttatggcaaaaaaattccaaagcctaacaattttctaaatatctcaaatcaaaaattgttggtaaaggggcgctatcctggtgacgcgcagtgtatattttacactttggccgctcttttcttaatgatttatttgatttaaaagattacagataatagaagtgtaagggcgattcagtaatgatgctaaaaatataacaagaatttttcaacgttgatacaatttaattaaagctttgccaaaaccagtacactgcagtgaaactaataataattattaatttattttataagataaacttacttgttcaaacggttttgtcaattctggataaccagcagaaactagccactctgcttccatttctccatctaaattaaatttcaaaagaaaatattattgactttcacataatttttgttatacaaaccttcgtaacttgcttcaggttcgatactttgggaattgctttgcagataatactcattgagaaattccgaaaagtcctgatcatctgaatgatggagatctgtattgctgttcattttaaacgtctctttataacaaattttctcgtatccatgggagaaaatacctgtaaaaatgtgatgtgattttcgatagactctatgggaactattatttttgtcaaacatttttatactttttataaaaattatttaaaaaaaaaaaaacaaaagagaacgtaaaagtagagatccctgacttttaagtacacatgcttcagctagtggtagttcaaatgtgaatgtagattctcgcagccgcaagcccttcctaaatttgttatttgtaaacatgccaacattggagacacaattaagctttatggaacctcagctatgcgattatcttttgttatttaaaatatcccccctcgcaatcacactatcttgtactctcgcgcttgcacctttggcttagagttcttttcgctctgcaattaagtcgctatccatttctttcttatcctcgatgccaaatttaaattcatagagtaaaatgaccatatttcttgtacttcgatagaaatggggaaaagaataatatataacaaaatttatacatttttttgggcggagtaaacttatttagaaaatcgatagaaatgtacagaccaatagaaaaatagttgccgttttgggcggcttttctccggaatctaaacgctcaatcttaagcccctacggacagacgggggccatttggaaataaacttgtctctaaaatttaagtttaatctcaacaatctagctagttcctgagatagaggcgttcatacggacagacggacggaaatgactatactgacgggtataacaatggtattcgttgcaaaatcaattggaactttttcttcattgataaagcgatgtcattataatagttatataacgttataataaactcgtttaaaagtatgttactcactatgtgtttctatcgctgtcaaaaaattatctttttcactttcagatgtattctttggatattttaaggaatataaaaatcctaaggataccgattgcacaaatttttgccatagtgcatactccagtacaagtcaaacccagtcttggtctacaagcagtctcttcagaattactagcatctgtttaagttatatttaaattctacaatgtcctctttttaagattttgaatctgaacattttttttaacattcatacatgtacccacacacactgctcgtcatcagaatggcgccccctgcatggctccgattcttcataggttctgtattttgatattgaacgaaaatcgatcaatcttattgttttttttttttttttactgatttcctctctctttgaggataagaaagaggtcctgataagaaccgttaccttttttttgcccagatggacaagagtgtccggctgctataatcccaagtgcgttcgccgcaaaggatttcagaactcgattctctgcatctcaacaaagatacttgtagacggctttactggaaatgccctatggaatgctctaatgttaaatagaattattagtcttgtaaatttctattgatgtgccatgtccacaacctccgaaaacggccacgcccacgcttttgaaaaaatttgccgaaaacattttctccacgcccactctggcgcctaaaaacagccctaatatattaactttgttgtcccgatttctaccgaaatttcttaaaaaggttgaaactgtacgtctcacttggactagctaagtaacgggtatctgatagtcgggcaagtcgactatagcgttctctcttgtttaacattattatttactattcccaatgcagtcatacatataaaatacagataaacaaaataaatcaccacggttagtacacccaatcaaagtgcagtacatgtaacatcggaacattgaaaataaaatcgaaatcgaaaaaaaaattaagataagcagagcatgcctgattatgatgtgcttgctgatccttaattatttagattggctattgtttcagttttaaatttatgaaaactgagatcttttaatagcaactatgtcgccgactttgtacttttaggatggtcctcgtcgtagattgtatctctttttcttctcgttttgaatctggagaaaacgtctctttgcttgaattctatcattttatcctctagcatctgctgaatccttatattcaattttaggctcatcttcctgccctttttttgcttcaaacaaacattgagttgatgacttctggtacgccactgacaatttatgccaatgtagtgggtcgtcaattgcaagttttgaaaaaactgaagcttttgagttcaccctctcaacctctctatttccaaaaatgttgctttgatcttgaagtcttgcaaaatataagatgttgatttgggtgtttggatttagatagagccagcagaattttgtgaaactgtcgatttctggtaaaactgtttatactgcttttgcgttgactctagaagtccaaggaaatttatatggtaggtttgaagcggttgcttatctttgctgagtggatgaagtttcacgtaatgtatagctactcctttgtggttaaatccctgaagatagcgtttacatgaagttggatcacacttggcgaatttgaaagaccgaaaaggtattctcagaaattgaaattgtcagttgtgagtgactaacgatgtatattaacggctctactcggatgtttccatgatgccgtcttcaagccattgttcggttttattgtcaaaaatgtaacgttcggcataagaaaatctgcaggaccgtatgtatttcggcataccgtatgtatttatatcttcgatataaattttgagatttgaacttatatcaccttctgatgtgataggttttgtaattttcacttcttcactgtttactgtaacttgagcttgtttgcaaaactctttatcaaacaccatttattagtcgaggaggtgcgattctaatacgagaaaattttttaaaaattcggcatattctgcctattgagagtttctgctcaaacgatcctgatgatttgatcttatttttgtctgatttactaaacccgacgagatatattttgcagtcccttaactttagcttgatattgtcagtatcttcctgagtttcttcgccgatttcattgtccgtttcatactcttcgctttcgtgttagtcatttcctcgccaaatttggttcgactaacatgtttctttgttgcaatatatgtgttttgtcaagtcggtcttatcctgttgcagtttttgcaaattatcgcgagatccatatcagataatttgtctgcgaagaaattaatttctgtcgatttgacgatttgactcgtcgtaagcgtagcctcgaaattctcgcaagcgttttctgttatcgagtacaatgttttccggatccggatttgctaactcttgcgatactttatttctttctttattttcattatattttaattcttgtttttaacacttttactacctttttacactctgttattttggtttaattttgttgtatattaattgttgagccccaaattatgtgagactgagttcttttttttttgtgatgtgtttactgatccttgattggatatttgtttaaggggttttggcgagatagtcgttctccggcacgtcttctacttcgtcgtcgtaaaaacattttccttccatggatttttccgtttagctcccgaaatcgttctctgccttttgaaggctcgccgcgtcgttagcttcgcctagtcatcgttatattagctaggatgaccattcccacatatgcatgtctgtaaacattctcgaatactcgaaatacatataaaagcctttcaaggaatgcatccataggcctcatagggttcttacaggacaagacttgaatacttttgaaacttatgtggagttatgaaataacgtgtcggaacatattccactcaaattccacgtccgtatggggacctctcaagaacgcttacagtgtgtaggcagtgtgcaggcagacgtagtataagctcatgctttgtaaatttgactaaatgtgacattcatattttagaaaatagtaataataaaataataagaacaaaatataaagtaattgtgctaaattttgccaaaatagtaaaataggaattatttacgaacttttaatttttatgtgctcattttaatttgatgctggtagggctgtttttatacaggtttgagtttcaatagattatttcaatataaaaaacttgattggcccagttgaatgcccttatttatgcaaaattcctttaatctctaaataaattaatttttaagatgaaaattgatacctggttgaaaatcgtctttttccacaaatatgcacacatactcactttcttgcgtatgccttaatttactcaaacaagtgcgtaaaaaaaattagatttgatttcaactgaaagaaataagctgcgagccactgtatgagaattccatgaaaaacgttgaactgccgatgctaagttaatcataaaatggtccacgtcaatataaatattaaataaatatcaatttacattacaggtctcggaacatacatacataagtaagttaatggatggacatattaacatacattctatgtacgaacctaagaacccatgacaacacgcatatctagttgttttttcatattaaaataaacaaacactttttttaattataaaaagttaagtaaattagacacagcttatgtgcaaaactactagtttcatcaacaaaaaatcatcaactgggtagcagatggtacctccttttcttactgattttacttttccatatatgtatgcatgcattacatatgtatgcatttttaaatggacttacacagaaattcagtatatttcacctatacactaaagatttactaaggcaaatatcaagatgtttgtgtaaactgctgatgtatgaatcgaatgaattgagatttattcatattaacttcaaccttacacaattttcaaagtcgatttgtgacgttctgcgtaaatatgcacgatactgcattttttttttactcagatggaaatgtatatatattaaatatattatatatttattaaaggcaaattaattttcgttcttgatcttggatcttgatcttggatccaaggacagtttgacagtttagccatacaatttcgcaatcttgtagcagtgcaagtttgtaaagttgttagtctcaaaatagatcatagaaaaaatagatcggtgaaaatatatcactaacaaacggtgttaaaaaccaaatgattgtaaagtttggtcatggcagctttgtcagttttccgggcttagacaagtttttttaagcatatcaatagaaattaaattaaaaagaaccgaaacataatttaatttaatttaataattttttaattttagttgacctttcgaatggacgcgagaactttctgaaatatgttgtttttctagcttttatatttccccagatctcgaagtatacacggactgactagatcatgaatacatataatgtatacggtggtaaaggaatttgcgtcaaaatagcgcagatgagttagttgcgttggcggaacggcagaatttttaacatgggaacgttcttatttacttgttcttttagtctttacttataggtgaatttaaaaaaaagaatgttatgaaaagaatgatctaactatctatttacgacaaaagtttgaaggacccaaaaaagtattacaatatgcaatttaaaaataggcacccaactttttagggaatatcgccattctcaaaaggtgttccaaaatgaacgctagacaaccttaaaggatatttcaggaaaattaaaaaaaattatccacagtttttgtgataattgcatagtacagctataaaaaagtttttaatttttttttttttgacttaaaa

SEQ ID NO: 25283 - DNA, 461 bp, DROSOPHILA
gtttacacaaacatcttgatatttgccttagtaaatctttagtgtataggtgaaatatactgaatttctgtgtattttctcccatggatacgagaaaatttgttataaagagacgtttaaaatgaacagcaatacagatctccatcattcagatgatcaggacttttcggaatttctcaatgagtattatctgcaaagcaattcccaaagtatcgaacctgaagcaagttacgaagatggagaaatggaagcagagtggctagtttctgctggttatccagaattgacaaaaccgtttgaacaattgaagtcctctttgtgcacgcaccgttaccggtcgacctcttcgcccttggacagctggagtccaaggtccagagcgacaccgttagttcacggtctctccgctttgccggggtccaaggtccatatatcaaccgtttgccctgaccgcccttgat

SEQ ID NO: 25284 - protein, 112 aa, DROSOPHILA
MNSNTDLHHSDDQDFSEFLNEYYLQSNSQSIEPEASYEDGEMEAEWLVSAGYPELTKPFEQLKSSLCTHRYRSTSSPLDSWSPRSRATPLVHGLSALPGSKVHISTVCPDRP

SEQ ID NO: 25285 - DNA, 3770 bp, DROSOPHILA
gcagctctgagcgggactacatctccattcgcggcgacaactccggctgttggtcctccgttggtcgagtgggtggcaagcaggaggtgaacctacagtctcccggctgtctcagccgtccaggaaccgccatgcacgagctgatgcacgccctcggcttccttcatgaacagaaccgtatggagcgcgatggttatgtggccatccagtacaacaatgtccagtcctcggcgatgaacaacttcgaaaaggccgcccgcacggaagcctttggggtgccctacgactatggcagcgtgatgcactactccaagaacgccttctccatcaacggacagcccaccatactggccatggtgagtacaatggtaccaaaagtctcctgggtttaacttaacactcttcaatttctgcattcgcagcaagccaatggcgccgataaaatgggccagaggaatggtttctccgactacgatatccagaagctgaatcgtatgtacgattgtggcaccgtcaacgctgttccagttgccccaggattacccgcccctgctcctgctcctggcgcccctgctggcagtggcaatccgattgtagatagcttcatcggcggcctgatcagcggattgggattgggcgatgaaaagaaggagaccagttcatagacagaatctactagctcgtaccatccaccaacgctcgaaagtatttaacgcattccacatacaaaaaatctagcaccattacttaaacatgtagctaatatgtttagttgataattattaaaatttagcatgaattgaacaaacggatttaaatattcatcagttggaatcgactaattttaagctgtaggttaacttgggaatttattataattgcaaccgaaacatgagaatcagacgattctagtcctagatatctaaccggaaaatgttgcacatatgcatatttgaaaccgaaactaatgggaatgtgatttgcatcatatattccagaactacatgttgcgcttggcggccaggagacgggatcgcggcagacgacactggctgatgctgtgcaggcggtactgcatctccggctgcgtaaccttctcgtacagcttcttcttggcctcggcgaccgtgtggacaaggacaccatcgccgccctcatccatgttgaaggcttcaccctcggcgcactcgggacactgctgggtgagcacaatgtcattgagatcggtgggcagctcgcagatcttctcgatctgcttgaccacatagtcgaagcggccctcctcttggcgctccatcacataaacactagccgtcagctcctggacccttgtctcgagcagcttcaagaatcgattgacattaaccagattgacgtgggtgtggtcaccaaggagtttggtcagcggactggcatctatggaacacatctcgcagaccgtctccacgccctgtagaagattctccaaacgtgcatcgttgttttcccgcgccttgtgcagttccatgttggattcctgtttgttacgcaccttgttctccagactggaaatctgatccagttggtcctgcagcgtgttggagttatcctttttcaggttaactatatcctcaaacaggcgattcaccgaattattcagcatagttatgtggtagctcatttcgttggcatagttgaagaacgagtaatagagactctcctgctgctgaaacttatcgatcacctcgtccatattgctagattccgtatactggagaatcttctgcagcaccgagttgtagagattgatctttttgttgtgcacccgtcggaattcatcccttcgcttgtactccttgggctgcaaatcggccagctctcgaggcttagacttgcaattcaggaaggcggtgttatcaccatcggctgccacctttcgcataataccctgcatctccacacgtctcatatcgcgctccttggcctcccttttggccaacaaatcaattttctcgtacacctcaatgcagccatcgaaggtattcagagcgtattcgatcagatctatgagatactttttctcgctgttcagcttctgcaccattttggtgtatgaatcattgaagaaggtgcgatgattcaggatgcggataagctgctctcgcagatccgcattggctgccgtaaaaccgcactcctgacgcactcccacctccagggaattctccaaaatggtcatccttttccgtgctcgcattacataggcctgatgttgctgatccggaatggttaaacgattcaggttgtatatttgcttggacatgcgacttatctccttctccatgttggaaatcgatgtcttcagagagttaatgtcctgcgacagattctcctggcactcgacatggcagcgaatcagctccagccagcgattgttctgttttttgtgggtcgtaccactggccacccagatctgggcacgcagatcgtttttctcctcctccagctgatcgatggccgtctcaaagctggcctcgatgatggtctccttgcgggtcttgagtttgctggacaggatcttcttgtactcgcgctgtcgcttgcccaattccttgtgcttcagcaggtagctttccaggaaggcaagcttgtcaaacttcttgatttcctccatggtgaatgctttcttcagtagctaacccaaaacggagttccaccttataaaagtggagactttagtaacgaaaatcaagcagaatattcgtgtttgtatgcttgctttcgtagtgtttaaaaagttgcaatatgtttgtctaatcactaaactctaaactctctgtctaaactctaaataagatatgaattgtatgtcaaggcgtatgtggcgtatatttcatacttaaatagataaatatttaactagattcataccaagtgtatcaaagcccaatatttatgccaatataggttgtaagttgatttaaattaggcatattttatgttttaattaaatagtaactcttttattcaacttaagaattaaaaattaaccaatgaaaaactgtgaatttcttttgttcttgagggtaaaccactactgttgggaaattccggagctttccatggcttggaaaattttgaatgaagaccaaacgtaggcggccctccgcagatcgttacacaattcaaatttgtgggccatctccttgatgccacgtgctgcagattccataactgtttggagagccgagtccacgatatccgcctctgtggtgcattgttgtatcctcttaagtttcttattgggacatatgttcggctaaaggagaaaagtaagggatttactatactatactacttaagggtaaggatggacatactagttgactatcggggcattcatgcaaagactcattgatggagttcatcagttcgataataagctcggatgtagatttagagttcattttgccatatgacacgtggttaatgtttttgaggtactcaaagtaggatactgttacgccgcccgcattgcaatagagatcgggaactaggaggacacccttatccaataggattttctcgccagatggtgtggtcggcccgttggcgccttccaggatcagcttggccttgatgtctttggcattgtcggtggttatcactttttgggtggcacacggcataaggatatcggtttcggctaccaacaagtcctccttagactcctgagcttttggatatcctttaatagtcttcttttcctcagtgtattcaaaaagatccta

SEQ ID NO: 25286 - DNA, 1770 bp, DROSOPHILA
aacactacgaaagcaagcatacaaacacgaatattctgcttgattttcgttactaaagtctccacttttataaggtggaactccgttttgggttagctactgaagaaagcattcaccatggaggaaatcaagaagtttgacaagcttgccttcctggaaagctacctgctgaagcacaaggaattgggcaagcgacagcgcgagtacaagaagatcctgtccagcaaactcaagacccgcaaggagaccatcatcgaggccagctttgagacggccatcgatcagctggaggaggagaaaaacgatctgcgtgcccagatctgggtggccagtggtacgacccacaaaaaacagaacaatcgctggctggagctgattcgctgccatgtcgagtgccaggagaatctgtcgcaggacattaactctctgaagacatcgatttccaacatggagaaggagataagtcgcatgtccaagcaaatatacaacctgaatcgtttaaccattccggatcagcaacatcaggcctatgtaatgcgagcacggaaaaggatgaccattttggagaattccctggaggtgggagtgcgtcaggagtgcggttttacggcagccaatgcggatctgcgagagcagcttatccgcatcctgaatcatcgcaccttcttcaatgattcatacaccaaaatggtgcagaagctgaacagcgagaaaaagtatctcatagatctgatcgaatacgctctgaataccttcgatggctgcattgaggtgtacgagaaaattgatttgttggccaaaagggaggccaaggagcgcgatatgagacgtgtggagatgcagggtattatgcgaaaggtggcagccgatggtgataacaccgccttcctgaattgcaagtctaagcctcgagagctggccgatttgcagcccaaggagtacaagcgaagggatgaattccgacgggtgcacaacaaaaagatcaatctctacaactcggtgctgcagaagattctccagtatacggaatctagcaatatggacgaggtgatcgataagtttcagcagcaggagagtctctattactcgttcttcaactatgccaacgaaatgagctaccacataactatgctgaataattcggtgaatcgcctgtttgaggatatagttaacctgaaaaaggataactccaacacgctgcaggaccaactggatcagatttccagtctggagaacaaggtgcgtaacaaacaggaatccaacatggaactgcacaaggcgcgggaaaacaacgatgcacgtttggagaatcttctacagggcgtggagacggtctgcgagatgtgttccatagatgccagtccgctgaccaaactccttggtgaccacacccacgtcaatctggttaatgtcaatcgattcttgaagctgctcgagacaagggtccaggagctgacggctagtgtttatgtgatggagcgccaagaggagggccgcttcgactatgtggtcaagcagatcgagaagatctgcgagctgcccaccgatctcaatgacattgtgctcacccagcagtgtcccgagtgcgccgagggtgaagccttcaacatggatgagggcggcgatggtgtccttgtccacacggtcgccgaggccaagaagaagctgtacgagaaggttacgcagccggagatgcagtaccgcctgcacagcatcagccagtgtcgtctgccgcgatcccgtctcctggccgccaagcgcaacatgtag

SEQ ID NO: 25287 - protein, 550 aa, DROSOPHILA
MEEIKKFDKLAFLESYLLKHKELGKRQREYKKILSSKLKTRKETIIEASFETAIDQLEEEKNDLRAQIWVASGTTHKKQNNRWLELIRCHVECQENLSQDINSLKTSISNMEKEISRMSKQIYNLNRLTIPDQQHQAYVMRARKRMTILENSLEVGVRQECGFTAANADLREQLIRILNHRTFFNDSYTKMVQKLNSEKKYLIDLIEYALNTFDGCIEVYEKIDLLAKREAKERDMRRVEMQGIMRKVAADGDNTAFLNCKSKPRELADLQPKEYKRRDEFRRVHNKKINLYNSVLQKILQYTESSNMDEVIDKFQQQESLYYSFFNYANEMSYHITMLNNSVNRLFEDIVNLKKDNSNTLQDQLDQISSLENKVRNKQESNMELHKARENNDARLENLLQGVETVCEMCSIDASPLTKLLGDHTHVNLVNVNRFLKLLETRVQELTASVYVMERQEEGRFDYVVKQIEKICELPTDLNDIVLTQQCPECAEGEAFNMDEGGDGVLVHTVAEAKKKLYEKVTQPEMQYRLHSISQCRLPRSRLLAAKRNM

SEQ ID NO: 25288 - DNA, 3174 bp, DROSOPHILA
gatcacaatcccaattgcaatcacagataaacccacaatcatctgggtcacaatcccaattgcagtcacagaatagaggatcacaatcccaattgcagtcacagaatagaggatcacaatcccaattgcaatcagagataagcccacaatcatctggttcacagtcccaattgcaatcacaaatagacttacactctgatgcctcacagtcccagctgcagtcacagttaggctatgattcaactggatcacagtcccaattgcagtcacagttagactcacaattatctggcgcacagtctcagttgcagtcacagtttaattcccagtcttcagaatcacagtcccaattgcagtcacaggccaaattccggtctttaggagcccagtcccaatcgcagtcacagcttaattcccagtctttaggatcacagtcgcaatcgcagtcacagcttaattcccagtcttcaggatcacagtcgcaatcgcagtcacaacttaattcccaatcttcaggatcacagtcgcaatcgcagtcacagcttaattcccagtctttaggatctcagtcccaatcgcaattacagataaggtcacagctaggaacacagactttagagtcacagtctccatccgaggtgctactacacattcaggggccttccacatatcaggacaatttggctgaatcgaatatacagacgcaaaaaaatcgaatcaatgtggttacgcctgagtacaaagtattcaaaacaccaaattaccttacccaggaggacatcttggataatactaagctgacaactgtgagttgaaacatctattcctctgattccaatcgctccgaatacctttttaacaaatccaataggttgatctgattgagaagtacggctatccatctgagaccaattacgtgacctccgaagacggctacaggctttgtttgcatcgtattccgcgtcctggggctgagccagttttgttggtccacggcctaatggccagctctgcctcatgggtggaacttgggcccaaggatggactagcatatatcctttaccgcaagggttacgacgtctggatgctgaatacccgtggcaacatatactcccgcgagaatttgaatagacgcctcaagccgaataagtactgggacttctccttccacgagatcggcaagtttgatgtgcccgctgccattgatcatattctgattcacacacacaagccaaagatccaatacattggccattcgcagggctccaccgttttcttcgtcatgtgcagtgagagacccaattatgcacataaggtgaatctaatgcaggcactttctccaacggtttatttgcaggaaaaccgcagtccagtgctaaagttcctcggaatgttcaagggaaagtattcggtgagtgaaagtccttgtttgggagtatataattccactatcattaggattaccttataatttataagataagacaataagaagataacatgacaaagagttgacatatcagcaattttaactgctttacagcatacttattccgtttatctttatagatgcttctgaacctcctgggcggttacgagatctcagcgaaaacgaagcttatccagcagttccgccagcacatatgctccggctcggagcttggcagcagcatctgcgccatctttgactttgtgctctgcggattcgactggaagagcttcaatacggtgaggcgaaagattgttttctctggtttcattaacacattactaccaatgcactttagaccctcactcccatcgtggctgcccatgcctcccaaggcgcctccgccaaacagatctatcactatgcacagctccagggcgacctgaatttccagcgtttcgaccatggagcggtactgaatcgcgttcgctacgagtccagcgagccaccagcctacaatctttcgcagacgaccagcaaagtggtcctccatcacggcgaaggcgactggctgggatccacatcggatgtgatccggctgcaggagcgtctgcccaatctcgtcgagagccggaaggtcaatttcgaaggcttctctcacttcgacttcacgctctccaaggatgttcgtcctctactctacagtcacgtcctgcggcacttgtcaaccagtctcagtggatagaacattttcggcatgaaacccttgaaagtgaactttaggtttcaagaaacgaataattggaataaaaatctagattcaccataatatgagtgaaacttttaaatatatatatataattatactgaaatttattccatattaagtgataaaagaggttccataggggtatctgccgttcaatttcgtggctctaggctctttccatcagcatcactcactcaagtgaaaagaaatcaatgcttacgaacagtgaggaaaatttgcatttctctggccccaagcgctgccataaatttcgcatcctgaacgcatatttacacgccgcgaggccaagttttcaaattaagtttgcaatcgaaatgaggcgagaggaagccaggaccatggctttaaattgctcacgtgtgtgacacatttctttcggcggagtcacgacaatggcgacaagcggaagcggaaacgcgaaatgtgaaaaatgcgcagagcaaacaaaagatggccaagggtgtgtgtcatcgggggaggtgaaacgtgtcgcttaactgttccacgtacgtggccctcgaggcgcagtccgcccacaaaatttggggcaactgtgtccacatagcttctttttagctggctgtgacttttttcgatttattagctagaaattccatctggaaatggataaaaactaaatgtattcactgagtagcttgcattacatgaaaatcgaaaaaatatagctagaatattagtgtcataaaattaagatagaaacatctattcatgcttttcctgtgctggggctctactttgaaaagaaagcaaacaaatgttaataaataggaacattttgttccgaacatatcaaaaaatattacataatagttccaaagagcatagtttttggctaattctagccatttccaattggcaacactgcctcccaaacggtaggcccttctcggtgtggtattcccaactgtaagccccaaaaggcccggcgtacgtg

SEQ ID NO: 25289 - DNA, 957 bp, DROSOPHILA
atggccagctctgcctcatgggtggaacttgggcccaaggatggactagcatatatcctttaccgcaagggttacgacgtctggatgctgaatacccgtggcaacatatactcccgcgagaatttgaatagacgcctcaagccgaataagtactgggacttctccttccacgagatcggcaagtttgatgtgcccgctgccattgatcatattctgattcacacacacaagccaaagatccaatacattggccattcgcagggctccaccgttttcttcgtcatgtgcagtgagagacccaattatgcacataaggtgaatctaatgcaggcactttctccaacggtttatttgcaggaaaaccgcagtccagtgctaaagttcctcggaatgttcaagggaaagtattcgatgcttctgaacctcctgggcggttacgagatctcagcgaaaacgaagcttatccagcagttccgccagcacatatgctccggctcggagcttggcagcagcatctgcgccatctttgactttgtgctctgcggattcgactggaagagcttcaatacgaccctcactcccatcgtggctgcccatgcctcccaaggcgcctccgccaaacagatctatcactatgcacagctccagggcgacctgaatttccagcgtttcgaccatggagcggtactgaatcgcgttcgctacgagtccagcgagccaccagcctacaatctttcgcagacgaccagcaaagtggtcctccatcacggcgaaggcgactggctgggatccacatcggatgtgatccggctgcaggagcgtctgcccaatctcgtcgagagccggaaggtcaatttcgaaggcttctctcacttcgacttcacgctctccaaggatgttcgtcctctactctacagtcacgtcctgcggcacttgtcaaccagtctcagtggatag

SEQ ID NO: 25290 - protein, 318 aa, DROSOPHILA
MASSASWVELGPKDGLAYILYRKGYDVWMLNTRGNIYSRENLNRRLKPNKYWDFSFHEIGKFDVPAAIDHILIHTHKPKIQYIGHSQGSTVFFVMCSERPNYAHKVNLMQALSPTVYLQENRSPVLKFLGMFKGKYSMLLNLLGGYEISAKTKLIQQFRQHICSGSELGSSICAIFDFVLCGFDWKSFNTTLTPIVAAHASQGASAKQIYHYAQLQGDLNFQRFDHGAVLNRVRYESSEPPAYNLSQTTSKVVLHHGEGDWLGSTSDVIRLQERLPNLVESRKVNFEGFSHFDFTLSKDVRPLLYSHVLRHLSTSLSG

SEQ ID NO: 25291 - DNA, 4196 bp, DROSOPHILA
ggccgggacattaaaagttgcttaaccttcattaggcgcccgattccgcatccgaatccgactgacggcgagatgaaatttaatatatgtcaggtcccgacatcggagggcttaatgccccatttgtgcagggcgccactgcatccaaatgatggtgccagaaaaaaaaagcaaatcaccgcaagttggcatggagctttaatcagcccagcaggcaaaagggctagtggtggtggacaggagggggtggtattaaaggggcgcaaggacactaggcaaactcaatttcgagcttgtttcacgggacaacgaccacgcccaacccgacccaccagaggcgctaatgcggcgacatggcattatccttcttcctttcgcgacttctttcccgacttttccgaccacggctgcactctccttgggtattttgataatcaaatttgcgcaaacaagcgagtggcgtgaatttgccaacgccaccggaacaaggacgaaacaaggaccaaggataataacggttgcgcctcgtgcacttgtgcaattagattgtcaaaagttcagtaactttacccaaaccgaagcgccttaaattctccattgttcttctttaaattacagtttcactatttttgattttagatggtaataaaaaaatcaagtgtatccttaagcttctacttaacataattagttatttaagttcgattaaatgaaaaatccgcaaaccacacacttgatctatatcttgtgtttgtaactgggaagctaaggcaaaaaaaaaaacacttattcaataccaaatcctggaattgtaacaataaaatgtattttcaagaagcccatcaatcttgctgtcccaactcatttgccacttgtgatgtaacatcgagagataatccatttaaaatcgctttaatccatgtgttatcaatttcatggcatttcatttgcgagcctataaaaggctcctttccgattcgctgctaaaagtagtttcagaatgcagttaggattcctttacgcattcgttgcgctcttggcgatatttcgagtggaacccagcgagggaattattgatataaacaatcaattgaacaatattataagccccccgatccttcctgcggttgagagcatattggacatcaatggcgatgcagattcaacagaagatgagcaaaaggtgcgcttgcaaagagaatccattgtaaaagattacggattcgtgtttaaacctcaaccaatagtcttggaaagtaattcaagctataagccctcagttgaatctgaaggacaggcccaatcgtttagccgagggcttgaagaagcgaagcttcaaatccaaaagcaatctcaatcacaatcgcaggctcaaggtctaggtcaatcacagcaacaaatccaatacgcgaatatagccagaactaaagtccaaaaacaattccaatcgcaacaactaggactggctcaatcgcagcaacagacccagattcaacaatcactgaatcaagatggagctaaattacgagaaaaaccttatccgcatattcaaacttcatcacaaagaaacgccgatgatccagaaagtgaagaagctgaagcaccaggaggactgtcgggaaaaatagctttagtaccaccaaatgaagagggagatcaaaagcaagaccaggctcaatcacagattgaagatgaagctgaagttcttagacaaggtctggcgcaaacggaatctcaaattcagaatcaaagacaaggactggaaaaggagatacaagggcaatcccaatcgcaggatcaagctcaatcccaagatgaggctattaatccagaatcggcaaacgctgaaaatcgatcatcacagcaatcgggagatgtagcagagaatcaggaccaagctgaatcacaggctcaagagcggtcacaattgcagttagagggtcaagaacagtcccaagatcaagcacaatcgcaagatcaatcgcaggctctggaaaaagggggtgcaccgcctctatcaccacaacaatcgctagttcaagcagaggatcaagcacaagaagatcccatagaccaatcacttcatcaagcgcaatctgaagtactaaaccaagttaagtcgcagactaacggtcaattaaaggctcaagctcaaatgcaagctcaagttctcgatcaggctctggaagatgcgcatgttcaatatcaatctcaggctcaatcacaaggaatatcactgtctcaaacgacgcaacaatcgctggtcgaaccagacgatcaagcaaaggaagaccccgtagatcaatcacttcatcaagcccaaagtgaaataataaaacaacttctgtcacagactaacgatcaagacaaggctcaagctcaagcgcaagctcagactctcgatcaggctctagaagaagctcatgttcaatatcaatctcagactcaagcacaaggaactccaatctttcaaccaccacaacttcaaccagaggatcgagatcaagataccgctttagaccaatctccgacgcaagctcaattggatgctcaatcccaatcacaagaacaagcgaatactaagcttcagcggaaatctcaagcccaatcagaagctcatggtataattcttacaaccttgaggaaagcgcaagcgcaacagcaatctgaagttcaatcaccgcagcaagaaccacttcgatctgatgatcaatcaggcgatcaagctggggatgtagcgcaaaataccgctttggaccaatcactacatcaagcccaagctgaagtacaagagcaacttcaatcacagactcaagcctcaggtacatcactaacgcaatcccaacagcaatcccaagttcaagcagttgaagcgcttgcacaatcactaactcaagcccatgctcaaatccaggagcaagctcaatcacaatcacaatcgcaagagcaagatcaatcacaatcacaagctcccaacgagaggcaatcgcaattacaatcacaacgtcaagaccaagatcagggccccaaatttgatgatgatcttgacgaacaacctgctccaaggtcatgttcacagtgccagaaagctagttacccacaatacattacggaagtggacatcgagattgacgccaagctggacacggtgagccatttcactcaagagattccatggggacagcagttactataataaaggtttctatatatttctctatcatttgacagcccaaaatgatctcaaaatatggccatcaagcagagacccattacgcattcactgccgacggctacaagctctgcctgcatcggattccgcgatctggagccacacccgtcctattggtccatggcctcatggccagctcggacacttgggtgcagttcggtccatcccagggtctggcctatatcctgtcccaaagcggctacgacgtctggatgttgaacactaggggtaacgtttactcagaggagcgcctggccggtcgggagagcgacaagatcttctgggacttctccttccacgagatcgggcagtacgatctacccgctgccatcgacttgatcctgctgcagactaaaatgccgagcatccagtacattggtcactcgcagggatccacggccttctttgtgatgtgtagtgaaagacctgagtatgcaggcaagatctcattgatgcagtccctctcgccatcagtttatatggaaggaacacgcagtccagcactcaagtttatgaaagttcttcagggtggcttcacagtaagtacaggagaagtttaaaaggtatatcatttctatatggttcgatatatattcaatattatagatgctgcttaatctcctgggcggccacaagatctccctgaaaaaccggatcgttgacatgttccgtaaccacatctgcaacaagcttatccccagtcgcatctgtgccatctttgaatttgtggtctgtggatttaacttcaacagcttcaatatggtagaaaacaagtccctgattttgttttcaagggttcagatattaccttcttttgtagacactatcccccattttggaaggtcacgcctcgcagggaagctccgccaagcagatctatcatttcgcccaattgcagggcaattctgctttccaaaagtacgactacgggctaattctgaataagatacgctaccagtcgatc

SEQ ID NO: 25292 - DNA, 2196 bp, DROSOPHILA
atgcagttaggattcctttacgcattcgttgcgctcttggcgatatttcgagtggaacccagcgagggaattattgatataaacaatcaattgaacaatattataagccccccgatccttcctgcggttgagagcatattggacatcaatggcgatgcagattcaacagaagatgagcaaaaggtgcgcttgcaaagagaatccattgtaaaagattacggattcgtgtttaaacctcaaccaatagtcttggaaagtaattcaagctataagccctcagttgaatctgaaggacaggcccaatcgtttagccgagggcttgaagaagcgaagcttcaaatccaaaagcaatctcaatcacaatcgcaggctcaaggtctaggtcaatcacagcaacaaatccaatacgcgaatatagccagaactaaagtccaaaaacaattccaatcgcaacaactaggactggctcaatcgcagcaacagacccagattcaacaatcactgaatcaagatggagctaaattacgagaaaaaccttatccgcatattcaaacttcatcacaaagaaacgccgatgatccagaaagtgaagaagctgaagcaccaggaggactgtcgggaaaaatagctttagtaccaccaaatgaagagggagatcaaaagcaagaccaggctcaatcacagattgaagatgaagctgaagttcttagacaaggtctggcgcaaacggaatctcaaattcagaatcaaagacaaggactggaaaaggagatacaagggcaatcccaatcgcaggatcaagctcaatcccaagatgaggctattaatccagaatcggcaaacgctgaaaatcgatcatcacagcaatcgggagatgtagcagagaatcaggaccaagctgaatcacaggctcaagagcggtcacaattgcagttagagggtcaagaacagtcccaagatcaagcacaatcgcaagatcaatcgcaggctctggaaaaagggggtgcaccgcctctatcaccacaacaatcgctagttcaagcagaggatcaagcacaagaagatcccatagaccaatcacttcatcaagcgcaatctgaagtactaaaccaagttaagtcgcagactaacggtcaattaaaggctcaagctcaaatgcaagctcaagttctcgatcaggctctggaagatgcgcatgttcaatatcaatctcaggctcaatcacaaggaatatcactgtctcaaacgacgcaacaatcgctggtcgaaccagacgatcaagcaaaggaagaccccgtagatcaatcacttcatcaagcccaaagtgaaataataaaacaacttctgtcacagactaacgatcaagacaaggctcaagctcaagcgcaagctcagactctcgatcaggctctagaagaagctcatgttcaatatcaatctcagactcaagcacaaggaactccaatctttcaaccaccacaacttcaaccagaggatcgagatcaagataccgctttagaccaatctccgacgcaagctcaattggatgctcaatcccaatcacaagaacaagcgaatactaagcttcagcggaaatctcaagcccaatcagaagctcatggtataattcttacaaccttgaggaaagcgcaagcgcaacagcaatctgaagttcaatcaccgcagcaagaaccacttcgatctgatgatcaatcaggcgatcaagctggggatgtagcgcaaaataccgctttggaccaatcactacatcaagcccaagctgaagtacaagagcaacttcaatcacagactcaagcctcaggtacatcactaacgcaatcccaacagcaatcccaagttcaagcagttgaagcgcttgcacaatcactaactcaagcccatgctcaaatccaggagcaagctcaatcacaatcacaatcgcaagagcaagatcaatcacaatcacaagctcccaacgagaggcaatcgcaattacaatcacaacgtcaagaccaagatcagggccccaaatttgatgatgatcttgacgaacaacctgctccaaggtcatgttcacagtgccagaaagctagttacccacaatacattacggaagtggacatcgagattgacgccaagctggacacggtgagccatttcactcaagagattccatggggacagcagttactataa

SEQ ID NO: 25293 - protein, 731 aa, DROSOPHILA
MQLGFLYAFVALLAIFRVEPSEGIIDINNQLNNIISPPILPAVESILDINGDADSTEDEQKVRLQRESIVKDYGFVFKPQPIVLESNSSYKPSVESEGQAQSFSRGLEEAKLQIQKQSQSQSQAQGLGQSQQQIQYANIARTKVQKQFQSQQLGLAQSQQQTQIQQSLNQDGAKLREKPYPHIQTSSQRNADDPESEEAEAPGGLSGKIALVPPNEEGDQKQDQAQSQIEDEAEVLRQGLAQTESQIQNQRQGLEKEIQGQSQSQDQAQSQDEAINPESANAENRSSQQSGDVAENQDQAESQAQERSQLQLEGQEQSQDQAQSQDQSQALEKGGAPPLSPQQSLVQAEDQAQEDPIDQSLHQAQSEVLNQVKSQTNGQLKAQAQMQAQVLDQALEDAHVQYQSQAQSQGISLSQTTQQSLVEPDDQAKEDPVDQSLHQAQSEIIKQLLSQTNDQDKAQAQAQAQTLDQALEEAHVQYQSQTQAQGTPIFQPPQLQPEDRDQDTALDQSPTQAQLDAQSQSQEQANTKLQRKSQAQSEAHGIILTTLRKAQAQQQSEVQSPQQEPLRSDDQSGDQAGDVAQNTALDQSLHQAQAEVQEQLQSQTQASGTSLTQSQQQSQVQAVEALAQSLTQAHAQIQEQAQSQSQSQEQDQSQSQAPNERQSQLQSQRQDQDQGPKFDDDLDEQPAPRSCSQCQKASYPQYITEVDIEIDAKLDTVSHFTQEIPWGQQLL

SEQ ID NO: 25294 - DNA, 4109 bp, DROSOPHILA
tgtcttcccgctcccgaatctttcccacaggtgcaccgccgccccacccgataaacttgccctccggctgagagctgacaattgatgccaaggatatgccgtccaaatcacgcgctaaacattattttaatgtccccaggcagtcacatatgtacatatatgcgagtcggcagcttttccctctgtatttcacatgcgtggattttccgggaatgtttaaagccctgccaacttatttcccggaatttgcgtgtgcgttaagaggactcttgggaacaaccatgatgcccgaatcgaaggaggtcgcgtccttgaaggatttgccattttagtttctgggaaaacctgcttaggttttttagtcaggtctaccctagaataaatgatgaagagttttgaattattccttgattttccgttaattggaggatttagtgttgagacccactagggttgactgagatgatggcaactctatcgttttgtaacttttcccacacggattagaaaagatgcaacactgtacgtacatggcaagtgaaaaactcgactggctctgacaattccatccaaatcgtagacaaggccggaaaaacttgcgttttgttatgtagctttcgactggtggaaaacccgttcacacatattttaaacaccccaacaaattcaaatgttttgccaacatttcgtattataatcgtagcacaaaaaataagaagcggtcgaggaattttgcgcgacccaagtgtatcaaaaaccattctgatttcaacgacggccagagttctctattttctatgaaaatcgacgagcccaagaactaaaaaaaaaaggacagcaaatctcagagtcaaagaggccattaagggagcaacgcagtcggaccagatgtgctaactaagaaaccaggtccacaaccaatcccagacaagtccccaaaaaggaggcatcagccagtgcgtaagctatccacaatacaaaagttgccacatcgcaggacatgttgtcccacgccttcaacatgcatccgcagaggcgtgtgcccgtcatccatgagcagatcgcaaagcagtgcgccctgaacattgtgcgcgtggcctccgccatgccgcaaccgcagccccgctgcccatccggtcatgtggtcgtgctcgtggagctgcgccggacggacgagcagaccgtgcaccgctaccaggtgaatgtgccgccaacgggctggaccaacgaagatttggaggaggaggaaaagcgattccagcaattggtgctccccggtacactggacagtatgggccttaagctgcctctgccagagcgtcctccgtgtccaatgcatgggcgttccatcatggagatgggctggtcaccgaactccaacatgggtccgcctcctatgctgatgattcagtcttcggtacacatcaccaacgggcaggatggcgccactgacttcgccaccttcagagagcccgttgtgactagtgaatcaccggataatttgagagcgcactttatggccagtctatatcagcagcaaccaagtccgctgagctactcggacatctgggtatcagatagtccatcgacgggcttgcccagaagtgaagccctctccacgacccattttccgcagttttatctgggcgagaacgccgagtctatggtcgctaataagatacgacctatcaatggttatcctatcaatggttatcctatcagtggttatccgacagttccgagaccagctgtgaaaaagcctcgtcacgtcgccgaactttgcttggacagcaatggagagtatgtgctcaacaagcagctgcatcaaccgttgattagccgtcaacccgatccgatcattcccagtgtctcgagcagggatccacactacttcatacaaaatcaaagccaccagttggagtccgccattaaaggactcaatggctacacgaacgtcgcccaagagtctgagaagccaaaaaatggttacaaatatcagcccgcggcctttgcagatcaacggattgtcctgcaaccaaagctgggacagggacagggacaggcgcagggagcagtacccggatttatacccaatcacctgcagagtcgtgtggccatggtcgagcctcgcatacgccaggaatcactcataaaaccacaaaatccaggtgaggaaaatccctgcaacctgatatcaatatataatttcaatattgatgtaaaaatgaatatacatttttctactttacatttagaagaacctaagctgtacatataacttgcttgcccttgtgaataacaatgaactcatcttctagatttggcgttgccgtcggaggcacatccaccggttccccaggacctgcagtcgctcttccgctggaactactgtgcattgtgtaacatggtcattcggtcgacacagagtgccattgatcactactcgtcgcgtgcccatgagcgcaggattagctcgtggctggtgcgtaagtgctacgccaaccttactggacgggatgcggacgccttgggcggggccatcagccaatcggaattctactgcaagttgtgcgacctgaagctgacctcgttgtcgcacgcacagcaacacttccttgggcggcgtcaccgaatcgcggcgcgccacaggatcagaccattcagtgatggcttctacgatcgggagggcaattgggtgcgcacggacatcaagtaccccatgtgcgagctgtgcgacgtgatcatcacctcggagtcgcaaatggccatgcacctggcgggtgcacgccaccgtagacgggtccaaattgcctatgctggtgagtccgccgggggcatggaaatgggcattggtctggtcccgttcgatggctcgcacatgtaccggatacgcggcaacggatcgctagccccaataaggcccttgggctcacagctcctccaaggctccgcttatccgctatccctgaccgatccgagtgccgtcttctactgcgatgcctgcaacattacgctcaaccatctgaagtcggtgaatcagcatgagcagggacgcatgcaccgccggaatatgcacaggttgcccgcccaagcggtcttcttcgagtgatcttgcgattggcgaagtgaatggctgggagatatccgatgaaaagtaaagtcaacccgcaaccgtaataccagtcaacgaggaaagtgaggaaggtgccgggaggaggttttaaagtacgtgatctttggaaaatatttcaaaaataaacagcatgatgtctggagttcccagtggccaaaccaacgtcctgctgcgctgtgtgttatttgcaatttatttttgatctaactacttttttttatatgttttttagtagtataataaataaacctcaaaaaactaaatgcataaataaatttggctaataaaaaactacgacattgaggtctgcaactgcatttaatatcataattttccttttcacaatagaaacgtttaaacacaaatttggggacttaaatctgtccttgtgcgatttggaatatcctcaagcgcaaacattttaatgagttgcccacaccagacattgcgttgcatacttctgggctgccggcgaaatgccggccagcaacatgttgccgcaaccagatatctgcatctgaaaatgtatctggacccggagtgcgggatttgaaggaactatcaacacctccgggcatggacttaattaatgatgcgattgcgatccactggccaccctcccattcctcacacccactcactctgcggtggctgaaatgtctggaatctttgcttttaattgccagcctgcttatgcagaggcacgctcctccggccgctggtttttggtttcatccagacggaagtggcataaaatccaatggggctgccactgtggcagtggctccagcctgcagacaatgggtggccataaaaaggagttatcgcttgacaaatatcggagagagtgtcagtcagcgagagtctagacaaaacatggcgctaaataaataaatagtagcgccagcatggaaaaaaaaacgccgctcattggcaaccgcaaaaacggaaaagggactttgctacgaaatttatg

SEQ ID NO: 25295 - DNA, 1959 bp, DROSOPHILA
atgttgtcccacgccttcaacatgcatccgcagaggcgtgtgcccgtcatccatgagcagatcgcaaagcagtgcgccctgaacattgtgcgcgtggcctccgccatgccgcaaccgcagccccgctgcccatccggtcatgtggtcgtgctcgtggagctgcgccggacggacgagcagaccgtgcaccgctaccaggtgaatgtgccgccaacgggctggaccaacgaagatttggaggaggaggaaaagcgattccagcaattggtgctccccggtacactggacagtatgggccttaagctgcctctgccagagcgtcctccgtgtccaatgcatgggcgttccatcatggagatgggctggtcaccgaactccaacatgggtccgcctcctatgctgatgattcagtcttcggtacacatcaccaacgggcaggatggcgccactgacttcgccaccttcagagagcccgttgtgactagtgaatcaccggataatttgagagcgcactttatggccagtctatatcagcagcaaccaagtccgctgagctactcggacatctgggtatcagatagtccatcgacgggcttgcccagaagtgaagccctctccacgacccattttccgcagttttatctgggcgagaacgccgagtctatggtcgctaataagatacgacctatcaatggttatcctatcaatggttatcctatcagtggttatccgacagttccgagaccagctgtgaaaaagcctcgtcacgtcgccgaactttgcttggacagcaatggagagtatgtgctcaacaagcagctgcatcaaccgttgattagccgtcaacccgatccgatcattcccagtgtctcgagcagggatccacactacttcatacaaaatcaaagccaccagttggagtccgccattaaaggactcaatggctacacgaacgtcgcccaagagtctgagaagccaaaaaatggttacaaatatcagcccgcggcctttgcagatcaacggattgtcctgcaaccaaagctgggacagggacagggacaggcgcagggagcagtacccggatttatacccaatcacctgcagagtcgtgtggccatggtcgagcctcgcatacgccaggaatcactcataaaaccacaaaatccagatttggcgttgccgtcggaggcacatccaccggttccccaggacctgcagtcgctcttccgctggaactactgtgcattgtgtaacatggtcattcggtcgacacagagtgccattgatcactactcgtcgcgtgcccatgagcgcaggattagctcgtggctggtgcgtaagtgctacgccaaccttactggacgggatgcggacgccttgggcggggccatcagccaatcggaattctactgcaagttgtgcgacctgaagctgacctcgttgtcgcacgcacagcaacacttccttgggcggcgtcaccgaatcgcggcgcgccacaggatcagaccattcagtgatggcttctacgatcgggagggcaattgggtgcgcacggacatcaagtaccccatgtgcgagctgtgcgacgtgatcatcacctcggagtcgcaaatggccatgcacctggcgggtgcacgccaccgtagacgggtccaaattgcctatgctggtgagtccgccgggggcatggaaatgggcattggtctggtcccgttcgatggctcgcacatgtaccggatacgcggcaacggatcgctagccccaataaggcccttgggctcacagctcctccaaggctccgcttatccgctatccctgaccgatccgagtgccgtcttctactgcgatgcctgcaacattacgctcaaccatctgaagtcggtgaatcagcatgagcagggacgcatgcaccgccggaatatgcacaggttgcccgcccaagcggtcttcttcgagtga

SEQ ID NO: 25296 - protein, 652 aa, DROSOPHILA
MLSHAFNMHPQRRVPVIHEQIAKQCALNIVRVASAMPQPQPRCPSGHVVVLVELRRTDEQTVHRYQVNVPPTGWTNEDLEEEEKRFQQLVLPGTLDSMGLKLPLPERPPCPMHGRSIMEMGWSPNSNMGPPPMLMIQSSVHITNGQDGATDFATFREPVVTSESPDNLRAHFMASLYQQQPSPLSYSDIWVSDSPSTGLPRSEALSTTHFPQFYLGENAESMVANKIRPINGYPINGYPISGYPTVPRPAVKKPRHVAELCLDSNGEYVLNKQLHQPLISRQPDPIIPSVSSRDPHYFIQNQSHQLESAIKGLNGYTNVAQESEKPKNGYKYQPAAFADQRIVLQPKLGQGQGQAQGAVPGFIPNHLQSRVAMVEPRIRQESLIKPQNPDLALPSEAHPPVPQDLQSLFRWNYCALCNMVIRSTQSAIDHYSSRAHERRISSWLVRKCYANLTGRDADALGGAISQSEFYCKLCDLKLTSLSHAQQHFLGRRHRIAARHRIRPFSDGFYDREGNWVRTDIKYPMCELCDVIITSESQMAMHLAGARHRRRVQIAYAGESAGGMEMGIGLVPFDGSHMYRIRGNGSLAPIRPLGSQLLQGSAYPLSLTDPSAVFYCDACNITLNHLKSVNQHEQGRMHRRNMHRLPAQAVFFE

SEQ ID NO: 25297 - DNA, 3200 bp, DROSOPHILA
atatcactgtctcaaacgacgcaacaatcgctggtcgaaccagacgatcaagcaaaggaagaccccgtagatcaatcacttcatcaagcccaaagtgaaataataaaacaacttctgtcacagactaacgatcaagacaaggctcaagctcaagcgcaagctcagactctcgatcaggctctagaagaagctcatgttcaatatcaatctcagactcaagcacaaggaactccaatctttcaaccaccacaacttcaaccagaggatcgagatcaagataccgctttagaccaatctccgacgcaagctcaattggatgctcaatcccaatcacaagaacaagcgaatactaagcttcagcggaaatctcaagcccaatcagaagctcatggtataattcttacaaccttgaggaaagcgcaagcgcaacagcaatctgaagttcaatcaccgcagcaagaaccacttcgatctgatgatcaatcaggcgatcaagctggggatgtagcgcaaaataccgctttggaccaatcactacatcaagcccaagctgaagtacaagagcaacttcaatcacagactcaagcctcaggtacatcactaacgcaatcccaacagcaatcccaagttcaagcagttgaagcgcttgcacaatcactaactcaagcccatgctcaaatccaggagcaagctcaatcacaatcacaatcgcaagagcaagatcaatcacaatcacaagctcccaacgagaggcaatcgcaattacaatcacaacgtcaagaccaagatcagggccccaaatttgatgatgatcttgacgaacaacctgctccaaggtcatgttcacagtgccagaaagctagttacccacaatacattacggaagtggacatcgagattgacgccaagctggacacggtgagccatttcactcaagagattccatggggacagcagttactataataaaggtttctatatatttctctatcatttgacagcccaaaatgatctcaaaatatggccatcaagcagagacccattacgcattcactgccgacggctacaagctctgcctgcatcggattccgcgatctggagccacacccgtcctattggtccatggcctcatggccagctcggacacttgggtgcagttcggtccatcccagggtctggcctatatcctgtcccaaagcggctacgacgtctggatgttgaacactaggggtaacgtttactcagaggagcgcctggccggtcgggagagcgacaagatcttctgggacttctccttccacgagatcgggcagtacgatctacccgctgccatcgacttgatcctgctgcagactaaaatgccgagcatccagtacattggtcactcgcagggatccacggccttctttgtgatgtgtagtgaaagacctgagtatgcaggcaagatctcattgatgcagtccctctcgccatcagtttatatggaaggaacacgcagtccagcactcaagtttatgaaagttcttcagggtggcttcacagtaagtacaggagaagtttaaaaggtatatcatttctatatggttcgatatatattcaatattatagatgctgcttaatctcctgggcggccacaagatctccctgaaaaaccggatcgttgacatgttccgtaaccacatctgcaacaagcttatccccagtcgcatctgtgccatctttgaatttgtggtctgtggatttaacttcaacagcttcaatatggtagaaaacaagtccctgattttgttttcaagggttcagatattaccttcttttgtagacactatcccccattttggaaggtcacgcctcgcagggaagctccgccaagcagatctatcatttcgcccaattgcagggcaattctgctttccaaaagtacgactacgggctaattctgaataagatacgctaccagtcgatctttcccccactttacaacctttccctggcactgggcaaggtggctcttcaccgcggagatggcgactggttgggatccgaatcggatgtccttcgactggagcgggacctgcccaactgcatagaaaacaggaacattcgcttcgaaggattctcgcacttcgacttcacgatttcgaaggatgttcgatccttggtctacgatcgcgtaatcgatttgtgcggttcaaattgaacttttagcttacgaatgaaatattagcaaatcaattaatagatttgcttggcacatatgtgaaattgccttttcctaagggctcggaaataaatataatttttattaagggaaattaaatatatacaaatattttacaattttcccagctgtaataaagaaagacttttattatgataatcgaaaatatggaaatgaataaaccgacaaaagtcgccagtgtttagggtgaattcaggccagagacaattgttatgtttttatccgtgttatttaatgaggtcacaaatcaatcaaacaaaatactaaagaataacgatacctatcatactaagtacaatcttcttttacgattaattatgatcaacctgtaattcaagctcctttaaaaagttacgatatctttacatctagctgcttgaatacaaaaaatgtatttattaaacccttgatcaaggttgccctttgttaaatattactttagtgatgctcgatcgatatgttaatctagttattcactccaagcatggatattttaatttcagggtattttatcattaacgctataaaagagttcgatttcatttctgccttcgagagtagacaagaagggaacgaaatggcgatcgcatttaatattgcgatctatgcaataattttagtgggtagtttggtacccagcaagactcaggaatgggttccatatgcatatcctgtagatgaaaatcaaggattgaatgaacagacacagtggcagtcacaatcacagattcaggtaaacaaagagagtgcaaagcagctaagatccgttggacctagaacaaccactacctaaaaaacccaagcttaccgtcaagggtaaactcaatcacagtcgcaagatttattgtaaggacgtgcttaatcacctataaactacaatcacaacctctcaatcggaagcctaatcaagcgtaattcccatttcagagtcaagggacgtcacaatcacaaagtcaag

SEQ ID NO: 25298 - DNA, 1075 bp, DROSOPHILA
gcccaaaatgatctcaaaatatggccatcaagcagagacccattacgcattcactgccgacggctacaagctctgcctgcatcggattccgcgatctggagccacacccgtcctattggtccatggcctcatggccagctcggacacttgggtgcagttcggtccatcccagggtctggcctatatcctgtcccaaagcggctacgacgtctggatgttgaacactaggggtaacgtttactcagaggagcgcctggccggtcgggagagcgacaagatcttctgggacttctccttccacgagatcgggcagtacgatctacccgctgccatcgacttgatcctgctgcagactaaaatgccgagcatccagtacattggtcactcgcagggatccacggccttctttgtgatgtgtagtgaaagacctgagtatgcaggcaagatctcattgatgcagtccctctcgccatcagtttatatggaaggaacacgcagtccagcactcaagtttatgaaagttcttcagggtggcttcacaatgctgcttaatctcctgggcggccacaagatctccctgaaaaaccggatcgttgacatgttccgtaaccacatctgcaacaagcttatccccagtcgcatctgtgccatctttgaatttgtggtctgtggatttaacttcaacagcttcaatatgacactatcccccattttggaaggtcacgcctcgcagggaagctccgccaagcagatctatcatttcgcccaattgcagggcaattctgctttccaaaagtacgactacgggctaattctgaataagatacgctaccagtcgatctttcccccactttacaacctttccctggcactgggcaaggtggctcttcaccgcggagatggcgactggttgggatccgaatcggatgtccttcgactggagcgggacctgcccaactgcatagaaaacaggaacattcgcttcgaaggattctcgcacttcgacttcacgatttcgaaggatgttcgatccttggtctacgatcgcgtaatcgatttgtgcggttcaaattga

SEQ ID NO: 25299 - protein, 355 aa, DROSOPHILA
MISKYGHQAETHYAFTADGYKLCLHRIPRSGATPVLLVHGLMASSDTWVQFGPSQGLAYILSQSGYDVWMLNTRGNVYSEERLAGRESDKIFWDFSFHEIGQYDLPAAIDLILLQTKMPSIQYIGHSQGSTAFFVMCSERPEYAGKISLMQSLSPSVYMEGTRSPALKFMKVLQGGFTMLLNLLGGHKISLKNRIVDMFRNHICNKLIPSRICAIFEFVVCGFNFNSFNMTLSPILEGHASQGSSAKQIYHFAQLQGNSAFQKYDYGLILNKIRYQSIFPPLYNLSLALGKVALHRGDGDWLGSESDVLRLERDLPNCIENRNIRFEGFSHFDFTISKDVRSLVYDRVIDLCGSN

SEQ ID NO: 25300 - DNA, 3399 bp, DROSOPHILA
ctgaagtgcccctcggtggtgaccaagatagacgactccaatccctactggctgggcttcaaaaagggactagatgaactgtaggtaaacaaagattgtgtagttttcacttcataatttgttgaaattttccagaggtttgatcacccatacacgagttttccccggcgccaccgatagcttctacgtccggcaagtgggaattcccgctctgggattttcacccatcaacaacaccccggtgctgctgcacaatcatgatgaatatttgcgggccgacacatatctgcacggaattcaggtgtacaggaagctcatcccctctattgctgattcataaaatgttcaagcgaagttccactcataaatggaaatcaatatgctacaattggtcttatcgcttatgagtaatgtttttggctcgatgagtgtaggaccaaaattaaatgtttaaatggtgtgactactacaaatcatatctgtttctaaacaaatgaaaatcacacactgataacacgagtttcagaagagagtttttgtcatggactttgccctcattcaatatccaataaatcgtcacaactattgatatcgttctcaaaaactaacgtaaccttcacgtaaaggggttgtattttatatatacatcataattatcaataattacattaatatgtattctattttcttatcaaaccaaatacaaattataataacccattttttcgcagaccataaacgacggtggttgagttttattggtgttatgtgaactttatcgaattggctaccgtttgctattagacatttgttttggtagaattttgtacaagaatatgtgctgttatcatttctataacaaccgagtttgataacgaactcattatttgataataatacgaagccaaggccataaaaccaaaatcacccaacacacaaaaatttctgtataagttcattttttgccaactgcggcacattcgagtttggtgactggcagcgaaaacatatccacaaaatgagcaccgaaaagtgggaggacaacgaggaaatcaaaatattccgcgaatatttgcgcatagctacggtgcagccaaatgtggattacagtaaggattccccaaggaattcacagaagagcactactcatgtacatcttaacttctagccgaatgtgtggagttcctgaaaaggcaggctcacagcctggatcttcccgtggatgttatatatccagtggagaagaagcctgtggtgatcatcaagtggttgggcaccgaaccggagctgccctccgtcattctcaactcgcacatggatgtggtgccggtgttccgtgacaagtggacccacgatcccttcgctgccgatatcgatgaggagggcaggatctttgcgcgcggtactcaggacatgaagtcggtgggcacaggatatctgggtgccatccgcctgcttaaggcaagtggtgtccagcccaagcgcaatttcttcgtgacctttgtgcccgatgaggagatcggcggcgagctgggcatgcaggagttcgtcaaaacggaatactacagcaacatgaatgttggtttcagtctggacgagggcggcaccagtgaaatagatctgttctatgtcttttatgccgaacgtatgcgatggggtgagtaatccttgagacacatctaggactagaatctaaactatatcccctctttggcaggtctcaagctgaatttcagtggaacctctggacacggctccatgttgctgcccagcactgccggcgtgaaactgaactatgtgctcaacaagctgacggagttccgcgaatcgcaggttcagaggctggccaatgatcagacaatcaacatcggtgatgtgacaactatcaatctcacccagctgagcggtggagtccagagcaatgtggtgcctcctcatttcgaggctgtcttcgacatgcgtctgtccatcaccctggatgtggttgcctttgagaaacagatccacgattggtgcgaggaggcaggtggcggcatcgagatctccttcgacgagaaggaaccctacgtggcacccacaaagatcgacgactccaatccattctggctggctttcaaggctgccaccgatgaactgtaagtctgaatcgaatgctcaacaatgcgtgttcctaatacgatttgtatgtttatagtggccttaagatctaccccattgtctgccccggtgccaccgacagcaggaacattcgagctcagggcattccagccttgggattctcacccatcaaaaataccaccatgcgcatccatgatcacgatgagttcttgggcgccgaaacttatttgaagggcattcaaatatacaagaaaattttgggcaacctagcgaatgtctaaaaactaaatcgaaataatacatgaaaaccttatcaaaataaagattgatgattttgttataagttagtacaaaacttcctggccttttatcttatctcaacgaataccttaatcaacttaagatctgaagaatacaacttgctatccttgcgacagcaagtagataatggatgtatctacattttgctgtatcatcatagatagcaagttggaagactgggaagcccattaaatccaaaataatcacttgattttttcaaatcgaaggtcatcaatcaaagcttcgtcattttaattgaatttgtcataattttacgatatgatggaaaatattgaaaaatacatgacaacttaccaagaacttgaggtttcaaaggttgaggttgcatagataatacgcaatgaactcatttctgtgtaagttgcatagataatacataatgaactatttgccgcttagaaaagttacttattcggataatagacgtgtgggttttgcagataagggcgttactatcgcaaccacatacacttttgataagcatttaaattccttgaccataaacatgaaagcaatcagtgtgattataaaagcacagacaatctttgttgcagctcagttgctgatgacagaagagtgtcgaaatgagctcggaaaagtgggaaaacaatgaggaaattaagattttccgggaatacttgcgtataccaacggtgcatccagatgttgactatagtgaggacttaattttaattctttaaagtttgcgttataatgtctttcaatgtctagctgcctgtgtggagttcctgaaacgtcaggctagctccctaaatcttcctgttgaagtggtttatcctgctgttcaaacgaagcccgttgtgatcatcaagtgggaaggaagtcaacccgaactatcgtccattgttctcaactctcacacggatgtggtgccagtttttcgagagaagtggacccatgaacccttctccgccgata

SEQ ID NO: 25301 - DNA, 1221 bp, DROSOPHILA
cgaaaacatatccacaaaatgagcaccgaaaagtgggaggacaacgaggaaatcaaaatattccgcgaatatttgcgcatagctacggtgcagccaaatgtggattacaccgaatgtgtggagttcctgaaaaggcaggctcacagcctggatcttcccgtggatgttatatatccagtggagaagaagcctgtggtgatcatcaagtggttgggcaccgaaccggagctgccctccgtcattctcaactcgcacatggatgtggtgccggtgttccgtgacaagtggacccacgatcccttcgctgccgatatcgatgaggagggcaggatctttgcgcgcggtactcaggacatgaagtcggtgggcacaggatatctgggtgccatccgcctgcttaaggcaagtggtgtccagcccaagcgcaatttcttcgtgacctttgtgcccgatgaggagatcggcggcgagctgggcatgcaggagttcgtcaaaacggaatactacagcaacatgaatgttggtttcagtctggacgagggcggcaccagtgaaatagatctgttctatgtcttttatgccgaacgtatgcgatggggtctcaagctgaatttcagtggaacctctggacacggctccatgttgctgcccagcactgccggcgtgaaactgaactatgtgctcaacaagctgacggagttccgcgaatcgcaggttcagaggctggccaatgatcagacaatcaacatcggtgatgtgacaactatcaatctcacccagctgagcggtggagtccagagcaatgtggtgcctcctcatttcgaggctgtcttcgacatgcgtctgtccatcaccctggatgtggttgcctttgagaaacagatccacgattggtgcgaggaggcaggtggcggcatcgagatctccttcgacgagaaggaaccctacgtggcacccacaaagatcgacgactccaatccattctggctggctttcaaggctgccaccgatgaacttggccttaagatctaccccattgtctgccccggtgccaccgacagcaggaacattcgagctcagggcattccagccttgggattctcacccatcaaaaataccaccatgcgcatccatgatcacgatgagttcttgggcgccgaaacttatttgaagggcattcaaatatacaagaaaattttgggcaacctagcgaatgtctaa

SEQ ID NO: 25302 - protein, 400 aa, DROSOPHILA
MSTEKWEDNEEIKIFREYLRIATVQPNVDYTECVEFLKRQAHSLDLPVDVIYPVEKKPVVIIKWLGTEPELPSVILNSHMDVVPVFRDKWTHDPFAADIDEEGRIFARGTQDMKSVGTGYLGAIRLLKASGVQPKRNFFVTFVPDEEIGGELGMQEFVKTEYYSNMNVGFSLDEGGTSEIDLFYVFYAERMRWGLKLNFSGTSGHGSMLLPSTAGVKLNYVLNKLTEFRESQVQRLANDQTINIGDVTTINLTQLSGGVQSNVVPPHFEAVFDMRLSITLDVVAFEKQIHDWCEEAGGGIEISFDEKEPYVAPTKIDDSNPFWLAFKAATDELGLKIYPIVCPGATDSRNIRAQGIPALGFSPIKNTTMRIHDHDEFLGAETYLKGIQIYKKILGNLANV

SEQ ID NO: 25303 - DNA, 4126 bp, DROSOPHILA
agcatttttgctttttttttatttttagctatccaatccacttttttttaagcacaccggaaatatatcaggggattaagtttgctcttggcataaaattattaaactggaactaaaactggaaatgagtttagtaagtcgcttgaaaatgtagttttataagaaagggttttgatcccataatattactgttacaattttaggaaatacttttttgatctacatatattatgcaattatatccatccttaaaaagttcacaattatttgagaattgtaatagaaatgatagcatgctataatcaataaattattaacacgtcatataagtaactaacgacaattttccacatttctggaaatgtggaaaaatgtaaataatgtctgtgtttataggaactgagtggtttacttttcacatagcaatcacatattcgctcaattactccaatcattcaatcggcaatcagacactctttcaggccaagacaatggacttggctcaaagagacccattggttctgatcgaattcatttaatataatatcaataacaaatgcgagagcgtatcggagcagatcgttgaataaccgcgaattatgagaggtcgtcgagttgtaaccaactaattgccataccagaaagccggtttgccactccgggccaagccgaaactgaaaagccacagcatcgaaaagcaaaatcaatatcaaaaggtgaacacaggtgagtgtgcgttgaaagtgaaattgaactggagagtggggaagtgccatttaagagatgatttctgggccaagtgcgcggcgcctcgtcttcccaggccggcccacctgcacttcaggtccatcaaaagtgccgaacccgaggagcagttggtcgcacacctgggccgccagaagaagcgaaagaaacccaagccaaaaacccgggccgggaacagtttttcaaacgccttaaaagcccgagacggagctgcaaacggtttagttcctcgccgcaaacaaaactagtcacaacaacgtggagcggaagccagcagccccaaagtgaaccagttaacatacagagatacggtctgaggtaaagacactcagagaaaaacgtttaaaaaaatgcttaaaatttatggtgaatttccaaatataaaacaaacaaaattgaagtgaactatcaattttagtgcaattgtcaaaaagaaaaggaaaagtgggaatgactataactttaactaaagcatcgttcaaaagctaatataaacagtgaataacatatagctctaaaacagcttaaaaatattcagttatttgtaagatcccttcctctcttaatatcgtaaaaataaaccaccttttttctctgcagaaagagagagcttttggaatcaggagcaagttttttcagagccaaagtgaacgtagctttcggcacgttcgaaccaccacactcgtttgattcattgccagcgagccactgaaccgcctcgcattccgcgaataccaaaaaaaaacaaaaaatccgccgaaatgctgcggacctttgccattctgctactgatcgcagtttacagccacgcaagagctgcgccacagaaaacaaccgtttcgccggagtatgaagccaccgaggacgtggactcctccacctatatgtccgtggaggagagcaccattacggtagatgtcgactcggacgtgatattgaccaccaatcctgagggggaggccttcaccgaagccagcccgatagttacgacggaggagccacttccggattcggtggtgcaacagcttgagatggagcgtgcacaggaggaggagctcaagaatcccgaaaagccggaagatgacctcgattcggactcggaggaggaggatcagaccacatcaacaagtactgagcaaccaaagtctgaagtttccgagagcaccaccaagcggagctacaaattcggagctaccacactgccaccgaatttcatcacaaccactagaagagtggagatcaccactattctgccacaggacggagccacgactcctaatgctgagaccgaggaaaccaccgtcaaggaggaggtcaaaaccataaggaactacttcgagcggaagcccgcacatatggaagagattgaactggacatggccgagaaccgaatggaaacgaccacaaatgaacccctccatgagaacgtagagctttccatgattatgaccaccgacgccgcattggtggaagaggataaaaagaccggaattgagactgatcaggcagagacggtggaaaccacagtggtgcctgtttaccaatacgttagcaatgcagctcctatcgtcactgaaccacaaccggaatcaactacggtggtgcccacagtaaaggaagaggcagccaccactgagggtgccattgaggaaactacaggtgtgtctttaatctaaaaatatatttgtgacttatttatttacgaaacccatttccttgccaacaatatgttaactaaatacatatttttttcacagaactgccactagttttgtcctctgcatttaaacccaccagtgaggctgaggagaccactgaaacagctccaagcacctccacttcaaccaccgagactgttctgatcaccaccaaggtgggaacattggagaacttccagccagagaccaccacgagtgctttggacacaacatccactacgagcaccactgaagctccaactacgacgagcaccacaagcagcactgaagatccaactacaacgagcaccactgaggctccaactacgacgagcaccactgaagctccaactacgacaagtaccaccagcaccaccagtgctccaaccacaaccaccaccacagaacgccccattcagacgcgagctccgcgtgtggagcgaatcttcaactccgacggagtggaggtgctctacggatactcgtctgtggtgcggaccaaccgctcgtgagtggtcagcaccacacgaccttgtcaaggtcggacaacttgccattatgtggagattgatgctcgggttgttttaggcaattttcaattctaaacgagttataaacaaaaatatttaaattttatgcgacgatccgcacagtgtgataaaccaaaaaaaaaaaagaaaaacaaataacgatgcgtaagaagatatcgatggaaatacaaatccgcacagacattaaacaaaacaaaaataatattgtgcaaaatttgtgaacggtctgccaaatgacaaaaatgaggagaaatgcgtgagataagcgattttataaattataaataaaacatgaacacccatctttcgttttgtgtttgttttggcgattgcacaaagcgttagtaggtattttaaacattgttgatccgaaaatcgatcttcaaatgggacataatattgccgcaacgaaacgtgattggctgaggtgatccaaaagataccctctaatagtagcagagggaaagataatttaaatcatgtttatgtagggtctattcctaaaattgaatattcaatatagagtttttaatatagagcattcaatgtagagtattcaatatagtatagacttctttcaaatctaattcactgaatatgaatcattttgtatattgttcgagcagcgcacccaagaaatcaagtcaaacacaagctcagacattcagcagcccacaagctgatcgctgcccacctgcaaaaaaaaaaataaaaaacagaaaaagaaaaaccggcaatctcctcaagagttgtcgtcatacatttttgggctttatgttccggcatggacgcagttagtccgatggacagacacgtggaccagtcaagctgactggtttggtgtggtcaggtctgcaggcttgggtcgcctggcagattattcattcatcgatcggcttgtgaaaatccatgaatccatgaagaagcacagggcttttttgggggttttgcaatgagtatcacgtttgctatgcctcaccctcgatggaatttgaaagcaatcggctataaaacaaacaccaagcgctaatttccatttgaacttgagcggcagtcgctaaactgcatgttgaatatggttcgaatgaatgcggatcgaaggttttggcgata

SEQ ID NO: 25304 - DNA, 1746 bp, DROSOPHILA
caaacaaaactagtcacaacaacgtggagcggaagccagcagccccaaagtgaaccagttaacatacagagatacggtctgagaaagagagagcttttggaatcaggagcaagttttttcagagccaaagtgaacgtagctttcggcacgttcgaaccaccacactcgtttgattcattgccagcgagccactgaaccgcctcgcattccgcgaataccaaaaaaaaacaaaaaatccgccgaaatgctgcggacctttgccattctgctactgatcgcagtttacagccacgcaagagctgcgccacagaaaacaaccgtttcgccggagtatgaagccaccgaggacgtggactcctccacctatatgtccgtggaggagagcaccattacggtagatgtcgactcggacgtgatattgaccaccaatcctgagggggaggccttcaccgaagccagcccgatagttacgacggaggagccacttccggattcggtggtgcaacagcttgagatggagcgtgcacaggaggaggagctcaagaatcccgaaaagccggaagatgacctcgattcggactcggaggaggaggatcagaccacatcaacaagtactgagcaaccaaagtctgaagtttccgagagcaccaccaagcggagctacaaattcggagctaccacactgccaccgaatttcatcacaaccactagaagagtggagatcaccactattctgccacaggacggagccacgactcctaatgctgagaccgaggaaaccaccgtcaaggaggaggtcaaaaccataaggaactacttcgagcggaagcccgcacatatggaagagattgaactggacatggccgagaaccgaatggaaacgaccacaaatgaacccctccatgagaacgtagagctttccatgattatgaccaccgacgccgcattggtggaagaggataaaaagaccggaattgagactgatcaggcagagacggtggaaaccacagtggtgcctgtttaccaatacgttagcaatgcagctcctatcgtcactgaaccacaaccggaatcaactacggtggtgcccacagtaaaggaagaggcagccaccactgagggtgccattgaggaaactacagaactgccactagttttgtcctctgcatttaaacccaccagtgaggctgaggagaccactgaaacagctccaagcacctccacttcaaccaccgagactgttctgatcaccaccaaggtgggaacattggagaacttccagccagagaccaccacgagtgctttggacacaacatccactacgagcaccactgaagctccaactacgacgagcaccacaagcagcactgaagatccaactacaacgagcaccactgaggctccaactacgacgagcaccactgaagctccaactacgacaagtaccaccagcaccaccagtgctccaaccacaaccaccaccacagaacgccccattcagacgcgagctccgcgtgtggagcgaatcttcaactccgacggagtggaggtgctctacggatactcgtctgtggtgcggaccaaccgctcgtgagtggtcagcaccacacgaccttgtcaaggtcggacaacttgccattatgtggagattgatgctcgggttgttttaggcaattttcaattctaaacgagttataaacaaaaatatttaaattttatgcgacgatccgcacagtgtgataaacc

SEQ ID NO: 25305 - protein, 449 aa, DROSOPHILA
MLRTFAILLLIAVYSHARAAPQKTTVSPEYEATEDVDSSTYMSVEESTITVDVDSDVILTTNPEGEAFTEASPIVTTEEPLPDSVVQQLEMERAQEEELKNPEKPEDDLDSDSEEEDQTTSTSTEQPKSEVSESTTKRSYKFGATTLPPNFITTTRRVEITTILPQDGATTPNAETEETTVKEEVKTIRNYFERKPAHMEEIELDMAENRMETTTNEPLHENVELSMIMTTDAALVEEDKKTGIETDQAETVETTVVPVYQYVSNAAPIVTEPQPESTTVVPTVKEEAATTEGAIEETTELPLVLSSAFKPTSEAEETTETAPSTSTSTTETVLITTKVGTLENFQPETTTSALDTTSTTSTTEAPTTTSTTSSTEDPTTTSTTEAPTTTSTTEAPTTTSTTSTTSAPTTTTTTERPIQTRAPRVERIFNSDGVEVLYGYSSVVRTNRS

SEQ ID NO: 25306 - DNA, 3337 bp, DROSOPHILA
atgtggtaggcaaaatgatggagttccgcaaatcgcaagtgcaaaaactagctgacgactcatccctcgaaattggtgatgtgaccactgtgaatctcacccaactgaggggcggagtccagagcaacgtggttcccccattgctggaagctgtatttgatatccgcattgccgtcaccgtggatatccctgcctttgagaagcagattcgcgactggtgcgaggaggctggcggcggcattgaactggagtttgagatgaaaaacccctttgtggagccaacaaagattgactcgtcgaatgcctactggctggcctttaagaaagcactcgatgacctgtaaggatgagaagctctgacaaaaggcatggctctgatatcctttctccttgtttctttcagtggcctcaagacacgggttcgtgttttccccggcgccacggacagtcgttatattcgctacgcaggcattccagctctaggattctcgcccattaacaacacccccatcctgctgcacgaccacgatgaattcctgaaagccgatacctatttgcacggcattgaggtttacaagaagctcattcctgccgtagctgatgcttagcgaactcaattcaattatgaaataatgcatttaatgcttacttgtcgatgtttattgtaataactttaaacaagcaggcttataaaaacccatttaaataaacaatgtatgaataaataagccagtccatagtccataccattaatggtgagcaaaaaaaggaaatttaaatgaaaatgaataagtttatggtttactattatggctttgctagataacattaagctcttagcgcaaagatgaaaatccgcaaattgtgggctcttctaatcaagtagcttaaagtcaacaactgataatgccattaagtcaatccacactcagacttcaaaccaaacagcacggtggattacaagtcagttcctttagaaccacggggcattcaactcaaaatgtgcacttgcacggaacaatggaagaacgacgaggaaataatcattttccaggagtatttgcgcattccctcggtgcatccagacgtggactacagtaaggatttgtttttccgctccttggattttgttatccctatttcccttgcagctgcatgcgtggagttcctaaaacgccaggctaacaaacttaatctccgcgtggacgtggtgtatcctgttgtgccttcgaaaccggtggtgattatgaagtggctgggcaagcatcccgagctgaaatccattatattgaactcacacatggacgtggtgcccgtgtttcccgaaaagtggacccatgagccgtttggtgcccacatagacgcccaaggccggatttatgcacgcggtgcccaggacatgaagtccgtgggatgtcagtacatggctgcggtccgtgcactcaaagccagtggctatcagccaaaaaggaccgtatatttgacttttgtgcccgacgaggaaactggcggacacatgggcatggctgaattcgtcaagggtgattacttcaaagccatgaatgtgggctttagcctggacgagggcatcgccagtgaagatgacacttatcctgtattttacgccgagcgtacattgtggcgtaagtcttccatttgcatcagtagcaatatattctgattcattttatacccctgcagaacttcgatttaaattcagtggcacttcaggtcatggatcgctgctgcacaaaagcacggctggcgaaaagtttcactttgtgatggataagctgatgaagttccgagaaacccaggtcaagctactggccgaggactcctccttgcagtccggtgatgtgaccactttgaacctgacccaactcaacggtggcgtccaaagcaatgtggttccccccgtactagaagccacttttgatattcgcatagccatcaaccagaatgccgatgcaatggagaatcagattcgcgagtggtgcaacgaagtcggtggtggagtggaactggatttcacgctgaagtgcccctcggtggtgaccaagatagacgactccaatccctactggctgggcttcaaaaagggactagatgaactgtaggtaaacaaagattgtgtagttttcacttcataatttgttgaaattttccagaggtttgatcacccatacacgagttttccccggcgccaccgatagcttctacgtccggcaagtgggaattcccgctctgggattttcacccatcaacaacaccccggtgctgctgcacaatcatgatgaatatttgcgggccgacacatatctgcacggaattcaggtgtacaggaagctcatcccctctattgctgattcataaaatgttcaagcgaagttccactcataaatggaaatcaatatgctacaattggtcttatcgcttatgagtaatgtttttggctcgatgagtgtaggaccaaaattaaatgtttaaatggtgtgactactacaaatcatatctgtttctaaacaaatgaaaatcacacactgataacacgagtttcagaagagagtttttgtcatggactttgccctcattcaatatccaataaatcgtcacaactattgatatcgttctcaaaaactaacgtaaccttcacgtaaaggggttgtattttatatatacatcataattatcaataattacattaatatgtattctattttcttatcaaaccaaatacaaattataataacccattttttcgcagaccataaacgacggtggttgagttttattggtgttatgtgaactttatcgaattggctaccgtttgctattagacatttgttttggtagaattttgtacaagaatatgtgctgttatcatttctataacaaccgagtttgataacgaactcattatttgataataatacgaagccaaggccataaaaccaaaatcacccaacacacaaaaatttctgtataagttcattttttgccaactgcggcacattcgagtttggtgactggcagcgaaaacatatccacaaaatgagcaccgaaaagtgggaggacaacgaggaaatcaaaatattccgcgaatatttgcgcatagctacggtgcagccaaatgtggattacagtaaggattccccaaggaattcacagaagagcactactcatgtacatcttaacttctagccgaatgtgtggagttcctgaaaaggcaggctcacagcctggatcttcccgtggatgttatatatccagtggagaagaagcctgtggtgatcatcaagtggttgggcaccgaaccggagctgccctccgtcat

SEQ ID NO: 25307 - DNA, 1224 bp, DROSOPHILA
atgtgcacttgcacggaacaatggaagaacgacgaggaaataatcattttccaggagtatttgcgcattccctcggtgcatccagacgtggactacagtaaggatttgtttttccgctccttggattttgttatccctatttcccttgcagctgcatgcgtggagttcctaaaacgccaggctaacaaacttaatctccgcgtggacgtggtgtatcctgttgtgccttcgaaaccggtggtgattatgaagtggctgggcaagcatcccgagctgaaatccattatattgaactcacacatggacgtggtgcccgtgtttcccgaaaagtggacccatgagccgtttggtgcccacatagacgcccaaggccggatttatgcacgcggtgcccaggacatgaagtccgtgggatgtcagtacatggctgcggtccgtgcactcaaagccagtggctatcagccaaaaaggaccgtatatttgacttttgtgcccgacgaggaaactggcggacacatgggcatggctgaattcgtcaagggtgattacttcaaagccatgaatgtgggctttagcctggacgagggcatcgccagtgaagatgacacttatcctgtattttacgccgagcgtacattgtggcaacttcgatttaaattcagtggcacttcaggtcatggatcgctgctgcacaaaagcacggctggcgaaaagtttcactttgtgatggataagctgatgaagttccgagaaacccaggtcaagctactggccgaggactcctccttgcagtccggtgatgtgaccactttgaacctgacccaactcaacggtggcgtccaaagcaatgtggttccccccgtactagaagccacttttgatattcgcatagccatcaaccagaatgccgatgcaatggagaatcagattcgcgagtggtgcaacgaagtcggtggtggagtggaactggatttcacgctgaagtgcccctcggtggtgaccaagatagacgactccaatccctactggctgggcttcaaaaagggactagatgaactaggtttgatcacccatacacgagttttccccggcgccaccgatagcttctacgtccggcaagtgggaattcccgctctgggattttcacccatcaacaacaccccggtgctgctgcacaatcatgatgaatatttgcgggccgacacatatctgcacggaattcag

SEQ ID NO: 25308 - protein, 408 aa, DROSOPHILA
MCTCTEQWKNDEEIIIFQEYLRIPSVHPDVDYSKDLFFRSLDFVIPISLAAACVEFLKRQANKLNLRVDVVYPVVPSKPVVIMKWLGKHPELKSIILNSHMDVVPVFPEKWTHEPFGAHIDAQGRIYARGAQDMKSVGCQYMAAVRALKASGYQPKRTVYLTFVPDEETGGHMGMAEFVKGDYFKAMNVGFSLDEGIASEDDTYPVFYAERTLWQLRFKFSGTSGHGSLLHKSTAGEKFHFVMDKLMKFRETQVKLLAEDSSLQSGDVTTLNLTQLNGGVQSNVVPPVLEATFDIRIAINQNADAMENQIREWCNEVGGGVELDFTLKCPSVVTKIDDSNPYWLGFKKGLDELGLITHTRVFPGATDSFYVRQVGIPALGFSPINNTPVLLHNHDEYLRADTYLHGIQ

SEQ ID NO: 25309 - DNA, 4793 bp, DROSOPHILA
aaagcagagaagcagagaagcatcgagcgataaaaagatttttgttgcttgatttcgttgcaccaaaaaaggcaacggcaactcccattaaatgtcccaaaaaggcaaaggcgccgtgttgcacattgtttgtgtggctgttgctgctgcagattgttgccgttgatgtttttgctgaagattgctgctgttgcagattgctggcgcccaccaagtggaggaaatcggcgaccaccgcgggtagtttactccgtctctgcactgccacgcccaccgcccgcccactggggcagcgtttgaggcatattcacggttttggccaggccttgccatccgctccaacgcttatcgtatcctatccattcagagatgacttgaaatatacttaacaattaagtgtgtttttatactaattaaaatgacacttgggtatgaaaaaaccctcaatacaatttatattctacataatatatattccgtctacataattccttttcatgatcttgggtcgcattcctcttccttaaattgttaaatattcaaaactacacacataaagtaagttaaatgctatagtttatagatattaaatcatagataaatgtggaaacggccaagtaggcatctctatatacatgatgatgccgaaccaagctgcagcatcaataaagcagctgcatttaattgcaatgcccatttaggactcggcccctcgaagggcgcttttccctcctgattctttcgttggtggggtcccaagcatcgtgccccatgagccccccgcttttttgcggcagctgccttgcatttcttacagcatttttgccgcgactagtttgcgggcaacacgtgcaactgcaactgctgcccagaatgccagcatcccatcaccccaactcacccagaactgggtttccactgcggttgttgtatcaattaaagctgcgcttgatttttcacttgcgctgggcggacgacaggtgcaaagtgctacaacagctcagaaccatcggaaccaggcccaatcggcatcttgcagtgatttgaattcttccctgtccttgtctagcttaattgcgggcctacagcaacggtcacggatatagtggttaaatcttatcagtccttttacttggagcttagtaacttgtataggaacttaattcctgaacttatttgttatacattaatttaagactcatcagttccagtggagtagaatctttcatgaagatgagcaagctcatcatcagatgaatgtaatgaaccgtagatacagcactactggaaaatccccataaacaaacaaacaaacaaaacttaataaatgccaatgctgaatatataatatatatatgccagaattcgtaatattgtattactatgattttattgatatttactatcaaattataattgcgcatttaacaaaggcctaaaactagactagaaacaaatattcgagatgaggacgtcatttgcaatgtgattcaatggtcaaacatttcgctgggagcttggaaacgatttgaggctcccgtctgaagactgtggcgtagctgattgaccagatggtaagcctccctattgttttgacaataggcaaagaacgacacgtcagctagcatgcgcatgatgttggtcaagtcggtgcgaggattgcttccaataggcgcattattatttgcagctctggaatcaggaggcccaggaatataaccactagacagtacagcaggcacagggttttgtccttggtaactggagctggtggtcggctgataaatggacgtggtactggtcggagtcggaaccaccggagtagctggatgatgatttggtcgagtgtaccaatacgaattggctggtcgcggatccactggatagcgggagttgattacagaagtagtaactaccgagagaggtcgtggattttcgtcgtggaatactggtgcgggcagcagaccagagggttgggtagaaactggagaagcattatagggagcagtcgccggattgctggatgttgtggctggagcaggtggtgatggtagcctatttatttgataggtataggtaattcctggtgcatcggcatccggaaaattcggtgaatttgtagatgttgtcactgatgtgggattatagtcatccatgtctgtggttttcggctgtaggctattgcactgttttcctggcggtaacaaccttagcttttcagctgttcccagtgccttgaaaggttcagacgggtcaacttgctcctgcaacaggtcagtgcgaacccgaatcatattctctgcgtagggaaccaggtcactacgaattcgtatcgcatttattggggattgggtgggaacttctggtgttatactcatatcaggattattttctttatgagcctctgggtcagttgaaagtatgtccttcaggagcggcatgttctttggtgattcgttcaatatgtttatatttttgttcgcttctccataaatttcagaaggcacttctgggtcggatttacttggaacattaatatctaagcttgctaagggatcacagggtgaagtttctttctcgatcaagtcgtcggaatttgatacctctttcatgatatcactttggttaggctccctccaatctgttggggtttttggttttggattatcaattataagagattcgcgggcttcttcttgactttcatcaaccataactatgttggatgtgataccgcctgcttcgccacttgtataattttctagctttggtcgtctgctatacgttttcaaacagcgctggaaggcaaaagatgatgtttggccttgctttgatttcttgggagtcaaaaactcttttatcgatctctgttttttggcgttatgagatgggctatcctcctcccggcgatttcgcttcctcaaagacgcttcatccaattttccattgatgtgatcagcatagtcctgcagggtgatctcgcccagctcatcgtcaaggaccataagcgaggaattggggataactgattccacgtccagtgtttccatatcacgaaaacgaacaactgatttctcaacttcttcatcgctgcaaaggtccacaactgatgggttagctagtactttctgtttctcttggttctgagctggtgactcggattccatttctttgtcctgctgggatttctcttcacctttcacctcgtccagccgtttcaaccatttagctaccatcagttcctcgaataacttcgcaggtagcgacttctttaccttcaggttgttccgatcaaagcgaagtaagagctgccaggtcctgcgatggaattgaattgatgattcgtgatgtatagaaggtgaacatataatagtgactgctactcacgctaaattcttgcccagttcactgcacccttgcagttttgatagttttggcagattaggagagacggcaaatgtgcaatctaatatctattgacaattgctgcatcacacatattgaaaatattatcgataagccttattagtttttgcagttttgcaagcaatacagtgcggatcctgagaggtctcactgtgtcttcaaggttcgcctttagaagtcaaatggctcgaagaagtctaagcggaatgtagaatgtagccaaatatagaacacctaccacagatcgcattagtttctttctttcctacgatatttactccttcaaaatcgatgcgcaaatggtttttaaggaccagcgcctgcgcagcacttgaccaaattcaggtaacggcgaatcttattttatccacttcaaccacatacgatagaaaatattaggggagagatgtgtgcgtgacaattagatagtggattgtacatccgatagctcaggtaaacaacaaccaaacatacctaaaacttaaacaactctttaatttaacgtaaaaataatcgatgacattttatgagcgagttccgagaaaacgtttaataaattattaccccattgggtgttcgtgttcgcacaacataagactctcatctctacattttatgagtgaaacattcgtttgagtgaaagtcgatttccaaccctgttatgatttggcgggaaacttaaatacttggatgaaattttttgtataaagagacatttcatattttgtatttgtagtacttaaattctagttttctagtttgcaatgcctcgttcatcgttattatggcctgagtgatttcgaactttctttagagccgtatgcttagttctgtttttttgaagacttcaatgagatgttcattaaatcgtagagtgacaaatgcaggaatatcaaatgacgtaatagtagaagtcaagggtttagaaatgatttgccacggtgctctgttgttcgccgcggtttactcgcaggttgcccatgcatccctcaaacaggatgtctgcgatggcctttcgtgccagaatccgttgcgtgggggacatttcctcgtactggatagcccaggatctggccagaacttcggaggactcgctgagttgcatgggtgcagttcctcgttcgttctcgggatctgtttgaatcgaggatgtgggttctttcgtttccaatgaatttcccaaactattttcctctttgacttcacactgcccttcttccggctctatgatctccaattttggactgagcagggaaccctcttcggattgcggggcggtcggttcggactggtagttgaaagcgttatcatccttgatcggccaatcacaaacgctttccgtgttgagatctggatttttcaagggg

SEQ ID NO: 25310 - DNA, 1838 bp, DROSOPHILA
ataaaataagattcgccgttacctgaatttggtcaagtgctgcgcaggcgctggtccttaaaaaccatttgcgcatcgattttgaaggagtaaatatcgtaggaaagaaagaaactaatgcgatctgtggtaggtgttctatatttggctacattctacattccgcttagacttcttcgagccatttgacttctaaaggcgaaccttgaagacacagtgagacctctcaggatccgcactgtattgcttgcaaaactgcaaaaactaataaggcttatcgataatattttcaatatgtgtgatgcagcaattgtcaatagatattagattgcacatttgccgtctctcctaatctgccaaaactatcaaaactgcaagggtgcagtgaactgggcaagaatttagcgacctggcagctcttacttcgctttgatcggaacaacctgaaggtaaagaagtcgctacctgcgaagttattcgaggaactgatggtagctaaatggttgaaacggctggacgaggtgaaaggtgaagagaaatcccagcaggacaaagaaatggaatccgagtcaccagctcagaaccaagagaaacagaaagtactagctaacccatcagttgtggacctttgcagcgatgaagaagttgagaaatcagttgttcgttttcgtgatatggaaacactggacgtggaatcagttatccccaattcctcgcttatggtccttgacgatgagctgggcgagatcaccctgcaggactatgctgatcacatcaatggaaaattggatgaagcgtctttgaggaagcgaaatcgccgggaggaggatagcccatctcataacgccaaaaaacagagatcgataaaagagtttttgactcccaagaaatcaaagcaaggccaaacatcatcttttgccttccagcgctgtttgaaaactgacctggttccctacgcagagaatatgattcgggttcgcactgacctgttgcaggagcaagttgacccgtctgaacctttcaaggcactgggaacagctgaaaagctaaggttgttaccgccaggaaaacagtgcaatagcctacagccgaaaaccacagacatggatgactataatcccacatcagtgacaacatctacaaattcaccgaattttccggatgccgatgcaccaggaattacctatacctatcaaataaataggctaccatcaccacctgctccagccacaacatccagcaatccggcgactgctccctataatgcttctccagtttctacccaaccctctggtctgctgcccgcaccagtattccacgacgaaaatccacgacctctctcggtagttactacttctgtaatcaactcccgctatccagtggatccgcgaccagccaattcgtattggtacactcgaccaaatcatcatccagctactccggtggttccgactccgaccagtaccacgtccatttatcagccgaccaccagctccagttaccaaggacaaaaccctgtgcctgctgtactgtctagtggttatattcctgggcctcctgattccagagctgcaaataataatgcgcctattggaagcaatcctcgcaccgacttgaccaacatcatgcgcatgctagctgacgtgtcgttctttgcctattgtcaaaacaatagggaggcttaccatctggtcaatcagctacgccacagtcttcagacgggagcctcaaatcgtttccaagctcccagcgaaatgcccgcaattaagctagacaaggacagggaagaattcaaatcactgcaagatgccgattgggcctggttccgatggttctga

SEQ ID NO: 25311 - protein, 449 aa, DROSOPHILA
MVAKWLKRLDEVKGEEKSQQDKEMESESPAQNQEKQKVLANPSVVDLCSDEEVEKSVVRFRDMETLDVESVIPNSSLMVLDDELGEITLQDYADHINGKLDEASLRKRNRREEDSPSHNAKKQRSIKEFLTPKKSKQGQTSSFAFQRCLKTDLVPYAENMIRVRTDLLQEQVDPSEPFKALGTAEKLRLLPPGKQCNSLQPKTTDMDDYNPTSVTTSTNSPNFPDADAPGITYTYQINRLPSPPAPATTSSNPATAPYNASPVSTQPSGLLPAPVFHDENPRPLSVVTTSVINSRYPVDPRPANSYWYTRPNHHPATPVVPTPTSTTSIYQPTTSSSYQGQNPVPAVLSSGYIPGPPDSRAANNNAPIGSNPRTDLTNIMRMLADVSFFAYCQNNREAYHLVNQLRHSLQTGASNRFQAPSEMPAIKLDKDREEFKSLQDADWAWFRWF

SEQ ID NO: 25312 - DNA, 4702 bp, DROSOPHILA
tgtgtgtttagaattacctcatttttatttcgtacttcatacattgttaaatgagcttcaatctaaatttacgctagttaaagtattttcataatatattttaattatctcaaaaattctgtgtggtatgtgtgtgagtgatagtgtgcacgatcatcgcctaaataaattatgttcatataggtaattaattatttattatactcgtacgtactaactaaagaatgactgcgttttcattttgacacttttctccgctcgtcagctttgaaattcactcgagcttttgattttcctttctaggaaaatccaacgataattatcaagactcaatgtcaaagtaaaattagtttaaattgtatataaattatggttaaagtaggagtaaattgctttaaattaaaactttgccatattcagtctaaacttaaaagcttttcaattcaaagaggactacacagttggccattgcattaaaccatttctcaaaatcatttgcattcgttatgaaataaattacaaattaaataaaatcatgatgggataaaacaagttaaataatttctccttcgtttatgttgcgacttattcgatgattttcaaatgtgggggacaatggttgattttgttttcagtgcacttagctcagtacgtataaattagaagtataactaagcaatatggattgccagataatggaaacatttcgttattgcatttggggagcccagctttgctaatctgctaatcatacattagttagttaatgattacgttcgtaaagttgataaattcaaaggtcgttctatgcagtctatggaaatgataatggaatcttcttcccctttcttctggctacttaaacctaacaatctgccgccattctgctcacttgaatggttggatattcgctgctttgcaggccactaggccccatggtgtccgtatgtacaataaaagggttaaatatgtcaagtagagccactccaggcggcgatcctcagtagatgcgctggaggtatagacgccccaatggcagggcccgctccacaaagctcttctcggccctcgccgacgatttgtccagtccactggcactggtcctggccaccgtttcctggctctcgtccagcttcaggctcttggcatcggccttgggatccacaccgcccacctggcccgctcccgagcccagttcatcgatctccagcgtggatacggcattggttttgggggtgacgggctccctgatttccccactgccaagctcaacctcctcaccctggctgatcttctccagctgcagatcgctgccgttctggatgcgcgtctccccggatatatcctcgccactgtacatcagcagtggcaccagggagctcttctcgtgaatggatgagccggacgccatcatttcctcggtggtagaagacttatcctggtagagatcgatgtcgccaccaccacttccgctgccactgccatccaggctggtatcggtcgccagtttcacatgcctgtggtccacctcaaaggggctgggtatgctccgaggctcatccttctcggactcggctatgtcctccagctcgacgagcggaaagtttacgtctcgcagactgaagtcgtcctcgggcagcgagggataggctggattggattccacttgaggtacatcatcatccacgtccatgtgatgagtggagctcactggcggcatctcactgcttactgcgacggaatcggagctactctcgacgtctgacttggtggtgtttgggctgatcacggtttggatggtgggtgaggtctcgctgggctttggtggtgcatccgtggtcactttgataacggttccaggtccctcggtggtggatatgatgtggtaaatgttatcactgcccgccgtatcgggttcaagttccgcatcggacggctccaccagcgaatccctgaagccattctgcacgaatatgggcagtgcggattcctcgtagttcttggtgctcagtgtggatccctcggtggtgtactcccgcttgatgttcaccttgctgggatcgttgctggtcagcggctgcagtccgtcggcgttgtaggtgaccagcggcttcacctgttgctccactatgatgctgctgctaggcgagaggggtctttcgatgtagccaaccgaggcgatgagctttaagctctcggtgccgcctggaagtgctttctggttgccgtcttggctgggcattggtgttgctgtcgagtccgttggtgttgctgccgtcgcggatgatgttgctgctgctgctgcagtgctgctgcttgccggtgctgctgctgttgttgctgctgctcccgtcgctcctgctgatcctgctgtggtggtgtccagggagctgctggttactggtgctgcaggtccctcggtggtgagcatcaaattgctctgctttctggtcggaatcgatggcttggctttgttgtcatcggttatgcggatctccgttggcttggtgatctctttgatggtgatgttccagttgaatccagccggctgagccagtgccatcggtttcgccgtggtagtagtcgagctgctcacgggttcgctggccagcggtggattattatcgagaactgtgggtgttggggaaacgagttgatttagtgaacccactggttgatcaacatgcagcattggcaaactcacttggacaattgtcgtactgcggacagcagcgaccgggcacgtatttgggcatgcagtcatctcgccggtaacaggtcaccgggctgcaaacaatctcgccgcctgcaacaaatggagtgtgtttatgccaatagtcgaaaattctacgaaaatattgctgaatgagggtgtgtgtcattcaatatttgctacactacaaagaaaaaacattgaagctcttgggtaccgaaaagtggagatgatctaaccaaaatagttatttatttacagattaaataaattttttttgatatcttaaagttttacccatgcgttgtatcatcagaaatgttaggtgcattatttggcataaggaattatatgaagcgaggtcataaaactttcccaaggctctgcacacccaaggattccaccataattacccccagttctcggctaattggcagacagctggatgcactcacctttgcagtagcacacggtgcacggcgtgtccggggcaaccaatttatcaccattggcataagttttgccatccttttcgcaatctggaaaaggagcgcagtggagatttgcataaatgcatccgaaagtgggtgcgccggcatggattcgctctcacttaccgcatttataatcggggcagcagtggccagtgcgctggatggcacgacagctagtttggtattggcaacgggtcgcggattcggccacccaaagtccatcctgcaggcattggcctataagcaatttgaatggagcgcgacgcggcgcattgtttgccatttagtttttgggtgtgggtggcggtatgggattagttttcggctcttaccctgcggctgctgctgctccggagatgcggaggatggggattccgtggagctggccgcgaggccgtggaatccgcctacgctgccgccactggagctgctcgacaggatgctcggcgtgaccgcgaccgtgacgactgcggaggatgcactgctgctttccatggcgggcactgcgaaaaagtagagaacacgagtgtgaaatgcgagaagatagaaaatcaacaaaggccattgaatagaatgcactgcactggggcaaaaaatcggcggggaaatcctgaaaatccgggctcataagaaataaagttccataacacccacgcacatttgaaaggcttaaaatattttgcatttatttatgtggtccccaaaatctgtaaattccacaacgcccacatttttgaaagttacgaaggtgaaaggattttacatctatatatcaaacatgttcttttttagtttgttcacttgacccgaggcaaacaagcacaggtgtgttaagattaccaaagttttgacagctatattaagtgtttttattgcttagactatatgaaatttgaataagaaattaagccttgatataagttttactaacataaaatggattttttaactaccttgtatagtactgcaacatggctaaaacaacaaaaacttgaattctattcattctttaaatacatatccctattttagcgtcaacagataaatacgtatctttattatgttttgaatgaaattgtacttcaacattttcccggaatgcctttttttaaagtttttttgcactactttaattagtaaatatttttgtagcttaacttgcttccaagaatttttcctcatagttcactttaattctagaaaaatgcttgtgcagattattaacgaacactgccctccactttgtgcacagctatcgggatcttcctttaatgaaacgaaaatgcaaattgccttcatgttttaatttacaaatgtaattggattatgttgttctcggatttttgcagagtgtatccaggagcggaaaggcatttgctggaggattggtgcgaggggtgagatgaggtgatgggcagttgcccttcgccccctgacactgggtacatatttgaatgaatgacattttgataacagttgtttgttgttcctgttg

SEQ ID NO: 25313 - DNA, 2098 bp, DROSOPHILA
atggaaagcagcagtgcatcctccgcagtcgtcacggtcgcggtcacgccgagcatcctgtcgagcagctccagtggcggcagcgtaggcggattccacggcctcgcggccagctccacggaatccccatcctccgcatctccggagcagcagcagccgcagggccaatgcctgcaggatggactttgggtggccgaatccgcgacccgttgccaataccaaactagctgtcgtgccatccagcgcactggccactgctgccccgattataaatgcgattgcgaaaaggatggcaaaacttatgccaatggtgataaattggttgccccggacacgccgtgcaccgtgtgctactgcaaaggtgagcggcgagattgtttgcagcccggtgacctgttaccggcgagatgactgcatgcccaaatacgtgcccggtcgctgctgtccgcagtacgacaattgtccaattctcgataataatccaccgctggccagcgaacccgtgagcagctcgactactaccacggcgaaaccgatggcactggctcagccggctggattcaactggaacatcaccatcaaagagatcaccaagccaacggagatccgcataaccgatgacaacaaagccaagccatcgattccgaccagaaagcagagcaatttgatgctcaccaccgagggacctgcagcaccagtaaccagcagctccctggacaccaccacagcaggatcagcaggagcgacgggagcagcagcaacaacagcagcagcaccggcaagcagcagcactgcagcagcagcagcaacatcatccgcgacggcagcaacaccaacggactcgacagcaacaccaatgcccagccaagacggcaaccagaaagcacttccaggcggcaccgagagcttaaagctcatcgcctcggttggctacatcgaaagacccctctcgcctagcagcagcatcatagtggagcaacaggtgaagccgctggtcacctacaacgccgacggactgcagccgctgaccagcaacgatcccagcaaggtgaacatcaagcgggagtacaccaccgagggatccacactgagcaccaagaactacgaggaatccgcactgcccatattcgtgcagaatggcttcagggattcgctggtggagccgtccgatgcggaacttgaacccgatacggcgggcagtgataacatttaccacatcatatccaccaccgagggacctggaaccgttatcaaagtgaccacggatgcaccaccaaagcccagcgagacctcacccaccatccaaaccgtgatcagcccaaacaccaccaagtcagacgtcgagagtagctccgattccgtcgcagtaagcagtgagatgccgccagtgagctccactcatcacatggacgtggatgatgatgtacctcaagtggaatccaatccagcctatccctcgctgcccgaggacgacttcagtctgcgagacgtaaactttccgctcgtcgagctggaggacatagccgagtccgagaaggatgagcctcggagcatacccagcccctttgaggtggaccacaggcatgtgaaactggcgaccgataccagcctggatggcagtggcagcggaagtggtggtggcgacatcgatctctaccaggataagtcttctaccaccgaggaaatgatggcgtccggctcatccattcacgagaagagctccctggtgccactgctgatgtacagtggcgaggatatatccggggagacgcgcatccagaacggcagcgatctgcagctggagaagatcagccagggtgaggaggttgagcttggcagtggggaaatcagggagcccgtcacccccaaaaccaatgccgtatccacgctggagatcgatgaactgggctcgggagcgggccaggtgggcggtgtggatcccaaggccgatgccaagagcctgaagctggacgagagccaggaaacggtggccaggaccagtgccagtggactggacaaatcgtcggcgagggccgagaagagctttgtggagcgggccctgccattggggcgtctatacctccagcgcatctactga

SEQ ID NO: 25314 - protein, 136 aa, DROSOPHILA
MESSSASSAVVTVAVTPSILSSSSSGGSVGGFHGLAASSTESPSSASPEQQQPQGQCLQDGLWVAESATRCQYQTSCRAIQRTGHCCPDYKCDCEKDGKTYANGDKLVAPDTPCTVCYCKGERRDCLQPGDLLPAR

SEQ ID NO: 25315 - DNA, 5796 bp, DROSOPHILA
actttcacggaagcgaatctcttggcggaattcaacctcaacgcagcgcgacgcgaactcaactgaagaccaattcgaaaactgtcaacggttcgaaccgccgattacaaaaaccacatcgaccaacttctgcagagaccctgcagcaaataaaaaaaaaaaaccgaaataataaaaagaatgccgaaatacgaaaaactttcgatcagacaacaacattgcgcactgtgacgtgttagcttgttttgtttacatttcgattacgttttaccttttgggccagttaattaaatatgggtacaaatcagtgggtctccgaggagggggagggtgtacttcgaatgcgtagggcgtatcaatcggaaacaagaaacttatcaagtgcagcaagtacagtaaagcgtcgagccagagacaaaagcaattgtcaaattgaaccatgttcaatggagcccacaaatatcttatcaatcacaaatgttcacacaattgtaaaattgtattttatgatgacataaagcccaatggtttataataatttatttatctgagattattttccaaaaaataacagcaatcaaagagatataagtagataaatgttgataacattttgatacctaaggtactttgtttacacccactgttgtaaagtaggtccaaacatttccaccaaggtaattatcattatttatcgtctctcattttaccatcgaaatagcttaataaccgaaacctttttggccaaagccacaacaaccaacactggtaacagataactttattgttggccatcaaaagaaagtaaaagtgtcgaccagttgtggcggctgcctttttgaattatacatatatatatgtatatttttttttaatggtttggctaccgcattacataattggcattttggacgactgccaaggtaaataaagcatttcgctgggcaattattttctgttatttctgttataatgggccttttttatataattttggcggtcattcaattacgtagggcaagcgcccatcgaaaaactgttccatatgctcgattaatttgtcgttgaccaggctcttaacatcgccggaaatcaggaagtccaagtgattgaacttcttggagttgatcctccgcacactcttcaccgacctcagcattctggcatatatggcatggactccttccggtgtggcaatagcatccgtttccccgaaatacaatatgatcggcactgtgatctggcttatattgtaactgagggcctccacgctgtgatatacttgcaagttctccgcggtcccaaagtcataggagatgaaatcacccgatttccatatctgctgcaagtgtttgatttcccgcggagaaccgccttgcagtagatactcgtagttaaaggcttctaacagctggaaaaggatattaaagctagtgggtattcaaattcattaaataagtataaatgttttacctttttgttgttttgagcgctgcctaccaactgcttggcataatattcgcagagatctcgtttggcttggcatacttttcgaaagtagccaggtggaaagatctcgaacttgtatgccttctggcgtttctgcaagcaagaaaattgttatatttataaaatattaaatattcagactaaaatgcttattaatataaaaactttatttatttatatattcattttatttaagtagcattataccacaagttcaatttttagtttatcttctataaacaaatgtattacttttcttctataaacaagtgtatttcttttcacgaaaatgcattgccctttttataaaatttccactggaatagattccactcagctgattggttttactttccatagcatcaagatccaccaaaacatatttagagtcacaccagggggttatcaccgagtgtacctatttctctaaataatctcaaagtctctcctactctcagaagttccctaatctctctaatgtcaagcggtcaggctgttatcagcaacactgagaaaaacatatggtttcctcgagcactcaactttgtaaaaccaacatttaatcttgattgtttcatactattaccatatctaacctttattgaccaaaaatcctgatatacaaatcaaatacaaatttttgtacttcaaagctagttaaatttctttaggtgtatctcaaagatctgctcttggcagtgctctcgatccgggcttcagtcactgcgcgatgttcagactaagctatcgactgcccgctgccctcggcggtctgcgccacgcctcctccgccgccggcgagggtcagcgcaccgccctctacgatttccacgtgcagaaaggcggaaagatcgtgaacttcggaggctatgctctgccggttcagtattcggatcagagcattatagcctcccacctgcacacccgtcaggtgggctccattttcgacgtgtcgcacatgctgcaatcccggattttcggcaaggatgcggccgcctgtctggagtcggtttgcactgcggacattctgggcacgccggagggcagtggtagcctcaccgtcttcaccaacgaggcgggcggtatcctggacgatctcatcgtgaacaaagtcagcgaaaaggagctatatgtggtctccaatgcggcgatgaaagaacaggacatgggcataatgaagacagctgtggtatgttcgtattacattgcacttttgaaggataaatatatgtttcgaattttcaggataattttaagtcccagggaaaagacgtatccattgaattcctcacacccgccgatcaatctctagtagccgtccagggtcctcaagtggccaaggaactatcgaaactacttaccgggaaagcttctctcgatcaactctacttcatgagttccttcgtcaccacattggctggaatccccaatgtcaggatcacgagatgtggttacaccggtgaggacggtgtggagatatcggtggcatccagccaggcacagaagctcactgaatctcttcttgagagtggagtcctcaagcttgctggtctgggagccagagactccctgcgattggaggcgggtctctgcttgtatggcagtgatatcgattctaagacgacacccgtggaggcggctcttgcctggttggtaaccaaaagacgccgcacaacccgcgattttccaggagctgacgtgatccttggccagctgaaggagggcgtcagccggaggcgagtgggtctccagatgttgggcaccaagccaccgccagctcgttccggagtggccatctttagtcagggtcagcaggtgggtcaggtgactagtggctgcccaagtcccagtgctggacgcaacattgctatgggatatgtggcagagaatctaaaagcacccggcacaaaggtggagttcaaggttcgagacaagctctacgaggctgaagtcactaaaatgccatttgtaaaagctaactattataacagaccaaagaaataaatgtgcagcacacactgataatgattaagtgaattctaaatggaagtttaagctaaggttgacaagtctttcgccaacaccaagcccgctaactaaacaaagtaaatttccagcaattaccttgataaacttcatgaggcgccgcacctggaaggagtcgaatctcacctgacgatgcagtcgagccagtggtgccagtgcctgtatgagctgaatgcgctggttaaaacgtggatgcaccgcacaaagcaccaggaacgcattaaaggcctaagagcatattttgaaggatgagttagccagctgaaagtaagcagcgctcacctgggagtgtccaattagtaccacctgatggtgtatttgctcctcatcctggccaggacctcctctgctggccagttgctcgccgcctgtgaccttcgccatgtggtcaattatggctggcaaatcgtaggcgccatgctcgtggaagctgaagcgccagaattcgaccatcacgtcggtcaagtcgatgtgctgccgtccgtagggcgacactccgcgcagattcgccagccacacgtcgtattcgcggtggtgcagctggaaggctgtacaccgaaagaaaatatagggtttcatataaagatatatcaaagtgcaattcagtaaggccacaatgtacgaaagttgttgaaatacaattttaagttttagattccaccaaaacccactgacaatgcatttttttaagatttacctactgacttgtatttaggtgtacaaatgttaccggaagtgcccacctgcttacccaaactccgttcgggccccatgcacacccatcccagagaggaacccagcaatccatggaccaggagcaccggcttagctcccagtcgcggcagacgctgcaactgcagctggtagccatccgccgtggtcacattgtgcacttcgtggctgacattctgggcctccagccagtccatctaatggccatgcatagaatgcacagaaaaaagtgcaatatatattttaattttaatttttaacagattaaaaaaattctatttaatactctctactctatttactctcctactccatgcattcattttcatgataagttttgaatatttttccgaagtgtattaaggagaagggagcgtagtcgctattagcccgacactcaccgtagtccacttgtatcgcgactccggcggcgaggagtgggcatttctgccaatggcacacacgatgagcattactttgatggcgccgatgcagcctgacccacccatttcaccctttcaactaaatcgggagccagccccacatgggtgcactaattggccggttccccagatcatctttacacttgactaggcactcaaaaatgtaatttatcgagcaatatggttagttgagtgcgaaaagctaatagctttacatatttcaagctgcgtattattaagtatttagaatgcttctttaaataattacagaactactcgcttgtttttattattaaagtcttacacaaatatatatacagtggctaaagtaatacaacttcaatctataaactttattccctgcatccagacaagtgccaggcaatgccattcgcaattaaataaagcttaatggaaaacttaaataaaatagattgaataataccagcgcatcagcatcagcatccgcacacatccgcatccgcagtgggatctgtatggcaacactcacaattaattgcagtcccctggtcttatcactcagtaatattcatactcgcaaagagggggaaaagtctgcgcaaaaagaaaatgcgaaagcactcggccatccagttgcaattgcaactcaggagcagactgcaccccctgtccaccgcgtttgtttacttatcgctgggagattacaattgactacccggacaacaaaaaatcgcggcgaactttattaaaattacgctcgaaagtgacaggatgggtaaggaagcaaccgaataaaaggccaaagccaggagcaaacgccaaattaaatggaatacaaaaatgtgaatgcaaaaaaaaaaaaaaaataataaccacaaggctagggggtggcaaggtgtgggcttcgcgaatgcgactggcaacaaaggacgtgcactggccacaggtcctgcgcccaggatccgatccactgctgcccgttcaactttcctcccgtcatatatggttgaatatggcccttttggacatttggtccacgaagtcacacagcgttctccttttggcatctctgccaaaggatacg

SEQ ID NO: 25316 - DNA, 1242 bp, DROSOPHILA
atgggtgggtcaggctgcatcggcgccatcaaagtaatgctcatcgtgtgtgccattggcagaaatgcccactcctcgccgccggagtcgcgatacaagtggactacgatggactggctggaggcccagaatgtcagccacgaagtgcacaatgtgaccacggcggatggctaccagctgcagttgcagcgtctgccgcgactgggagctaagccggtgctcctggtccatggattgctgggttcctctctgggatgggtgtgcatggggcccgaacggagtttggccttccagctgcaccaccgcgaatacgacgtgtggctggcgaatctgcgcggagtgtcgccctacggacggcagcacatcgacttgaccgacgtgatggtcgaattctggcgcttcagcttccacgagcatggcgcctacgatttgccagccataattgaccacatggcgaaggtcacaggcggcgagcaactggccagcagaggaggtcctggccaggatgaggagcaaatacaccatcaggtggtactaattggacactcccaggcctttaatgcgttcctggtgctttgtgcggtgcatccacgttttaaccagcgcattcagctcatacaggcactggcaccactggctcgactgcatcgtcaggtgagattcgactccttccaggtgcggcgcctcatgaagtttatcaagaaacgccagaaggcatacaagttcgagatctttccacctggctactttcgaaaagtatgccaagccaaacgagatctctgcgaatattatgccaagcagttggtaggcagcgctcaaaacaacaaaaagctgttagaagcctttaactacgagtatctactgcaaggcggttctccgcgggaaatcaaacacttgcagcagatatggaaatcgggtgatttcatctcctatgactttgggaccgcggagaacttgcaagtatatcacagcgtggaggccctcagttacaatataagccagatcacagtgccgatcatattgtatttcggggaaacggatgctattgccacaccggaaggagtccatgccatatatgccagaatgctgaggtcggtgaagagtgtgcggaggatcaactccaagaagttcaatcacttggacttcctgatttccggcgatgttaagagcctggtcaacgacaaattaatcgagcatatggaacagtttttcgatgggcgcttgccctacgtaattgaatga

SEQ ID NO: 25317 - protein, 413 aa, DROSOPHILA
MGGSGCIGAIKVMLIVCAIGRNAHSSPPESRYKWTTMDWLEAQNVSHEVHNVTTADGYQLQLQRLPRLGAKPVLLVHGLLGSSLGWVCMGPERSLAFQLHHREYDVWLANLRGVSPYGRQHIDLTDVMVEFWRFSFHEHGAYDLPAIIDHMAKVTGGEQLASRGGPGQDEEQIHHQVVLIGHSQAFNAFLVLCAVHPRFNQRIQLIQALAPLARLHRQVRFDSFQVRRLMKFIKKRQKAYKFEIFPPGYFRKVCQAKRDLCEYYAKQLVGSAQNNKKLLEAFNYEYLLQGGSPREIKHLQQIWKSGDFISYDFGTAENLQVYHSVEALSYNISQITVPIILYFGETDAIATPEGVHAIYARMLRSVKSVRRINSKKFNHLDFLISGDVKSLVNDKLIEHMEQFFDGRLPYVIE

SEQ ID NO: 25318 - DNA, 106416 bp, DROSOPHILA
atcactcactgccttccgactcgactgcatttggttcccgtttcttaagccataagttgtgtatgatatatagtaatatatatactattcgagattcattaaaatttagttaggtataactaggtatagtttatgttctgtatatagactcgtatacatcattcattcattcaatgcttccactttggtttctcatttaaggcgttctgtacaatttgcgtttaaacgtttctcaagtcaattgttgggtcgattatttaactactttatatatatatagtctaataaattactagcgatgcgtactcgtactcgtatatcgtatagatttgatgtataattgtgaaaatgttcgatttaccttcaattcaattacaatttctattcgcaaatacagcatttgcaattaggcaaaattttgtaaataaatttatcgcttcgcttgttaggtgcaaaaaattcgcataaggttttcatccttggggattcttagagaagttcgtatacatttgagtgattgtttcgagtgtagtcggtaagaagtaagatgagtttgcctaagtgtgtctgccaatataatgttgggttcccatgcaaaagaagctcaagtttcaagtttcaaagagcaggctaagtaatccatcttatttcgcgtttgtattttcaaaataggtactcgctttccacaccttcaatctattcatagttaataagtttcaaactaaatacttaaatttcgatttcctgccctctgcatttacgtatatcgtttccatttaagattaatcagattcacaagcaatgtaaattcaattcagttccttagcatgtgacgtgtctgccaaaagatccaacacgaattaaaataaagatatcctgggtggagaggatataaggctcttggagtctatatcccccaaaaataatagggtttgcccgcgctgaaaagaaatcataaccaatcagaaccaaaattgaaataaaaacactaagaaagattattttttcaaatattttctcatatatgcattttgttttcatcaataaatcatctctcgtacaattctatcctcttgaattagttaaatttaaatcattaattaagtaaatgtaataataataataatagttaactaaggattaacgcatacaaattagaatacataaataaaagtacagtttaaacgtaagcataatttattattaatattacgtatacatattcagagttatgtatatgcctatgccattatttgtatcgtattgtttgtatctcgcataaaatccatacatatacatattaatatatatattcaatcggtccatgtgcttcagttggaaaataatactacaagatccgcacacaatgaaaactctaaaacaaattcaaatcatatgatgttcctcctctagttatcatctttcccttttgtaaaaattaaattccatttcgtttttacttaagtgttgcaaggcataaaattagaaaacaattcaatttatttaaattaatcgtctaaacgtaggatatagtagggtgctatcgcctaagcatagatgtacgtatgtatctatagtttgttaccgatttgttttgtatgtacatatacatatgcgtaaaggtaaagaaaacaaagcgttactacaactgacttgttacataactaaaatgaaactaagaactagcaaagaattctcctctcgtccttccattgcgcaaattatattcaaacttgatcgaatttcgctgctgctattggtttggttttcccttgattttctggtggggcggggcatttcctaaattcaaactaaaatctataacaaatccgaacgaaatgtcgcttaaattttgtatatccttttcaattttgtatcctttctggactacgcctaaattcatgctttaaaatgttgtgttttgcactctgcagctttgaacataaaaatttgcatttcaaattgttgtgttgcgtctcggtgtgtctgtgtgtgtgtgagttctggttttgttttgtttatttaacttatagctaagcgtttcatttttgtttatgcataaatatttcttttttcttgcttttattttcccttttttttctgcttttgttatttacgtttagggtatacacaaatagtttcttttaaaatttctgggtttctttttgatgtggtttgttgttgctggtgctttttgttgttctggattctgctgtttcttttgttgttattgttgtttttgtcgctgttgcttagctaatatcattttgtatagattttactacgattgttgttctttgcttgttgttttttgtttgctattacttgactgatattgccacgcggtatgctttagttttgggatcggatccatgtgtattcagctccttcgtacttcttccttcgtcgttcgtctccagtgttgggtggtggtaaaatttaagctatgattttggcttgatcgcttccggcggagagctctctggttccagttccagtttcatttccggttccgggtcggggccggattacgaggattacaagtgctggccgtagtactcggcgggcgggtaatgcggatagccctggtggaagcccggatctccgggcggacggtgcatcatatgcgcctggctgtccatcatgtagcccatggcgtcgtggccatatccggagggacctggatgcggtgtatagactgttggtgagtcgccaagtggaaaaaggcggattccgcggatgaacggaaaaagagaaaaaatgcacataattagaaattgcgttcgaatggatggcaaaattaagggaggcgatccttacggctcaccgcacttagttcttaactagataagcgctatttcatagttatggagatttttttttttttttgatttaattttgaataagagcgatagttacctgcacgattcgattgatcgatcattggctggacaattctccgccgcgcattgatgaacctgtaagcagacagaagatatcgttttagtggcattccctaattaaacacaccgaaccgaaccgaaaaggaacgatgaattatgcatgaattggcccggatttgccgggacctcggtgctttatgtgcccaacttagccataaaccaaaccaaatctccgccagagtcacactttttgctgccctgccacggccagatcaatgggcctcgccgactttggttatgattgtcgtttaataaatgcaataagaaataataagcagttgcccgttgatccgcaggatcagtggcgacacaaaaagcgcaaaaagagcgaaatgattaaagcagaaagccgccggcgggccgagtgacagtcacttggccaagacgatgttacccgcaagctttgacacggcctcaaaaaaaaaaaaataaataaataaataaacacaaaaaacctatatataatgccaaacaacgaaaccacacagcaaaaagcccaaatggggaaaaggaaaaacatcagaagcatcagttacagttgcaccgggaaaaactaatgccccaagtgggaacgatgtccctaaaatattggtgaatatgaatgacaatctacatttggatttatatatatttcgattttagaattgatttagcgaaaacatgataatttcggctcggagcaatacttaaagaagtaaaaaggcaaatttcttgcagtgtatagctacagctacaaggacggcaatggatacagctactcgcattagccaaaaaccaagttagccgaggttaatgcacttgccaactgggaactcctccttcaaacggattgaaaaagggaacatttcaccgctcgcccctttgacttttcaatttgcagttcagttcgtttgcgatctgcccctgatttttgctcattttggggcggaaattgttgcaacgccctgaaatcgtttatcaaaacgacaaaatggaattgagttccgttctgccatatagatattcgctgcctcgcttttctcgcatttcaagatgcagcaaatgattcgaggcttgtaagctgcaaatcgatttgcccgctggcctcgcacttgattggaatgattgcagaatggtagaggaatacatatttatgcgcatattcttatataggtccagataagtacaataactcagagcagtaagcaaacacttgccaagatatttatgtacgtagtccataattataacttttcttcctgcagctgtaactaagcggtaatatttaaaacttgctcagcggcagaagcagaaaaaaaagcgaaactttttcgattacgaaagttacttttgctgtctgggcatcttattgggtgttaatggacttctccagaatctcctggtcatttgaatggcttcttatgctcagttcctgccggctcaaattgcgcaaaataaatacacatttagagagctatagtcctgggggcgatgcgatattcccccaggattagtgtcctgctcgctcggaccgacttgctcggcaaaaggtgtcctgcccgcctgcccataaataaccaaaagtgtcaacattttattttgctattttctgccaaggttcccccgtccattccattcccatccactccactcctccccagttcggctttcctttttccgcaggacctttctacgcagtgttgcgtgcctaagcgaatcggatgggcagggtccttcggataccatagtatttgttaatttggagtgtgcttcggtgagcgcgaaattcaatttaattgagctgagtgcctgccaggcggcacagctctcacacatttctcgccggattttattgtggcctgtcttagcttaaaagcattccacgccaagccaacccaagtgaacccaggccacgtcggagcaaactgcataaaagattcagcagcgcttttaacttgcttgaaaagcttttccatctccattcctatttgcgcatcttgtagtttggctgcattttgcagttttcagcttgccgagtgtcaagttctgcctgctgtcgcataatgtgcaaaatttgatgaagttacagtctccaggagacgtttctttgccacgtatcccaagcttaatgcactccgggatctctaggatttccagttttcagtttcccccaccttatgagcagggcccataattttgtttgccacattcttttcaccttttttgcctgtcgacctgtggcaggttctatttccttggcgtgggctggcttataaatttgttttcggccagatagtattattttctcatacggtgtgcttggtgtgtgtgctctggttttggttgcgagtggaatcttacggtcaagtcagggaataaagcgtgtgagtaatggacagcccagggcgtcgtttaccacattatgatgttgtgtgtttgaaaggatatctgatccgatacgatcggatctctgacggcatactcaccaattattcacttgcagtatcgttaggccggtgtcctgggccaattgtttcttctggtcctcggatgggtagggatgctgaaaggaaatgtcaaaatgatatgattacaatattatatttgcgtgtttgaagttttctctttagtactgtacatatattaaatggaagttgtttacatggaataaatatggaaaaccctgtcctgacaaatttcggagctgggcaaactgttgcagtgcccaatttatttacaatctatctagccaaccggccaaacaatcgatcaatcatggccgcaataaaaccgaatgggaacctgtcagcccgcgtggatggctgcacttgaaacgcagcattttcgggtgtttttggtgttatcaggggaccggttgcagtgcgtcctccttatcagcagtgccactcaaagtgtcctcaattgccgctaccttagggggttaagcacggggaatcggaccgcatggtgtgggttaagggaggtggggcggtgcaattggagcgcgtgtctagcgccaaatgggcaaacaaatgccaacgagtagtccacttcccataaatcttgcagtcgaaccgccgacacagtggcgtcagtgggtaaatagtttggctaaagtgaaagtgccactccccctggacaggcgacccgcccccttaacccctatggctgcccagcagctaatctaatcggctggctgccctggcgcttattacaatttcttttatttgcctagttgttgtgcacttattgttgattcaatgattccgatcgcagcacaatttcactccattaatgctgcttcgactgttacaggggaaagaaaatatccgaacatttttgaatggctcaagaagttaattttgtgtatacgtctactcatagagcagctttttagcatacttcaattttttcagtgcattaaaggcaagggtttaaccagtcacctggcggctgtcaaaaaattatttctaaggatctccgctcagcggaagttgccgtcaaatgattttggctttgtttcgccctcgaaaaatcgggatatgcttgtgcgcgtgctcgaaggacgaaggagcctttgtgttttaaccctcgactggccgcaatcgtttccggcagctgtgggcggttcctgcagcttttgggccactcgtcaccagtcgataattgtgattcaaggggatcccattccgcagtctgcaaatgcaattttgtcgttgcactggtctaagaaaatgtctggcaatttacggtcggccccgaaaaatgtatgaactgtcacccatacacagacacagagaggttatacatataaggcggggccattccaatcgaaatgtgcaacgctgcacatccttgtcttcgtctgtgtccttgtatttgtgtgtctatctgtgtgctggcatgtcctggccggctgtaatgcaatttagttgccgctgttgctgctgttgtcctgcagcagcgagggcttggcctgtgtagctgtgtagctgtgggctccttaaatgcatttgccttattgtttgtgtttaataaattttacgtgttgtcttgctgctgtccaaagtccaagttgtagtcctgcccggcggcaatagttgtttgctgtcctgtcgaggccaggactttcagcctgacacgcccgcactttcggccagcaacaacaaaactgccagatacgaaatactatatgaaatttgcgtattgacaaataaacgtaggagccatgtaaatacaatggacatgccattggcaatgttgcctcattccatcgcaactgctgctgcacctcgttttctcatccatataaaatgttcaagaagtcagaaggcataaattacatgcaggtaaattaaaatggaatttatagcatactttgtggcgcacatctatttgcagagatggctttctcacaagaaaagcaggcagtgggtgggtggctttggctttggctgattctagatgcaggtggagcctggttattgatttgatgttgtggccaacacgagccgagacatctggcagtagcaggaacaactttgtggttgtcaatggggaaaaggaatggtctacgaactccgaataattgagagtccaacttcgggaataacatatattttgaaatttaatgcctgcagagggaaggttatataagccaaaatataaatcagccgtatacggcaaccttacaaatagtattctaatatcaaataaatattttatttccaaagcccaaaagttttcgttttcattaatcaccagtgccaagaataagatcataactaaatccattacctttgttacccagaacatcacagcacaagacatagatttctttagcaactataaatacgacagacttgtcccaactgagtataatcctttatacatatatctggcaggtcaagttcgttgacttgcccgactcttggggatcacaagtgcatatatatcatttgcaaaagcttttctttcaacgcctactctccgtcatgagtgtactcccaagagcttagcagcccgtctccctctgccccggacgtgctgtctctgtctgcttaagcgtttttctttcaactgcactttgttgcaccaattagactaatgaaagcaattatgcatttcgcactcacacacatgtgggtaaatgcatgcatgtggatatgcagagagtgcataacatgtcaagtagaaacaaagtccatttggtttattaatttaccatacgacaaaataattaattactgtcacgcctttaagttgtcgccccatccccggcccctagtcactcgctccgtctctttctatcgctgggctggccgtctctttcttttttgtgattcctgccttctgtctgctgtcttccgtccctgtggcaacttgactcgctccacttttttgccagcatattttcactttgttgtgtgtttatttaaacttggcaaatgaatttaaaacaatcatcgcacactgatgtgtgtggagtgtgttgggcggggggcttggggtttacttactccttttctccccctgctgacaagtggaaggcccacgggcccgggccccaaagagagagggagagagagagagagacccccatttaattggacctgggcccaatgatgtcaacatgactgcaacgccgtgacacatggcacaacaagcccaagaagtcaggtcccgctttgcactcaccgtctctgtaccccacattcaacatacacatgaggcaccaacaacgggcaaccaagcgatgccagcgatgccgacgccattaacaacgccaaatgcgacgccatttgtgaaacaagccaacggcaacagcaacaacagcaacatcgccaactgcagcaacaccaactacacttgcaacagcgacggcagcaacaacaaccacgttggcagcaaattgcagcggtgaaaattgcattgccacagcgaagaaaaggcgactgctggccattatacagattttttccagtctaagcaaagccaaatgagtgtttctccgtctctaccctctcttgacagcccacactgataaggtgagctagaaggcccagcaataatcgcaatgctgccccatccgccaagtgttgtggcggaaaatcataataatatgcagcgtggccggaaagaagatgccctacgttttagtgggacggtaaataagtagcacaagatatttaagtcttttcaaaataccttgttcaaagatataaatatttttaaaaatagttatctaacgagtaccacatgtactgagtgcattctttaatctgaatgcttaaatcgttgtgcagcgcattgcagattcgtcttgagccggcaccttgaaccatgccacacactaagcgccgttgcaacatgactcgctgacaacaatgcaactctttcatcgcgactgcacctaatgcccctgccccacccttcccgccagtcttcttcgaccgccctctatggcttccttttggccattttgccacggcttaacatttcgcgctctccgcactttttttcgggggttgcaagttgcccgttgcaacggcaacgccaaaatgtaggcccaaaagcagaacagtacagaacggcaatagcagacagccggaagaaaattgctggtgagggagggtttttcgctggtcagaagagggggggggggcagctttaaatggagaatggaagcggacctggggcatatgggcaaactgagaacagcaaactgcacacacatgtggctaacagctcgagtaggcggagcacgcgaaatgaggccttttttcttgtttttttttgtgtttttgctggtgttggtgttgctgccgttgccttggctgctgttgttgctgcctgtctgcagtgcgcgccaaatgtaaacaaaatattcgcgcgcccgccataattatggcaaccagcaacaacaacatgcatttctgcagcaacggcaatcagccccgaaagcaacaacaagccagccatgcaatgccctcaatgtacgctgttgccgttgttgttgcagccgacgtctgcgtctgccttttgttttttggttggccagtcagttaacccggccccaagcaccccgcccccttttttttccagaatgcacttcattagcaccatcattgcggtcttatttggggcctgtcttacgagtattcgatggttattatgcgacatctctgttactgattttatttggttttatgtatattttcgtattatgattgttaacttatttcggtcttgaattgcagctggctatgtcaaagtgtatttgattgatctaccggaaagggtagggctgcattttacatgttaatcactcgaagcgttgcatttcgattattcaattcgctctattttccattcgatactttccgaatataatcactcataggttcgctggtccttaagttaattatttggcaggcctataaatcaaattggcaatcattgtattatgcgaaaatcgaagggcttttgaatacgaaattaaagtttcaaacgcatttcggcgtggaagaaaaacaatttccctaatgcgctgaaaaactgttaatggcattaagccggggcgacggagtcagtcaaggatgtggatgtggatgtcgatgtgaatgtggatgaagatctgcgtgttgaggatgtgcaggctgtgaaagtcgagacgctgccgctgggcaaacatgagtgatgcgctgatttaaacggcaattcatcaatgtcaccgagggtttgggggaaatgggggtggttgggctaatgcttcttccgtttactttacttttcgaccaagggggtggttggggtggtattttaaaacgtttggatgttttttttcttttttttttttttttttgggccagaaacgcagcctcaactttaatttccgattcgctggcttatcgcactggtcagcttttggtcgttagctttggtcgcacacactcgcttaccaaaattccattaagatttctatcattttacatacgcagttacgacgccagcagactcacaaaaaatccccaaaactaatggccaaaaaacgtagttggaacttccttgacccgtccagcataaaatcttatagttttgtttgccggccacttggctcaaccgcatattcaacccttggccaccttggcttttcccctttttcccttgacgtagcttttcttgttgcttaacataaagtggcgcataacaaatctgtttatttgtattacacatccggcggattggactggacttccgtttggcatcgccgaagtatccgaaaaaggaactttgaactgcagtttctggctttgaatagttattgccattggcaatttgtttttagtgccgcatttggaggccgtttagccgagctctttgatggccccaaaatggaaatctaattggacgcgatgaccgggcaaagaagctgccgaggtccgaaagggtatattttcaaatggataaatggccaaacggatgcttaggccttagactgagtgctctgcgattggattaggcagttgaaagcgatggcaggggatataccgactcttcagtctgatcgagtacagcacacaatcttgtttgcatttcccaccctaatggccatataatcaaggttccgaatggcgccttccctggctgctatcgtttacatcatcgtgcaggcttttccccggcccctcgactgtgttttccttttccccgcccactgtaccgcccattgacgcaggccattcattggagcccatgcggtaatcttatcaacctgccacacgttggaaaaaacaatgaaaataaaacaatagctgcactgagagattacactgttaggtatacataatttatacttttgcagtttacaaatattttcttttgatgaatgaacactacttccctttgtattatttatactcccattttaattctctgcttatacctatagtttctgactactttaataaataatcttcttggaggttcttatttttcggaactgttatcacaacatgaataataacttttttaaacaattccgattagtacacatgattttcgcgctatgcatctagaccgaattcttatcagagttggggctggcttagctgctagtttgtagtgggtggggccagcccccagccagtcagggattcccaccgagatcgcgataacatctctgacgtgccggaaagccattggccagaagtcggaggtggaaatgatggtagtgcggtactttggtactttagcactctggtacttgggcactactgtttgctactcaccgttaaatgctgaaacagccacgctctcaatatgttggttgctacttttgggaaaatgccacgtttcttttggttctttttgccgctcgcatcgtcgtcctcctcgccggtgccctctccacttcctatgctggcattgctggcatcacctggaaaattgtggaaaatgagagaaaagtgagtggtgtgttgtagctacatagttgggggaatcttccgaggcctatgtcaatattgtcagagttctacatgctacgagactatgccataacccccaaaaatgagaaaatgagcagactactactgctccaagacaacttctgtgtttgctgttctggtttatggctgtttgtcaagtgggcataaaattactccactcggtcgtaacgataatcatatggatgacattgtttgtgactgcaggtcagtagactgggctctgcttttcggcttccaagacttgtttataaacaaaattaatatttgtcaggcctgctgcttgggctgtggctttggcttttggtaatgttcctgcataatttttggttaatttaaactccccgggcttttatcttttgtttgcctcgtaggcccaaaaatctcgttggccaggcgtttcctgtgtgctttccttttcatcatcatcatcactggatctccccagactatgtatatttttgtttaatattaagtatattatttgtgtgtttacttaaagttttagttacacttaagtaactcaaatgccagcaaacaggaagcccgaatcgctgcgcacatgcaaacaaaataaaccagaccgaaaccaactccccctcgaaccacagaaaccatccatggattgcataatttcacgctccttcctcgacgatgatgatgatgatgatgatgatgatgatgacgatgaggatgacgacgaagacgaccatgatcatcagatttcgggggcccaaaacaaatattgcccaaccggcaaatgtctaacttggtagccttcgcttaattccttcataaattttccatactttatctttggcacaacacctttggcatttgctttcgctccaccttcactctggccgctttttattaatttttcagttaactcattcattaattttcacacacagtagccacacctagatacaaacaacactcaggcattcaatggtggtggcagacttcacgccattttgcgtaaaccggaagttcgttttgattaatttagtcgccgatggagacgttcgcttggcgagtggtcagaaaagtcagaaagcgaagggggaaggggattttccaaataggccataaaacaaaacctgatggcagcagaccaaataaaaaatacgaaaatccaaacagaaccagaggaatttcgattgaagaaaggcagaccactctatgctctcgattttgataaagaaaattaagaagatctcaagtccacatttctgtaatgggaatagctggtaaaatatacatagtttcctcttaaattcaaataaatatatattagtataattttatcacttaatattcaatgaggaacccaagggaaactacgggctctcaggtaaaaatacagtcactaaccaaatcactggaacaccaaaccggaaaagttataaaattaatttaccagaaagagggaagaaaaaaccgaaaaacgtaaacaaaagaagttcccaaaacaatcacttgttggaacctttctagcgcctttcgcccccaacttcccgccattgtttgcataatttagcaattatggaaatgcgttggcctatagtgtatgtgtacatatagtacattccgagctggccaacggaatctggccaaatgaaagccaagaagttggcgtccattacacacaaagcttatcatcgagcactgtgagctgcactttagttgctaagagcggagaagaaactagctgctggcacttaacaacttcattaaaagttgtttatgatcctcgaaattgattattccactcaggggggggggacgggcagggggatctcaacccgttgcacccccgaacaccccgactgccccaagaggcactcaaatcgcgacgggcgcgcgcttaagaaaacatgaaattgattaatgcatttgcctgcaacatggatggtcaggatggtcggagctggagatgcagatgggtcgtcttcgtctcgggatctggaggcatggcccgggtatctggtatctgctggtgatatgtaaattccttcaagtggattgcactttacgccgactccaagttcggtttgcggtgtttttggtgtgtgtgctcccatttccattttctttactttatttttgttcgttttcgagacccaaccacaattaatctttggccagagccgcatcttctggctcgcttattattgttataataacgatgtgcaaaagcacttgtgccacttgaaagggcactcgtgttgcacaaggaaagtggggccagaaaggggcaaaaggggggaaaaccgattaggacggtgcgttttcgtagctttttcccaaagtgcttttcgctgtacgcgataaaggcgcttgcatttttgcttttaattgaattgttaagcgcagcgcaaaacttaattaattttcactataactttgtgcactttatggtgcccgctcgattcccaataagtgtgctttttggggcgtggggaggtggaaataaatttgatgccagggcaattttcgtgggtggctcacacaaacacaaatactcattccaactggcatttttatttattattggcttaaaggacgaaggatgcaggagccaaagacgcaaacgcagacagacatataaatacatatacacttatatatatatactatatacgctgtgtgtgttgttatttttgcaaggagctccaaaaaaaaagaactacagttggtctgccttgcttgccacattttcatgtttgtttttggagcactctttttgctctcatttttttctgccttctacaattgcgcaaaattccaatttgcagtaaattttgcgatttttcctttatacggacatacaaaacatttttagtttcctgctggcttttccttttccttccgcctgccgacttcttcccccagaatgcaattatagagtaaagctgacaaaaccccaaatgcttcgagatgcttgtggaaagttgcccgattgattaagatttttgcagagccagcagccccaaagaatccgactaaattcaagtttagtaacttcaattagtccggttttttgtgctgcacaccgaaggacaagctattttgaaagatagaaaacagaagcttgaagcctattttttacatcaataaatatctatccttattttctgtgtacaatttctatttatataatgccaaaactaaaaccgtttcttgtaccgtctgcataaaattcaataacaaaatgcacttttccacccgtcaagttgcagcagcaaaaacaaacaaaattgcttttccagcagacgagaagcgaatggagatagacagtgagggctatagatattttccctctctggctggcaaaatatttccaaactacttgactgtgtggggttggaggagcagaaggagcttggggagggggaaaatcgtagcagttttcaattagtttttaaataaacttttgcccgcaccaactgagaaacgccaaatgctaccccgcacggagaaaactttccattttccactaggtgggtggagatgggcggcagcagagttttccgtttgtttacacaaatccatgccaatcgtctgtcaatcattttccaatgggaacgagtagtagcatggcggaagtctgcttaagctcattggctcgacgagtatttttcgctttttcaggctgcctaactaattgagttttggaccgatatgataataaacagcgtcggcggtctaggccggttaattgaattcaaaacatgtcaaaagaaatcagccatcaccctgggtggccgaaaacgccctcaagcagcatttgtcgtcagctgcagcttggcacacactcgagaaaaccgtggctcaagtgttggccaagaagctgcgcttgagccagccacttcagagaagaaaacacacaaaaaaaaaaaaaaaaaaaaaaatacagagaaaacaggaggaatacatggaaatacaaaacagaagcgcctgacaaaagctctggaaagggcgtcatcgtcgtcatgatcatcatcacgttcatcacacgcttgtcaagtgggtggctgtacagtaaacactcgagttgtggacccccaaggtgttagcccgcttattagccatcatgtgcgagcggccttaagcccgacttggctgatttatggcccggcatttattgtttataaaacgctttattgaatctccgcggcgcagtgataaacacgagcaattcatttcggtttagatggcgaccagttaagtgatatgcatacgatcggcaaattaataaggcttaagtgccactcgcaaatggcttaattaaacatggaataatcagcgtagtttgactttgctcggtttgacaatcgcctgtgagttatagatgcacagcggaaaaacgaaaacagtccaataattcacgagcttatagaacgtataataggtacttctaaacataattcatgtaaagacaagatatgttaaaatatcaaacatatattaaaaaatatttccaacgcgtatttacagcattttaaacgcccagggttttccaatcggcccattcgaattccctggcaattttcatgtgcgaatcgaaaagggaaaaacatgaataaactgcaaattatcggaggccgcaaaatgatgatggatcacccaatcgcgcaacgccataaaacggcaacaagtcaataagaacaactacaagagctcaggcatatggcaaaccagactccaaagtcaatagcaatttttgtggccattttttgtgattttttcgatttcgtgtttgttgttcccaggcaggcacaaaaaacagtttgaacagtttgaagtattaacacaaaagccgctttagctttcggctttgccatccccacacgaatatatatacacacatataaatatatatacttatatatatctatagagaggaggctttttatggaggatttgtgtgatccgctgcaatattttgagccggccaggaacaagcaacaaccaacagccatcatcattgtcggctcgttgcattgtttttggccggcaacttttgttgctgggagggggaaggggaataataataaaaataataataataatgttgcaaaggaaaaaagtctggcgatgctgcaacatgttcatgcctcattattttcgtacagattcttgcggttcgccttggactctttggatttgggttctcaggctgatgctgatgctggagttcattcaataggcttatagaacagaaaaaaagaatcggaaaagaggagaaaacccaaatactggctggcgaaaaagtttattaaaattccacgccaggccgagccagtaaaaaaacaaaatgaggaacagaccaaaagccaacacatgttttcacgcctacgaggaaaaagcggttgaagaaagatggaaaaaagctgacggagcaccgccttaaatgcagattagccatatggagttgccgtctctgttttcgactcgaacactccatcccatatgcaaaatcaaattattcaaattcaattattgtcaattttatttattattaatgcgcataattgtcaaatttggcaaatttatgaacccctctgtgtttcttttttttttgtattctgtttttttaagccgtatgcaaatggcggcaagacaagatttctgtgcactcaatccgctcgaattcatgagacatgttaaaatgcatctcaccttgcctttggtggatcgtatccaggttttcgagtcccagaataaaccgggacaggaactgcctgaaaaccgagctctggagtcgatctgccaccaagggagttggccgggaagattaatggcagcgggtttaatttgtttttggcttttcaggtattcattactctttatgcactcgcattgacaccttttcgaatggaaaaaaaaaacactcggatatcagatgtgggacccacaggtgagtgactcgtatttgattgctccgtttttttttttttttggcttattacccacacattttttattctatgcctggtgctacacgatattaagcaattcataagcgtgtaatttcgtttagcacacgaaccaaaccaaataaaaatacaagcccggcaaaaagaaaaaggcaaaaattaaacgtctgcagttcagtttttctgacatcaaaattgcagttgtggcgcagacaacgcgccaaattcaaggcggtcccagacattggggctgttgtgcttcctcttcttcagcttcctcccgctgctttttgcatacattttttgttaataacacacagaaaatgtttttttaacagcctgaaaattataacgcatcagtcacgaaaacatgaagacaagaaaacatttgctgcattttttccccgatttcgcttcgttttttttttattttgctggtaatttcctgtagttttcccttactctccgccgcctgtgtgtgaaaatcttttttctctctgtatgttggtgttaccccattttgtgcagctttgtcggccatattggaggggaaaagtctggccagaaagagagggaccgagggaaagagagcgagagggcgtgcaataaagaaagagaaaacgggaagcaaagtgcaaaaactcaaagtgagggtgagcaaaaaattcgcatttattcagccgctgtacttagcaacaaaatggtttattagattgaaaaacgagaagcaaaaaaaaacaaaaaaaaaaacgactatacaagtcgattttattctaccctccagcttgagaatatgcaaatcaagttaagtaacagacagcataaattaaaatataagaaaagacctaagaacccagatgcgatgggagatcagatgaaatgaatctctgagccgctcggcaactgtccaataataatgaaatatttccaactcgaaaccaactcaagaaatagacaaaaaacacacttttctaaggcggggagtgcggtatttgttgttcgccgttatttatgttctccctactaatttcgaatttgaatctttttggctgtgacctttggggcctacccggccatatcgatttggtatttggtagatgtgtgtatttttcttaattttgaaagcgtattaaattacgaaccaagaggcccccatccgccggagccgaaattgaaacaagaatttcaagtatgtttaacccaaaacacagaaaaaaaaacaaaacaagccgaagccgaaacagaatcagaatcggaatcagaatcaaaaccagagaaccaaaaaccgaaaccgaatggagtggagttggagatggaggctctgggcttaaagtatttcacaggaaatcttcggaaacgcaacccaacagcaacaatatgttctacacatttcttgcgaccccgctccctgtgtgagaaatcgaaatcccaaaaactaaatcctataatgcctgcgaggggcgcacacacatacccatacccatatccatacccatgcccatcgaaaatcgaaaaatccgacccgcactcacgcacggctacattttgaaatatctcatcgtgtgtgagtgtttggcttggtatttcttcttccccacacacatataaatctatatacagatatgtatatatatatatatatatatataaatgtatacagatgtacactctttttttcagcctttttgtttcacatccccacccagggttcccagtgcctttttggccccatctcaagagtcacaacccgaaccgagcgtgcgctcactctataataatgataagatggctcttaatcacaaaatttatatgtgccctggcatttagttgttccttctccccaaagccaaagccagaaccaaagaccagaaatcaagggatctggaaactgaacactgaacactgagcactgaaaactaaagactgaagactaaagactgaaaagcccgaaccgaactgaaccgaactgatgatgggttatgcgcgattataattatgggtcctgtcattccgcatctcaaagtctacaattttcagtttagtgcggaacagagatgggcagacattcctcagtcattcctctcgttcagtttctccattttgccaaaactctgggcaagaactctgatctcggggcgtggcatttttgggggcttgccccacttcattggtaataataattatacaattataaagagaaagcttaccgcttgcactcgttccgaaattgtctgcaagtagagataaaatgcaaaaattagttaattatttgtttaacattttttttttgtttcgggtgcaacattaacctgcccgagacccaaatatctcggaaacttgactacaataaatcttctcataacccaaacccaagatttcaagtccaaaaacagaaaaaaaaattgaaaaatttcgtgcagacttctgaccgcaaatcgttgtttttttatgtcggatttcactggctataaaatatgaaatatatattcacacgcagaagggaacagaaggggtggcaatcaatcaaaactatgtgaagcctgtggaatcagcaccaagtgtgagtccaaaatatttggagcacatcaaatgcagccccaaagaaaacaaaagatgaagcccgtttcggtttcaacattttattttattacctctttttttcgagctcgccaataattttgtttctcagttttatttttggctttttcgcacgcaaatcattttattttttgttaggcgaagggggttttgttttcgaagcgttttatgatttcgctgggggcattatgcaaatctcgtttcgcgggctaaggtatccataaacaaaatattcaatctgtgagataattttgcatgagcctgctaaacttaatacttttgggattgggaccagttgaatattatcttttatccatcaaaatgttggtcttaatatcgctaacaaaaataactcaaaagtaatcgcaatacgtaagtatttctgatttctgtcttcttcctctcatctctccgaagtcatttagtcagtttgtaatgacatggctgagagtattttgtgaactcggcttttgaggttggccagctcaattgcagccttggcatctcgcaatgaacgcgttcttcttgtcatttaagtcatcgaacacgcattggtacattgtacagagtgtcggtgtcgggtttgttgtcgttgcccgtctctttcctttgggccagctccttctctctctactcgctggatgtcagtgtcctggaacggccatcaccagaccaacttcccaacttcccaggttccagtctcggtctcggtctcagccttagtctcagttcgattccagagtaggatccccaaccccccgagcagttcataaataatcgtcttaagttgatgcggtgactgtcgacgattgctgggtggcactcgctgcagttgatggcacaccgaaagaaataatagcacccaagaattagccatcagtttgacacttctttgtacctcgttactgtattttaagcatttaatagtcacatgattctcacaaagcagagcgtatagcttataaaattagagatccatcgttgggcgctatttattcgtaagtagcttgtaatttctctcaactttaaagtttacttttttttctgtgcagcttttcggcttggctttttgggtttaagcccgagtgcttaacattgcagttcgaaaatgaaaaggctcgggaatttatcagcactgcaacagaaagaaagcaaaggcggctgggaatcgttcagatattccgaaaacgtttcaatgaatgtcagcaacgcattgcttcaattttttcagttctgttctgtactgtgtttttgcccccctctgttagccagcatacgaagttgtgtcgtgtctgatcccattttaatattctagatacttaaataaaatacgtgtctggcctggccaacaaacgtttattgtttgttaattgatttcgcagccaaagttctggttaaaatgcaaagtgcagcttttcagttgccggagaggaaaacaaaacgaaaacaaaactttgcacacagctctgcttggcatttggtatgcaaaatttgtttgcctttcggccgggccaagatcgctgctccccttcttctggtctctggtgtttcatgagtttctttcgtcttctcggcttttgggcgcaattaatttgcagacagcgaatcagccttgaggctttaagcagttgacaattgtcaaggactgcgacaacttggcggctgaacgcaaagttgttcgtctctacgcggtcggttgtccgttgttgcttgtctctgggatggttgttgttttccacttgccacctgacagctgacagttgagagactctgtctctatgcctcggacttgggtcatttaacggtaattaccaaaatgctggccgcacaaaaagctttccgcgaacgatggctggaaaatgctttgcccctttttgtttttgttttgggttttttttcctagttttagccgactttccgaagagcagaaagagctggctgaaagagcagctcaagtgccgacaaagccaaagcggccaagtgaagcataaaaatgaagcacccaaaacgaagaaaacctcaaaaattgcagagccacaaatagaagtagaagtcggtgtacactggaatctttttggttgaaaataggggctacacccaaaaatacaacttatttgtgtaccaaaaatgcttccgacgtgagcataggatttaaagaccccacattgggcgccacttttgttttattggtttctatcaatctgatcaatctaatcaaatttctttatttccattgctttaggtaacatatttttaaagtgtaggaacccaggcacacgattttccatttggccagagccgagctgcgcgagactctcgagcgcgactcacagtctatttatgtgactattgaagtgggctttctgttcactttctggggcctcctcttcagcggagtcggagtccatgctccgcactccacaatactccagacctgaagagactgcggcggctcgggctttgatttttgcttgatttctttcaaaatcggctgcagctaaaatagagatgcagagcagggctcctccggaccagagaaccttgggcctccgaagaagaaatgtggctcgagtggagtctgcttttattattttttttttgaattatttttttttgctttttgtgttgcatgtgcagtgactgtgacgccattttcaggcgaagcgtatgcaaaagagagagaagccgagaagaccgaggctggagaacatgtccaaaggcaaaccgccaaaaggataatcagcaacaatttagtattattacaccacgtttcgaagccatcgaaaaagggttggggctggggaaaggggaacaggcgaggaagggggcggaacggggcaaaaggtggagcacacaaagttgtctgtcagaggctgtgggccctcttttaagcctggctgagctctcgagtatgcatttcaaagaaaatcattattatcgatgcggcaagaggatgaaaaagaggctgtggcggcaggaggatgaaggccccgggtcttgcctttcggtattttcacgtagttcgtagattgagtttcaatggaaaaatgatttgcaaattgactttaacgaattgccagccagcaacgagcaggttggcttttgggcatgttatggaattttgattacagcatttgctattagaagaaagctacggccgcatgtaattggcacgcattttggccggactctttggatctatggatccataaagaggcacctctgggacctgcacctctaaccactctgcagaccattcagaagacaatcgaaggcgttcgccagagccatgtcgatgccattttgatggccgtttcattggcattggcccggccgaaagtctgaaagtctggctgggactgagactaagaaactcaagatacttggggccgcaggcgggacgtctgatctgatccatggccgccgatcaggcgcactctcaaaaagggatcactgggagaaatgtctttaaattaaggcctttttagtttatgtaaggtgcttaaaggaatcccattgtaatgagatcggcatacaaatccattacatttaatggatcattttcaaaactagaatttcatttaatgatatcatctagatccttttctctccgtgttggattgaaactccaactgaaactccactgcggaggagcctttgcccgttgggcgatgccagttcgtatatcattatagaaattacctactctcggcagcagccattgttagtattttgccattaacgttaactctctggcacaatctgtgccgcttgatctctcgctgttgcctttgcagcatcagaagcagcctcatcgatggcccagcagaaattaaaagaaaactaaccaaccaactagccagcaaaaaaaaaaccagcacgaggaaacgaggggctgggcagaaaaaaaagcacaaaaaatggatgttgtaaattactgaaatctaatggaaacgttgacgtcagttggtctcgtgatgatagctctagtccgctgataagccgcactatcaactgatagttccccagacagatagctgtggcatggagttgggtaactagtggagaactgattacttaccaggactaccgaggaagactgaggaatacaatcgccgggaagcgtctgcattgcgagcatcggcaggtgaggaccattctcttcgacaccatcgtcctgcaaaagatagaaaagccgatcgttagaaatctatcaataactatatatgtaccaaaatgcataagtgaaaatagcgagcaagtgaatatacaaacaaataagttaagaatctgttacaaagcccagtattcatttctagttataagctttgcacaacaagtccattaaactagcaacattattttgtgtaaacctaactaaactctattaaaatacaaataataaaattggctgaccataagaccctctgtaaattatcgcttcactacttagttatcacagcgggaaaaccgcgtataattattaattcaattttccgcgttcctaagcctttcggcaaacgaactgaaactcatttccagttaaggcatccgcagcagtattaagatcttgagccactctaagccaccgactgactgacacaattcgcaacacttgtcaacttaatgcttttcaaccgatattgacagcacactgaatatgttaagccaacgcatatatcttatgatatctgttgaaggctcagagatagttgtctctgggttttcgtcaaaaattcggagaatgacaggtgccttggcccccacacctgaaattcccccagtaatctctgaatgaaaagaaaccctcaaggaaaacgggccacaaaatgtataaacataagaacctcaatggacactttaagctgataaaactttaaatgaaatacgtagtgtaaggaaatgagcggggaaaatggcgctaataataatttggtttattggctttaaagcacaatgaaggcggttggaaaaaaaatgaagtgtgggggcgtgccgcgtcgtacaacaacaatagcaaccctcgaccaatctcccgggcaatttctattatttttttaagcactttcttgagctcaacgacgcgggcagacaagcagcaacgcacctttatttaaattttccatttttttccttttaccttccttctattctggtcagaaaagcggggggaaaagtcgggggccagactacgcttcgttttcttcttaatgggcaattttcttggtagtaaatgggcacgttttatgaacgcttttgtggggtgtttatggggtggtcctgatgcccagccttacattcacccgccctcgaagagccacccccgaatgccacgccccttttggcaagagcgaatgcaagtgtctactgtttttttttttttttttaacttaaatggaatattaaattgccagcgaaactgcacctgcccaattaaaatgtaacgtaatagggccaaaaataaaatcggcaaaaataacaaacagtggaaaaatatctatttaattggttatcaattccaaatgtttttacgtgataataataataataatatgttaaactataataataaaactataaaactaaaataataaaatgttaaactattttagctatttttctgctcgattgctgcataaatattctttattttgtggcattttatatggcttaaataatttcggattttttaaatgttattatttttgtgttattaaattgttagcccaaatagttacccaacatttttcagctaataaaaattgacctgacaacgtgttgtttctatgcactcaaccgaaatcaatatcaaaattaatagagatttttggggccaacaagaccaacaacataggtaaaatgagtggccgaaaaaaattgttcgcacataaatctttgcactaaaaaattttattgtcgtttttattgtaaggaaataaaataaaaaagccgcagcaaaacaaaacaaagtcacaacaataacaacaacacaaagagacagagccaaacagtctgctgatttttgctctcccaaacacaaacacacatggaaaaaaaacacaagcacaaacactcgtgcatccacagattctccctctctctttcgctctttgatggccgcgtatattttccccgcctcgcagcggctctgctctctcttggtgcgccagagcgagacgaagctagtgaagacataaaactgcggcgaattgagcgtttttttttttttttttggtttctgccaagttaatgattttcaatttttgtgacttgactaattcgatttttgagtccctcagctcttcttcttcacgtctattgccttatgcaatgcaaaatcaataaggccaacaaagctaattcgcttcgctttaactggccacaagcaaaaaacaaaaacttgaaaatgccacaagttatatattattttaaaccaaaatgctttttcagattcctttgtttatggggcttttaaatgtcacaactctcgattctgagaatgtgctaaaacatttatggttagcttgtctcaaaatgtattttaaattattctagctttttgtgttgttcaatttgcttcaaaaatgtattttaaattatcttgatcggcttttcgtttcttctattttatttttgcatgttttgccactttaatgtttcgaaatgtttttgaaattaattttggttttgttaattatgtttgctcttgtgcgaattttgttgtatttttagtaacctatttttggtttgttcttttttgacctttgaatatatcgctttcttttagttgaattttaaattgccttaagttagacgcgactttttttatattcccgtttttatatatttatttttaatttcgtttgttgctttgcttgatttgcttttcggccttttgtcggtgaaacgcatcgaacgattttctatttttagtggcactatttcggtggcgaccccatttgcttttcagcctctagctaagtgtattccttctccccactttcagcgcccgaattttccccgcttttccccgagtttccccaaaactttgtgaagtgcccatgggcttgataaatggcgcttaggcattgattagatgcctcagagctacgaaatgcatttgccttatcacccatgcacttctcacacacactggcacacattataactaacacccattatacccccaccttcagccaaaagtgttcccccccccctcacaaccgagaacagccgaaaaaagaaaaacaacagacgcaacgaaacgaattttccattttccatagagttcacttcaccccaatgccaaagtcgcttcaaattcgttgaaagcagtgagaaaaagggagctaaattatttaatgtctatatttgattaaataaatcatttgatatacttaaaatttaaactatttttattttatattttcattgccattttaatactttgaatcattttcgttcacttcaatcattttaagaatgtgaatctgaataaagtaattgatttcaagtaaacgcagatgtttttgataccatataaaaatcggatagttaacgcctttgaaaacactatcaagcatttgttttcagtgcacttgtgtctgtcgcttttcgtctgtgtgcgggtcgctttctgtgtgtctgtgtttagataaaattgtgtttcgaaagtgacagttgaaatgatttatcacttgccagcgactgcaaggcgcaaacgccaacgctgccccgcccctgccaccgccgccccctttttagcccaacttggctgtcgtcaaagtttttagcacaagttcccttcggccccctcgccaaccctgaggctcactctttcgcttttctcagccccagcatgtttggcatttttgtgtagaaaaattgaaaattgcttttttcgtcagcagcccccctttcgaagcccccttcacccagccaccacccctccctttgtcctgctatctgaggcaacttcatctttccaattttctactatttggctttgttccccatccccagccccttgttgttattgttgttatttgtgagtttttcatatgaaaatttaattccgctcaaaccccaccacccactcaactcggcgtccctccaccaccccctccgcactcaggcatttcccatgcgagctaatttaaaaattgttgtaattttttcgctttgctcttttggaatttttgcaatgcgcgacaaaatgatttatgtcgctgcctgggcgaaattaaaaatattacaaaaagccacagcagcaacaacaatgtgaacacatttaaataacataaaaaaaaatatatagatatatatttgtgtatctgtacatttgtgtatatggtgtcacttgaagctttaaaatgaaattgttgccgtgtggaaatttacgctggcttttctcaatttttatgcccagcaatttcgagcaactgcagcggtggctggaaaaaatttaaaataaaatacataaaccgcaacaatttttcaacattttgcacgtgtaaattttccaattggttgaacgcgccaaatgaacgaaggggaaaaagttgcaaaaatgggtagggaaaaacgaaggggccaaaaaaaagggggtggttcgaggggcgtgtctctcgtattaaaggtctatctgatggattcatttaggcgattcttgaggcaggtgagcaagtttctccttttcgcctggcaaaataatggttgaaaattatggcggaatatgaaatttgcataggctgtgggaaaccctttggggtggccctaagaactggaaaacaagttgggaaaacaggtattctatctgtctcagtatttctcttccatcgctcatcatatttttgcattgccgtcggcaatttataatccattttttaaaacttagagatagaaaccatttctttaagagcttgtatttgctttccattcatttatttcaattgtatttgtaaaattaaagccaaactgctaggaaaacaaaaaataaaaaaaagcgcaaaaaaatgttgttaacccaaattgcattggcatttcatctctgcaatctttcatttggtttttcccctcactcttttttcttggctttttgtgtaattattcacatgcaccgaatgaatttttctgttttgttttttttgtttgcagcttgccacgatggccggaaggtggcgctgctgcagctgctttacgagcacagagcaaaaaacaacagagcagttatctattttgttgcactgtttttgtagttttgttggcattttccgctgccgttttcagagcattttccagttcttttttttcgcagaggaattttgttgtttgcttttgttttaatttaaatgaaaaagcttttcgcgcatagttatgaaaataatggctgccaaaaaaggggaatattccatatacatatatgtgtgtatagagcatgaagccagttctaatgcattaaagcacactaagtggttttagttggggcttcggaaagcaaggccttaaagtgtttcgctcgtttttcaataaaaatccagagccacacctcgaacatgacttgtaacttaagctatggaactcggttccttcagtcctgtgtcatcagttttggcgacatcctttgggatccgcatatcgctttacacttgaagcgaatttgaaagtctggatcggtccgctcgtaactcttctggctctcgcctctttacccctttagccagcccacacacacaagctcttctcattggactttatatttttttttcgtattctgttctttttttttatccggcccgcgactaatataaacgtacaatggaccaacttaagctgaaatgacagttgcgacatgtttgcgtaggcgtgtgcgatctcccatacggacagacatacggacacgcagacggacggacaacgacccaagacatccagacatactatacaggccagcaaatgttttggtattaatttttcttgttgttcctttgagcatctggcccctcaatctctggacttcatgctccccttggccgctcctgcaaaaaaaaaaaaaaaaaaaaacaccaagccaactgacaataaactttatcgcattcatgtgaatgcactttatgacacctaaccaggcaacagaacaggcagtcgaaggtggagaaacttgtttacctgcccgcaatttccacgggccgaacaaagaatttcgttgcggatttcgaaggcaatttttgcacgactgatttgaattgaaagactttgatgagctctacatgtgggtaagaatataatatgtaagtgcagagagagaaaagaagaaatagattttaacggacagttatgtatatttctgatatttctgttcgcctacactccaatattgatttctggcatatttatcgttctgtgccttgtttgaccagtccttttaatacattatgactgcaaaaatattaaaaggtctaacaagctagtacagagatatcaagtttactttccaaagacaataacgatattgttatgcattttttcgccgtgtggcaatgggcattttgtggtcgtctggctgactcgtgactcgtgcaatttcagtcgtccgtttgacggtcacgtgaccctaataaatcacagaattaatgttacgtaaaatggagttggcgttagcctgagtcctgcggagtcctggatcgcagaagtacagagctcaggacgaggtcctttcgctgcgaaagccaccaccgttgagtggttaaactatgccggccggaaattgaaaaacgtttgcggcatttctgataagccgaagaagagggaaaactacatttcccggagaaatgtaacttaaagatcaactggttaattttggaaatttaaaaatgttcatacgccatgttaaccagcacttgcacacagagaaaggaagagagatagctgcgtcgacattacggccattaaaaatacccaaaacgacaacgacaatttcctcattatcgtaaaatttattcaagcaaaataaattcattggtcgttaaccttgacactggttttcttttatttttccccgactttctgggtgtgtgtgtgtgcgcataaaactcatgctatgacgcgtgttaaatagtcgcctgtcaactggggaaaactttggcccgccagctgtaaaatgattttcccagacggcacagctccatatcgcctcaagttcgactacattaagtgtaggcacagacaaacaaattgtgattacgagcagaaaggaggaaaagccaaagctgtgcagaaaaaaaaacagaggctcaaggaatctgtaaaccaagcatgactttcattattttctttgtctggttactaaactaccaaaaataaataaaatggaatgacgccagtaagtatgctacaataatcgatacgagtgtgtgtgtgagctcttgttgttttaactgctcgactgcgtttttccgcacacaaacgcacaagcgtacaacgcacacacacacagacacaggcttaaaagagagcgatttgtcatggggctgccacgagttttcgggggttttgcattttccccagacattttgcccgcggctgttttcggtggcttaaagtgttaatgtatcagtttggcattgttttccacaatttatgcactgagaacttgttgaataccttcgccgacttatggccaaatactttaggacaaatatggcgcccaacttaatttaattttatacccaattcacatgtaaaatagtaacacccagagttaatataacccccgtatatatctaagttatggctgtgacaaaggaaggccagaaatagcagctgaaggaataaataagcggaaaaaactagaataaagaaaagcttttttcatcccaaaagctagctgtatacgtttgtgtggcagctgtctgtgtgcgtattggcgaaaactccgaccaactccgactgcctttccattcatttccattcctctccctacattttcctctcaagctgtcgtcgtcatttcgttctttatataaagcccgagtggagccaaggaaaatgctccggcacacacacatagattttatattttttctttttccctttttttttgctcctcgcttttttctagtatttttctacatttcttttatttccactcagcagaaaaaattcttatacacaagcgttgcgttttctacaagtgcacaagtgtgtgtgtgtgtgtgctgggaaaagctttgctctcatgtgtgtgtgtgtgagtgtacgagagctggagcagtcagctcagttttcttttgaatgattcgatgattttaagcgcctgcgttatatgaaaaccaatcgcatcaaagcaccccattaaatttcatcgtcaggcatatatccttgccgcacacacacacaatggggccacaggacacagctgctgctagctgatatccttggctcctggctggctcctggccacgtctgcatctattccatggacgtattcgtctgtctaagcccaaggcaaccgttgtatgctgtgtgttttctatgtgccggggaaatccgtcagaaaagcgcagccgctgcagctgctccttcagacttccatcttagatcccccaccgcccaccgcatacacacaccccccccctcccatcacgacggcttttccatttcccatccatttccaccagcccctcccactccatcattatgtgctgacggcgtaaatggctctatcagcacattgtgcctttggtgcctctgacatgtgagccttcgaactctcagccttttgcgaatcgggcttaaagcttagagcgcaaatttcgaggcaatttaaagtgctgctaatggctttataggagccacaaaaggttgaagaagaaaacgtataaattgcaagtcatactggggagtggaagttacaggcgaagctgtctaacttgaatactttaagctgacattaaaactgttttgtttaaataattcaaaacgagccagaattgactaaacatttgataggtttttgggtgataatattgctttggatattattgataatcatatattttaatatctgaagtgctcaactgacacctgttagggtgtttgccaaatgatgcctgactgtagttcgtacgtaacgagggacgcctgtagtttttggacatgtacaatatagcagctatatgcacatagtcgcacagtctatcactggcaaacgccgccatcttccagcgctcgtcgtttgctttatttgcagttggttccactccatctcttatttcgcctgctggccccatcttcttctggcttttctttattcccctccgcctccaccactctttatatatatatgttttttttttttctttgatggcaaacatttaatgggtttttcagaaaattgcattttcttctttggcactctttagcctttttgtttagctgctactttgcagtggaaagtggtagggggtggtgggtgaattgtgggtggtggtggagcttcgctcccagtcgctgctgttgttgttgctgctgctcatgaccatggctgccatattagattttgaatgcatttccgctttttgccgcagcgagcaaaacttttgttcgccatgttggctctgccttgccagcattcaatgcttctctttcgctctcgagcacccgtctctctttcacccgagctgggaaatattttccactgactgacagctgtgcaaatgggcggcaacaaggacgaggaggcgtactgcaagtttgtctatcttcggcttgtttttgctgttgttttcgtttgtgtgtgggcagagtgggagtttttgggtgggttgcattaaaagtttgtttcatttccctcttatttttccttttgcttttgtttgatggaaaagtccaagttgttgcgcaaaagtttttatgcaagttttgctattttggcaaatggatatccttctgctactccaacttctcagctccgcatttcccccttcgattatgctgtgggcgcgctatctatgttacttatatgaaagttggtcagacatatagcacgccatatatacgtatatatgtatgtatgaacgctctatatacatgcatatacatgctgagcttgctattggcaagaagtttaatcaaagttttcccttgcaatacggaggcaaaaataaattaaatagggaattaatgcagagaaagaaacgcacatggcacagtgctgtttatttctacgtaaattatgttttatacaaatctgctttaaaagcgcagtaaaatggtactcatacattttcgtagtgttaaaatttaaaattggtaaccaacattacacgggtgaaaattcccagtgtttttgtgtgcacggaattcccagcagaacacaccttcaagctatgctggtaaaacaaaaaccactgcatatttcagggcgcaggctgcatatgcaaatgaaacattccacacattcccccagaaggcaaaaggccattaaatgtcaaacccgcagacacaaaaaacaaacaacgcttcggcaaacattttccaacccgttttcgttgaccaaattaaaaagccatttgggctcagcgaagccaaccgacttttgtgccaagttacctttttggctggcggcaatttataatatgctattatgctattactatttggagaaaaacacaaccggttgatgggttttatgggtgccaatcaaagttcatcgattatgcgacatcagttcgtctgcttttcagttttcgattcggttttggatttcgttgcggattccgatccgaaatgtgaggcatatctttaacgattctcaacggcactaaatcttcaaggacagggagctgaagtgagttaatcatgaatgatttaacgagtcgtagaccatttaattgccattcaactcggacatgacagcaatcggtgattaaagccaaacgagacacaaaatacaaaaataaagagcgacaccaaattgtgttcgcttttaacgacttgacaaagtcatttaaggaatttcttttgacaattttgatccgagcttccgagcctcatagtcgatgcgaaatgtatccggcacctgtaagtttgttggtttttcgggggcaacagcacgcgccatttggctggaaattgaaaacgtgtccaacatcgagccatcaatttttaaacagaagtaatcactttgtaaacgccgagcggagaggaacaaaaataaatattcgagcatatcctctgggggttgacttgggctaagccggaaaaaccagcgaccagggactagagtcctgcaagtcctttggtccttttcggtctttgcctctgctacgtatggtatgtattaaccctcgacaagtgctcctcaaatttctggggttcgcttcgcttgatttccaaatttctgcacgtaacaacgtaaagttgcagaaatttttatacaatttgttgcatgcataattcacgaggacaacaaagttgggagggacctctggatttatgtgggttgcgtctggctaaagaactttcggtgactgtcgaggaattatgatgagccagagcatcaaagaaagtgacttaaacggcttgggtattcaatagggggaaagaaatggtccaagtgagttgtacacagagaaaataatgcttatccaaattcaaatactttcaaataagcaaaactcattgcttgacagtcaatttaccataaatattcattatattgatttaaagcttaagccctaagtcgaagctactatggctaattgatggcacagcaaataagatcggaaataaagaatttcgaatcccaggcgatacagaaaactgagaccccatcaaacaacattaaaccccgttaatctatcgaaacgagcgccaccatttgtctgccggctcacgttttaattgccgtccgcgctaaaattgaaagaaaaaaaatcataaaaattaaaaaatccaaataagctaaaaatttattaaattctcatttatcaaatgccataaatcacgacgcgtctgcgtcgtattttgtgttttattccaaatgatctatcaacagttgccatttcgatggctattcgctcacttcagacgcttttatgactagctaatttggtttctttttgattttgatttgtcagtttattgtggctggctgtcaatgattcgctctcgcttctctgctggctcaatgaactataaaaaactaatgtttcagagcttcgctaactgttctcctgacaagtgaatgaaaggccgaatgatgatgtcaatctatcaaatacacacacacccctttattttttctgaccacaccatcaactcaaacacacacacacacacacacacacctctgggcctgtcaacttttactttccgcatgacctttgctaaactgtcaaaatttgttgtcaaaacgtgcgatgttgctgctgttgctgttgttgctgctgttgccgccgtgatgcgatgttgctgctgcgttgtatttgcatttgacagctgctgtcggacgtccgctgccctcacatatattttcgcacttttgcagcagacgcaaaacgcggctttgaactactaaatcatttttgacagttggcagcgaagccggggaaagcccccagttgctgtctctttcgcccatgaccttgagaaccgttacactcgcgcagacttacacacacacacacagccagacatttttattccgatggtgtagcctttgtttatgcaataaattaaaagcaataatttttcatcttgagccaacagcagcagcagcagcagcagcaacagttgaaagttcgcccgctgcggcgcaacaacattaattttacacacaaacacatgccgaaagagagggctatacctatgtagtgggagcgggaaagagacgggcccacgggaaaaagggaaagagacggggcatttgataaagtaccgccatggcaatggcattgtttttaactcgctgcgactgcgctaaaagcgaaaaaaaagtgcagaaacaataattcaacttgtgctccacatacacagccatacaccgggggtacgaatatgcccggattgcaggttcaacggacgctttgcgcctgcgcagggttaaacaaattgcagctgtctccctctacggcggacggcccctctccctcgcactgcctgtatgccattaattctagcgcttgccggcttgtttgacagttctgacagacgattatttaaagttgtgcttaaacgcccgctcgttgtctctgtcccatgctctcgctgtctctttctgctcttggccatggcccacggctgtctgccatccgcccgccctcggcggcacgccccccgcctgtgccgcccaaggaaataatacaaattacacttttggcatattgctcggctgctctccttttggccagcctaaaataaaagccctgttttgtaggttagtgggtctttcgaacattggttcacacaggcgaaaaggtgatgcataaatcggacatcgatgaggttttctttctagtacgatatatggaacatggatatcatggatatggtcatggaataaggataactcgtttaagggaactaaataatgtataaatcaagtaatgaaaaaatttaataagaattctaaaaatatatattatattttgttttagtgattaaattttgatggcactaaaaccaaaaatacaccgcttttctcagagtgcaggaaaaacaatcgaatgtgagttacatttgaccggccctacacttgccttttaacgatttaaatgctctggcacgccattcctcaatttaacgcatcataaagaggggaaaactgcatcctgggctggcattttacgacccagaggaggctgcttagccagcaaagaaaaaaaaaaaaaccaagagtgcagagcacagagtacagaaagaaaagccccacatggagggccgctcgccgatcataaatcaaatttcaattcacgtgccggtcgctcgaccattcgtttttgcctcatgttcattaatgaaagcgaaatgcgcttatataatgccataatgccgcgactatcggccctcggacatcagacatcggacatcggacatcatcgaaactgccactgattttcgcagcgcaaaaattgggacaagttcatcatcatcatctgtcggttgttgtattttttaagctttaagttttcagttttcgttttttttttttctttcagtgggcgtggcccacatgcacgttgaaagctgaggagaccgccgatgttcaatttatgagccgcagacagtatttcgtccccaaccgcaaccctcgagctcgccctcgcccccttaatcgattgtagtttttaattaaaatttaactttataatgattttttatcagctgtccggtgcgcagtctgtttaagtctaaattaaaaagaaatttctcattttaaaagatcgcagaaacaggaagccgcagccgtgagcaaagtgggcgtggaccgggcaggaacgtgatcgcgaacaggattagtgacagacatcaaagagcccatcaagcccaagagacccaggaactgaggaactgaagcactaaggaactaaggaaccgatctatatcgatgcccttggccatcggccaaattttgattgatgtgcgaaccgaagggcagcacgtgtttcgcttcagatctacaactgactatatacatatcttaagcttacgactagcaatctactctatacgtactgatatacaagtgttaaatgacttaatgtggaatgcgacttaccatcatatgttagttctgaaggattgagtgatgataagaacttaccatctgcaacgagaagagagagtgggaaggtaaattaatttcaattatagctgtccgcatgcattacaataattatcaataaattgcagtttgtgattaaccagctcagctaatttatggatgttttgaaaaaatgtatactattagatcattttgtttgtctttgaatgcaagccaaatcagtacacacattcaaagcaggtaaaccatttttatgtggggtattaaaaactcagatatgttttcttgtttcatgtttaccccaccccccgcaccaacttatccataaatgaagcattaaaacgcttaattacgtgtgttctattgttgctgccatttaacaatatagtttttgtgcaggtttttgtttggcttttgcttgcaatttttggttttcctgccgcgtttcattctacacgcatgtgtatatagtataattttttttttttttggtttggtgcttgattaattttattattgtgcagcatttaatttaatacgcattgcggcgcataatgtacaatgattattttaaattcactttgacaagcgcacacaagcgcagttacatacatatctcacccacgctaaccgctttcatttccctgttaatgttaatttaatatttttacattgtgctcgtgttttaattttgcctgcggtttgccatgtttgttcctgctgaaattgttgaactttttcgcttatttttacgcttttgttatcacaaaacaaaaatgcaaattaacgcagaatcctcttctgctgcttcatctctttttgtattgttaattatttatggctgtcatggtaaacttttttctttattttttttttgcccttaatttagccgtgttttatcgtttttgccgcattttatttgaacgcattttatttcaataaattattaattcttttttaatttctttaaagtgattttttttttgacattttatggcaattttaaggccgtaagcatttgcagtcagttcgattttatttgtttcccataacaaattaatccctaaatgctgaatatcccatcgaatctttccctatttccgttttactttttttatttgtgtgacccagctggagtttgtttttagtttttttttttttttagtttgttgtaaataaatcaacgataattaaccttctgcagcgcgtagaaataattttactgtcaatgttgtcaccactgacagtcgaacatcttaaatcatttgtgttgttgttgtggctctgtttttctcgttttttgtactttttctttaggttttttcccgctgatcagaaaacgaaattaaaaagcgcaacagcgacggacactaaacacggctaaatgatcaacgcgccccgaaaatgccaaatgcgccaaatgaaatgccaattcgcactcaattggaggtagcattggcggactggcgacaaaacacctttgcgaaaaagtcttcttgggtctcctctgcctccgtccctgtctcttgctctgtttccgtctcttttgttgtccgatcagagagagggaaagaaactatacaacaaatatttggtgatgttaaattatagttatagaagacccttcgaaatatcaaacagttatttaaaataaacatgttaggaatattgcactctgttttttagtagtgcgtctattttttatcattttcatcaagagttgctactgattttctctctgtgcatcccttctccctgatgcgtagacgtcaaaatgccgcggtggcaattaaatgccttcgacgctcattgccaacgcctcagtctcgaattggactttgacttggagtcggcggagctccgggaggagtcttctctgtggattgaagtagaatggagtggaatggtgtggagttctgccccgtttgggctggtttactgcccagtccgtcctggtgcccactgcaccactccacccttttccacctggagattctggaaagtcggagcaccgctcggccacaaataacgcccaaatatggcgcaatttcattcgcaacgcaacgaatcgattgccgatgccaccgctgctgctgctgctgctgctttcaattcgatgcgtttcgatttatttatcacctgtcgttgaaaattgaaattgcattcgcctcgagactcgagggtttttgccttagtttcatttcaatgcgattcgattcgattcgtttcgtcttcgtctctttttcagcttcttctgtgttggccaggtaatcattgtcaacaattaatgaacagccccattggtgggcgtggcagtcgtttaatgaacaaaccaccgaagaggcagtagtgctttcctttttttccgtattttttttcttctgtttttcatattttttttatttcgctgtccagatatttataaattagcccaggccttttcctattagaatggccaaaaaactcatcagcataatgtaagatgttgtgttgctcggggcgataatgagccataatggcgctggccaaggagttcggggagttggccaagaaaaaagggcaatggcaagggcaagggcaagggcaggggaaaggggcagcggtaggatgagggtccaaaactggttcgagcccgctgctcttaagagctcttaatgccgccgcatgtatatgctgtttccacctctgctttttgcatatttaaaagcttgatgccgttcaaaccgaacattgatcgactaatcagcaaaaggctaagatccgctggtggggggtggtgcgacggcatcggggtgcacttcttatcaatgcactttgccgtgctacacgtaaacttactttaaacgcgccaaacttttcattggcgataagaagggtaacctcagacgaaaccctgcctctagaatgattgtactacattgagagaaaacataataaaatatggtatactagccaatttcattagcaatttgcttatgctttcgtataagtgcagcaactctattcaacataattttaaaaatgtttaaatacgaattttgtataatactcttgtctgagtgcagccattgatttgcatcattgtttatgtactttgcatgcgcctggaaagttgcacttgattggcagggaatcgagctcgacaggcagcacttgggcacttgggcactcaggagcggagtcattagagcggcaattggccagggccaaaaggctgagcgtgttcgtgccggcggcgtgcgcttcaacgctttagtcttggccacatcgctccatggtcgccgattttcctctcgattcgatggctgggagtctttggcgtatagaccacggtctggtcttgtggcatgcggacttttgtagcagacaaaattgtcgacaaatagtttacacaggcatgaaattttgctgccccagcgagcaacaaaagaatgttgttgctcgtggcgcagttgttgttgcagttgccgcagttgttgcaggaatgttgcagcagcaacatgcaacacaaagctattggcaaacgaaaggcgagtggaatgggtgcggatcttgcggatagagacaagtgcaacatgatagcccacctatagcacccacacccacaaccacccaccagccacaaaatgtttaattaaattatgtgagcagagagcggagtgcgcgatagctgccccaggattatgcattgtatgcggtcattaattcatatcaaaagggtaattgaaaaccgcataaattaaacaacaacatgcaaaaaacaaaaaaatatgcctatataaaacagagcaatcagttttttattcaaatttctttctctgttatccgctggggaatgttcagcgcgctactttgacatttggctgcatagtttaatcttattaaaatatttattttattaaaatatgcatgcaatttgttaatttaactgctgcgtttgctgttatccaccgccactcccacacgccgcctactattttatttatgcagcacttttctctttgataccctgcaatgccataaagtatttgaatgttgaatgctaagagaaagttatgtttgaaacatatgttactttttcatttagatgacttttaaactaattttctaatctagcttactattatattataaggaaattagtttacataaaaccaatctatctaatgagggtattcccactatcgacagatcttcgaatggcgctctccatttttttagttggccatcactgatttcgtgcttttattgtggcagccactgcgcttaattgcattttgtatatgaattaatgaattttttatcagcaacaatgcacctacacacacagagagacagatgtgctatataagcctctgctcatgcatgttttatttatttgctgccttttttcgtgtattttttcttgtcacggcgcctgataatgcaatgaaaacaacaaatgcgccaaccgcagagctccacatttttttcgcatttgttttaatgcattttttgcaccgctgcgaatattttatttcatttgtggtagtccgaccaataaaagccaaccaaccaaccaaccaggtatagacatagtgccatttcggaggtcggttaatcttttcaatactacgccagggcagaagtgaaattctccaaggagtccggcatttaccatatcattaacaactaggctcgtatcgggccgttaggatcgtattatagatctagattccctagaataaaaaaaagggttgtgccccgaggccgcaaagtttccttattgtgtttcattaaaatgcaattaatataggctttcagcacattctgacgactttggggactcgaaatgatacccacactagcagcaaattagggtgcgcctataattaataacagtttcaatgaagataagcggggaacgtggcggggaatcgtgaagcatttcattaactttacattacatattatacgagacgaagaccagaggccgctgcaattgtcccaaaaactcggccaacggacacgtgtaagccctatgcacacagaagtgcacacaagaaagattacactgcgaaaaatgacattaacagcccaatagttcatgaaatgctgatagagttaaggcacagttttccctattgacccttgccagatcattttttttttaccgtgcagaaagggatagatagtgttttgtatgagtcaatccattaacgttttgataaaagatctttatgacgacactcgaagccacgccggcaatcatcatcatcagccgaagagctgaggccactgaaatggctttggtacgtgttgttggcctggccagcagagaaaagacaacaaacgcacacacgttgggtgaaaagtaattgcgtttaaatgcgtttacattagggcccgaaacaaagatacaaacatatgtatgtaccatatgtggatatagaaggcacataatgcaatggaagtcagagcgacctaattgctctgaggcctgccgtgatgaccaaggacaattattacattacacttgtaatggcattattaatgccgttcggtgcgattgtttttacgccatttcccaggcgataagccagaaataaatctctattggcgactttacgagcgccaaaggccaacactcacccaccaaacgtaagccccatcccgttcatagtttctttttacgactttttaatagttctcacatagattttatagatctcagccccgaagctttgatgggcccccatcccccggctattcctcggctatttgttgttcttacttctggccagagcgcataaaattgatttccttttcccggtttcccgactcgggcgtttactactttctgggctgtcataaaatttatgtttatgtcgtaaaatttagttcgatttttttgccctttgagcaatcgatgtgcgtgttttcactacccctcctcgctgtattctgttttcctgtttttctggaccacaccaggtgtttgcaaagggttttccctcacagactcagagacaacgccaaaataaaaagaggagtaatacgcaacttttccggccaagaaattgccgcctgcttgatataaacaaacgacagacatttatttttattacacacctttttgggggtctttttttccttcgcctctgcgaagggtgacactttggtagtagattctagttattctaatgcacatttcataggcaattccaaattaggcaatgtttggcaatgtactcgcaccccaaccacccaccctcaacatcaaggtgtggccttgggtggctggccagtggtttgggtgggtggttactttcccttttcttggtggaaaacggggctgttctgtgggttgcctccttataaaaaagtaattttctcattcgaggctttttgtatattagaagaaatggctttatttatttcttatttctgggcgtacaagtgcgaaatgaggaaaactttttgccgccagctttcacttcagtttgctctactctactcgcttttcgtttatttcacttgagtattttctttttctggttgggcgcccgttaaattggcaagtttgttgtgctaagtttttggggtctctcgcttccactcgaagcccataaattagacgcacaaattagaaattatgtgcgcatttaaatgtgaagaggagctccggttcgctcccccattcatttctccggctctgtcactgctccatatgtttttgggccaacttcggcgagctaatgaaatggcagtgggttgccctggccttttagtcaaactcaatgaatatttaaagagcctgcaaacgaatggtttcgccaaaaaaaaaaaaataataataaaccagggaaaagaaatgaaaggaacaaaagtataagtacgaaatggaacttttgtgccacggcgccatttggcgctacaaaagatatttttccattgaaagcgttatatggccgggcgaaaaagttgtttaaatttagcacaagacacatgtgtgtatacatctcctccgttcagtgggtgtgtttttgcgggtgaagatgtggcttacaagccccagaaattccgcatttcgcatttctttgtgctgattcttactttatttcgcggaccggagacaattgcctctgagatgactcaaaattgcagacagttcaatgatcatctctggttccttgccctcgtgatcaacacttttatcagaccatttgcatcgcccagaagtccatttcatcgacccccttgagtttccctctcattttccacgctcgctaatgtcgtttatcattagggcaggctaacctacaatttccatactgctgggccagaaaacgtatttatgtataaacatacctatatttaccacaattttctacacaattttccctaaccattttctggcacaattttcctcctgttgacgctagataatttccttttttcgagggcaacggaggaacgcattacaaaatgtcaaaatttcctcacaaaacgccctcgacacgctccaaccaaggtgggcggtttcttcttcttggcaggggaagggtgggtgcttcgttagttaagttaagttagtaggtggcataacgaaacaaaacacaacaaaaccgagaggcagagttggtcaggtgagcacagaaccgccgaccgaccacgcccatcattcagccacaaggcgcataatttgtcattgaatgtttgcccaggcaaactgggcaactgggtgatttgggggaggggctgctgccacgcccattgcggtcagtgggcgcagggcgaagactacacttaaaatatgccgaggtattaacagagacaatatccagtttaatataattcatattctgatagacatccaaagatcctaaaaatgtattaaataatcattttttaagttatgaaattcattcactattcattgtactatttggtattttatttattctctctctgtaatcttcggtgtttcggtggtttttgttttccaaacgaacaaaccgaaaacaaggcctcttcaagggggccgtggataatgccggtagtgggcgtggccggtcgagaggttgttggctagcctgcccaaaacatgagcggcttaatttgcctggctgggcatttaaaaagcatttagcatacagtggagtcgttacgaataggtccactgcaccactatgcgaatatttatgaagtttaaaagatattaaatatatgaactgaagtattattatattattattattgttttcggaatatagatgatctgatttcccagagcgttccctccggatttcgttgccatctccggcgtatctcattgattctggtttcagcgaaaatgagaggtcgtcagggctcacagcacactcgtacacacactcgagctccaagagagagagccgtataattataattgctgataaatgcctcgtactaataaacacttggcaccacgatggggcatttagaggatggagcggaggggcatgtgtcagatcgggattgggatcgggacgtgtgacgctaatgacacttggcttcgtcgggcaaaaatgaaatgatttgtgtgagagattgcatgccgcgcagtgatttgtgatttgtgtgttgagaaatgcagttttaaactgcaaaactggcagcttgataagctccgccactgtcatcagcagcatacggcacttgatagctctattaatggcacgccaccatcgtgccatctctttcgcttaccgtatgaccctctctctttctcggatgcagttcaaagagacagcgagacaccgaaatgaatgcgaaaataatgaataataaaagtcgggagtacatggtttttaatgtttccttgagaatgaatagcattgaggttaatgcggggggacagaaattaagaagaaaaaaaatacttatctctagctgactgcctctctgtccgtttgtctgtctgtctgtctgtctgtctctgtctcaagcggtatggccatctctctcgccgacttatcacttgatggcttgagtgttcgtccggttgttactaatttatgcaaccgccagtgtggcagatccataactatattacgacgataagtgtaaagctagacaaatttcaagtcaaaagcgaccacccatgaaacgcgattcccaacgaaagagatgggtatacgagtgctgcgtgcgaaagagacggcacggaagtttgcattttgttcggcaatcgggagttctttgagcaaccctcaaagtcttttttggtgttgcttgtttgtcaactcccggcgaccttccgcctcatcctgccgaaattttcagcaactcccaatgctggtgttgatgattccgttgatgtgagggttacccgggaagattccggcctgactgccgggaaattcgatgcgcattctattcattggcgtgtcggcccagaaatatgataatgcgctgcgccgcaccacaccgcatcggaggaaaaaaaagcaacagtcagttcgtaaattttcattgtaaaataagaacaagtcccgtcactcgttgagtttgcttttttaggggatgaagatgtattgccctttgtgccgtttgacgtaatgttacataagctctccttggtcctggtcccccgaccagattgccatatttcccccacctcaccggagtcctcattatgaaacatcgcattgctgtttcaatttttacgagtgcgattgcgaatcaacccgagcggaatcccaaacgtgcagcagctggtccggcacgttttgccggattctaggggttagggattcctattccgattcggaaatatgaatatgcctagtcctatgccaaaaggataaccccgaacagatatgggcaatttctgccagcacagcacaaaaggttttttcttcgttttcgttaatgcgtaaaattttaatttcagtttttgtcgatcgctgtctgggttatggtttgggaaattcgtgtcagcattttgacaaaagagttaataagttgtgggaacgctagaaagatggatcagcagataatatggggtgtgaattatgattggatgtcatacgtcagttgtacagctgtgagttctagagtccatttaaaatattcaaattatttaattagaattttagaaccttttacgatgttagagcaaactaaccaacgatttgtacgaaataaaatgatctaaattatttagaagagcctcaaagcgtgtttacttcctttcccaaaacaaaacggagaatacaattaaaagtgggtggggtgagcgaacgagtagtgaggaaaatgctttcacatcacaaaagacagagaaaactcccagagcgaaatgcctgagaaaaactgtcaacgccgccgagggaaagacccaaatggaaattgtctaattgtgcgtggtaagataacaaagcagagttagagcttcctgttattgttatgcctcttgttgctgtgcaaaactcatgccatcaatgtaaataagctagaacaacagggcatcggccaaagataatcgccttagttggggtacaaaaaacaaaaactgggaaaaaagaaactaagtgcacttcacacaaggtcgggtaggatttaaatgccgcattgacaaaaacaagctgccatccctcccctcctgatttggttttgtgagagaaggatatgttttaaaattgtaacaattggcaattgtgtgggtcttgcggcttgacgaaacttcccgagcggaaaggataacacgcacttttcgacccaacccccatgaaagttaatttacgtcacgcagcattttcaatcaatgtcagtgtggtggagggagaggtgttccttttttttttgtcggtgcaaaaccaaggggttgctaaaggaccacccgttggttttgtttattttcatttccaattttatttccctgaccccacggctgatctcgttttgatttgcatttaagcacgacacttgacgactcgtcaatttcgccgtgtaaataaacagattgggctttaaatttgagtatcgcttggctctttaacgccgcattagctcgtcactttgaaatatattttttaattgaactcagaccgaagttgatgagggtgttgtatggtgtaattacaggctctgcggctgtcagttaaaatatttttggttttatagggaaatctatctaccagcttggagattccaagtacacctataattaaagacgaaaggtatcttaaagttctgaaaggggcatgcccctttttccctgacctctgctccgcgcacaattcatggaaattttcaggatgcgcatccttgtgcactgagctctcttctggctctttttttgccctgccttacttttctttgtgctctcggctgggcatgaaattcctgtcaaaattgataaaaatcacattttccatttgaataacattttacgaattcgtgcataaaattacgacagaaaaatattccctttcccttgccgcagcgccttttcttctgcagtggaatttctgcagctcggtgaatatatacttattcttggcaaccgcattccaccgccctcggttgccttgtctacttaaaatgtggaaaatatctatttgctacgcccgaaatacgcgacgcaaatttcccacagacaccgagtggcagtagggaaatggaaaagcggggaggggcgtgccattttcttatcgctcggaaaacaagatggggagcggagcggagactgcgccccgaaaattaacatggaaattttgcgcgctgctagaaattattcaactgtagataatttctattgagtgctcgggagtgcacaactcgaactatgccgaaatttaatttgtctacaaagtcaagcgacgtgtagataaatcaatcaaaatggcgcgcacacacgaccacacaaaaaaaaatatatatatatatattctcgatgtacgagtatatacatatatactcgcatatcggtggaactcgcacacaatcgttaaagttgctgttcggcgcgctttaaagttttttttcgaatttgacgtcaacgtcaatggattggctgcggaacgcctccaactctgtggagcactcttcaaacccctccctcgtaatgcacgtgaaaaaatagtttaaacttgagctaatttggttttactaaacttattctagccagctgtctttaaaatactttcttttgttaggcaaaccatttggtaatttggcatctacatttttttcagtgtcccaattcatttagcagtgaaactgcattatcaccttggggcccccccactcaatattcgttttttccatatatatatttatttttttcattttcttgagagcaaacgacgagtggcctagagtgtctttttcgagagctgttttggccaggtcttttgtttttttcgttgccgccatacaaacaaaggggaaaacaacgcacttgcgctctccgaggaaataaaaatacagaaacaaaatattatttttgcctatcaccataaataattcacctgacttccccccctgaccgacccacgacggcatacgagatcttcaaaaagaagcgccaagtgcaaagtcagtcgcactcgaaaaaatattgaaaaagcaacaaccaggtgaggagggagtgtggggaaaatactaaaaaaatacacataaaactctttgcaggctgaagtggagtttggagtggtgggtctactgggctccaggttcggaactccaagacaggcagtctagggcctcaaaggccgaagatccgagggctgtccctaggaaaagttgttgtttcttctccacgcagttggcagttggttgttggtaagcgtagttgttgttactcttttgttaagttgttgtacgattacgctgcgaacttgttcgaaaagctttggcggcacttgaaacagaggcaaacaacataatcaaaagtgggagacagccgcctcaagaggtgtgaagtgtgtaacacattcaatagggattaagcagatcgaaactggctagaatcagcttcaattttgccgcataagctttaatggagcttaatataaagtctttggtgagattgttttaattatgagaaagttctattataatggaaaatccacatatttaatcgaaactaaaaaagggccctatcccaagtttcatatcaatcagattggtttttatatcactcagctgactttaactatggtaccataccatgtactagcctcagtattgccgggagttccaatcttgtttctaatcttttactctcctaatagaactaacttgttttagatttaagtgtgcacttaccagggtctgatgtatctagggcaggtggctgctgtgacagtggaccgggagtactaccagcgcccggcgatcgggcgtcatcgttcattgcgccgccgtaggacagcgatgagctcggcggccgctgcaagtaaagaataaatcacacaatatgaataagtaaattcattccggaatagaaaagggtatggctggggttggtggggtgatgcgttagctgattgttagaattgattacaaattggttataaatgtcgctttaaattgacacgcctggccattaaatgcgccagacgatacagccatggccaatgccaaaggcagacattgtcagcccccgtcttgtccggattcttccgcctcctggcccggctataactccccccttccaccgcggactgtctgcacgactgtcaagttgtcaaaagtgccacggcctggccatattgtgaacaaacaaatgttcaagattgtcgtggcctaggcctagagcaaaatacaaaaccaaaccaaactgaaccaaaacgaaacgaaacgaaacgaaacgaaacgacaagagggcagacaacgtcgtgtgcagaaataaatatagctagatatacacgtatattgtatatataagttatcaaattaatatgcagcgactggctctggcgatctgaccgtcttctaactaggagtagaatcaactcgtctccatctccatctccatcatcatcaacatcgtcatcggcaatggacaacaggccagcgacaacgatggcatattaaacgcggctaaaacaaaataagcaggcaaggaaaggaaagaaataaaataacagcggggaaaaacttatgcagaaaccaaaaatgtcaacgtaccaggtattcagcgatcgaaatcgatcgaagagcaatttaaattctgctaataacgaaaatacacaaagcggtgttcgcattaatttcatgcacgtgcaagctacaatttttagccataaaattattattttcccaagctcgtaaaaattcttgactttcgaatacaatgaaatatacgcattttgtcgcatttgtgattcatttcgaattcggggcgcatattgcttgtgttttcgctaaatatttgttaaatcgcatattaatagcgccctgctatagacaatttgtggcttgtttgctttgtataattgttattgccgaatatttgatttaatagatagagccccggagagcaatgaacttttggggtattagctttaaccataggtttgaggaaaataatatatagcctacgttagattaggcgacttggccaagttccaggggacggctggttcctgcttttttgcctactttccatttcaaacacactcgcagccgcaaatctattaataattagacaacgccgtctgcattttaaacactcctagccaatccaatccaatccaatccgatccgatccaaacccatccctccactttatgagccataaggtgtctcttgatagtcgcataaacaatttccaccataaacggacgcgataatgccgctggaaccgcctgcaattgtagcaattgtcgttgcttttatggcttataaacaaagacaaagcacaacaactttggactgaccgccggccaaaatggaactatttaattagccagccgaaatcaaatgaaatggccataaaaaacagagcctcggctaagagagcaaaacaacaactttcccatgcagagaggcggtgaaatttgataggcttgatggtctgggccaagtcttctggactggctcgcatctttcacacttgccgcacactttgccagggttctgtttcattttttcaatattatttttttggcggcctgggtcctgtgaaggtggctccaattactgggagctgagagcttcggaacaccgccgagtgttggccaaaatgcctggcgtgctccttgaagaggatccggccaatcgatgcgtgctttaattacattttcaattagccgaaggcccgctccacaaattaagctatcgaattcctttcgcatgtcctgcgacaattattaacaaatatcggtttttattcaaatgatgagcgtccatgctggggactgcttttaatattaatgaaagcgaaacgagggggttcacccatctaaccccaaacccaattccatttccacgtcacgtaatgctccctcatcgtgaaaagttttttttttctttcggggcggagcggccctttgggtgcattaaaatgatcaagaaacaattttcgtttacctgccggagctaaattatttatttaatgccctctccgaccgctctgcttgctaaatttttgatgatatctggagtggagtagcgacaattgggcgagcgcaagtgtagatgggcaaccgagacaacaaccgcaaatttctagggccaagtgagtcataaaaaaagttacgaccagagccatcaaagtttacactgagaatagggcgatgttgaattggttttcttttgcttgatattctatcatgggcacactgttaagtgcgaaaaagcccagtgtgaccatgtagtctaccaaaaacttaattgctgttttgagaaatagcttagtgtacgatttgacacgaaccttcttcgattgttcacagtgcaccacacaaattgctgaagtatagaataactttgctcaattgttttgggcttcgctcacttcattacgctggcgagaagtttgacttgcggtcagtctgagaactttccaagtgacttggctaagtcggctcagctgcggcagataattgctgtcggaatgggaaatgggggaatgggcaggcgtcgaacaaatatcgacgcgtgtcgagctgcgttccacccaaaagtcaaaacatgcaatttccatagagccctgtaatttggtaaaaatctctgtcacagctcctggccggttggttaatcactacaatcaacagtttcgggacgctgccctctcgaattcgagtcccatcgaaaactgaagcaaaacaatcaaattacggttcgtaactcagttttcggtgcgtgggaagttttccctttcgcagtgggcgtggcacacgcagagattttcctcccttcttcatcactggccgtaattgcccgacggcgtatatactgcaattgacatacgggagtgggttctcgggggtaagtctaagcctaacccgcggctgaaatcccaatcccagtctgagtttgggtctgggattaggccattgcctcgggctcatttcacaatttaaaatacaaactgcagctaagctgggaagggaagaggtatgagtttaaaaaaaaaactgcaataatcatacacagagaacgaactccgatttaaagatgataattatttttgcactgcacaattttgattgcttttggtaataattttcctctgtgcagatagtcctgtaattgtgtttgattttgtttcccgaacacccagccaagtggacgtgaaacatattttttctatttgttggcaaacacgcaggaaaaaattttctcccccatcggatgagcatatccttagagcaaataattaaatcctttttacacggccgctgcgaatgaaagtttttccgtgcggtttctggtttcgcaggattttcggggagatgggaagtgctcgatgtggaaaagtgagtggcagcgagtggaagttgagcccaaaccccaagcccagtcgcagtcccaatcctcggaacaatccctcctggctgtttgttttgatggatttgccgttgttgttctggggcaacaaaagcttttgtttgtctgtttgtgtcatgtttgttgttttggtttaggttttggttttagccacaaggccctccagcccggaattctctcggtctgaagagtctttggcgttgggtttctgttagcaggctgcttaattaacggtatataaccaccccaaccctttgcctaagtgtgtgtgagcgagtgtgtgccacttgagcagcagctgctccacccttttccacttttccccccgttatcaccgccccttttcgccggtttttccctgttttcaggccacccacccactactccccttttgcgctgttgccaccttttgtgtatttaattgcgcgcatggcatttaattgtttttcaaatttgctcaagctgtaaaatgtgtgttcatgtgtgtgagccattttgtttggggggttgaatttttaattaaagccagtggaggtgcaaaactccttggaacagcccgaacaattcaatatggctgactgaaatcgttcgccccctttggcagccatcacttttggcaggcaaattgctttactaagaattttccacaaatgaatgaatggatgtgcgagtgtgagtgtgtgtgcggggtataatttcaatcaaatggcaagttaattacacacaattattgtgtacactcagacagacaaaaggcttaaagtttgttcaagtttgctttaagtttattgaaattaaaggcgctaagctctcgggaaaagtgttcacctcaccatcacatttatttatttctttattcacacaataattccatattaatcagcgtctaagtcatcggctatcagtattttaattaaacaccaataattacgcacatttcaggccgactgctatcatatcttcagaattcgaacatacatccacaggcaatgacaaattaattttccagttaaattccagctcgagtggcaacattttaatttcatgtcgaaacacttgacataattaaactaaaccggagaacagcaagtcgactattttagatccaagcacggcaaattactcatacgccgtgttgcagctcccttgtgaccattatctaaccaagaatcttgacttcccatgctgtccgctatcagcagccaacgaaagccaaacccaaacccgaacccaaaataacaataaaacatgagcgagaatggagaatggagaatgaatgcctaaagtacaggtctgtgattaaatatttataggctgataacagccaaattgaagcactggctgccgtagctcaaaaaaaaaaaaaaagaaatttggaaatcttgtgcaaacaatgaaattagtattttgataataaaaattcagaagctacctgaaaaaactactcggcttcccgaagaagtcaggaatataagtaaggtaaaataataaatagataaggcagcggtggcgcgcaattgtgactctatcaaacttatcatttgtttgcctttgctattatgttacacaaacagtggaaacgttgagactgcaggcccgaaaaaaaggtacaaaaacactataaataaataggaaaatacatagaggtatccatccatcccaaggaggaaaggctcggcggaaatggagcaaatggagctgcacgcgattttacatttcgcacagatcggatttatctgctccacaaatctcgcagctatcaatttgaacttttcgctcacacagccccagattaaccagtcggagaaaaagaaaaaaatgggaaaaaatgtcggagagatggggtctccagaactttggactctagttttccttattttttcctcttttaatttgcacctgagtgcatttctcgctgcggctgccatgcaaataagataattattcaaatggcatgtttcacacaattccaacacaaattcctggggatgcaaacgggagggagggaaatcacgaaagccaatggaatcattttcttgccggcaaaagatatcaagatagcgacatgcaaatgctgcaatgatcgcgagaaatagatttgcataagaggcttgcagactggcttgcatgtgagaacattaatcgtgtaattaatttaatgcatgtgtatgcaaagtaatttcatgtaaactgtcacgccccctctcccctttgcccattctgtttttccccatttttacccgactccccacctttttttttttttttttttttttgtagcgtgctaaaaagtctcccgggacaaacgaaaatccagcggaaagacaacgacatcggtccccaaaccaatacccaaaacccaaaagccaagaccccagacagtgtcaaatagattccgctggccgatagagacgacaacctggcccagagattagccaagacatcggaccgggccagcaggatcccgattccgattcgcagtacgattccgatcccaaatcggacacttcgtggacgtttccctgtcagcagactaacgcaaatcccagctacaacgacgctcgcattcgagagacccaaacattttcatttcgcaagcggggagatttcatagattgcattttgcaagtgccccaaggtgttggccaacttatcgcctcgccggcttgttccttttggcccggccgataagctgacagctgaaattagcccgactagaggaaacatgcccagagacgaggcattacaaggatttgtcgctgtctggcgagtcatgcctcaaaaaaatgccattgccagtggttgtggtgctggtggaatgggcggggttgtatggtacggtatgtcatgccctctggaagcccaaaagtgtcgagtcacctcgacgggcagcataatacgaaattcatacagtattattgatatgaacacactgataaatggcccagagtgactcaaatgtagatcaaagattcgcgcgagctacgcattccaaataaactccccagttccctgttagcccctttcaaataggagagtgttacactgagaaaagcgaaaatattctttaagttgagagataatacgcaaggtaaaattatggtgcatattcaatatatctatgaataaaactgtttaatcaaacagaatgataggtttgttgacaatcaataatcatataacttttttattgatttggcttattgatcaatttaatacaccaatttccctcagtgccatgaaatttctcatctgaatgcgatctgaacactcttgttttgaattttagcccagtcatctttgccgcgaacttcagcacggcgcttttgagttctgtgtattatttcattcttctttttttcccctttttagagacagtcttttgaatagaggggcggtcgagtctttaaaagcctggcctggccaaaagtgtcgcatcatggccagtgcgagcagcagactggaagacgacgtcgccatggccatgacgaggcacaagttccgcccctcgactcccagagccaacattaccattcccagtcccactcccatatttcccccgaaaagccactgcctgtgcctctccagaaataagtaagagtacttaaggttgaatcatgccggccactgccaaatcaattagacctggtcgtgagcctcactttttggccattactcgccgctttgtcagccccgcagagggccataaaaattagaaaatttgattattgcaacacgaagcgttgcccgagattgagtttggttcaagtcagagtagcaggagtagcatttcggaagtgaattggaatggcgacctggtaggcaggacgtcccactgggccgggccatttgcatattatcatttggggggggcaaaagatgctctggttaaaaatttcattacccaaaccctcgaatccggacaaccgaaaaaagcacagtctaacggtagcgatgagtttaaatgagtttattacatcttttggcgccttttacagcatttagccgggcatgtttggtaaaaacttttcccgaccgaccaaaaggggtgtgcgataatgaaatttccatagatttgcataaaccgagagcccccaagcgactcgagtcagtcagcagagtcagcagtcagccagtcagccagtcaggcagtgaggcagtcaggaggagatgccctaaattagataatgtctaaattggatttaaaacacgcattttgcgggtttccaaccaacacccattgaagacccatcgagacaacatcaaaatatcattagaagccagtgcttttttctgcttttctgctgtctgggcatttgaagggttgctctctctgatttgtatgcaaatgttttggctggctggaatgaaatttgattttccatttggtggaaaaacaggtgccagacactcgctctctcactctttctctcactgtgccactaagccgattataaagcgtaattaaattacgctggaaaatcatatggcggtgatgaagtaaagtacagaaatgtttcaattataaaaaaggggtacatttttagtaagctaagctaaaatgtgttaagagtttaaatagttatatctcgacaaattgctacaaatttttttttttttggttttaaaacccctttctaaacactatattagttgggtgacatttcttgagttctctggttgaacgtggtttttttatcgctgaactttggccaggttaataaatcctggtgctacccacattgtcattacgtcatttgcatgcacatatacgcaaagtcattggggcagccattatacaaaaaaaaaaaacaaaacaaaacaaaaaaaaggacactaatatacacttggacaagttcataaactttcgtttcattctgccccaaaggtctggccgtattattgttgtttttacctttgtttttagtgtggagattgcgtggcatttttcgcatatttctgctgcacatttcgtgcaaaacttaattatattaactgagttatttgcggcatttggcgcgctctgcgactccagctcttggccctctagagtacggtgtatgtagtatacatatgtatgtatatgggtgtgtatatgtacgtgctgcaggtgttgttgaacgacaaaaattatgacaacttaacttgactaactggtgtggctgtgcaaccgagagggagctagttgttcgcacctaaatggccagaatgacgggccaagaaggacggacggacggacggactgacaaactgacggactgaccaactgacgggcaatcaacaacataattaaagacaacaaatgctcatgtctccggatcttttcctctcctttcagttgtttttcttttcgtttgcgatcctccagacgctgctggtatcttttggtatgcaacgagttgcaattaaaaatcaataaaatgcgtgatttttgcaatttctgcgcttgccattgcaatttgtaattgccataattaaaatgttgaccagaccgaagagcccctttctctgcctctttctctttctcttaatcaaattttcacctaccaaaacgtgatcgtaactggcaggagtcagatggcaatgagatgcaattaaatgcgttttcaaacaatttcactttggactcgggccgggcactgttgttggactgactgcttttggacggaacgagggttgtgtgtaaggaaaccaccccgaaaaccctgacaaaatcaggcaatcaatcacaggaccgccgcataactcaccctcgtctacggacttttcggttagggggcgcaacaaatcggattaactccgccagactgtaccgaaatccacgcaggcgcattctcgaaggatgttcaggatgagtttcgagttctgattctgattccgagtcctcagctctatatctattgctgtccctctcccaccgacgactctacctcgcagggggtagcttatacatatatctctaacaattaacttctttggttgaggttttttcgccgttctgcggggcgtgtccggccatccctaaaaaactagatttctaaagaatcgaaaaaacgagcaatcaactgtgagatcgaaaagatctcgcatccagctgcgtttgttgatcgttagccaacactgggcacatcaaaggggagaaaagcgagtggcaaggggatcacgtggtcgtgtcagttgcctgtcaaaataatcattatcgatggtccaccgccgataaggaagagatcacgatgcgaggatcactgtgggccgtagattggcgaatgcagcagggagattgaggtggtaaaggttgtcagacagcgatttgactttggacgggctctaactaaccctgaccttaatgaggaaaggtttagattattaatctttaagtttaattgctcgaaaggagaaagtaagtcggcactaacatatctatcaataatatgtaaagtgaatatttgtacgagctttttttctaattcatttcgaaatttcagcgagataagacttaagtttgaagcttagtgtaagtgggttctttctattgcctacatccctctcgctcgcactcgctcggcccacagtcaattgaaattctacgcattccaacaaacaacaaacaaatgcaggcacacagatagacacacagacacatgcacagacagttgcatatatagaattctcaattgctttcgcatcattacgtctgcgaacaatttatttttataaaagcgaagcgaccgcgccgccagtccgaagttggcgtcatcatcacgatgatcaccatgcattttccccgtgctgcattttccctgtaccgcattttcccgcttgccgcttgccgcttgccgcttaccagcgctctcagcgaagcgttcacgttcgaaagtgcagaggcgctggggaaggaaaagcgggaaaattgaaggaaaatactgaggcatgaaagcggcgtaaagaaatcaaataaattttattgtataaaagcagcaacaaacccaagcaaaacaatcattgagccagctaggctgtaaatagtttacagttctctctgcggttcctcacacttttccttttcctttgcccgcgctgcaatcgatcgcaaaatttcccccacttttccgcgctctttcggtttgcattccctttttttcctatgcttttcttttttgtattgtaaacaattctgttggcggctggcggccacatcatcatcatcatcatcatcagccaggcggcctagctaaatgggtgttgagtgcaaagtgtttgtattgccacagattgcccccgctagagcccctctatatgccccgatatatatcgccccatcgatccccattctgtggcaaatgcaatatggtcgatcgcgatcccgattctgcatctgcatttgcaccagcatctgtatctgtatctgaatccgtatcggaatctttgcctcgaccgtgttaagtgctcgataattttcgagtgcatacttcttcaactcgggcgatttgtctcctcaatttaacgctattttcttgaggttagtaaaaatgatttatttttgggatattaccgttctctggcaaattggcttcctaattatcactttccaacttgatcattaaaaactgtgttggtttgataaataatgtattttttgcatacttttgtttctgtttaattagcgcttaatttgtgttttttttttcgtgtggcttgctagactgtttttctgtttgaattccgtgagttttgtttgttgcaagctttggatcgatcgcctggcgttcggttccttattttattattattatttatcgattcttttcgggtcgcagcgggagatgcatcttttgtgccgatgtggctgctgcttcttgatcgctttgtgtgtctttttaattttatgtctggccttgtgcctttcgggggaggggcggggcaagcggagtttttggagctgacactaaaaatacaattttaaaatacgaaatacgaaaattcgaaatcgatgtgaagccagaaagaaatcatacaaaggccatggccaaaagcctgaagtaagaaaaaaagcagtcagctctttttgagatttttcataatttttgcgctgaccacaaaaaggctgcaacaacatataccatacggcaacgaccaccatgttaacgactttgggctcagactccggcctcatcatcatcatcatcatcatcatctcggttgggctgggcaccctgcagcccctctgcgtccacctcccacccctctctacattgtttgccggatcgtttccttaacgtaatgttaaagtttcattttcgttgcctgcgcagtgataccaaaaccaaagggcaggaaccgaaatgagactttgtccaggaaaccggcgaacctcggcgagctgcaacaaatgagtttctttttttggcctgttttttttttgtttttgcatttgtatttcactttttgctgcacccctctgatgatttttgaattgatttgtgttgttaaatattaaattcttataagtcatttgcactcggcgcgggtctgagagcttggagccccggagcccacgggcctgggatctttgtgtggctccaaaatgacagacaagacggtacggtccgctcccctttgtaccgcccgattccccccgatgtgcccacatatatcatttacactcggccaagttggcgagcgagctggcaattggaaacggaatcgaattcgaatccaagacccgactcagtcagacattcagtcagttcacagcggtcggtcggccaaaaatggcaacggggcagcctctcagatatatagtcgtacgtacgaacgtatatatatatatatatatgtgggttcgtatgattccccaaccgatgcccccacttcttgctgttgtttcttttggggaggggccgctaggtggggagcctgctggctcaaacagaaattatattttcaaggtgttctcctgcacattgctgggtgccttaattttctcgtatttttataattttaattaacattgctggggcgcctaaagattgcaattcgattttaacacagtcgaagcgttgagcacagtcatgcttcgttatgaggaacaatttagatgtgtatatgatggaatattgctgataataggtacaagttttttctcttttcttgtctcaatatgtgtgaaataaataaattgttcaattttaaaacattgcaaatcaaggaatgagtactgtggcaattataccctttgtgtctctaaattcatatgtatgaaactggcgttttattgccattttatagcattttattaatttttctcgcaaaacggagacagactttcttcgactttcttggcaaagggaaggggaaatgttggggtctgagcctcgaaaaaaagagacattcaataaacactcacgcagtgcacaaaatggactttaaacaagtgccacatgaagtcgggaaatttatatggagagctttaagtaagtctcttcagctgctgttgttgttgtagcctgcttcgttcttccgcagcctgcgtctttcttctggttcctcggcagctcgtttcggttgcattcattacaagcgagccaaaggttaacatgcaacgagcgaacgaacggcaagctgcaacaactgcagcagcagcaacactgcaacaacatcggcaacaacacaacagcaacaactgctaaaaagcttaaatttcacaacacgcttcgggagacagacaaacaaacacacagcatcaacgttcatcgtcgtcgtctctcaacttttgcgtttgagcatttaagtgccaattaataacaatttttatgaaccgaagaaatagttgacaacacggcatggcttctcttctcatcccctctccgctcgtcagtagtcttcagtcgtctcttctcgtctcgcgtctgcgatgagcgttgcatgcaacaagcaacatgcaacatgcagcgtcttcgtctgcccgaccagccaaacctcatttgaaaacacataatattgtacactttatgaacaattattatataagttttattagctgtgcgagagacgaagcagcagaaccgcgcgagactctttaattaatttgtgatttttctgcatcagaagctaaagttgcagcagcaacaactaagctgacagcaagttatgatactttataagttgcagcattagcagcatcttgaataccagcagaactagaattattaaagacagacgattgcaagacaagttgcacttaaagctgcttttacaggaaatatggcctaaactgtatcggaaattgatgttgatgtagacacaagatagaaagaaagtagaaagtataagtatattgccttaaaatgagactagatagatacttagtaggaaagtttggcttcaaagccatttatttaaatagcaaaaacctataaataactctctactaatgctcttacactaaagtatgctcacgaatataattaaaatacaaaaacagtagcattaaatcggccattaccaccagctacttctgatggtgcaacagcaacattgggagtgtaggaaaacccacccgaatcgaccattgcattagagggcatttatgccggcttattgacaggaccaaaagtccttcgaaggaaacccaataagcatacgaaggcagagcgggacaggctgactttgaaacatttggcgacattaatatgatttaatgcgttaattagcgcccggcaaacagaaggaacaacaacatcgccgagggtgcgaaaccagcaacttgagagcatctgacgcaaagtgttgcccgcgcttttttccacccagaaaagtatgctatgcgccccgcttcgagaattccccaaatccccgaagcggattagtgagagcgcaggcatccaagcaggaaaagcaggggaaaggcggcaaaagcggggaaaagctggtgtctgactggtaaaaacggggagtgaatattcagcgccccgtgtgcattgcgtaattgacgtcaattttgttttcgcaccgcgcataccaaagaaaagcaacagcccacatcccagtagcccacagaaaaaaaaaacaacaacaagaaggaagaacacctaagagggttttcgagtgggtggttttccctgctcggcagccgtccaaagggaaatccaatacgcgaccgagaaaataatttgccaaaatatagaaattgtgtcgccgtgcagaaatatgcagcgatattgaaaacttgaggccgggccaataaacaggagctacgacaatttcccatttccattgagggtggcggttggcatcatatttcatttattagcagcgagcgtggcaggcatttttatttatgcccccataatgccgggcatatgtggcccaaatgggaattgccttgccggataagcagcctgagcactcagagaacggagagctggagacaagggcagagaattcgaattctcagttctgagtacttggcaagtaaaagtagcttagagatttacgcggcattggttccattgaaatttctgttaagctccacttagcagccctccaaatcttttggctaattaaaagttttagttaaatgtgaatactactatagtactttaaaatagttgtagtatgaataaggcaatttatcatagtactgtctaagtataaaaaatcgagaaaataggccagggcaaaaaaataaacaaaggagtcgggtttcatggcacgtgcgctattatatatgcaataaattatttctggctagttctttgctgccccccggaccactgaacccactgcggaatttgctaagctgcctgcaaattatagaaaatcccccccaaagtcgccgagatgtggggataaagaaaaatccaatgtaagcaataagcaggaacaccattatctaatgctcggcgcgccattcaggcataaagccgaacccccactcccacactcctcgtggatttcctggtggaaaacttcttaggcccgaaaatagtgcgcaggaaataaagcacaaaaaggcaataaaaatttgctgcccccacgaaaataagtttgggctgactattttgtagatgttggccgcacagcttccgggccaatagaaatgccagcagaacaacaaaggccaaaggacacccttccgaaaataagccaaaatccaggactgggcctaatggccaaggcaaacagacaatcagacagacagacagatagacgggaaaatacagatagaaacgaagacgtcgccagcagcgggtttaagtgcaagtgatttatgtcctcgaagatgtgggcgaaaatcagtggaccaagtcggattcagagccaaaaattagctaagaggaaaatcggccgaaagccagagcaaaatagcaattttcaatcaaaagttcaatgacaaatagaatgcattcaatatgcaaggagaacacgtttagcaaatatcgatccacatcaaattggaagcctttcgaaaccacattgatcaatcagcagcaaatgtttaaggaccttgcgaaaagggttaagagactcgagctaaattcaattagcagcggtcaaagtggctgctctttttgatatttgaatcataggaaatagatgcccttcaagctggattcgattacacattacaagtggtcaatacgggctaagcggacttaaggtcccccgttcttatattttctctgtggtcagttgcgtgttggtaattgaaaagcactcaatggggtcaaaagggatcaacggtgagggaagggagtgctgatccgatgataggatcaactgctgactaatcgagtttaaaacaagcgtaaattgtcctgctctttccttttgatattcgagtggacttcagtggcgttatttgcggtgccaagtgcagcgaatacgccgggtaattaatggtaattgttcagagctgagctgagctcccacatagggcttccctcaggtgggcatggcaaaaaaaaaaatacaaaaaaaaagaaggtaaaagcctgggagaggtgctgcatttgcctaatgacacaaaagtaaaccgtccaacggactttgtataatttccctcgccttttcgctaagctcttaaaccgatttgcagcttagttgaatgtccaagagatagaggagcttcggtgcaaaaatatttcacaaagccaaaaacgcaaaaaatgaaaccgaaactgtgtgttcattggaaaaaatgttttggtccaagacaaagagtgtgtgttttttgttgctggcttgtcttgtggcatttttacggcataaatttccattgaattgatactttttggccggcaccaccaccaccaccaccaccatcgcccctcccgcaatcatggcaaaaacgtaagcagcagggccaacaaaaaaaaagggttgacacaatcaggtagagtattcctcctgtcggccgccgtcctttgaaggcaacaacacttgagcagcgaaatttcattaagatttcaaaaatgttttttggccagtttctaagatttcctggaattgagtaaaacagttaaatggacaaaagatatattccataaaatgtttacgactaggagttaacattgtgtggcaaaagttttcattaggattaagcctttttttcatttcagatatgtagttataaaacaggagagccgtcagtttggcatgtcttttcacgccgcccaaggattttggtgacccaaaaggtatcgcattcaacgctttcagtacgtgtaattcccctggcaaaaccaatccaaattctggtcaaaaaacttgccgttgaaagctaacaaaaaacgaacatcagatcagccgcagacgaaatcttgtggcaactgcattgaaacattagcagtgatgacatttttgcggtcaccacccctctgtccaccacccaaaaaaccgtctgtggatcgtctgcctttgttgcttttgttggttgtgcgatggagaaattcctgccaacgcgacacttcatacataataacaaaagatcgacggatcacaaaatcgtgaagcgctcatgactttgggtttcgctgagtaccctgtatttgtgtggagtgtattagcacggcaatcagcttgaagttgtgtcgaagaactgttgtccgccaacgtaattcatcatatataatttgattttaatttaaccaatttgtcttaataaactcatttgggcacatgcattttaaatgtaacacaggggtatttctgaaccgtttccccctgcaaaaaggcgatcaaaccttgtggatttttttcgggcatttgtagggcttttgcggcctgttggtttattaattgtagccttggacttggcgatggtccctctttgtttcacaaatgaatgcacaaatttcgggacaagtctgctctgcggtttcgtttgtgccacaaaacgcagacagtatgacgacgccgaaagccgcaagagtgaaaaacaaacagaaaaaaaaaccgcataaaagcaaattataagaaagaaatccttttggctaactcgtatttcggctcaaaagtcttcaggtgagagtgccgctaatgagccaaagccaaaaaccccaaaatcttcgatcctttgctacgtatttctcgtacttttttgtccgagtttggtttttattttagcctcggaccaggcctggtcttcgatttcaaaaccagttggtcagttttgggaaagggaatggattgtcttaatgcctctaaaattataggttacttcgcgcgctgcttggaaaattgtttgcttttgttttggggcgttgctcgagaaattaatacaaaacccaagccacacgaaagagcattttcttcggtggaaattccttttgaattggtttgactttcaagagcccagaaacacgcccagggcaatcacgcaaaatgccaaattacatgtagccaccattaagcgaacgaactcatctaacacgcacccaaaaaaaagccggggaaaataagcccagccgaaaaaaaacagagtcatttaaggtgtttcacacacgttctttccccgcgtggcagctgtctcatacgattcgatacgatacgatcgggttgggctgggttcactgctcgaatttcagagtttctgagatctggcgcacttatccagtgatccctggcagcacccccaattttctggatcgaaaacctccctctgcactttaagcggcttacacgtgccgcctggtttcgtccttcgactgggtttcaagtaatacgagccgagctcctctcaatttacacccgctgctaatggaacaggagccaggattgtgtccagtttccagttcctcaacagggtgaaactatctgaggagttcagttgcagttttagagaatgtaagtaatatagagtgtctcaaaaagtcaatgctaatagagttgtagagttcattataatggaagttatgtagtaaattatacatatatatcaatattaaggagatttagaaaatatgttctataagtataagtgccctaagctgcgttgaaagtcacaaaatctttagtatgttaggtacctatttatagaagttacaagatcattgagagcaatgtagtaaagctctcttaaggtaatttcgaaaatctataatcgataaatccgattttactgaacacctaaagaaagatattactacactaccatcctaagatctgttaaacgaataagacgtatccaaacgcggctgaaaagtagaagtccctaagcagtagacataaatccatcttgagatccatccgcaattaggtgatctgaaaatccagctgaaagaatggaaaaatgtcgtatcctttaattaatagtcatccttctttggtttcgtctgtggtatatccattaatggtgatcttcaattgcatcgtaatgctcccagttcgatgctgggaagagtcctaaaatccatgcttgcttataaactagggtagccagaaaaaaatcgatttcattttgttttatacttttcaaatatattttggttttttttttgttgtttttgtttcttcgtttgtttcatatatttattggctaactctttaaactttactctgtagttttttgtttttacttaattcttctgtgtttttgtttttccttgttttaattatattattagtatacatataaataattaaaaatattacattaaaatgtattcgtatatcgtatagaagttgctgtttgttttgtgttggattttcattttacttttctcttttctctcaatttttgattgcgttttctctcctccatttcctttaacatttacgttcattttacaattttgctaaaaactaaataaaacattttatttgtaaaaacaataataataattattaaaaaatgtatgctcaaattatggttaatttctttatttttttttatattttaaaaatagtaaaaagcaaaaaagcgccttctttcgatttttaaaacatattacgtatatattttgcatcattttttaattttagttctttattattatttttacttgtgttatatttttataaaatatcacctaaagcaattacgtatttcagtttcagtatttgtgtttgtatttttagtttatttttacaatgcaacaataaaaattttgcttctttttttcatttttgtatttttttggtagcaaaacatttaatacaaaaatcattaaaaataatatataacgaaatgcaaaaagctcacactaaactcataggaaacaaagtgttcatcttcgtattttctctccttttttgcaacagtgttttgtttttaactaaagcggcgaattatgctaacagaaaaattattacataattacagcaatttttcaagtttaattttagtttcttacatacaagtttttgttttttttctgggtttgagacaaagtacaacaactattttaatttttttgttgcaaattttttttatagttttgcaagaagttttcgttttgtagttttgaaaaaatagtacaaaagcttttcacgttgttgttgttttttagttagttggctataataaaccgctgggaatcggttcgactatagtctaagtatacaaatgactgcccatatagctgaagaactgcgatcgactgttcgcagttcgatttaagtacattttttttgtagttttgttggtttagtaggtctacaactcaaaatagtagtagaaattagcagtagaaagtgttctgttggttggttttggtagctagaagaggggtttgctgcttacgattttcgtatctttgagtttcgcttgcaagcttaggggttcgcctagcatacaactccaaaggggggggggggggttggtaaattggggattttggggcctgactaagaactatataacgtacgctatagtatacaattgggggaggagagcgtgggatctctaagtttctccacggctccctaattcaattaaattacattagctttctccttttatgtttattttataatagtagtatcgcgtagttttcgatttgctttagtaaatgctaaaagtttgtttagtttttagttgttgctgttgatttacgtatatcattgttcttgaagggtatcggctcatttaaaatgtcgttcgtataggcgcattgcaatcctcaattaattaaattaactttaagtttttgtttcgatttccattttcattatttaataaacaataaagttttattcgtatactttgcatttgaactcaggttggggtttcttttctggtatctcttttacgtatatgcgttgcatgttcagagttaaacaaaaaagattaacgaaaatagttaatattctcatttagcgtttttttttgcgattattgattattaattatttggcaagttcgctccagtgttgtaaaacacgaggagggaaaaaggacgttttgtttttgaaaaatcgtatacacgtttgctaaagtgaaaaattcccgaaaacatataggaaaaaaaaaattgaaaactaagcatagaaaatatgtttagaaagtttctaggaattaactatacttttagcgtttgctcctctctcttttacttgcgagtgaattcttttaagcgcagcctagacttgactttagttacaaactacatggctaagcgttatctctatattagatcgattttcagtatattcatagagaactgctgagggggtcgaaggggaaaagtcgggccggactaaaagtccgcctcgtgtttgatgcgatagctggcataggtctcctccagcggtgaaaagtcttgggtgctgggctgtgatcattttccaagtaattggcacagatttacgtaagaattttcgtaatatagatagagagagattttagaaatgttggggtatactcgtatactctgtgtgtctggtatttgtatttttctgttttctgtattatgtagttaagcttttgtttttggctatgtcagtgtctgcttgttgttgctgttattgttcagagaggagggacgggggatgtcacgtatttacaagtttacaaactcaaaaaccgatgagcgagcccatcgatcccactgtctaactgactgtacccgataaggatcagggcagaaaagtcaggccagctctcgtatatcatatcatatcagtatacatatataatatatgcgtatttgtgggtatttatatatagtttctatatagaactctatatagagttatgtgcatatgtaaaattgttaaaaattggttagttttggggttagtaaactttctcataatataagttcattacttcaattcttgttggttggtagtttgtttttttttttgtttttagggtgttcagtgtgggttaagtaaagaaaaataatcaaaaatagttggttaatggtgtgtgtgagtgttgggtttttgttaataataattaataatatattggcgagctatatgggcctcttgcaaaaacgaagttctggaacatggttcattgtaatttagttctcaattactttatgcttttcttatctggctttcttgtttcattagttgttggtactttttacaaattaagcgaaattgtttgttgctctaattattgttgctcagttgcttttgtttcgtattgtttatctttatcatttacaatctgcttgagatatataaactgatgtttgttgtgtttacgtgttttctgttttttgagagggcgtgagatgaactgggaaggcgcgtggggcaggcaaaagtgtactcacttcggccctagccacggctgtcctcagtgcttttcggaacttatatttatggcatttactgtacacagaggagagcaaacaaattctggccgtggcagctatagcaacattaatgggtatccgcatccgcaagatacactcgtgattcgtggttcgcagttcggtttggtcgttcgtggagtcggttcgttgtgtttttcggttcggattgtggccgaagcctcttggaagctcgtttgtcgctggttagtcactcatgtcggttactgtcctcggctgctgctgctggccggcgatgttgctgccgcatgttgcatgtagctgccgttgatgttgctgctgctgctccggctaggaaattcctctgctctccttttcgcttgattctgtatatttctgaatttattaatatatttttgtgttttgtgtgggtatttttttttttgttttgggctttcttcgctttttgtatgttttttttttttttgttttcatttactgattctgactaatttacaatgtgtgtgtgggtgttttgtgtgtgttcataatgacgtacaacttcttctgcgttcggatttggatttgaattcatcaatattaatattatgtttgttttcgcacaaagtgaattaattttacttaatttgcttgaacagtgtgcagcaacattcatttctttactttcttttctttcttttttttgtggttatcgctcggttattcgctcgattggcatttcgtattgattgatcgcaattattattattgattcatttaatcccagggcattgtgagcacccgcttcgtttttgcaagaaggtcgttatcgtactacgaacatgggtgcaccaccgcattgtagctcgccaatataggaccatgtgctcccgcgaagggggtactcacaacgtctggtgtactagctccatcggtgtgcgatgtggagtcggcgttgctgcgcccttctccgttcgccgatcccaactccggtggtttggtggtgtcccgttcgtcgatcactaaatctattggcattttaccctttaaacacgatatataccgatgacagaagttatcgcataactcgtgtacctgcaacgagacaaccccgcgaaaaaggcagagaaggtggtagagaagagagagagagaagagatcatcagttttgagtcgttttcatcatggccgggggcggggtgcatttaaaggggggttcttttggtgctacactctagaaggggtgctctaaaaacatcagacagtgtgatatgtttcagggggcttatatctaaaggggatccttatggtacgtacaaaaaaaaaacatttaaaatattaacgaaagcacattagacgctgaaagtgtagccaatagtatgtataaatgtttcgatttatatacgtcttttgtacgatagaaagtattttaatgcattttagaacgcagtgacaagtaaatattgcatatgtaaggtatcgctgatatttagttttcactcatagcttatatctacacttggagccagcttaaacattgccatacactaagcgccatcgcattcttgccccaaccagaaacctgctcatcccggttggtcgatctgcccatccctccctccccagcaaatggcatgcaaattgcttttgatgcgttacctgaaaactccgactccaactttggacggcgactccatcgcccaggcccgtgaacatgatgatggcactcaaaaatggctgaggcagcggctttagctgctaaccaaggcccataaatatgcatagaggtacgaaataatacactggccgaaaaggaagttgccagccatccagtcagccaaccggccagccgaacgagacgaggcaggcagcttagccccggggcacactttcagccaaataaccagccgggccaagagcaagcagcaacatgagacagcagcacgtgcaacactcgcattagcaacatggagtggaggatcgctggcgtcatcgtcagcgggaaaaaggcaaggggcaaaaggcccatgaagacttggcccaaacagaatgcgtttttaaggccctgttgttgctgtggctgtgagtgttgtgtttgtgtgtgtgtgataaaacaaatgcgataaggccaaagtgagtgtgagtcaggaatatatgcaaatatgcagcaacaaagagaggaatgcagccgccgccacggctaaaaagaaattaattgcactgggccatggctggcagacacaacagcaacaactgcaacaccggcaacaccagcaacaacagggtgctccatttaaccgggccaggcatttaatttacgaaaaagtgcgcgttgcttatgcaaattgtttgttgtcgctgcggctgctgctgctgctgctgcttctgcttctgtttcttttctgtacgttttttggcctgcaaaagctgcaacagtcaggctattaacttgttgcccattgcccaaactggccaaactcgtttgcaggctgctttcaatgttattgtcaccgaaaaaatatacgcaaaaaccaaaaaaaaaaacaacaacaacgaattgcaaaaatatgataaaaagagcaacgggcctacagcaactggtttatgacaggacaatgtcaaatttgtcgccgtcactgataagctgccacggcagcagcaacatgttgctggcgaaggagtatcgtctcgtggcggtcttttgattgcattggtagctgtcaaagtgaccataacaatatccataaagcgtgcaattagcgcaccagcaacatgttgccgcacatgcacatgcaacatgagggcgcccaccaaattgatatgtttatgcgatgctgttgctgctgctattgctgcgctgttgttgctgctgcaagttggggcccttcggagactggcggagtttcgatgccggctggctgataagttttgattaatttgtcagcattgtatgtgacattttcgaacggctcattgcgatatttatgactgccagtggccccatgttgctgttgcacattgctgttgctgctgctgttgctgttgctgttgctgctgctgttgcacattgggtggccccacgagcaacaagggcgactggcggacatggacagtggcaacggcagcaaccagagggcgttgcttgtaaatgccggcgctcatttgtacatcctgttaagcaaaacttttcgcagcagcaacatcgacttttcccgcccgtccaacctcacccctccctggcagcttcctccgttctaatctcgatgcaaatcgctccaatctgcgcagtggtaattctcgatttccgttcatagatagcttgaactatacgagtactagtatgcccccatccaaaagtccccacacgcaacctccaacacacagctcacagtctgtctaacaagtttactgtgctctctctgacatttaaatgcagtgctattaattgtagtacgtattgcataagtggtcataatagtttatcaacgttgttctttcagatcagacctccttttgcctcacataacgtgtgatggctactatgttaaacgaagtatctgagttaactttctgatatatttttctcagcccaaaaaagtgctcgaaagtcatcatcagttgtcttttggcatcccccagcttgcatcatcgccaaagccaaaagtacacagctgtcgatggtgatgttgctggtgttttttagcgagagatcccgaagcgatcttggccaagccatcaaaacaaggcccccaaatcgttgctgctggcggtgttgctcttactgttgttgttgtgggttctgttatgcccccatgccggcattaacccaagcgattccaattcctattccgattccccgatccgatacccatgccccccgctggcggagaagcgtgtgcaactgacccaacgtgttgtgtctccgcctgcgtctccgtttgtctgtttgtcccactgtccatctgtccatcagtcggtttgtcccaccgtcccactgtctgtttgtcaattgcaatgcctgcctgcctgcttgattttttctctgtattttattttgtatttttgtattttgttttttttttttctcttattttctttttgcatgtgactctgtgacgagaattgtccgtgtgctgtggggagctaaaaagctggagactggggccccaaagcctggagctccgagactgagaaactcagaaactgagactgccaaaccagtttttgacagacacaagtcttgaaaacgtctttttaactgattctgttcgctgttgttgtttttagcagcggcaacaaatatgcacagatacagatatacatttactcgctcccatatagatgttgtatgttttttctgtgtttttttttttttttttttttgcaagtcaacccgcacattttatttaagtatattttgtatttcattgtggctgtgtgtttttgtttttgtcgttttgttccttgcatttatatatttattttatacaccaaaaatcgaccgctgcattttgttggctgcatataaatgagtgtgctttttatgctttatttttttttcagttcgattttacgttttttagtacaagttgctacagttctttgttggtttcgtgtgtgtcgcaagctgtgtgagtgacaaatgacaaaacaaaaacctgtcgtggtctcggccgctgctgtgatgttgataaagatcttggctgttttagttttttttttttttttgctcggttctggctttttatacagggtgcaaccaattgcagctggccaactgactgactaacttggcttactgctctagttttgtgcttttgtttgctttcgcgggcttagaaagcgtttggtgattagccactaattgcaccttgattgactcttcttcgttcgattccttttcgctgtcattagcccatatatccatggtctctatgctgccgccacaaaaagaagccgacaggcagtcgctgcattccacagcaaacgactttgggtcaagtgcagggccaagatagttagtgcattatggccagtaatctggcatcaggcaagagttaaatcttaaatgtgtatttagattactatcggacttctaaatcgatggtatccatgttcttcgtattttaaacaatctccattaatgatccaccagctccactccactatatattccccgagcgtttcgccttgttctgcttcggttttttcggttcgtgtagaatgttttgcataatttcttacttaagacttaattgaaaaaagagtgaagagcggctttcggacgggttttctggccggcttagctctcagtctcactgacttaaactccggctccggctctgggtttcggtttcagtttcggtttcggtttaggtttaggttcgctccacgcttcgttgcgcatttgcctaattaattttctcagcacagcagcagcaacaaaatacagcaaatacaacaaatgaaatacaacaaaatacagaaaagagggggtttgccggcattaattacgaccacgtttgaggaacaacttccattaagtcacaggctgggagacacgcacccgaagttgctgcttgcatattatttgaaattaaaacaaattaggcaacctgtaatttttccatttagacaataaagtgtctaataatcaagtaggtgttgtggcagcgagaaccctctcagcttaaaacctccccccacgcattcaatttactagggaaaataattaatgtgactgcgttatctagaaattatgttagaaaatcgtggcgagagggcatcacacctcatgtatcaacaacaaaagagatgccgaaacctgaatgcattccattgttttcgaaaaaatttgcctttttccgtctctgttttatcttacgcatgaaactgtaaccaactacagaaaacacctgccgctggccaaatatttgtggtctaggcccacatcctgtttccccttctgccccgcaaacaaatatttcactttgattggcaattaattcaattttcagttgcattttttttcttcttgctgcattgctcctttaatttagacattttgcaagtgtattagaccaactgcatatatgtgcagaaacatatatatatatatatatgtggccgcctgctgggcaactatacatgtgtccccttggccccgtttcaccccctttgcaacatggctcaataaaatgtcaacacaaatgttggtaattgaaatgcgcgcccgttggcaactatttgcctgcttttttcgccccggcgttttggacccggttttatttatgggcctgccggctggagactgtgtttttgggtcctgggttcctggttaaacattttgggtggtctttttggggcgttgataaatgattgccgacgactgcgacttggcccggcttgccactctggctttttcagttaattgcaatgactaaacaaatgctgctttttctcccgcttagatgaggttgcataaatagactttgatattgaagctatggcaatgtttaagctgacttaagtggcatagttaaagtaagaaaaattactggaaaatcgttacttactttttctaattctaaaaggtgaaaccgaagtacttgtattgcttgcaccatctgtaagaaaagaagaagaaattcaaatttagtaaggtaaaatacaagcatgtaacattggagtgaccacactcataagattcagattaatcgcgaaacaaacttgtaattaacattttaattttcttttacaaaacactcttgcacactcgcaaacgcacaggcattgaaatgattgctggtgtgaccagaccgctaattaaaacatcactttgacatttgacatttttacgatgctgctaactgctgctgtgtggcctgtttggttttggttattgttgcggctactgctgccaggaattccattttaacccaagacatgccataaacatttttatagcaaggggtttcttttatttctgcctcttcctttaagtgagtgttactaaatgcacttttaaatgttcaaacacgatagcggataaaggggatgtgcggcacgcggggggagtggcaaccacagagtggcatgccaaaatgatttatggccaaagtacgcagacgcgagcgggccaaaagatagacacacggccatggccaagacgatctatgcacgagggacatatgcaagtggcgcgggggggaaatggcgggaggaactcgggggtttttcagtgattttgtactacaactaataaactaatctgcaagtgcataaaattagggccaccagaggaaactccgccgtgagtgagtgggtaagtgagtgacacatttacgactgccggcaattaaaattagttttgcccataatctctttatactccgccagactctcgactctctgccatatgaatgtatgtacatatatacgtctatatgtgcaccatccgtctgaatttttttttttcatccgacgttagcttagctgctagccaattgcatggctcgttttgcactttttgcacgcggcatttccgtcttgatttacattcagctggatgctgctgcctccgaaatgatctctttttggccccccaacgtttcccgcacttcccaactcatggccataaaaattgttatgactcctcgggctgaggaatgccgggaaaaagatttaacaaaataaagcgagaaggatcggctgaggcggttgtgtttgtggctcattcctaacctggctggttagaggatgttcacggatgttttcagtaaaattggttaaatgaatttggatgtaagctctactttttatatacatatatacccccaaactcaacagcactgactcacttcgctttcttacttctgactgttcctcataaacgagttccccatttgagtgctaaaaatctggatgcccttttaacgatcatttcctctggcagattagcatgagttccgttcgccccaaactatagtgatgatcctcgaagatttcagctcatcatgagcggcgatcatgatcatcgtcaaggttgtgctgctggcatttgccttggattcagcccccccgttttctgcctaagatcgcgaatgcatattccactaaagccaagccgttggctccattgttgttactttttgcatcttttttttttgcatttttacttatttttttctttgcacacccaaggctggcaggcaggcagcccatttagagagtgcaaaaatgtcatatgcatcattaaatcgttctgcttcatattgtcgttcgcatgggttcgctcgttgctcgacttccccccgtctatatgccccgatatcgccatcgcccatggactactatatcccccgagagcaggcaaatagcaagagcgaaaagtatggcaacgctgtccaataaaatgactaaacaactcagttcagtctgacgaacaaatgctcataaattgcgttcgcttgctgtggcttttgctaaattcactgtgatttattctaaataaaagaaaattattcaattgtcgtcgttgttttgggtcaaggtgatgcacacactcaaataaacacacacacacacacacaagggcacttggggagagaaataaaaaaaaaaatagccatgatctttggctttggcaacttgctgctaaggagactgtgcaactttgttgccagctttgcttttcgtttttttttcttcgtacttaccagtgagtcgacttcgggatctgcggtataatagggtttctgtgatcttatctgcaaggagaaagaatgagaaggacatggttagtaagtgttaagtttacacaatgaaaaatattttttgtaatatcaatatccatagttttttctattcagagctttttccccctctgtacagcacactgcgaccagctgtcctagtcaaccatgcgactcctatccaaccgaccacacttctcttttatttggttctttttttgccattttatgatggcctggtggccgataagctcttgccaaaccaaaatattgtacacattataaaactacaacagcaaccataagcaaatcggttccacggcgagcatgggaaacgcaacatttgtgctcatcagctcatcaacggacccaaagccaaaaacccagaccccagagcccagagcccgaagaggtgacgatgcgactcgctgtgaccataaaagagattctcgcttttatagcaatcccgaacacacagagatataaaaataaaccacacacttagataaagatcacaaaggcaatatctggctagataaaatgccacacagaccgaacgagaaggtcatcaaaatgctgtgcgaattatttgaaatccgttgtcgaactccgactctttgctggatttggcagtttggtgttggtgtgttggctctcacggaactgagccacaataaatgaccgagacgagctcgggtcttcagttttcggtcttcagtcgttagataaacagatatcgccgacaaacacccgctgcgatatcttatataacggtcgacggacctgaccttgtccaaatgcgtatgtgttacttgtgtttttgtgcaaagttgttgctggctgaccacccagtaatgtgcaacaaggttgcccggcaggcggcaggttttacattgttccggggataaaagacatgaccctgaaaggagctacgggcataactgatctcccgttgtggattgccaatgagaggattaaggcaacattgtaaaatgtagtctaatcaaacaggctaggtgcaaggccacactgattaaagaacataattgcatggtcacactatgcacttggaatactgcaagacatcagctataaagctagctgttttcaacaaaagctgtgtgtctcctgcagctcctgcaacaatgatcttacagatataagaaacccacacagaatcgagtccgagttcgactccagcggtccaaggcagtaacggcaatttgaaatcaactgagccatgtgcagctaataattacacactttgcacacggacggcgaggcgggaaagacttggaagacttgtatctagatatgtgggcacttccacaccattgtacgaaatggtcgtatgagaaaaacgccccattgtgagtaccataccatgccatgccatactacacattacatacaataataacaaacacaaagcacggccattgaagagtcgcgatcgaaaaattgaagtggtcgcaaggggcgaatgcggggagccaagttgcgtgttgggtattttgcaaaagttgttgcccgttggcttttatgttgcattttcaaatgctggttggctgatgtggtgttgcacacacacacacacacacacacacacacgccggagatacagataaaatgggaactcgccaaactggtttcgctatgcaggctcgcgcttttggctttaactgatatgaaaagcagaaaagcagtcggccaaagatgttggccgggcctatattgcacgcactttaccaccggaggttggcctttttatttttcagaatgaaaaaaaaaaagtagaaaaatggctgccccaaaaccttgaacacatcgcggtccatcctaattgaagttattcttcgccgtaaatgagagacgagaacgggatgattttaaaaatatataaatcatgcgggcaactactaaaatgcacagcatgagacaagtctataaatacgcgaaatacgttcggcagttggggcgtgaaaatgaaatgggaaatgggaatgggaaatacgaacgaaatgattttccccaacttttccccaaaaacagttttgtcaacatgctgccgctgcattgcgtgggcgtctgcagctgacaattttgtatttatagttcagttttatttcgaatcagtctcaaatcgagtcattgcggaaatcgtcacgcgcgtgaaaaaaaaaaaaaaaacaaatagaaaagtagcaaaatcggaacctgagagcccaaagcgaaccccattcgtaatcagtttcgcatgagcacctcataaatttctatttctgttttccgttgttgattttttatttattcacttcatattttttgcgacaacgggcgaaaagaaatcactactgtttagatactgctcttcaaagctccttttttatgatgccaataaatgcaattatacaactggcaaaaggtttacaatgtcgcgtctccaaatcgctggcctcaaagatacaacacacacacaaaaaaaaaataaatcttaagtaaaataaaataaaaatcgaaactcggttggcgtaggtggtcataaatttcccgcgcgcgcgattatggggggaattttgaaatcagtaccatttcatcaaccacgtgctatcatacaccgtcataaaaactatatatatacaagacaattctatagaacttgctcaaattatgattcaatcaagaaatttcctcaggcaattatcggaaaggcgagacgcttggaagaaagcgaaaactgagcaactaaatctgggttcataaaagacacaaaataaaagcattcattccagccggactatattcgttttataatgccaatacacacggttgggcatgattttatggccaggtcgcttggctataaaatcattccgagccagcgaggagatagccccggactagggacaatagtacggccggttggttatacacatacatacatccatacatatgtatgtacatatgtatttgctagtctgcaggcacttgagtaatgtggtggctgttggccataaagcccccactcccagccagagtttttagtcccgtaccaccggactgggccataaagcaatttatgcaccaccgcaccaccgacttttggaatcagcgcacagtagccagcattttgagttgtcgctgccgtcagaagccgcctgccgatcgctattgagcctcgggcccacttgagaaaagagtgcagtgataacagtgataacacggcccaataccaaggaaaagggccggacaaaaagattcgcaagaggtacaaaaaaggcgggaagggcccagtttaaaaacaagtcatcggctgtattgaaaagcataaactttggccgactggctatctctctcaaattaacgaggcttatcgataataatttattttgttagatatgctaataaatatttttccattaattaggtgtaagctatgaacccgaaaagttcaaagttcgacctagaacgaagactgcaactactatccctggagaatcccgccctattaatagttgatctaattgcggagccaaaagtcagcggggtatacgaaaagcgaggcgcctaaattgcagcacgtagccgcattttattattttcatttccatgttgcgtgccacggcgccagccgcatgcgggtttccctgccccttttcaacattactataaacaaacagagagaacaacatatatgcgagtgtctgttatcaagatttttaactttggcccgaggaaaacaaaccaaattaaagtaacagcccgaagaggatgcagatatggccgagagacatttttcataaactcggctaaaagattatttctatttccatcggggaaatgagtatcttgtctagacccgaacaaaagttgtgaccgcaaaaacatagttagaactattgtatgtatctttgctcagtcagtgcaaaactgcacttacctcaaacagtgaaaaaaaaaatcaaatgaaactagacccaactcgaaacgagacaaaaccatatcgggtttctcacacctacacaatgggaaaatggaaccacgcttaggtgcctaaaagcttgctcaatagccaaaaattcagaggcttaatcgtgggggtaagtcccattggtaatattttataaaaatatataaaatgtaagtacaataacaattgtcataaatcacatacacaacataaatgcgaactaaaattttcaatcaaaacactattttataaccccctttcaaaagctttgcgcgccgcccttgtgccgcagcccactcataaaaataacaataatttcgttgtaatacaaaaccgaaatccagcaggaaaaaaagagaactttatttgcttagccgatgacgatgatgttggacttgtttaatgtcgttgattacttttacccggcatcatcaacaaacacaagtagagcaacaacattggtcgagcgagtgcgttgtcatagttgttgttgttgttgttgttgttccatatctatatctttataatgggcgcacaatatcggtagtaaaacggccgcaattgaggtgacacaagcagagactagaaacaaaaccagagacacggcgacccccaccgactgcttctttttatagccccacaacctcgtacccctccggaatgaagaagagcaaagtgtgggtccccgggagatactccacttcagatacttcagtttacgacccaaaggtaaactcactggggcagctaccgctcagatacactacttctaacgcgttttgctgtaggcaaacacatacggtaggaaagaaaaaggaaagagctctgcagagacaatgtcaatatttgcattggccaagagatttccctgcttacctgaaccaaaaagaaaatacacgaatatggctgaaaataacagaaaactagagataattgttacgtctgcgcccaaaacatccggtctttagctgataatcgtgcaaataacgagaaatcttttatacacacattatcggagaaagatggttgtcggttgacaagttcgcctgtcaattgtatcacaatttgtcattttacagccgctcgttgtgctttgctttttaattgagaacgtttagcagacatctcgtctcgagagccggcgctcataaatcattttgggttagcttctgggaggaggttggggtggttggggtggttggggcggttgaattttccccataagtaacgccacataaataaatgcgcagcgaaagagtgaaatgcttctgagcgagcgagcgctgtggaaaattatttccatatttgagaagacaagattcatattgatcttggtatcatttgtggctctatttcgtatacccttcggataaatttcggatagcgcaaattgatggttcgccctaatgggttaactcgcattatgtatccaacagatacacattccgtgccctgacgtatatagagctgttaaaaagggtcaaactactgaacaaatattgaaagtcatttcggtcagagcagcagcggcagcagctcgaaaatgttgccataatccaaatacaaactcgggaatcggagagagatgggcataggaatggtgatagagagcgagatatgcaggcagttaactaaataatcacatttaaaaggcgccaagtggttcgataaacaaatatttgagggaattgggaacgcatcttgtctgctggctgctaatggattgtggctcgtatgcaactgttaagtaaataatcttggaaaatccaccctgcgttcgatttccccctcccctcctctccttgttttaggcgtctgtgccaaatcaattcacgctgtgcaattgcggcaatcaccatcaacatatctacagaatgaaagcaacgcaattccgaaaaattaaaactccccttgattttagctccttggttttttgttttgttgggtgaaacagttgcgcctgcgcacttttgctcatttcgcagtttgggcaaaaaattaaataaaagcgaaatataaataaaaataacagagggaaccttttgttctgaccaagaaattcaaaacccgctaagggttgcgatcgcacagaactaaaagaacaatgctctgataatatagctaggaagagcgaaagggagagggtcggtgagcgagggagagggcgagattaaaaaggtaccaaattccaaataaaaaggtaaaggtttctgtatttctttttttttatcattaaaagaacaaaacaacggagagtcgaagcagggaatattgcacaaaagagattaagttccttttcttttcttttctttgatttttttctttaatttttggactccgagaaacgcaaatgcgtagtggagaaaggcgatgacgacggacgggacgagcagagatatctctcctacagagatccctcggcaaagtgaacattccaatgaggctgagactatggctgtgcggcgcgatgcggtgtggtgctcctgctgacaatacaaatacaacacaaatgcgaagcgtaacctttcatacctgattatgaaccatcctcctccgtttcggatgaaatcagaaaatgcaatttacgaaacaaaaaataaaaacgggagggggaacggtgcaggggaactgggaaaaggtaagccggtaaattgccttttgtagggaaaacccagccgtttgcatgtggatagtatacccagaaaaaaccgaaaagtcccgaatacattgattggcattagggcttaacctgttcggttacggttagaagcctgttacctgctttattcgtttggttggtcagcttgaaatgttgtgacagttgttaggcagccagacaaatgtcaaggacggccaactagaggcacttcattaatcatcccggatcttccgatctgccccggctgcaacgtgcaacaaatcaactcatcgcatgtccaaactattagcaaaatgtcatgaaacgagcggattttcattttaaattacatacttaaagtgaaatcatataaaattatctgcacactcagacgggccatcctttgtctcatttcgggaatcctcaacaaagaaatgatcagacaacgaacttttcgctgggcattttatttatatatatatatatatatatacatatgcagaacggcgcttcttatacttgttcttgttgtggtctttatttttttgttcatcatttgcatcacatgttgctggttttaaagagaaattataaagcgtttccttagctgcatcattagcagcgccaacaccaaaagtcgcctaactatgcccgccatccagaaggggatcttaggcggagggatcagtggatatggggaatatatgtgggcactgggattttgggatggtcttcgagatactatagggaaaatatcaccctgttgctggcgttggcgtggcgcattttacgcagttgcttagtccaaattaaagtgaatgtatgtatagcatagcgggagagtgccaacgaagagatatatctatgcaatctatctatataaaatgcatcggcatcatcatcatcatcatcatcatcatcaggagctgaagaagcagaagccgatgcaggagaagcaacaactgcgccaacagcaactacgagtaaaaaagtgccaatgtgccgccttatttttagcccctcttctggggcgacgacgctcttttctccgctgctcgtttgttaaaattcgatgggcgaatgacatttttgagttatttttgtcagtccgacaacgacgaaaacagccaagagctcggccaaaaactatactgaaaactcaacggagaccgaccgactgaaccgaggaaaccaagaaaaaccgagtcgaaaaccgaaataaaaacgaaatgcaagcgacaacttagttgttgacgttcggttcggtgaatgatcaacaaatgtcaaccgcgagatgggatcattgcagatcgttatgcagaatcgaaagatactttaacttttgggtgcgactttgggttggtatgccaaatgtagaatctttaattgtaggatcccaaatgttctaatagtatcaacacttttcttatgtttcatcgactgtcaaattttccaccttgatttgcttattggcgttgccagattttttgaatacctcaactttatgtgagatttaactgacaatctgacataagtctatcaaaatctcacccagccaaaaagccaaaggcaggcggacagatcttgataaatgtggctcgactttaagacgatgattcgagtgttgttttatgttgttcttgcggtcgctgttgttcttgttgctgcccgttttattgcccatagcagcggcctgtcaaaattccaaatggaccataaataagaacatcatttttataatattcaactgggggcgtcgctggttgcatttgttgtttgccaaaaatgtcaccgagcgtagaatggagccataagttcttgttcttgctcttgtttgtttgtttgtttgtttcggttttactcattttggcatcaccatttggactctgcgcgtctactgtttctcaaatgcgatcttcaatgagtcataaaaatagctggctaacgcaaatggggagcaggatgtggagcagcagcagcgacagcagcgacagcagcgacagcagcatcagctacttgcaacattataatttgtatgttaaaacatcgtaaattatccaaatgtcagtgtgtggcagcgcatcttcagcgtggttttatgaactctaaaaagggggcgctaaagggggcgtggacgagggccggaggaggaagtgtcaagtgtgggcagcgccattctgaagtcacatcgcatatttgtgacatatggcagcaagacattgttgatcttgctgcggcatgggaagatgctgctgcggcaacgtagatgctgctcttgtcagcggggactgtaattaagtgcagactgccccgctcattgagaatgtagagagagagaggaatggaaaggaatcgatccccgacgatcctcggggcaatgtaatccgatcatttagcggcttgcttcgttaagttcgtgtgccgcgatttggctgttgtttttattttcatttatatttatttagtggccacatgtgggccatgtgttcccatcccaacggaggccatgccaggccatcccgagccatgccatcaccatctcaaagcatcgtctccaattaccgaatggaaacgaaagctggggccattattcttacctgtttactgaacattgcaatatcctcgttgaacgattccgacgaacagacatcgccaccttgcacaccgggctccctcggcgtacatgtggccaattcgcacttctcaaagatcagcgccaaaagcgggaatagcggatgtctgcaatggaaaatggcacaataaatacataatacatcagttggtcaaatttcaggacacttcctgccctacaaaatgcaaatgagcagctgtctctcgatctgtatctatgtctatatcgattgctctgggcaagtacaaatcctgaaagtggcaataaataaagattacctgaccgataaatgattagagaattttcgcttgaagcatacataattggataatatgttttatttgttggaaaatcgccatagtctttacttctaagtactaactattttcaatgccactgcatcaaagtatttccctggattgcctcaaaaacccaggacatttcctgtccagctaaatgcaaatgagcagctgcttttcccatctgcatctgtatttgtttctatatctgcttcttagcctttatacacacataaataatccccctcttcatgctgacggattagttcaacaactcaacatgatttgaccattttttgttccatttccactcggcgagcagttttcccttgaccaatttctcaatttctgtacaaattgcacctgaacaaaattaggcgggacccctctgaccagaaaagaacccattagatggcacaaaaaaggaaaaaagaccgctccgaaaagtagggggtgtcgacctgcgcttaacaaactattaataagagtccgagtccggagtttccagccatttacagttgagtgcgtttttggtctgggatcaggagcagaacaaaaaaaaaacaaacgaaaagaaacgaaaaaggctaaaataaaaccgcctgacactcatttacgatgaccgggcaaaaagagcagctgaagtttggctgccaagaaggtgttaaacagagagctcttttcctttgtcttgccttttccacaatttcaatttgaattcgggaataaggtgccaaaaaaaataataataatcataatggcaggtgctcaatgaagtcataatcatcatcatcgtgttcaaacagtcactcgagacagggacaatcatcaaacagtcgtcaagcataagtcattcatgaaattccctttcaaagcaaatatttgcacaaaaaaaaaaatatatatatatgtgaaatgaaaaactgggcaaataagcatttcaggcactcagacagctggcaaagcagttgcaacacatgaaaattgccaggacacgcaatgacacaaaaacgtacgatcgggttagaataaaaaaccctttaaaacaataaaaactgcagggagagacacaaaaaccaaatgaagaagaaaccacaattttggcaaattaacacccgaaccgcagagcgagaaactgcacctcatttttgatggacggatggttggttggttggttggtagggttttagttctcggactccctaatgcctaagcacgttcatgttccgtgtccgtcactaaacacctgacacacccccaagataccgtagaattggaaaacggacatttctctcttcgagtttcggccgcaaaagcaaacccataattttgtattttgcgcaaaacgcaagaggatcacgcccatttctccctctctcttgttcaatctctttatctctttctatctgttgaaaaaaggatccttctttcgtgtttattttttcctcttttgactaagttacgcgtgcgcagaggtgaaaacaggtggcaaattgggttggctcactgcgaacatgccaaaaattataaatcgataaagagcaggcgtttgtatattgattggttgggatactttgatcgatatgcaactgattatgaatgggtaggctggatttcagcctaaggaaattgaattaacattttattatagcttttaacaaatcccacacgcaataaaatagattcagttctagacttttttatggaatatatataaataatggtgttgagtgctcagcaactacttattttgcgcttagtcaataacaacttgacagctatttttctaggtcgaaatttcccacattcctcattccccctactttagtcccaatctgaatctaagctaaattcgactagcatcaagatcatctcgggtcacttgggcagagttgccacctctgccgaagccaaaccgaattccattagtttacacactatgcacactatacttatactcactcataaatcgcatccttatcacgtttgtgtacttcgggtattgcgcccattaggtgattaccgaccggcgatacatgactaggtgttccatgacccccggcccccgaatggtagccgtgcatgcccactgtggccgccgccgccgctgcgtgcgtcatgtgcggagagtggtgcgaggggaggccctgcagtccgggcggccggtgaccggcgtgtggatcgtacatggccgctgctgcggctccggagtccatgccgtagccgtgtaggccatcgtcatactgtgcgaatgagatgggaacagaatgttgaattagtgggtgttgagtagggaatatgcaaccaaaattgctgattaaaatattaatactacttcatatatgggtaaagtaatatagccctgagagtgttgttaccatttatatataggaaatattatagatatgattgaactgggtattccgtgataatgatactacttcttgccctctcgtttctctgagtgcagccaaattagcggcgacatgaaatcgtttatatttaaatacattttctaaattaaagacgctcaaacctcgaaaaaagagaagaacaacccgatggccaacaaaaagcgacgaccttgtgattactttgccgctgcttcgacattatatggacgtatactcatcgcacatttggcaacccatacagatgtatctatacatttcggttaccttacttttgtctttcaacgttttttgcatattaattaagcgccaaaagcagcagacaattttgaatattatcagttaatctggcgaggcattttcgagtgtgtttgtatgtttgttgtactctatctatcttaaagttgtacaacgttttgtggagccgcgcaattgcaaacaggttttgtgcaactacaaaataataataacaccaaacaactgagaaatgatttttcttatatccatccacacacacacacacattcgtactatacatgtgggtactttttctccttctttttaacaaaagttcaacgcggtgtgtgagatttttatcatttgtactcaagtggcgtccgtcggctgaagatacacttcgcctctccgtttcacactgcataatttgagggaacacgaagaagttgacaaaagatttttgtgcagcgacaagagatggcccaaccccccgttttgaacagcccctcatggcgaacaagttgaggttgattttttatcagcctggaaaaatctttgacactaaatgagcaattgacttgccgttgagagaggacttttgaagtgcaaaagccgggggcggttgggttgtttgcggaaaatgtcaaggatctgcagctggtagggaagaagtatctttgtatctatactttgaactagtgcagtgcgcgtcataacagcagctggctttgcaggtggcttctttgaataggcataagaatcgagtaaggagaacaaaataagcttctgcaacgacgattgtcaacctctgaggttgaggcaatccttgagatacaaaccagagattagtttagtaaggcggtcgtgctgcctccgtttttcttcatagggtttttgttgctcttgctggctgtgtgcacatgcacgagatacaaactcatagatactactatagccactacagtataagaaacccagcaacttgtccgggtttagtcagttcgttttggcctggctttttcggtttttcgcgctgaggttcagttcatggctgttaaactataaagttgttatgctaattttagtgttggtggcaaccgaatgctgctattttttcttattttttttcctttttttaaccgtttcgatttcttggcgttcgtttcttggttcgtttagaaatgatgaaattgtggagcaacaaagagatcttgaaaattaccacaatttgtacttgtacataagtaatgtgggaatttgagccgccgccgcgaagaagaggagctcaaaataacaaaaatacaatgaagagtaaaaatcgaacaggcaaatacacttaggtccatggctttttttttgttttgtggtacaactccccgatccatttgggccaactttgattgatgatctttgatggtcgggtctccctatctcactcgctgtccctgtatttttcaccatttttctctgttgtttagtgaccaagccattgaccttgttgaatggaaaagctcttggccagccggatcaatataagccaaccaaccaccgagcgcagtcgaggcccatggttctgattctgacaagttcagcgtcgaaaatccttcaaaaatttatgacgccccccatggcagccacagaaacaacaacaacagcaaaagtgggcacaaatttgggtggtggtgctcaaaactgtcagtgacaggcgctgaaggagctacgattttgtttttatttttatttttttttgctgtattcctatatatatatttggagcagccttttttgggggagttttcctgcgttttccgacgcttgtcccacttgctggctgtctgtctgtttgtttgtttggttggccgtgtgtgccggttcttggtatgtttttgtcgtgtttgggccacattaagtcattgctgaaagccagcctacgaccaacttaacagcaacaactcaattggactctttaggcagagctttaatatgcagatttttgctttcctaacttaaaccatggctccacttaacaggcaaaaactttactaagttgaagaatgccaggaaatgttatattgtggaaatctagtccaagcttctgtaaatcgaattccataaattattatggaatgaaactggaaataaaacagaattgcttaaagccgaaagcctaaaatagagtcaccagagcctgcgtgaacttgaaactgttgctaacgttgcacaaacaaaaaaggcagagaggaaccggaaatagccgcgcagcaaggacattttgcgtgtgtgtgtgtgggcgggggtatcctaaaaacgggctaaaatgggtggttgggctttatctagcggcgcctaaaactgaccaaaaaccagacgccagcggcagaagagttatgactgcaaaaatgcggccagaccgaaaatgcgcgacagagatggaaaaataggtgggcatgtgtgtgtgcgctggtgttttggccaaaatggtgacaatggccgccattatacatagtcatataaccatatagaccacccacttcccccgcataggacccacaatatgtttgttgtacaaccgacttcgtttatcgatttcttgcgtacccccaacacttttgcttttcgtcttttctatttattcgatttttcgtattttcatagcccaaataaaaaacagaaaaaccttcttaattgcgctggcgcagacgaaggcctaatcaaaattaattgtttatcatgttgtatttgaatttcttttcatttcttccccatatatctcctctctatatagaattcattcccctttttttctgggactttagctttagctttgcttaattagcaagccaagccgctggttgtaggtgtgtcccgctgccacgcccccctcgccagatgaacaaagtcacgcccaggctttttttcgggcggccttaaaaagttttatttggtgttagacaattaatttttgttgcgtgcctgggtgttattttaatttacagttgcagcattgccaaacaccaaaaacttcggaacacgcttcatcctaggcgatattattaacttttattgcttataataacaatattatcgagcagggaaacatcaaacgttgacgagcatcgaaaacgtgtgctaattttttattttcggcttccatttaatttatgtcgaaaaacaaatacttaataaacgcaaaaaaaaatagcactgaaatatatgcataaaattaaagcagaaaaattagaagctcggtagccgagaaactgaaagcgaccaacgggtgaaaaaaaataaatgaatactttggcgttttaacatttatcaaaaatcaacaacaaatgacgtcagtctgtggcatttattaaattaaaatgagccccaaactcgcagacacaaaaactggcagatgattaacaaaaagccaacaaagcgcggccaatagcaacgaaaaatttgtccaaaaaggtaaatttaaaattcgtgtgttcggaaaatacaagcaaaatacataaaaatatcgaatcaaaaataaatcgaaagaaaagaaattttgaaaatatttttagctgctttctgggaatttaaagcccagcgaaagcgaagacaatttaatggccgaaatttaaggaaaatgtttgaaatttaaattgacggaaaatggcggaaaaggcagtatggcatgcaaataaaataaacttgtgtttaaatggaattaaacgaatatgtctcgagttaattgattatattatatttataatgacgaatggaatatgcaagtagaagaaaatatactctcagtaattgttttattggcctaaattaactatctgattcccaacttctcggctatttaattaaattgctgaagacaaggacttggccaagtttgctaacaaaatttctggcccaaagaaacaaaagtcttttggagtttggcatttttgccggggccaaaagttactcaaaaatacgaaaataaattgcgtgctgatggctcatttaatttaatgagcggcgtgcaacttgtctaaatgatttttcctctactttacaacacattttttcttcacatttttgtctgtacactttttccgtttcagtccctcgtttttttttcttttctttttataaagatggagaaaagagttcaccaccagcaaaaatagtaattccactttattcgatgaatattagcaaaacactttgacttaatgtttggggaaattacggcaaacgaaaaacgggcagcgatatttaaaaaacttttaagcgtaaatgcaaaaagaaatgaaactaatgaaaacactttcaacggcagccagcgacctcgtcaaacttggcaactatgtgtgtgctgtagtaagccagagaggccgggaaaaaataagtaaaataataatactactctataggctataacaacaaaggcaacaactatatagcaccagcaggcaccgacccaagaatcaggcacgcaatttgatcattaaacatgaagctctttagcacacgaaaaacaacatcggtggaaagtgggagaagtggaggccccatatagagtcttatgaccccctccccctgcgcaccccttgcagaaatatgcatatgtaatttgtttataaatattcctctcagcctgacgcttcctattcgctcaattttcgctggcatgtgaagcgtctgccgagcggattctcaaccgaaagccaagatatatctgaaatctcctgataaacggggggtcgtggcaaagggggtaagtggggagcccatgagtcatgcggtgaggctgggaagactggagaattgctcacttaattagaaaagaattcgcgacgaaggttggtcgctggcaaagattaaactattgcaatatgataaggactaggcgggaaaaaatattactatactttgctgacgaatgttattttgtaacatagggaatttcaaattcaatttattgttattaatggaatgagttcagcagttggtatatttgaaagtacacatttcagcggaccattgttatatactgataatatatacatatataactagaatttttttcctggctcaacaaaaaaaatgttttagtttgccacctaagtcgaattccgaatgtttccatcaacttttgcaaatgctgctggccactaaagtaaaccacagaatcgactgtggcattttccgctgctccgctctccttgatcttttctattttgattttgattttatttctaaagcgaacgagaaatacaaaaaatagctgaacaaacacagtgggagaggcgagcacacgatagacgaattatattttatgccacaaattacgctgcggttaacctttaaattaaaataacaccaaaacaatttttgtgctgcatttcgcaggcgtttgaaatggcacacgaactgaaaaatggtgggaaaagtgagggggcgcgggggagaatggcagcagctgcaatgcacatttttatacaaattgcaattgcacattttttttttttgcacattttacacggccgctctttctcactgtttctctcgtttgctctccgtttcgatggcataaaataatcaaattaaatatatataaaaatgcatgtgcagtttggtttgagaagaacccgcgaaaattgcttcccgccatttttcgcaaattatagcagcgcaaagtcatggaaaatggtaaaaataaaattgtaaataataaaaccacgaagcggcataaactgaatggatcgcttttgggccgctggcaatgtgcaaaatgtgcaataaaattatatgcatcaaatgcacacaaacagacagaacacccgtatatattcacatactcgtacatacatacatatatctctcgccccgagtcgaaaaattcatttgatggaattgaaatggcgcgattcgggtaaagagccgcaggagaattacgaaaaaggggattcaaagaggtaaattcggcacagaatcgggtattaaaccacaggcgtaaatttattcgccagtaacgcagacacacacaaaattcccgcgggcatttcttttttcccatctccatttccatttccatatccatttttattttttatatttctttctgatttttttaatgctcccaaagagcatggcccaccttttggtaacacacacacacacacacacgctaattggtagcacacacacaggcaaacggccatgtttgaggtctttttgctccgttaaataaaaatcaagttcacttcgcatgtccatgataatcaattgataaagtctaactgcgatttggtaataatatttttttgaagagcgggcgagcggagactgccggtcacctgattagcatataatttacgatccagatggattgtaaaaattattactccgtttaaaaagcgaggcgagaatttatgccttataaacgtgatggaaaatggtggaatcattgtggctatgcaacgggggggcttttcggaggtgaaggtcccagccatgtttaaacaaaaatcgaatcaactattgcggtgtgaaaatgaaaagttaaggggaaaagctaacaattttcaataaacattatttaatgattttctagagtaaaccgttgtttaatgtaatacaatatctatcactatttcggcgatctttgatttccatcacttcccaaataaaatggtctagctgcagactcagttaattatataaacttgtaccagaaaatgacccgcataaatcaaatgtgatttctgtcctattccaatacacataagcacacacacacacacacactcagaaacgcttagttaaaattcattttgatagggctctaataaacaagaactattccccattgaattgattgtaatgggttaaattggagaagcttggaggccatgtataagaaatatttatatagatctacttcatgaagttggattaactaatatctgaagatttttaaaactttttgcgtattctggttatagattgatttggttacactggtaacatatccatgatatgaaaactgttacaatatcatcataaactacaacctgtaagtgccgtcggcaccacttgacttgattacaaattgactgaaccccatttgttttttagccgtcggaacttgtttaaggataacaacactctcgggggaccattctatatggattctatatatttagaaagtgaactttggtggatctacttaccctgggctgagccattaatgctctgggagcgacgtctaacccgatttgtgccactttttacagtaggaacaacaaatgggggcgcaacacactgaccgacgtcccgctccgccgctgcaactgcttcggttttagggaagctctactgtagctgcccgtgtggagtccttagatttactcttggcttttccagttcttcagttttggatgttattttcttggatttttatatatgttttgcacttttttcatgtattgggaagcctttgctttttgaacgctttgcttcttgattttgctttctttttttttaacacaggcacatttgtttagattttatgtattattattacgtttgtatacttgttgtattgttgatgttgtcgtttttgttacgcgcgcgtttgttgtttgttttctagagcgggagatctggttttgaatgttttttttacttgtgtgtttgttataataattatttacatagcatttgtttggtttataaaaatcgtatacaatttgttgttggttgccgttgcagttgttgttgttgatgttcttggtatactcgtgtattgtagtagttgctgcaacatcatttgttactgggttgcatttgttgttgtcataaatccatggcgttttttcccttttcctctctctctcgttttgcgagtttccttgccttttccttggttatttttatagtagtagttgtggttgcttttaatttttatttgtttgtcgtatactctttttgcttttttcgtataatatgcgcactatttatcacagctgcttctacatactacgttactagagatgaacaaattatattgttaatatataatgcaatatattctgttgtgtttttgcgacggcaatttgcgtgtttctttgtttttgcggggggatcggcgggatcccctcgttgaaagaaattccctccgcggccctcaaataacagtatttattttggccttcaattgtgaaaaggagaacttttcgattgtgattgaaaaacacactaaaaaacgtgattgttttgttcgcgcgatggaaaaacgcgcgcgatttccaaagtgtttcttgtgttgtttatttgttgattgatggcaaaacgcgtggttaacgggcaataataataatcataataataataaacttcaccgacggcaacactttttcgcttttcttctcttttttattcgaacgcaacgcaacacagacacacgtcgtacgcgcttcgcagtcaaaaatacactgtgcggatgaaagatatttcatcgaaaaaccaacccgccagatacgtttgaatttacgctacagtcggacgtgtttccactcctaacatcgctgttaactaacagcgaagagagcgctgagcgacaaacaacagcaaagtcaacgggtgcaagcggtgcggcatgattgtcaatcatgcagctgccccgctctgttcagatgcaacaattgtgccattaactcgctcttggccataactcagcgagtgcaagcgagaggaatatatggtttatgcgaacgctccggcgaattgcctgcgcaggcgcgctcgcatcctgggcgacgatgactgatttgttggtacgcctcttctgtcatacacacacttgtcattcacatgcatatacagtaccgtacagcggtgttctatctctttctctttctcagttttcgcctctttttgcgcaatgttcgccgcgtttgaaatttatttggctttggccaaaaggagacggcttatgggtttttcgcccctctgccggcgtcggcgtcgaaaatcagcaaaaaccaatcccatttgttattttcgcttgagtgagtggcagttggcagcttggctctttttcgccgcacctttacaggttgaaaggcagcgagaaagcttcagttgtccatcagcttcagctttcgctcacttttcgctctcttttggcgcccccacacacactcgcacacacacacttttgcccgaataggcaacgccttcgaagaaaagcggcaaaaaagagaagaaacttgaaggagaagaagaagaaacgtggacgacaaaaacaaacttttcgctgcagttcctttattgcgtccttttggcttgtaacggtgatctggccactttggaaggatatgcgatcctgacaacaacaaacagctgttcgagtttctcctctctctctctttcttacttcttggggaacaacaacaaatggaacggcgataaattgtcaaaaacattcgctgaaaattg

SEQ ID NO: 25319 - DNA, 4383 bp, DROSOPHILA
gcacagtgtatttttgactgcgaagcgcgtacgacgtgtgtctgtgttgcgttgcgttcgaataaaaaagagaagaaaagcgaaaaagtgttgccgtcggtgaagtttattattattatgattattattattgcccgttaaccacgcgttttgccatcaatcaacaaataaacaacacaagaaacactttggaaatcgcgcgcgtttttccatcgcgcgaacaaaacaatcacgttttttagtgtgtttttcaatcacaatcgaaaagttctccttttcacaattgaaggccaaaataaatactgttatttgagggccgcggagggaatttctttcaacgaggggatcccgccgatccccccgcaaaaacaaagaaacacgcaaattgccgtcgcaaaaacacaacagaatatattgcattatatattaacaatataatttgttcatctctagtaacgtagtatgtagaagcagctgtgataaatagtgcgcatattatacgaaaaaagcaaaaagagtatacgacaaacaaataaaaattaaaagcaaccacaactactactataaaaataaccaaggaaaaggcaaggaaactcgcaaaacgagagagagaggaaaagggaaaaaacgccatggatttatgacaacaacaaatgcaacccagtaacaaatgatgttgcagcaactactacaatacacgagtataccaagaacatcaacaacaacaactgcaacggcaaccaacaacaaattgtatacgatttttataaaccaaacaaatgctatgtaaataattattataacaaacacacaagtaaaaaaaacattcaaaaccagatctcccgctctagaaaacaaacaacaaacgcgcgcgtaacaaaaacgacaacatcaacaatacaacaagtatacaaacgtaataataatacataaaatctaaacaaatgtgcctgtgttaaaaaaaaagaaagcaaaatcaagaagcaaagcgttcaaaaagcaaaggcttcccaatacatgaaaaaagtgcaaaacatatataaaaatccaagaaaataacatccaaaactgaagaactggaaaagccaagagtaaatctaaggactccacacgggcagctacagtagagcttccctaaaaccgaagcagttgcagcggcggagcgggacgtcggtcagtgtgttgcgcccccatttgttgttcctactgtaaaaagtggcacaaatcgggttagacgtcgctcccagagcattaatggctcagcccaggtttttcgaggtttgagcgtctttaatttagaaaatgtatttaaatataaacgatttcatgtcgccgctaatttggctgcactcagagaaacgagagggcaagaagtagtatcattatcacggaatacccagttcaatcatatctataatatttcctatatataaatggtaacaacactctcagggctatattactttacccatatatgaagtagtattaatattttaatcagcaattttggttgcatattccctactcaacacccactaattcaacattctgttcccatctcattcgcacagtatgacgatggcctacacggctacggcatggactccggagccgcagcagcggccatgtacgatccacacgccggtcaccggccgcccggactgcagggcctcccctcgcaccactctccgcacatgacgcacgcagcggcggcggcggccacagtgggcatgcacggctaccattcgggggccgggggtcatggaacacctagtcatgtatcgccggtcggtaatcacctaatgggcgcaatacccgaagtacacaaacgtgataaggatgcgatttatgaacatccgctattcccgcttttggcgctgatctttgagaagtgcgaattggccacatgtacgccgagggagcccggtgtgcaaggtggcgatgtctgttcgtcggaatcgttcaacgaggatattgcaatgttcagtaaacaggtacacgagttatgcgataacttctgtcatcggtatatatcgtgtttaaagggtaaaatgccaatagatttagtgatcgacgaacgggacaccaccaaaccaccggagttgggatcggcgaacggagaagggcgcagcaacgccgactccacatcgcacaccgatggagctagtacaccagacgttcggccgccgagctcatcgctgtcctacggcggcgcaatgaacgatgacgcccgatcgccgggcgctggtagtactcccggtccactgtcacagcagccacctgccctagatacatcagaccctggacgatggtgtcgaagagaatggtcctcacctgccgatgctcgcaatgcagacgcttcccggcgattgtattcctcagtcttcctcggtagtcctggtgatgccagcaatgccagcataggaagtggagagggcaccggcgaggaggacgacgatgcgagcggcaaaaagaaccaaaagaaacgtggcattttcccaaaagtagcaaccaacatattgagagcgtggctgtttcagcatttaacgcatccctacccatccgaggaccagaagaaacaattggcccaggacaccggcctaacgatactgcaagtgaataattggttcatcaatgcgcggcggagaattgtccagccaatgatcgatcaatcgaatcgtgcagtctatacaccgcatccaggtccctccggatatggccacgacgccatgggctacatgatggacagccaggcgcatatgatgcaccgtccgcccggagatccgggcttccaccagggctatccgcattacccgcccgccgagtactacggccagcacttgtaatcctcgtaatccggccccgacccggaaccggaaatgaaactggaactggaaccagagagctctccgccggaagcgatcaagccaaaatcatagcttaaattttaccaccacccaacactggagacgaacgacgaaggaagaagtacgaaggagctgaatacacatggatccgatcccaaaactaaagcataccgcgtggcaatatcagtcaagtaatagcaaacaaaaaacaacaagcaaagaacaacaatcgtagtaaaatctatacaaaatgatattagctaagcaacagcgacaaaaacaacaataacaacaaaagaaacagcagaatccagaacaacaaaaagcaccagcaacaacaaaccacatcaaaaagaaacccagaaattttaaaagaaactatttgtgtataccctaaacgtaaataacaaaagcagaaaaaaaagggaaaataaaagcaagaaaaaagaaatatttatgcataaacaaaaatgaaacgcttagctataagttaaataaacaaaacaaaaccagaactcacacacacacagacacaccgagacgcaacacaacaatttgaaatgcaaatttttatgttcaaagctgcagagtgcaaaacacaacattttaaagcatgaatttaggcgtagtccagaaaggatacaaaattgaaaaggatatacaaaatttaagcgacatttcgttcggatttgttatagattttagtttgaatttaggaaatgccccgccccaccagaaaatcaagggaaaaccaaaccaatagcagcagcgaaattcgatcaagtttgaatataatttgcgcaatggaaggacgagaggagaattctttgctagttcttagtttcattttagttatgtaacaagtcagttgtagtaacgctttgttttctttacctttacgcatatgtatatgtacatacaaaacaaatcggtaacaaactatagatacatacgtacatctatgcttaggcgatagcaccctactatatcctacgtttagacgattaatttaaataaattgaattgttttctaattttatgccttgcaacacttaagtaaaaacgaaatggaatttaatttttacaaaagggaaagatgataactagaggaggaacatcatatgatttgaatttgttttagagttttcattgtgtgcggatcttgtagtattattttccaactgaagcacatggaccgattgaatatatatattaatatgtatatgtatggattttatgcgagatacaaacaatacgatacaaataatggcataggcatatacataactctgaatatgtatacgtaatattaataataaattatgcttacgtttaaactgtacttttatttatgtattctaatttgtatgcgttaatccttagttaactattattattattattacatttacttaattaatgatttaaatttaactaattcaagaggatagaattgtacgagagatgatttattgatgaaaacaaaatgcatatatgagaaaatatttgaaaaaat

SEQ ID NO: 25320 - protein, 415 aa, DROSOPHILA
MDSGAAAAAMYDPHAGHRPPGLQGLPSHHSPHMTHAAAAAATVGMHGYHSGAGGHGTPSHVSPVGNHLMGAIPEVHKRDKDAIYEHPLFPLLALIFEKCELATCTPREPGVQGGDVCSSESFNEDIAMFSKQVHELCDNFCHRYISCLKGKMPIDLVIDERDTTKPPELGSANGEGRSNADSTSHTDGASTPDVRPPSSSLSYGGAMNDDARSPGAGSTPGPLSQQPPALDTSDPGRWCRREWSSPADARNADASRRLYSSVFLGSPGDASNASIGSGEGTGEEDDDASGKKNQKKRGIFPKVATNILRAWLFQHLTHPYPSEDQKKQLAQDTGLTILQVNNWFINARRRIVQPMIDQSNRAVYTPHPGPSGYGHDAMGYMMDSQAHMMHRPPGDPGFHQGYPHYPPAEYYGQHL

SEQ ID NO: 25321 - DNA, 4960 bp, DROSOPHILA
atcgattggagcgcgtgttttgaatttgctcaccccttgtggcagacgaatttgttgcatgcattaattttgttattgccatcggaattattgttggccaaaatttccagattgttcgtgaactgcatcatgttgttcgtgttgttgcctccgtaggctggatccacaggcgtagccaggtgggcatattcgttggattcgttgccaaaactctgcggcaagttgaaagctccgttgctggagacccgaactgctgactctgcagaaacttcgttgccgatatcccaaaaatccaggaactccttgaaagcttcaaaaattgtgcgactattgctacgcgaaacaatcgaagtgtttctgcaaaaaggcgcaacattattttgttgggtaagaccgaataaaatatctccgctcactggttaaaagtcaagctaaacgacgcggacttgtgaagactcatggctgtgcactcaaataaataaattttatttagcagttgcgatttgtgtccgcaagaatcttccgtgctccagggatgtcaactaaccggaaattggctaacttaatgtcatatatccatggctatcgataagctatcgataaggatttggccgagtgcgaacagtgctgcccattgtgcggcaagttagaatttctgttttgaaattttttcaatacttcaatctatttattagtttgcaaataacgcgccgtatgcagcaaattggtttcactgcacagccctttgaatggtcgagcaatgtaccgtatgatttctggctcctacaaaaaattaagttttatttaatggtgaaattccaaattttagtcaaactaaatttcaattaaaacgcacgaattatacaaagcttaggcagctacggcatacggatatatttacaattctaaaaatgtacataaagcgctactggcacaaaagtctttctctacagcagacatatgataatgcagctctaatatttctcagtcgtcacttcgctcggcggcggcgactcatttgttcgattttgaacatcggtcacggtggtgaggtcagagctcgaggattccctcgaatgcctggggagaaatggaaaacagcacagcaataatgataagtgtacagtggagatgacataatcgtagattaagtatcatattcacacaatgtttcaatcacctgtaaaacacatagtgctgcagcatgaagaacacatcgaagagcacggaaaacagacccagtccgaatttggtgggatcaccgaaaatcgacacccaatcatctggaaaccagacacgatttcattcgaaaatcacaaattgatagactatatcctaccgtaattatgagcattcagaatcatttgcagcatgctcagcgttcctcccgtgaaatccagcagaatgttgccgatgctccagccggaggtgctcttccggcgatagttcatcagagcttgcggcacgtacttgatgatggtaatggttagcttgacgtaactgcagtagtacagaaagtccagccaatggatgacggatcctccggccaaaccggcagacacgacgaccaccacggcgaagatggccaatattccgtaggcaatgaacgacaccctttgctgtgctctctggacaaatttaacaaagtatggatgttttacaagtcaaaaccttatctactcttcatatcgtaactatccgctgtgattcaaatgatttggcattttgattgatggcaattagtgttcaatgcgacaactgttgccacttcggcgataaggctattgaatggtatttgctatatatattattacctgatagaaaaagcactgaaggatcgtaatgcaggtggcgaacatggcatgcagtgagaagaccacgtcgttgagcatcacaggattcactcccagcggatatcgcacctcgtactcgttctgcagatcctcgatgaaatagaggccgcagttgaacatgctgtacagggtgaagcccacgatattgagggccaggaaatcaaagttcagtccctcgacggacttgcggcgatagttgctccagatctgcggatagaaggacaccgaccaggccacaaagtaaacccagccaaagatgatggaggtgtagatcaaagctctcgatttggccacagtcacgcgtacgaacacatccttcacactggaaaataagtgaattttccaattaggtacgggaacagttgggattcccgtgaagttactcacatctctttgttcgcatcatcgctatctgcgaccactttgacgttgccggctttgaggccagttatcaccaccgactgatttcgagtactgcccgctggatacacaaacgttgcgggatcgaggagcaaatgatcctccgaatctgttcccagcgcaacttccacgtcgctgtctagcaatccgctgtaatgggcacaatagatttacgatgccatatgttttggatttggatttcccggcaatggcaactcacttggcgaacaccagaaaagtctcgttgctgttcagcagaacggtgatgtcatgggaatcgacggtgagctgactgctttgggcatttcccagggcaactgtgggcaggagaaattccctcattattagatcgcaatatctggattgcgatatctcacctgtggccaggaggaggagcagcaaagtggtcaggcggtgtgtgctgaaatccattctgcttgcgttcaacgttcaacttattcatgcatgagcatccagtcctgctggcatcttcttcaatgaagccctatatggtattgtattgattcaattgtgaattacttcaattgaccaattgaccacgatcgggtgaaattgatatctactcgtaggagtatggaatgcaattcctgacaccttttttttttttgcttcttaatttaatgacccgtgcagacactcaatcaataaggaatataatatgatataaaatgatataaacataaaactatttgttccaaaaaaaaaacttgcagtgcaaactacgcacgctcgcttcatctggaattcgtgtgtgtttttgtcgagataaaagtcggtaaccttcatcaaatgtcgctcaatgttacaactttgcaattggagcacactttcccacggcaagcgttggagcacccattttatgtgcctatatggcccaaatggacgtaacaggaaatacatgggctttgtcggtcgatcgtaaaaccaaaagattcccgattgttcatactatattttttatatggcgagggccgtgacttggcgattgccaagaagtgtaaaacaccgcgtgagaacgggcttatctcaatcaatggagctagctgatagtgtccgtcgaattattgcggcagtctgccacaagttgcagataatcaatagattgggcaatgcactgcgattgcaatactaatcgcaagtcacgatccaaattttggttctacataaatcaaaactaatgagagtggtaaactacaagggtaatttaaagttcgaacaccatatctttcacgatcgttcacacgaatcttcatgtttcaactgatatgcaccataagttattcactaattctgtttcaattctggtgatagataagacgattgattggtaaaaaggtccattgttagttaacagtaacacccatttattcattcatgattccacgcacgagatacgcttgttgtgcgtctgtttgagccggattagaactttcactggcatgtgggcaagcagaggcttttagccgccaactgctaacgcaaaacatctgtataagccgccggattattgtgattaagataatgcggattagaacagttgtttgcctatgctatatgcatgatcgccacccaacacatcaattcactcacgttaagaatgaagttaaataatgtgtcccaactgacgattgagcgactgccgatggctacaagtggaatggaatgctatgatgatggctgcgatggcgactctccagtgcgactgagtgcgcgatccaatggatccgtttaaatattggagcgatggagtcgacgtcgactgcggcagcggcagcgacgcaccagcggcagcagcaacaacaagtggggcgagagcggaccgccgacgtatcttggctttttattatacattatttttgcacttgagaacccggcggccgaaaaggtgggcacttcagtcgggaacagttaaatattttgacaagacgagtagttctcaaaacaaaaaaaaaaaaaacacttttttttcaaattcaaatttcaaaaaaaatatgctaaaatgtatctgtgggataagcaatgaatggaaatgtatctacgggataagctatgaattgaaatgtatctgtaggataagctatgaattgaaaagtatctgtgggacaaacgaacttgtatctcacagtacaaagtaatcataccaaacccctaaatatatattattagtcaataatatccatcgagtcatattttctgtttacttatcaatttagcaaaagatatgacaaatgtaattacaatctaaaactctcgttttatgtatcctgtttaatatgttcaaaatataataaaacacaacttttggcctttccaatgccgaatactccccagacttcgaaaacttcttatcagcagtagaaactgtttttgagggacctgcagaaacagtgactataaagttttataagcattcgataagaggcgactgaatgaattatcaggttcgactaaaaataagcatagccaaacgaaaacaaacataagattcactttctattggagcgctgtttttttttttgccaatacagaatcggccacgattcacttgtgcccaatgcataatttttgcaagcgaatcgaaaacttggcatggaactcggaaatatgtgccaagccaagtcgagtaagacttggccaccaactgttgccctttatttacacttcgc

SEQ ID NO: 25322 - DNA, 1417 bp, DROSOPHILA
gcattccattccacttgtagccatcggcagtcgctcaatcgtcagttgggacacattatttaacttcattcttaacggcttcattgaagaagatgccagcaggactggatgctcatgcatgaataagttgaacgttgaacgcaagcagaatggatttcagcacacaccgcctgaccactttgctgctcctcctcctggccacagttgccctgggaaatgcccaaagcagtcagctcaccgtcgattcccatgacatcaccgttctgctgaacagcaacgagacttttctggtgttcgccaacggattgctagacagcgacgtggaagttgcgctgggaacagattcggaggatcatttgctcctcgatcccgcaacgtttgtgtatccagcgggcagtactcgaaatcagtcggtggtgataactggcctcaaagccggcaacgtcaaagtggtcgcagatagcgatgatgcgaacaaagagattgtgaaggatgtgttcgtacgcgtgactgtggccaaatcgagagctttgatctacacctccatcatctttggctgggtttactttgtggcctggtcggtgtccttctatccgcagatctggagcaactatcgccgcaagtccgtcgagggactgaactttgatttcctggccctcaatatcgtgggcttcaccctgtacagcatgttcaactgcggcctctatttcatcgaggatctgcagaacgagtacgaggtgcgatatccgctgggagtgaatcctgtgatgctcaacgacgtggtcttctcactgcatgccatgttcgccacctgcattacgatccttcagtgctttttctatcagagagcacagcaaagggtgtcgttcattgcctacggaatattggccatcttcgccgtggtggtcgtcgtgtctgccggtttggccggaggatccgtcatccattggctggactttctgtactactgcagttacgtcaagctaaccattaccatcatcaagtacgtgccgcaagctctgatgaactatcgccggaagagcacctccggctggagcatcggcaacattctgctggatttcacgggaggaacgctgagcatgctgcaaatgattctgaatgctcataattacgatgattgggtgtcgattttcggtgatcccaccaaattcggactgggtctgttttccgtgctcttcgatgtgttcttcatgctgcagcactatgtgttttacaggtgattgaaacattgtgtgaatatgatacttaatctacgattatgtcatctccactgtacacttatcattattgctgtgctgttttccatttctccccaggcattcgagggaatcctcgagctctgacctcaccaccgtgaccgatgttcaaaatcgaacaaatgagtcgccgccgccga

SEQ ID NO: 25323 - protein, 363 aa, DROSOPHILA
MDFSTHRLTTLLLLLLATVALGNAQSSQLTVDSHDITVLLNSNETFLVFANGLLDSDVEVALGTDSEDHLLLDPATFVYPAGSTRNQSVVITGLKAGNVKVVADSDDANKEIVKDVFVRVTVAKSRALIYTSIIFGWVYFVAWSVSFYPQIWSNYRRKSVEGLNFDFLALNIVGFTLYSMFNCGLYFIEDLQNEYEVRYPLGVNPVMLNDVVFSLHAMFATCITILQCFFYQRAQQRVSFIAYGILAIFAVVVVVSAGLAGGSVIHWLDFLYYCSYVKLTITIIKYVPQALMNYRRKSTSGWSIGNILLDFTGGTLSMLQMILNAHNYDDWVSIFGDPTKFGLGLFSVLFDVFFMLQHYVFYR

SEQ ID NO: 25324 - DNA, 3013 bp, DROSOPHILA
ggaactattcccaggcgcgatgagctggtgcgcgtgaagcaaaagccagagcaggtaagtctattcgattggagcacctcctagccagaccgaaatatcatttctcgaaccctacagaaagacaaagatgcggagagggagttccgttggcgccactgcaccttgacccagcaaagcctccaggagccgatcgccatgtgcggcatgggtaggctctattccaagcagagcgtcattgagcgactgctggagaaggaaccgatgccagagacagctgcgcacgtgaagagcatgaaggacattcgccagcttaatcccacacccaatcccgccttcaccgaggaggacaaaactgagggactgctggacacacgacattctccttacatctgcaagctgattggcctggagatgtccggcaaatttcgctttgtggccctttggagctgcggatgcgttttatcagagcgtgccttgaaacagatcaaaggcagtgtggctagcacttgtccgctgtgccaggctgcctatagcgttgaggacgtggtggtcctcaatggcaacgaggaggacatggagctcatgcgggtcaagatggaaatgcgtgcggccaagcgtaagtcctccaaaaaggacaagaagagtgccaaaaaggtggaggtgaaagcggagcccgcagaggaacaggagccagtggcgtccacatccaaggctgcagccgcagagaagcccactacaagcacaaaaaccaaggcggtggcgccggtcaaacgactgggcgccgttaatgcaatgcaggatcccgaactgaagcgtctcaagagcgacttcagcgtggccaaggacccgaaggccagcgatgtttacaagtcccttttcacctcccataaaaccgaaaaggaccaggagcgcgcccactgggtcacctataatccattctacaattagtctagatttcgtttaagtttgctgtgttaactcagtcacatgtccatagtttgatcgttgaaaccacacacacagtttcaaaatatacaaccgacaatgtatcgtgcagcctatcaaaaaggtttccttaccgtgctttacagcgtaggcagttcgcccctgaacaactggtcttcctatgtgagtatctggcattcaatgcagctgcctcgtctctagaaagcatccttgtaacagaccaaaaacgggtatatcaaacggatctacgatgaggacatcaagtccctggtgctcgagataatgggctcaaatgtgtccaccacattcatacactgccccagcgaatgcaaggagcagctgggcatcaagttgcccttcctggtgctccttataaagaacatgcacaagtacttttgcttcgaagttaaggtaaggccaagtgctatgaatttatagtaaactctggactgcacaatgatgacaatatatccttagattcaagacgatcagcgcttcatgcgccgtttccgagtgtccaatttccagagcaagacctccgtgaagcccttctgcacggcgatgccgatgggcatgtcaccggggtggaaccagatccagtttaacctggccgacttcacgcgccgtgcttacggctccaactatctggagacggtatccttgcagctgcatgccaacgtacgcatccggcgcatctacttcgcagataagctatacacagaggctgaattgcccaatgactaccgtctgatgggcaagccgaaggatctgaagaagccggagaagcagttcaaggtgcaggccactgcgcgtcctccgtcgcctttgaacacgggtcgcggtgaacccggaccctccaaagacacggacgcagaggcaacaggtcccgccacggatccgatgagtgagccggagcccgcgctgcagaagtctccgtcgccgcctgttccgcagaaggttccgtcgccagcagcttccgctcctccagagccggccaccgaggagccagctccacaaacggaggccaccgaagaggcctactattaagttacgttgcacagttgcttgtttttatcgttctgttgacacgcgactgggagtggcacatagtttaaatttccagtcatagcaatcataatcgaaagtgtttctttaatacaaaacttgggaatgggcattacatttggatttccatgcagaacggattggtttcccattgtagtcacacaacttgctttattttaaccctctctgactcgaaacaaaatctactttgttacattgtgaatttgctaaaatacataacttaattaggatgatgccgcgggtgcactggcgatagccagcatgtcagcgtcaatgttcttgagtgcgttgtggtactcggttatctcgagcgcctcccactcggccttgaaggcggcctttggatcctggggcatagtcatggcggcgcccgtcatggcatccgcctgtgcctgcgtctgatcggcatgattgttctcgccaagaaccagtgtgtagatggagcgcaggccgaacacgttgaggaagtaccaagaggctgaggagacccaggcggcgtccagcgaggccagctccacgccccgctggagcatgggcttaaagcgcagggtcaacgggaagggtaccttggtggtgacgaagcccgaaaacatccagttgatccagccaccgatcacgaccatgggcagcacgttaataaagtttcccttgaccatgtcggtgagcatggcggatgagttttgggctacaggcgcccgtttctgagtcttgaagtagccggtctcctcgttgttgaagtagttcttacgcatggagaagctctgggcgctgagatacttgccgttctcgcgtagcaagcgtgcccggatcattgcctggctgtgaacggaatggtaggtgtcactaaaaggtgcctcgctgcactttgctcactctcacctgtcctggatttgggtgatctcggccttcttctgcgtggatatcagtatagagacgtagtggcgcacaatgcccaccagga

SEQ ID NO: 25325 - DNA, 890 bp, DROSOPHILA
gatcgttgaaaccacacacacagtttcaaaatatacaaccgacaatgtatcgtgcagcctatcaaaaaggtttccttaccgtgctttacagcgtaggcagttcgcccctgaacaactggtcttcctataccaaaaacgggtatatcaaacggatctacgatgaggacatcaagtccctggtgctcgagataatgggctcaaatgtgtccaccacattcatacactgccccagcgaatgcaaggagcagctgggcatcaagttgcccttcctggtgctccttataaagaacatgcacaagtacttttgcttcgaagttaagattcaagacgatcagcgcttcatgcgccgtttccgagtgtccaatttccagagcaagacctccgtgaagcccttctgcacggcgatgccgatgggcatgtcaccggggtggaaccagatccagtttaacctggccgacttcacgcgccgtgcttacggctccaactatctggagacggtatccttgcagctgcatgccaacgtacgcatccggcgcatctacttcgcagataagctatacacagaggctgaattgcccaatgactaccgtctgatgggcaagccgaaggatctgaagaagccggagaagcagttcaaggtgcaggccactgcgcgtcctccgtcgcctttgaacacgggtcgcggtgaacccggaccctccaaagacacggacgcagaggcaacaggtcccgccacggatccgatgagtgagccggagcccgcgctgcagaagtctccgtcgccgcctgttccgcagaaggttccgtcgccagcagcttccgctcctccagagccggccaccgaggagccagctccacaaacggaggccaccgaagaggcctactattaa

SEQ ID NO: 25326 - protein, 281 aa, DROSOPHILA
MYRAAYQKGFLTVLYSVGSSPLNNWSSYTKNGYIKRIYDEDIKSLVLEIMGSNVSTTFIHCPSECKEQLGIKLPFLVLLIKNMHKYFCFEVKIQDDQRFMRRFRVSNFQSKTSVKPFCTAMPMGMSPGWNQIQFNLADFTRRAYGSNYLETVSLQLHANVRIRRIYFADKLYTEAELPNDYRLMGKPKDLKKPEKQFKVQATARPPSPLNTGRGEPGPSKDTDAEATGPATDPMSEPEPALQKSPSPPVPQKVPSPAASAPPEPATEEPAPQTEATEEAYY

SEQ ID NO: 25327 - DNA, 3176 bp, DROSOPHILA
agggattggtcaaacatccggtgttctccgtctacctcaggcgcgatggtacctcacagtctggcggagaagtcatctggggtggaatcgatcggagcatctacaggggttgcatcaactacgttccagtatcgatgcctgcctattggcaatttacggctaattcggtgaaaatcgagggcatccttctctgcaacggatgccaggccatcgccgatactggcacctcgctcatcgccgttcccctgcgagcctataaagcgatcaataaagtgttgaatgccactgatgccggagatggagaagcatttgtggactgcagcagtctctgtagattgccgaatgttaatctaaatatcggtggcactacctacacactaacgccaaaggattacatctacaaggtccaggcggataacaatcaaaccctgtgcctatccggcttcacatacttgcagggtaatttactatggatactgggagacattttccttggaaaggtctatacggttttcgatgtgggcaaggagagaattggattcgcaaaactaaagaagcattcaagttatagggtttatgcctccagttatgtgaaagaaccatctagctacggcatcgattacccattctacggcgatgaatactccagattctttacttgagtcaattatatttcaactccaaactaatccacgtgcctatttgtttcatcataaaccttatggctaaacacttgtattaaagaagatttgtaaaacgaacaacaaatatttgccgagttctttaatctctacgactggagttggctttgtttccaagtcagcttaagtatgccaacagaactcgtggacgtcattaacttccagaaatggaaaatttcgtggctatttatggatatttgcagttagacaatacaaaaaaaatgggagagcagacagaaaagttatttaaatttcgaacccatttcaaatctattcacagtcgaatttcagccgcagacatgagacagttgttagttttattggtgcttgtcgggattggccattccgctgccaagttgaatcgcgtccagctccaagtgaacaagaatttcaccaagacccatggcagtgttaaggccgagaagaccgtgctggcatcgaagtactcctttttggcggagacctctttcagtgtcagttcgtcgggtgccaccgaaaacctgcacaattccatgaacaatgagtactacggcgtgattgctatcggaacgcctgagcagagattcaacattctgttcgacacgggatcggccaatctgtgggttccaagtgcaagttgcccggcttcgaataccgcgtgccagaggcacaacaaatacgattcttcggcatccagcacttatgtggccaatggtgaggagttcgccatcgaatacggaactggtagtctgtcgggtttcctgtccaacgacattgtgaccatagcgggaatcagcattcagaatcagacattcggcgaagcactcagcgagccgggtacaaccttcgtggatgctccttttgctggaatcctgggactggccttcagcgcgattgccgtcgatggagtgactccgccgttcgacaacatgatctcccagggactgctcgatgaaccagttatctccttctatctcaagcgacagggaaccgctgtgcgcggtggagaactgatcctgggcggtattgactcgagtctctataggggaagcctcacctatgtgcccgtttccgttcctgcctactggcagttcaaggtgaacaccatcaagaccaatggcactttgctgtgcaacggatgccaagccatcgccgatacgggcacctccttaatcgcagttccactggccgcttacaggaagatcaatcgccagctgggcgccaccgataatgacggtgaggcattcgtgaggtgcggccgagtctcatccctgcccaaggtcaacctgaatatcggtggtactgtcttcaccctggcaccaagggattatatagtcaaggtaacgcagaatggccaaacctactgcatgtccgccttcacctacatggagggactaagcttctggattctgggtgatgtctttattggcaagttctacacggttttcgacaagggcaacgaaaggattggtttcgccagggtggcggattattaacataacgttgttatcgaaaaggaaataactaagagaaatacatgcaatacataaaatctaacttggagtattcctgtgggtaataactatcaggtttacttgcttacaatgtatgtaagtaagatttaagtaaatcacaaatcagagcgatagtaagctgtggtaatagcacccatctgcatgcatctttatactcactttggatgggtcagcggaacttccagtatcaattcgggcgggtaatcaaagtagtccggatcgtgaccattggccgagaccaccaatggcagtatgtcccactcgctgcccttgctcttccagcccagcttggtgcagacctgatggatggaagagcgatgggattggacatcaaacaaatgtgattcggaatcgaaaatcagcataaggccagcgggcaggcggtggcgtatataaaagtgacatgtgtaaaaataaatggggatactttggggctcggttttatatgcaaatacattaatgttggcatgggtatgtggactatggattgactgaaaccatggatcgcagtgtgcccaaccgctcggcggtaacatctgctaccgtatttgtgttcgtatttattgacagctttgttgtttgttcggtttttgcgtatttaaaaagagatttattacaacgagttatagagctgtagagcgaacttgccgccgctgctactgctgctacaccgccattgttgttgtgggcttttggggcttttccaacttgttggttcgacaaaaggtcgccacatgggaaattgggtgggtcaaagggggcgacggaggctcggatttaaaggcaaagtcagttgatgcgtgtaaatatcgtgatggcagaggaaaaaaaatatacagatatttatgcatgtatgatatgtaaattgatagctggattgcgcagaaccatgtgaataaataagagctgtttgatggcattgtaaatattttcgaaccgtgtctataactttgcgttcaaa

SEQ ID NO: 25328 - DNA, 1176 bp, DROSOPHILA
atgagacagttgttagttttattggtgcttgtcgggattggccattccgctgccaagttgaatcgcgtccagctccaagtgaacaagaatttcaccaagacccatggcagtgttaaggccgagaagaccgtgctggcatcgaagtactcctttttggcggagacctctttcagtgtcagttcgtcgggtgccaccgaaaacctgcacaattccatgaacaatgagtactacggcgtgattgctatcggaacgcctgagcagagattcaacattctgttcgacacgggatcggccaatctgtgggttccaagtgcaagttgcccggcttcgaataccgcgtgccagaggcacaacaaatacgattcttcggcatccagcacttatgtggccaatggtgaggagttcgccatcgaatacggaactggtagtctgtcgggtttcctgtccaacgacattgtgaccatagcgggaatcagcattcagaatcagacattcggcgaagcactcagcgagccgggtacaaccttcgtggatgctccttttgctggaatcctgggactggccttcagcgcgattgccgtcgatggagtgactccgccgttcgacaacatgatctcccagggactgctcgatgaaccagttatctccttctatctcaagcgacagggaaccgctgtgcgcggtggagaactgatcctgggcggtattgactcgagtctctataggggaagcctcacctatgtgcccgtttccgttcctgcctactggcagttcaaggtgaacaccatcaagaccaatggcactttgctgtgcaacggatgccaagccatcgccgatacgggcacctccttaatcgcagttccactggccgcttacaggaagatcaatcgccagctgggcgccaccgataatgacggtgaggcattcgtgaggtgcggccgagtctcatccctgcccaaggtcaacctgaatatcggtggtactgtcttcaccctggcaccaagggattatatagtcaaggtaacgcagaatggccaaacctactgcatgtccgccttcacctacatggagggactaagcttctggattctgggtgatgtctttattggcaagttctacacggttttcgacaagggcaacgaaaggattggtttcgccagggtggcggattattaa

SEQ ID NO: 25329 - protein, 391 aa, DROSOPHILA
MRQLLVLLVLVGIGHSAAKLNRVQLQVNKNFTKTHGSVKAEKTVLASKYSFLAETSFSVSSSGATENLHNSMNNEYYGVIAIGTPEQRFNILFDTGSANLWVPSASCPASNTACQRHNKYDSSASSTYVANGEEFAIEYGTGSLSGFLSNDIVTIAGISIQNQTFGEALSEPGTTFVDAPFAGILGLAFSAIAVDGVTPPFDNMISQGLLDEPVISFYLKRQGTAVRGGELILGGIDSSLYRGSLTYVPVSVPAYWQFKVNTIKTNGTLLCNGCQAIADTGTSLIAVPLAAYRKINRQLGATDNDGEAFVRCGRVSSLPKVNLNIGGTVFTLAPRDYIVKVTQNGQTYCMSAFTYMEGLSFWILGDVFIGKFYTVFDKGNERIGFARVADY

SEQ ID NO: 25330 - DNA, 35832 bp, DROSOPHILA
gagctccgaacacgccgagccccggtcgagcattattattttccatcattgtcaacatatcatcaggttcaatgacgagtcgatgcttccgttgttcccggcgctcctgctagtcctgctcgtcctgctgctcctttgccagacagttgggataataaatatacagaatgccagcggtagcttcaccaggaccagcttttctgcagttgcagcgctttattgaaaaatgtgtgcacaattcgagaaaagctgccaggtaacgcggcctgcttcgtgcgctctggactacactgagaaaaaatcagacagataaagtattatgtaaatacctcatatttttgttattattaaatggatatattcgaaacaaggtaatatttaaattattgtgatccaaattcctgtctttgcatattgtccgaaaatgcacttgctttccaatattctccctgcaactgtgactgcagttgatgccctgggaagccatcccttcgccagacacaaatatcaaatattatcgagctgagcggaggacgttgaaaggcgagcattgacggagtgtcggggtgtctccagctccggtagcagcttttgcagccggtcctggttgccggggttacacgtacgcccccgattcccgggctcctggcccgcgggtcctccgttgccatggccatccatgcccaatgcctgggcctcgactttgtttgtaaacatttcacgttcatcgctggcccgcaaatatttcgcttccactgctgctgtgcaaacttttgccatccgagctacgggttttgttttccatttttctagaacggagaaaagtatgccccgcacagagtgaaacaaatgaaagcagactagaaatcgtgtttcgttgtgttggctttgaatacgattcgttaacaaaccagcatcagcggaaggatcacgcgcacaccgtccctgaggttctccccctgaccaaaccaaatcatccaaatcaatccatgccctcgccatgcagaagaaggtagcgccagagcgccgtccatactgtgatcctcggctgcaggatgacaagctgaggaggaaacgaactctccatctgcccagagtgtcgcaggctcagaagaagggcgaaaagcgccagctgaacgactgccccttctacaacctgacttatggctttgaccaactgccactggatcctgtcaaggagttcctgcaggagaagatatgtaaggctcctctatgccactttaacttcccacaactaaataccaatttatacttagctcacatgcagacagacaaaatagtgggacattgcaatcgggagtttgatttccaccgatacgatttggataacgtgaaggatgagtatgatgagtgcgatgatgacagcttgcaggagctgcaactggaggatattatcatgcccgagcagttcgagatgctgcgcgatgccaaggatcatttatacaactttgattccactggtaagtaggaacatttccgggggaaagccacaattaagtggaacaacatttgcgcattaaaccaggtgtgctgggaatgggtaaatgccccaaacaaattgccacacatttcgtgttattcaatgagtgagaactttaccgcaaaaacataacacttaatactttattaaatgcgaaaacatgccccgactgaaggtgctgctttcgcccaactcccaattccttcttggccgctgctctacccccttctgttgccagctttcccattttccgactcccacagcgcagctcgctggaaaattgttcacctgtaaacataaaaattccaaacattatccttttaacataaaattttataaccgaaatgagaaaaaaaggcaaaaccgaaaaacaaatgcgtatgacatttatttgaatatcctttgggagtgcagggcactcaagggtagacagcgggggtgggcgagggggactcgtagggcaaggacgaaggtcgggtcgagtgactctacaacatgtttatcatagtgttttatttagcatttacatgaaacatttttatgttggcgtttttttcgttgcatactctttgcaaaatgtgtaatttggttgttactttgaaggaatatatggtacttttaatttagttattgtatcagaactatcagaatatccaaaagactggcatttcctcaaggactccgaactctttacactaaaaataatatttaaactttttaaattggcctatcttttacttaagtttctagaaagaatagaaaaagagcaactcttgttcgcatattcccacatgaaaaccatatctccctgcagtctcgacttttgtcgctagtttgtaataaaaatgtttaatttttgtgtctagttttttaatatttaatgcgagcatggaagcgccgtcccagtgggcggtgggcgtggtctattaagggatccggttacacaatggcataaaagcgtgttgccaatagacattagcatgcaaatacgacaaacaaactcacagatagccagagatgtccagttggcccgggggaatttcgtttgtaaaggcccgcaatggaaattaattccagtttaatcagttaaaaatcgaactctgctgccgtgactcttgtttaaaacaatttcatgttgcgcaaacaaacctatttgccctgcctttcaggcacgtcgaaagtcacgcagaaaaggggaaaatcaaattcgaaaagtgcagacagacccatgtcatattcgtgggcaaatattaaatacgattttcaatttcaattttacgcattattttttaccatcacctgcctttggtttgttttttattcgcttgcagcctgtaatcaatttccctggattgacaaatggatgactggcggtaataaataagcgtgcatatttactcagtgtgcattattaaaaatttgacaccccctttacatgtgtggcgcagtgcgtcccagtgagcaggagatctatgaaatgaccagccacctcctggaaatctactgcaatcgcagggtgcgcatcttctatccgggctgcggaaccagttcctccttgtggacaaaccagctgaggcgccagcacggatccccttcggagctgattggagcctatcgaactccctctgcccgccacatgcgggtcaacaacatgagaggacctcccaagaaggaaaagttcacggccggcgatcattatgcctttcgaacgccgcagggtaggggcttaattatatattttttaattcaaattatattggtgtccttacagaatgtcgcaacgaactgatgagagttgggaaaataattgatgagctaatcgagccagtgctgaaagcagcagagcacaaaattggtcatggactcacaaaatatcccgatccgcccagttgtaaggacaacactaatcgaatccttaggtcggcaggtatattggtggtatgtgtttttttttgccatttcttatattgttataaaaaaaaaacctattttacatagggaaagaaaaagaattgctatgtcggcaagtgtcgcatacatcgtaaggactttgccacaaatgaggagtttctgcgctgtctcaaaaggatggaagcaacgtgagtatcaatttccctcatttcaagttaatagcaattattaaaaactttccgatacagccactttccgtacatgcaacccttgcaaccggtggatcctgatgaccaaaagatcaaaatgttggctaaataccgagtagagctggcaagagcggaaaagctttttaccctgaagatacagaagcgataccagtgtctgctgaaaagtgtgagttatgatgagagatagttagggtgccacgtctcgcaatgtatttcggaattatgcaactgaccaaacatatgccaaatgcaacaaataaatgggcggtatgaaaaatgaaaccgaaatacccagccgcaatgactccttgaccgagaccataaaatacccatcaaatgtgagcaccagcgtcgggcgcaaataaattttatcattgactctgactttggctccgtttccgtgtgttgctccgtatccttcctcgccaccgtgtccatatccatatccatgaccgtgtccgtatctttgtgtctttgtccataaaaaatgataataataaagtccatacaatgtaaatatgtgtgcgtgggcgtgtgagtaaattagactgcctttgcttcagagcagtgttgctcacaatttccacaaaaaaaggtgggtttgaatataagcaattcaaaaaagaaatgaatcttaacttgctttggaacggactaacggacagacagacgtaaatggctagatcgactcggatgctgataccttatatggttgaaatatacttggtcaaaactggcgggaaaaaggatgaattggcaacactgcttcgcggaacgtgcttataaaaattatataattcatacctcgtaaatattatggtccgaggggcttggtctgagttatgaataacgtgattagctcttaaaaagggaaaccgcttgtgtggcgatggcgtgaatcacacccgatttaatgactgcactccgcccacaacctaatccctatgtttatcccccatgcagatgtccatagtgcaactggcgacgtatccttcacacctcatccgaaaggccttcagacgcatcaatccaaggagcgcccttctgcaggatgcctaccaatttatagtaaaagaaaaggtgagtaactgactaaatagctatctatagtatggtacactttattaatcttaatacaatttaatctttttcctgcaaaattaatactatttaagactgcactttatttcatattactacattttaattcacctttacgttatttttcaatacttgtatcatgtatttaagtttaagtaagctacaaaagtttattggaggttaatgttaataagcaggcttgactaaaaacaactaggtgggcaacacagattaatatataaaaggcgttcccaacttagtgtagcgtagacattattagtaaacttaactggctcagaattcgacagaagttttgccgtcgaaaaagtttgccggcagtgcgagcatattaaacatgctcccagaattggatggtacgagttgggagatgggagatatgggggaaactgggatgacaagtgacgaggcgcgtgttgatgttttgacgtgagcgccaaacaaactttggcagggatttaagccaagcacttgccatcagcaccggcaaatcagtgccggcaaaggcgggttaatgagcatccaaagatgctccgcagagaattcagtccccatccacctgtattctaaccacatggttccaaaatctccttggagcgccaacaaagtttataccacctgtcgtccccttttcaaccacatccccaaccatgtctaatcaactcattacagagagattggcccaaactgccgccagaagttatattaatggattacctgttcgtgggggaccgcggtgtgcgtcaggacctcgccatccttattatcgtgtgccttatcgatctacaggaggacttccggcactatgtcaagcgctctttcctgaactacctcttatcgtgggtcatctttggcttgatttgacctcattcatacggacattgattatctttgatctgcaggtctaatatggagaggaggcgtctgcagttggaaagggaacccccagagtttcccattctgaccatatcaccgccagtttcctggcgttccaacctcctgaggggcaaggctcgtattggtgaagttctcatgaccacacatccgacggttcaggcactgaatagattgtggcacgatctatatgaggatctggttgttgtagatctgggtcagctacttctggctcagcggccactggatgcagatactgtccaggttttcattgagaagagttgtgccgacgttcgggatgtaagtatatctaattttatgagattaatttttattaaattttatctttaagttgctgctcaacgattggctgccacgatgtgctgaccttatgaacgagatgcgtggcacttggaaggatctggtgcccatgtcggggaagtatggaggacgtgcggccatgctcttccggtgcatccactcggcgatgtcccgacacttgaacagcctcattagcaaaagcattaactacctgttcaaggttctgtgcgccttcaagggtggcaaccgcatcgaaaagtactccatgttcgacgcgaagctgaagaggataccgctaatgacccttattgcttctgtggtcggtgcccacttcgatcatgagcccatcaacatgggtcctggagtcagacccgcctcgaatatatatgtctatgatgaggacgacgctgatccttttcagcagccgcaagtcaaccagtttgtggaaaatgtaaatatgttgaactgtaatgataggaataagtaatttaaaatgagtaattacaggttcctgatattgatgatgtggctcagtttgaactggatcactcgaataagctctacatatatccttatatgcaggagctgcctcgaatttttacagagcatttcaagagtattttggcagtgggctatgaaattccccgcctcgagtttgtcatgtctggcggtggttagtaacagtacatatgcttattacactttgtttgtaagatataaccttggcttgcagaacccgaaaccaagggctttctgcatttcattgatgaagaccacgtggactttctggaactctgcgagaaagtcgagcagattgtcaaagtcaactggcagggagtgcacgtttacctgaagcccgtctacaagtattactttggactcttccaaaagttaatattgcccatggtgcagaaggtctggaccgagaataacctgccggaacttggggtgagtccatccgtccatccgtcctggtggcaatcagcgctttgtgagccccaggcccgtcttgaaatggatttaattatttatttcgatttgattacacgcaatgatgcgtagaattaacataaaatttcattatggaatattaatagactgctgacagacagacaagtagcagtcgacgggagttgggagttggaaaatggctggcagtttgtgtaatttgacaagttccacctcgacgggaatccggattatagcgcctgccgaaccgtgctcctctgcctttcgttaatttctggcattttgttagctgtgtgcaatgtttaattagtcactgtttggcttcgcacagcctgttgattttacaaagttgggcatgctgttatacttagacagtcccgtgaattgccaaacgtatatcatacgctcaatttacttcccccagtctggcccaactgcaattgcagttcgcattcattaagttttatgaaacgaccagcaatttcctctcctctcgattcgtttggttcggcttggttttttgctcaatttatataaaataaaaattacttccgactgcgtgtatgccgcctgctgcctgctgccagtcgatgcatgaaatgcgagtgcgtctcggtctgcaccaccatcgatgcacccattggtggatcattggtggagtcgtgtgattgaaaagggggttcaatcgcttgatgcatccgcagggcactaactctattaggactttaaagtgcggcataaagttttcaacggcaaagaagtatatgggcattaatatgctttcgtattgtccaaatagtttatttaatttaattgactattgtaaatgtaattagttgacaaatattgactgagtttaattacagagctaaaattgaattgcatacatgaaattgtaatatatgttgtaatggtatttcaaaaatttaaatatgtatagggagcatatcaaatgagttcatttaatcaaagtaacattgccatgcagctatagaattttaaaggttttattaacatatccctatttacatcctccccctttggatgtgccgcccatgtcctttaggctgtccaggagctgttgaaaaaattgcaggccgtgagcgatacgacctattatctgcgcgatttcattccgctcaacctgttcatgctggataatcggcacgtgaagctatcgctgcggatgtatgtgcgcgaaatctacgatttcataattgatttttacaaagccctcaattggaacgagaatcgagcgtaagtagccaagtagccaagtgtccgagtgtccgagtagccaagtaaccaagcggcgagaacagattgcatcagcatcagctaaatgaagtgcgagtgctctttcacttaacttttatgctgactgccccccaatgccacttaatagataactttgctctatacatacatatatgtgtgcatgcacgctacctgattttttacccgactcttttctgccacttcagcatctgtgaggagctggaggagatgtcgatgaaggccggcgagcggccggaggagacgcccgaggtggtggccctgcagaactacatcaacgactgccgggagatgcgcatatttgccatcaaggatgaaatcaagaacgtgttgaagcgcgtcgtcttcctgctgacacacacctacctgtccagtgagtgatgcaattggtttggtcaggacctccttctcgccttcccgctttctcccttccgctgtttgtgcagctgcagctggccagccgagctctttcccttggcatcccggccaaaatctagacactggggaaaaatacgatatacaatctctagggctttaaattgaaccacaaagatgtataaaattacacaacagagctaattaagttagaaatgtttgttactgcataccctttacagaaacctctaaacttaggaatattccttataaactagaataataataggtcttaaggcgagtttacatagaatacagaacttgaatattttctatacttctttagctgatatcttctaccttataacctttaacttctgtcacagagattattatcataattccagattatcccgcagtgtagatagtgtgtttgctttgccctgtgtttggcttttgggtagagaggtgatgcggaagggaaatgggctcataggaaaggcaggaagtgcagcttcgcttaacataattaacctcaactaacaagctgagtctactaattggttttataattacttgcggtgagacaccaaacattgagctccgctaaaaccccgaaaatgcaacttaatgagcttaacaaattcatgaatgtgtgaaagttgctttgacaaccagcaaatgcagacgggctcacacccacagaaatcctcgcagacaattgccagttatcgtcaagtgtcgtgtgtatctttcggatagctacaatgtgtacttgagtccctctgaatttgcggctccaactgcctgtctgtttgtctgtttgcctgtctatctggccgcccgtccgtccgtccgagtgtgtggctttgtcacaccgaatactcacggatacagcttgtcacagccaaatatactcgtacctactcgaataactaattattttatcccccgaaaaagaaagtctcgcgcagccaattaattaagagttaagcgcagttaattagcagcgagtacaatcgagagccatgtcatccagtctggtcttggtctcactcccatccgcaggcgacgaacttcatctgaactcgcgcacattcatcctgccgggcgaactggaggaggtcctggatctgagcgccgcccgcctggcggtggtgcgtgataatctggagctggccttgcggtgagtgaagtaccgattagactctgatcccgaacagatcccagatactaagccgacacattccgcagggagcggcgcatggagttcgagaagctgctggcccaggagaagcgcacgatggacggctttcgtattcgggaaatccgggatgtgctcacgctggaggagctcaaggagcgggtggatacggtcgatttgctcttcaccaccattgaggtaaggattagctatactttgctggtattcttttggaagattggagttgattagttggggcttagtttgggagtgacatatacaagtattcaagcatatttaaaaatcttcattattattattattattcatatgttccctacagaatctcagtcgtgaggccaaggccatcaacacagaggagactctactccaaatcgatgtttccgcctttccacttcttgccgagatcatcgagaaaatggagcctatcgagaagttgtggaagacctcgtacgagttcgaaaaggattatctcatttggtaagcagcggcaacatttaagcccattgcaattatagttctgtcagccggagggggaagtgtgacacttcccggggctccgtaatattccgaaatgaaatggccccagtccggcagtcatttccattgacattgctgcacgcaaatcccaataccaatcgtagtggccctctctcaattcccacaacccgggggcgaattccagcagaaagctggcgcttatgatgaggacaccactgcagctccggcccctgctcctttatttcgtccttttttttgtgtacttctatttacatctcttctgctgctttcaggatgttcgagcgcttcgaatgccttaatgcggatggcgtgcgggagcaagtggagaatatgcacaaggtaagtagttgcaaagtcggaagttgtcattctagggggcttcagtagctccgctggcttcagtagctggcggaaataaaaacgagcaaggaccgacaaagtttgagctgttgtcggatttctcctgctcaactgcccatgcatgggctcctacgtccttcgtcctgtggctcccctatgtgtttcccctatctcccgtatgtccgtctgtaagccaatgtagcaactaaaatgcaactaaaaacctcagaccacctaaggcagcaatagtagccatccatccagttagcaagggacaaacccgacaaacccgaccgacgaccaactgaaaactggctgtaaaaagaaagttccacttggcagccgaaaagtatgcatggaaaaaatacccaacatatttggcggctgccataagatgagtagctgaaggaaggggatcccctggattttggggatgtgacccccatcggggtcagctgggaagcctttcggagtcacgcaaaaaaaaaagctgcacaaaggcgcaaaaggaaagtcagttgaattgaatttttcggcacagctgaagcggcaaagtgggagcccaaaaaaatgaagaaaacagttctcaggcgaaagcttgaatacccttgcgaaatcgaattattttcagcttcacagctgcgcaaccttgcaccttaaggggtaattgattaatatataccatatcgatctttttttaaatatttttttgaaaaagtattccataatatagatgcataccagtcaactcctcagaaaattatagtaccatcctcattagtttctaattaaatcatataattagtcaattcgtttagatacggttcctgaccaggtcgacctggctaatttaatttcttataatatcttgagtggctcaagaaaccactcttacctgttcgccctctaactctgatattttcgccagataatgtacaagctgtcccgtcagttggcctacaatccagtggccaaacgagctgccgagcagatgcgcatgaagatcgagaagttccgcgtgtatctgcccgtcctggactcgatttgccgtcatggattggagaagcggcattgggatcagatctcaaagatactcggtcgcaaagtcaatccgaaattgttccccaccctgaaggacatgattgatgtggatatcatgagcattctgccgcagctggaagagatcgctaatgctgcgggcaaggagtacgacctgaacaatggactgaggatcatgcaggcggactggagggacgtaatgttcgaggtgctgcagtatcgcgactcggacacgcacatcctggccagcctggatgatattcaaacgctgctggatgatcatataatgcgaacccaggccatgaaacgctccccattcatcacagccttgggctccaaggcggacgactgggaagcccgtctgctcctcattcaaaatatcatcgatgcttggacacaggtccagatcacctggatgtacctggagccgatcttcagcagcgaggacatcatgcgacaaatgcccttggaggggcggaactttaaggcggtggataagctgtggcgcaagattatgaagcacacgctcaaggatcgacatgtgatggctgccaccgagtatcctgaaatgcttgaagtcttcacgaaggccatcgaggacttggaaacggtcacaaagggcttgaacacatatctggagcagaagcgccttttcttcgctcgcttcttctttttgtccaacgacgagttattggagattctttccgagaccaaggatcccatgcgtgtgcagccccatttgaggaagtgtttcgaaggggtgagtttggcgcagatttttatactgtagtatctctttttccaactttatctataaattgcattaattttcctacagattggcagtctgacctttgacgataacatggagatcgtggagatggtcagtgatgaggaggagcgtgtggccctggtgcggaaaattaacccgcagttggccaatgtaggcgatttgtcttttaatctttaagcggaacaccataaccgacttacgtttgtttcctagggattagtggagatgtggcttaaggaggtggagatggtgatgctggacagcgtgaaggagcagatgcgcgaggcctgggaggactacgccatggtggagcgcatctcctgggtggtcagttggcccggtcaggtggtgcagggcatctcctgcatggcctggacctacgaggtgagccatcgagtacttggcagcaaaaccgcggtaaccacaaggaccttgtccgtgggacagcaactgtccatcagttggctgtcagggaagagccctctgtgctgctgacagtgagattagctggacctcagcacttctgaccctcttctccttccccgggtttccttcttttgtgagcacttcccttttgggctttgactttcagagaagaaattttttcgcgtttggcaagcagcgaaattgaaaaccatatttcgctctttatttgctttcgcttcgctgcagtttctcagacactttatgcttttccttgccatcttttttctttacttcgcccaggtggaggaggccatcgagacgaaggagctgccggcttatttggagaagtccaatctgcagattgccgacctggtgcaattggtgcgcacggatctgcaagccggagtccggattgctgtggaggcgctgattgtcctggatgttcatggtgagtgcggagcaagaagtgtggaacaataagtaaaattttaaatgtgtaccatgcctcaaagtgaaacctacttgaccgtattttaacgcactttaaccaaaccgcaagcccaacacgtttgcataattaaataatgtttcgaccaaaaacaaaaccgcaaatgacccggtttgagcttttacataatgcatattttactaatatttatgattattgcaatcttttttcttttgcgttactgcacaagaattgttcatacaactaaatctatgggataataaccgttttctgtaaagtacttttcaagagttataaacacgaaatgtatcataaatgttaatagggaattaagtagtttaatatttccagatcgcgatgttgtgaaatacctgacggattgccggattacgaacatccaggactttgattggatctcccagctacgatactactggaaggttaacgagagtgagtttacttggggcctcaaagtttcagcaagagaccacaactataaatccatgatttatttccagaaaacgaggattgggtgtgcgtcagcatggtggtcacagatgtcgaatatggcatggaatacttgggcaacctgccccgcttggtggtaactcccctaacggatcgctgctaccggtttgtatgcaagaacatagtctatatatcttacacaaatccccaaccaaaaaaaaaaaaaaaccaacactccacacctgtacgatgccctgtatgaatatcgaaaatattaattgacaaaccgttgccaaagcccctcctttccacatatacagtgcatctaaaagtcagaagagaagccaggcacgtttattgggaaaatatttattttatttcggtgcattttaaatttattttcatttttgcaaacaaaatacgcaaaaagagctgaaagcctttttgatgtttaagctgcctacgacaaacacacaacaacagcaacaagaacaacatattcaggaatattcaggactaaaggaaggacacacgaaatggcagcaggctggctggcaggccgtcgttggcaagccggcagaaaggacattttaatggggtttccgataaaacttttatattaaacaaataaatcaatgttggacagtttttcacacaaacacacacatacgccgtacactaacactcacacccatgtcgggatagttaaaaaagggggaagcaaaagcggacaaacaaaaaacataaccgagtgtatatagatatttgtatggcgactatgccggaaaagctaaaaaatatatgcacaagcaaccccaccgacactgccaatatgataaaaatatgaacttgcaaaacaagcgacaaaaaatgagcaatgtttaaaatgacattcggagctggttagtcgaatataaagtatcctcaaagaagtaaagtgaagtttaagaaaaacgtaaatttcattaaagttcattaaagctctttcaggctatatgcccttcctaatttataagcaatatttatttggaacacttagttaataaatcctagatggttaaatgtttcctgttcagctttaagctggtgtaaagtgatacaatgatcactaagataaattccaattattaaccctatatacccactttcctaatatttctatctatttgggtcacaataaaaagccacccataaatgaaaattttttaagctgctgccgtgagaaatgggaaaaaatccgaaatagatattaaaagcgagggtccactccattttcccgcctcatccatcaactctttgttgagcttcctatattaattcccaaaacccactcgattgcagcacattgatgggcgccctgaagctgtgtttgggtggagctcctgaaggacctgccggaactggcaagacagagacctgcaaggatctggccaaggcggtggccaagaagtgcgtcgtcttcaactgctccgatggactggactacaaggcgctgggcaagttcttcaaggtgagccccccgaagtccggattgtatctatatacatatatataaagaggttcaagagcgtcgcgctgtctgcgattcgctgctcgaatgctttctaattgatggccccgaaagcagagtcgagtggagcacattaatcagacaaagaactcgtcttgatgcggcggcacacgcaacaatcgtgactttcaataccgcacgagcccagttaattggactaatgtcagacacactggagccgactttcgatgcgcccttccaattccccattctcttgccatatatatactatacgtatacaatatgtatagtatgtttattgaaatttatgcagcagcaccgggataatcgtattttcccctggctgttgactaattagccagcttgcgaaagtaatggccggccttcttccaaagaccacttcgtgcgcctccacttcagtttatgcaaatttttatttgcaggtcgttaaccgttgcctcctggacatccatccctatcccctttttcattcccattcccatcaccatcaccatccccatttgccattccccaaaaacacacgcacatcttaagtgggtgctgaaatcttgtagtaaaatttatgctgccataggctctaatcgcataatacgctcacacggctaattgcataatagttcctaagacccataaacacgggagccatttgatggcgatgatgaggtggtcggggtaaagtgatcacctagtgttcttgttcatttgcatgggatttgtattaataacgacccgaccgaaccggcaactttagtttagttgcgtcgattggagagcccataaattgccagcgctccgctggccgctcaatttaaattaatgaatttatgcgattgggatccacttgagtttggacatttgtttattcgttttattgcttaatttgggtctctgcgtctggttttcggactggagtcgagtggggctttagaaagtcgttctgcgctcgctttgtcaccaactggattggcatttgttctaataatctctaggaagtcgtaaatctccagcacacgatgctctcccactccgccgatttgcgatgcggtttttgatttttagttgccgggctgggaatgtctgggaaacaatgttgcgacaatcaaataatttgcaattgacaaaatatgcgaaatattcgagagcaattcctgtgccagccggagaagtaaacgtaaataaattaaatggaaataaaatggccacaacaatggatgtcgcacagaacaaaaggcgcatccaatgaatggcaaaaagttattgccgcagcaggcaggatgactgcacttctgggtaagatactttcgtgggatgaattcctagattttacagtaaacttatgtacatttaaacaatgtattcaatggtccttcttatagcgagtcatggagatggatcatttctgtaatatcctatcctacatcctattattaattttctattagccagaatatcaccgagatagtttgtatcttttttaattttgtacttgatacctttactgtgggtaaacttgttccatcactgttgtcacttggcgccaaacaactctcaatggagttcaaagtgttcaaaggcaacagccaccgtttttccgtgctctggacaaacaagttcctaacacagcagctcttcctccaggacctcctgctccgcgtcctgcacctccggtggaggcaaagaggcgctaattgtacaatggtggggccaagcggaacggcggtagccaccgcatcgggtgtagggacaacagtgactgcaaaaagcgtgcgaacgcgcaacagaatgtaaactctttgtgtggagtgcagatcgagggaaaagggggaggtccttggggcaggaccaacagaagctacttgccatgcaggcacctttaaaggtggtcaagtggatgcccatggccggtcagcagcaacagctgtccccatggtttccccattgtgctttagtttgaatggcagctttatagaagaaagtttgccaatctcccctcgtttagtatagcattttgacaggcttttgggggagtatcaattaaccaaattagttgtattagcaatagagagtatgaattatcattttcattttaatataattcccttttggcaaaaagtccaacatattgtttatttctgaaaaaatggtcataaactcacctgcacaatcacacaatttagttttcgagattaatcagccaatagtcaaactaacttatgccttaaatatatttatcatctttattttaatagaaatttaccgcatatatgtaatatccggcatgaaatattatgttcccttatttaaacgaagttcatttaaaactgctagagaacatttgttgctattgcaataattgaaaacccaaaggatacaaaaaaatcagttcgttagaactcctcatatttgcagcaacagttctacgtaaaggatttccctaataaggggaaattcgaaccttttcttcggccaaccatagatactgcgatgcatggccatcgggcagctcatggggatatatagctgatagatttcgacctgcgacgccctcttcatatggtttggaatggcatgggatggtatggcgctagcagtcaggtcagtttcgctgctttggcgttctatttgtgctgctccgggtgaaaagtgggctggagtgtgggaggtgcaggcttccagctgggataaaacagcatatttattgcaacatgcaaaaggaagcatatcaaagggtcgttgtagcggtagcagtaccactagccatatcgaccctgctttgctgctggcccccaggaaccagaaaacagaaaccgagccatgagaaagagaaaataatgtttatgctgctgtttgctttttccacttttccccaatcgaacagcggtgtgtgtgtgtgtgtgtatgtgtgcaaggatatttcccttgcactcttgtccaggaatttctgtttctatttgtgtgctatttttttgcagccctattcaggattgttcactcgcgctgggtgtgtatatgtttagactgctcctcatccactcatgcccattcccatttctacggattctttgcagggcttggcacaatcgggcgcttgggcctgcttcgacgagttcaaccgcatcgagctggaggtgctctccgtggtggcgcaacagatcctgaccatacagcgggccattggacgcaaggttgtgaaattctttttcgaggatacgatgctcaaactggatccgacttgttccatattcataaccatgaatcccgggtgagtagcggggtttttgggatgcaaggatgcctgagtgctgggaacagcagctgcggtttcacgcatcgcattttttccgcacttcctggtttttctacttttttttttgtttgtttccttctgttggactgggcatttgaaaatacatttagttactttgtaagcctaccatacggtagatacgactgatacgaacgacacggcggagagggctattagccacccacttggaggtggacgcactgcgttccgatattggtagttattgcgttattggagattttcccatcgggatatttattgctttggcatgcatgtggaacagctgcgacaaacatgcatattagccaggccctgtgaatcctcctgcccatgttcctgctcctgctccaatggttctgattcaggtcctggttctagccctctccggccgtaactgattgcgccattcagcgaaggtcttaatttcgattggacgtcgcttttgctttgccattcctgccggctagaagtgtgctttttttgtactttgcttcgctttgctttgctttgcaccactctgctttttcctgcctgcctgccaatttgtcacgcaaccagacgtccttaagagcagtcactcatattggttattggccattggaaggaccagggattgggaaattgggagagctgtgaggagcctgtgtttagtatttatgccattagcacttgcactttgacgaatttgattgcccaacgggctctaatccggtgtcttctctgctcattctgcacttttgcccacagctacgccggacgaacagagctgccggacaatctgaaggtcctgttccgcacagtggccatgatggtgccggactacgccatgattggcgagatcaccctgtactccaacggattcgatatggccaggaatctctcacagaagattgtccaggcctacaagctgtgctccgagcagctgtcctcgcagtcccactacgattacggtgagtaaagcgttccagaagaaattctggaaaatccagaatatatttataatatgtttaattttaagtgcaaaattgggggaaaactatatactttttcatcctcatcctatttttcatcctcaaactaaaatttcttttcaatctactgactttattctctgtgttccggaaactccgttgcgctgaagcataaaatcaccatagcatgtagctggttttagacatgacctggtcagagggcaaggttgtcgctccacctggctaataaggcgcaaaagtagtcaacaacatgtgtttttttccatccatgcagctcaactttgagggagttcggtatggttttgttggagggattggtggggatccaactttccggatgtctcatgtcctgcgtgcgtgtctccttctcagcgtttctcgtgcatccttttgctcgcttgtttcaaggcaaagatattgctccttttacgacgtaacatgtcatatgacattacaacatgtctgtgtttgccactccgtccgggctttccagtgtgcgtgtgcatctttgtgcatcctttgccggccgctggctgcaattgcaggaaggcagctgtgtgcaagtttatgtgcaaagtacatttgatcagtatcttattttgagtttaaattgaaaaactttcttgcaagtttgctgcgcttttgtgttgcatgtgtaagagacaaatggcacatagacacacacattgtatttgccgctctgccaagtaataataaaaactatttgtacatttagttgcccccccccccccccacaagcccccttccctcgctcaccattcctgtccagctgtttttgcaacgttgcgaaagtttagcatttccctggcgctataatgatgaggccaggatgcgcagggaatggttttcggatggggctggacgactccaggtattgcaactcccgcctcgtcgtcgccatcgggaacggcatcatcgaatgcctgaacctactgacttcgcgctgagttatgcgctcgcataactgtcaagctaatgcggcaaaacctccaacttcccacgccccacaaccttccgcagatctcactgccttacaaaggaaacagtctaacctataattaactaaataactaatttaataatacgattttttttagagttaaagtgcaagtcttcaggcatactaattggatggttctatactcaacatataaaattcattactacgcttataagctctacttgttacttggtttcttatcgatgtctcactgtacctttatttgccaggaatgcgcgccgtaaagtccgttctgttggcctccgcctcgctgcgacggctttatgttgacctgccggagccggagattgtcctgcgcgccattgtggatgtcaatttgccaaaattcctggagcaggacatctctctcttcatcggcatctatatggatctattccccggcgttgagctgccaatggtaagcaaaattacagtcatcggtttgaatcaattaacattcttcaggtgtaatgacctgcaagcgtcgtcaattaattcgataatggtttacttataaatatatccaaaagtggtttttacatcggtcagcggttattattacgaaaaatattgagcacttctctgctgatggtttttcttttttaatatgaaactacattttattcttcatctttcaaagagaacttttctcctatgtggcaggccataggcattttataaattcttaaacatcatttattaactgcctgcataccattttccactgttcatattttatttatgccggatagccgcaacgtggcgacatactcaagtggctgcacatcaacctggcggatcggaatctgcaggcgacgccatggtatttggagaaaattctgcagatatacgagatgctgctggtgcgtcacggcctgatgatagtgggtggctcgatgggcggaaagaccactgcctaccaggtgagtacccatggttcggaaacacttcatgctccatacctattaatttcgccgtccagccaattaaatggcctggaattaatgagttaacaaacgacttaatctgcacaggaataaattaattgcagctttccacctttttgtcttatgtatattaaaatacatgttttgagaaaaagtggtattaatatcatcgttataaataaaaatatttccgttaggtcttagcgcagactttgcgaaacgtttccaccgacgaggaggcgacattaaaggagttcccggtcacattccgcatcatcaatccaaaggccataactatgggccaactttacgggcgcttcgatccggtttcccatgagtggtacgacggagtgctggccaaaaccttcagggagcaggtgcaaggacccaaaggggagagggcatgggtgatgttcgatggaccagtagatgcggtgtggatcgagaatcttaacaccgtgctggacgacaacaagaaactctgcctgatgtccggcgagattatgcagatgaccaagctgatgaacatgatgttcgagccggcggacttggagcaggcatcgccagccacagtgtcgcgttgcggaatgatctacatggagccatcgcaactgggatggcgggcgctccacaagagcttcatcaatgttttggtgaataaggtgggtcttggtgatatctacatgacgctgttcgaggacatgacggagtggttggtgccggcggccttggaattcctgccccagtgcaagcaaatgctggaactttcacctatctatcagtaccagaccttctcgcggttcttcttgcacttcctagagaagcacaagcagttcaatcaagcctggttccaacaaatgttcctcttctgtttcgcctgggcctactgttcggctctcactggccagggtcagaagacctttgatgcactgctgcgaaaggttatctacggttcgaatgagaatttccccaagcccaagtacttctctctgaaccgcggtcaaatgttcccagagaaactgctcttcctggactaccgattcgatgaggctgaaaactggtggacgtggcagaagagcgacgacagcgctagcaccacgtccaatttccccgagaatgcccagatcagtgagcttattgtgcccaccaaagaaacgggatacatatcctattggcaagaattttgcatttccaagtcatacgccatgttggtcgttggaccaacaggaactggaaagagtgccatcattaccagcaatctgctggccatgcccaaattcgccaacctggtcaacgtcataaacttctcagcccggacctcggcgcaaatggtacaggataccattatgagcaaattggacaggcggcgcaaaggagtttttggaccctcactcggaaagaaggtgattaaggcttacaattaataatgataattactttcattctcatttaatattgccaattaaagtgcactgttttctgcgacgatgtggccatgccatcgaaggatacttatggctcccaggctccactggagctcctccgcacttggctggatcacggttattggtcggatctcgtggacaccaccaaaatcgagctggtggacatggtaggtggtgttgccagttgacaacttattccgtccataaactggccataagttatctgtaaagttttcatctttgccctcctgctcctccccacgccatctatgaactccaatcgttcgacagactctgatgtgcgccatgggcactttgggtggcagtaacttcatttttccgcgtctctatcgccacatgttcgtggtggccgtcgattcctttgaggactcaaccatcgttcgaatattcacaacgattggtgattggcatttttccaagggctatccggaaaaggtggctctgctatcccgtgtacgtatcttttcctcgtggcccaaacaacgaaatgtagagagagaaaatgcttttgaatttaagtgcgacttctatcttacacatatcaaataattttaatttaattttgatttaaacacttgttccttcactgaagacatacatacggtttaaaatagtactactccgcaacgataaatttttgctatcaactaaataatttaaatgggtttaaataatattaatttgacttaaaatttaaatttcgtatgtgaagacatttatatttcaattcatatttgggggccatttgcattcgtgtaaaaagcgaaccaaaacagccactggaggatgattgtctggtcagtggagtcaatggtccatccctgtgtcgtctgccgtgcttggcgagcatccaagcgttgggtacataataaaattaaaatggcgtattttatagctccatttccccaaaaacttcgactgtctctctctccaattttcgtttgtgtttgggctttttattgcacctggccgtgagtaagtgttatcctttcgcagggcttatcggaggctatggtcagtgtgtaccgcgatgcgattcgcagcttcctgcccacgccagcaaaatcgcactactccttttccctgcgggacatcacccgcgtcttccagggcatcgtgatggtgccccccaagcggatgcccgatcccgagaagctgggtcgcctgtgggcccatgagacatatcgcgtattttacgaccggtcagtatgatgtttactttctcatataagttacataatatataatatcgctacatgttattttcagcttggtggaccaacaggatcgagatcgtctgctcgtaatggccgtggatgcctgcaaatccaatctgcgttttcccttggagcaggcatttggtgagcgcatcgaaccgggtgaaaagctgaccgacaacgatctacgaaatctcttctacggcaattacatggaaccggatgccgagcctaagttttacgatgagggtgatacctatgagaagctggagaaactgatgaagtactacctaagggagtacaactctttctcgagtacgccaatggacttggtcatgttccgttttgctatcgaacatgtgagcaggtaagtgtgaggaattttgagaatattttactgatgttttttaaataaaacaatgtttcatatcgtgatagggtttcccgggtgctgcaaatgccgcgcggcaacatcctgatggtgggcatgggaggatcaggacgtcggagctctgcgcgtctggccgcctacatagcggactgccggcttatgacggtgcaggtgtccaagagctacaccatcacggattggcgcgacgacctcaaaaagatactaatgtcggccagcttcaatcttaaccacaccgtgttcctcttctccgacgcacaggtgagttaacttggtaaccaatgctcgtaaaaacaccgatcgattagtggattgatgtggatatgcaaatccatcagaatggcgttttaataaggttgtaaatcgcctcgtaatcaaaacttagccagggtagggaacaataaacccataaagactctacttcgactctctgacttcgtggtaatctgagtatgtaaattgccaaattaaattgaaattaattcgaatactcttgaaaattaagcagagattagtgcctgggatccgttgttggttcaaaattttgtcgaacgagtgccgggacaattaaatttggctcgaatgggctttcaatacggaagcagctctcattgttttgccagaatttgcatttataattaggttaattgttgaactaacttgattattgctcggtaatttgcataggcaggggctcaaattatggcaaatcaagagcacatgagtgggcttcagaaaattggcagcggaacaaaggcggcgtatggtgtcgcacctcagcccataataaatgttggtcaataaattagcatggccaaaatccaatcgatatatgtgcgccagacaatatgcaggtgtgtttacacattgttgttatacattataatgctccgtgttcgcctaatgcgccttttgtccaccggctccatttgaccatgaagcgtgaccaaaagtggggatccataagaagccatttgaccggattaaaactgctttaattctgttttgcacaaactctgaaatgccgaaactcaatcggattggttgctccctgccttttcgtttttgtccgatgaaaacttttcgaagcattagaatgttttcggaatccttgggccatccaatcaatgatttatctcctgctgtagtcttctgtctgggccaacaaagccccatgcagatattaattaacaattacaccgaaatgaccaacggggagctggctcctcctggttagtcctacctgtagtcccgtgtgcggagtccttcgctgggagtcctgagtcctgggacaaggccacttaggcgaatgcaaaatgcatgtcccaggttctctggacaaaagggctgcatagttccccggctacataaaaatgcatttggccagcagcatagctcaacttcagtttaaaaccccccaaccaccaatgcagtgccttgccaacttcctcttcaactgcaactcgaactgcagtccgatttgcattgcacaattgtgaattctcaggtactgattctctgtttctccctgcggtcgattgaaggcaacggatgaaggctacgtggaggatatcaatggcatacttaataccggtgatttgcccaatctctatcagctggaggacaaggcaaccattatggagaatatggcaaatgtagccaaacaattggtaagtgtgaagagaaagagtgagtgctgtcgtccaagaagcaaaaactggccaaatcgagcgttaacagtgatggagatttggttgcaaaaatatacatatttattcagattataatcatgggaaatcatttagttatttttagaaatattttatttggtttgaatatttaacatagcgtaattcaatcaattaagtttatctagtagatggtagccaaattttgcatcactgaaactcagaaagctatatgcattcctaccataaatcaaaatgcaactccctttgaccaaaccccatccacaaaccgagatgactggtaactaacccgagatgattcaccgcagggcaagattttggacactctgccgagcgaggtgtacgcctactacatcgaccgtatccgggaacagctgcacatcgcactggccttctcacccatcggggattcctttaaggagcgaatccgtgtgtatccttcgttgatcaactgctgcaccatcgattggtatatgccctggccggaggaggccttgtcccgcgtgggagtttactttgtcagttcaatgaaccttaaccgaccgcatggagaggagacacaggagccggtccagagcaaggatgccgctgatccagacgaggaggaagtgcgtcgcgaaacggttggtgtcgagcgggagcagacccaattggaggcagacctggtcgactgcgttatgtacttccatcagtctgtggtggatgctagtgaaaagtgctacttggagctaaatcgccgaaactatgtgacaccatctgcttatttggagttgcttaaggcatttcgcactttctacacccgaaagctcgacgagattactcggttaagggatcgctatacaacaggtttggagaagctcgacttcgccgctggtcaagtgggtgaaatgcagacgaacctctatgatctgcagcccaagctgaaagtcctgtccgaggaaacggatcgcataatggtgaacatcgaacgtgagacggccgaggcggagaaaaagaaggaagtggtgggtgcggacgaggcggcggccaatgaagccgctgctgctgctcaggccattaaggatgattgtgaaaccgatctggctgaggccattcccgccatggaggccgccttggaggctctaaacaccctgaagccagcagatattttcatagtaaagtccatgaagaacccaccatatggcgtcaagttgaccatggaggctgtgtgtgtgatcaggggcatcaagccggatcgaaagccggatccaagtggtcacatggtggaggactactggggtccctctatgcgcatgctcagcgacatgaagttcttggattccttgaaaaccttcgacaaggataacattccaccgcccattatcaagaggattcgggagaagtacatagcagatcgtgactttgtgccggaaaagatcaaagctgcctcgatggcctgcgagggaatttgtcgctgggtgcgcgccatggatgtatacgacaaggtggccaggatcgtgatgcctaaaaaggcggctttggccgaggctgaaggggagctatcccaacagatggagaagctcaatgccaagcgtgcggagctccaggttattctcgacaaactgcaaaagctcaacgacttctttgcggaaaagtcgcgagaaaagaagagattagaggatgagatcgacaactgcgagaaaaagttgaacaggtgagtcctagctgggaaagttctaggcttagaattttttcctaatctatattccattcccctccagagctgaaaagctgctaggcggacttggaggtgagaagacccgctggtcagaggcggccaagaatcttcacgaatccattagcaacattgtgggcgatgtcctgctggccggcggttgcactgcttacttgggctatttcacgacggaggtaagttggtttcgagcatacatatgtcctttgtttccgggctccttctataaaggcttttaatatgcatgagcacgtgacattgatttttcttttcgtgattctttccgcttttcttttgcgatggttttttcaaattgaccgacgggtcattttcgtggcttacatttttttgtaacatatttagctaagacctcaacactttgtttttagtaccgtgttaatatcctagacgactggaatgccctgtgcaagcgcaagcacattccgagtagtgaaaccttctcactggccaccactttgggtcatccaatgaccattcgtgcttggtctctggctggtttgcccgcggataacttttcagtggagaatggcatcatagtgaccaattccagtcgttactcgctgctcatcgatccgcagggtaagttgttccagggttatcaatcattcgggtatcatgtttcttattcctggcagtgcaagccaacaaatggatcaagaacatggaaaagaataacaacctaaaagtgatcaagcagagtgatgctaattatatgcaagtactggagctagccatcacctttggccagcctgtgctcatcgagaatgtgggtaagtactagagagaacctgacccattgccaacacacacaatgctttaccattctttcccgcggggtataggtgaaaagctcgactcgaacttgacgcccattctggagaagaacgtcatcaagcacaagggcggtctgtttatcaagagcggcgaccaaatgatagaatacaatcccaactttcgtctatacataacgacctgtctccgcaatccgcgttatccgccggaagtgatggttatggtaagttgtccccaaaagaaaaagaagatgtgaagagcgggataatgggagcttcagctccatctccagctccacctacatctccagtctgcagtctgtgctgtggcaatgatgacgttagttgtgtaataaaacgaccaacttaaattgatatttggaggatgcgatgcagcggcagcaggcgctgggaatatgcaaattttcgttggcattgacgatgatagggatgaggatgaggatgtggatgtggatgtgcgagagcggaatggtgatgtacgtgcgaggtggctgcataactagcagtcgaagccccggcattgaggacatctatcccaatcccccgtcctgcccattgtgctcatcccgctcctccgtcgacgtgtttataaaatttttccagcttttcgctcctgctgccgtttgccatcgctttttatgctgcaactgttgtcagcagttttccttttaaccatctctattttagccaaccatcctcttctcaaacgcccacacaatttttgcttgcttttttttgtggcacattgtgtgtttattttgagttttccttccattttacgtgccactctcggtgtggcaaggctccaccatccagcaacaactaaccaccaccaccattgatcctgtcctgccttctccattttgtctcctctgtttaggtaacagtattaaatttcatgataacggaacagggattacgcgaacaattgctggcgattgtggtggctcacgagcgtcccgatttgcaagagaagaaggaacaattgattattgagtccgcaaggaatcgtgatgcattgtacaccatcgaatcgaagatattagaggtaaggctctttggctgattctgcttgtcctgctgattctgctccagctgctccttctgctcatcctgctccttttgccactgctgttggcatactaaatgtttttattccctcgcatgctctttgagcagctactgcccctgctcgggaagtttccattccaatccgctggccatgctcagcagattcaattagagccggactagcaatttatgcttttgtgcctggccaatgacaattcaattaaccggaagcaggatgtttaaatcgcaaatatagcggcgcattctactatatgcaaagatcataacttgcaatagttatataaaaattattcaaacgttatgctaaagagaatcaaatgccgcttattttccgatcatttaatgtatctatatataacaccgttcccaggttctttccacctcagagggcaatgtgctagaagacgagaacgccatcaatatcctttcgtccagtaagattctgtcagaggacattcaggaaaagcaggtgatcgccgtggccactgaaattgagatcgatgccgcacggcagcaatatattcctgtgtccaagcactcggccatcctgttcttctgcatcagcgagttggccaatgtggatcccatgtaccagtactccttatcttggttcctcaatctcttcgtcaacacgatcctgaaggctccgaaatccgatcaattgagcgaacgtttgaaaaacctcaatgactacttcacaaagtccatatacacgaatgtgtgtcgctctctttttgagaaggataaattggtgatctccctggtcatgtgcctgggcatcctggtctcgcagggacgagtggagaaggcagcactgctcttcttcctcacaggaggcattggttacaagactattcccccgaatcctttgggagcctggctgcccgataaatcctgggcttctgtctgcaaggctgcggatctggaagggtaacgactttatcttaataataatataaaaattccacgttattaatatcgtttaacgttaaagaaagtttttctgcgtgcaggctaataaatcttctttaatttttgaaacccaaccccttttcccacgatagcctcaagaacctgccgcagatgatggaaacctactcggatgagtggcacaacttctacgacgcaagcaatcccgaccagctgcagctgccggcaccgcacaacacggtgaacgacatgtacttcctgatcgtcatcaagtctctccgtccggacaagttggtgccagccgtgcgggtaagttgagccgcatccgtagccgaaaacccaaggccccagggtcacggcgtgcacatttaatatcccccgattttgtcaggctttcattacgcgaaacctggaccgctcgtttgtggagccgccacccttcgatttggctgcctcgttcgcggacagctcgccgaaaattccgctggtgttcctgctctcggccggatcggatcccatggccagtctcttcatgttcgccaaacaacgcaacatgtacgacaagtaagttaattaacgagagtggctcatatttccgtgtccgtgtccatgggtgggtgatgatgccgatggtgaagctgccggtgctggctgtggaggtggtggtggcttgttttcgattaagcgcgacatgtgcgccttgtcgatatgtggcctccgcctccgcagcatacctatctgtacttcatccagctctttaaagaaatttatgctaagcacatctcgtcccaaacagattgaaaaccatctcactgggtcagggacagggtccgcgagcggagaagatgattatggaggccgcccgacatggccagtgggtggtgctgcagaactgtcacgtcgccatcagctggatgggcgacctggagcggatttgcaacgacaccaccttgacggatggagccaaccatgattaccggctgtggtgcacctcctatcccagcgccgtcttccccgtctctgtgctgcagaactccgtcaagatgacgaacgaaccgcccaaggggctcagggctaacatgcatcgctccttcacctcggatccgctgatgcgggacaagttcttcaccaacgctttcctcttctcggacagcgccaacaagtgctggttgaggggcgtctttgctctggtcttcttccacgccgtcgtccaggaaagacgagagtttgggcccttgggctggaacattccctacgagtttaacgagtccgatttgaagtgagtaataacatatagttgtgttgtaaatattgaaaattataacgtaacttcatttcgtaatttacattcttgcagaatctccctgttgcagttgaagatgttcatcaaccaaagtcagagtattcccttccgcggccatgtatatttgactggagagtgcaactacggaggtcgagtcactgacgacaaggatcgtcgcttgatactttccctgctcaacatgatatataatcctaataccatcgaagaggataagtccgttaaacaaactcaacatttgccgagctatgctaacctatttgtttatccagctatgccctatctcaatctggaacctatcgggtccccttaagtcccactcgcttgaattccatagagtatgtctccagtttcccgttgagtccccatcccgaggtctacggactgcatgaaaatgcggatatcaaccgcaatgttaaggaaaccaatgccgtaggtctacttcaaaaagaatataacaataaataccaatcaactattttgacagctcatcagtggcgttttgctgacccagaccgatttgatggcctccgtgaaggccagttcctctggcggcgccaaggaggacccggccatagccatctgcaagcaggtcctcaagcaactgcctgaggaattcaacattgacgaggtgtccaaaacgtatcccgtgatctacaccaattcgatgaacaccgtgctgcgacaggagttgattcgcttcaatcgcctgctctcatatatccggaagagtctggtcaacgtgggcaaggccgtggtgggtcagattgccatgattcccgaactggagcgaacacacgcctcgatggtcattggcaagctgccggcggactggctgaagaaaagctatccgtcgcttaagccattgggcagctacgtgagcgaccttctggcccggtgagtactcctgttctctagccttttgatgcagtcatgttcagtgcactgaaaaaaagtattcgctttttcgttaagcattttcgttctttatgtaaagatttcctgggtagcctatttctatttcttatagcacttcttatgtttttccttacgtagtatattttattgaaatagtttagattaactggtttttttccttgggatagcaatagtttttttttagtagtttttctagacattcggacagctctcaatatggcattgtattgagctgagttgccagtaatacgccgcgtgtgccccgttcgaagttcttttcgtttcattcgttctttgcctcaattgtgcaaatataataaatgtatacggcacacacatccgatgctcttcctcctgtggttgccactgccactgccattcatggcaaaaatcttatttgcttttgacatcaaaggacgatgctgtttgtgtgttcctgctcctgctcctgccaaatgctttgtgtgcactcccattcccatggccgtttttgccattcgcccatttccattgttgtcgcatgtttaatatttattaataaattgaaaaataagataactcgtctccattctcaggctggccttcttccaggagtggatagacaacggcgaaccgatggtttattggatatctggcttctacttcacccaatccttcatcacgggcgtcctgcagaactattcgcgcaagaatcgcttccaaatcgatatgatattgatcgagttcgcggtgaccaagttcgaggtacaagtccctggaactcccgacataggagcctacatccgggtgagtctataagcctctataaacttattatgcagacacaaaacccgaatagaatacatatcgaacgagtttataatctaaaacattcccacacacgcaacaggaacaaaaagaggtcaatgatgagaccaagtttattcaagtaagaatttttttaatatattcatttcccgcaatgcatgcaaattggacagtagctaaaaatagtttagcatgctcgagtataacccacatttatttaatagcattaaaattatttcataattctattattagtcattattgattccactgacaagtttattatttgaatgtagggcatttttatcgagggcgcacgctggaatcgcaaaactaaggaggtggacgagtccttctcgaaggtactgttcgatacactgcctgttatttacctgcgacccgtgctgaaggccctggaggatctaccccgctccacagccggcggtgagccggagaccatctacgactgtcccgtttataagaccagcgaacgaaggggcgtcctgtccaccactggccattcgaccaatttcgtgatgtacctgcagctgaggtgttcccggaaacccatgcattggattaatcggggcacggcttgtctgtgccaactggacgactgattgggattgcatatggccatggagcaggtggcgatcccggatctgtgcctgtttatgtctttttccatggcacaaagggccgcctgtcgtcccatctatatgcagatatgtattttgattttgttccgtttgattccgctgtccaggaagcccgcaagcgcaccgtcctgtttgtttttttgggacccctcctccttccgtatttccgtattcacctggggcaatgtggcaagttggaggggcagtgtcattttgatgatgatgatgctgattgccagatataaattaaatatgcacagtagtagtatacagcctggctggatatattttttatgtgcgccatttacaaatgaataaacgaaagcctaaagccccacgaagcgctgtgtgaatatatttgaaattaagaccgtttttttccccgatttgagatggccaggaaataaagttaatgaaagaaagatatcggtgtttcgtgcgcagtttaaattcgaattacgaagaatttacacacaacacaaggctcaacaggatgtaatacacgaatcatttaacgttaaccaattgaacacgtttcagcattataaaaagcacattccattctattcttataacccatctacatatcaaacgcttttcgacagacagccccgcactcgacactcccgccaagccaatgccattggcatcgtcaagtggtgctccatcatacattcccatcgccagaatgaattcctattcctccgaactatcgaacacgctgtgagtgggagattgccaagccatttcagcttatccgcaagatttatggcttgcctgccgctcaattggagcatctacgctatttcggcttaaaaatataaattaaaaattggaaaagtggcgatctcttaaatcattcatctatttatagccgcctaatggagcgtggcgagcaaaaaccaaaaatagcaacactcgatggaccatcaagcgcgtatcaatcgagatggcgtataaa

SEQ ID NO: 25331 - DNA, 13169 bp, DROSOPHILA
atgcagaagaaggtagcgccagagcgccgtccatactgtgatcctcggctgcaggatgacaagctgaggaggaaacgaactctccatctgcccagagtgtcgcaggctcagaagaagggcgaaaagcgccagctgaacgactgccccttctacaacctgacttatggctttgaccaactgccactggatcctgtcaaggagttcctgcaggagaagatatgtaaggctcctctatgccactttaacttcccacaactaaataccaatttatacttagctcacatgcagacagacaaaatagtgggacattgcaatcgggagtttgatttccaccgatacgatttggataacgtgaaggatgagtatgatgagtgcgatgatgacagcttgcaggagctgcaactggaggatattatcatgcccgagcagttcgagatgctgcgcgatgccaaggatcatttatacaactttgattccactgtgcgtcccagtgagcaggagatctatgaaatgaccagccacctcctggaaatctactgcaatcgcagggtgcgcatcttctatccgggctgcggaaccagttcctccttgtggacaaaccagctgaggcgccagcacggatccccttcggagctgattggagcctatcgaactccctctgcccgccacatgcgggtcaacaacatgagaggacctcccaagaaggaaaagttcacggccggcgatcattatgcctttcgaacgccgcaggaatgtcgcaacgaactgatgagagttgggaaaataattgatgagctaatcgagccagtgctgaaagcagcagagcacaaaattggtcatggactcacaaaatatcccgatccgcccagttgtaaggacaacactaatcgaatccttaggtcggcagggaaagaaaaagaattgctatgtcggcaagtgtcgcatacatcgtaaggactttgccacaaatgaggagtttctgcgctgtctcaaaaggatggaagcaacccactttccgtacatgcaacccttgcaaccggtggatcctgatgaccaaaagatcaaaatgttggctaaataccgagtagagctggcaagagcggaaaagctttttaccctgaagatacagaagcgataccagtgtctgctgaaaagtatgtccatagtgcaactggcgacgtatccttcacacctcatccgaaaggccttcagacgcatcaatccaaggagcgcccttctgcaggatgcctaccaatttatagtaaaagaaaagagagattggcccaaactgccgccagaagttatattaatggattacctgttcgtgggggaccgcggtgtgcgtcaggacctcgccatccttattatcgtgtgccttatcgatctacaggaggacttccggcactatgtcaagcgctctttcctgaactacctcttatcgtctaatatggagaggaggcgtctgcagttggaaagggaacccccagagtttcccattctgaccatatcaccgccagtttcctggcgttccaacctcctgaggggcaaggctcgtattggtgaagttctcatgaccacacatccgacggttcaggcactgaatagattgtggcacgatctatatgaggatctggttgttgtagatctgggtcagctacttctggctcagcggccactggatgcagatactgtccaggttttcattgagaagagttgtgccgacgttcgggatttgctgctcaacgattggctgccacgatgtgctgaccttatgaacgagatgcgtggcacttggaaggatctggtgcccatgtcggggaagtatggaggacgtgcggccatgctcttccggtgcatccactcggcgatgtcccgacacttgaacagcctcattagcaaaagcattaactacctgttcaaggttctgtgcgccttcaagggtggcaaccgcatcgaaaagtactccatgttcgacgcgaagctgaagaggataccgctaatgacccttattgcttctgtggtcggtgcccacttcgatcatgagcccatcaacatgggtcctggagtcagacccgcctcgaatatatatgtctatgatgaggacgacgctgatccttttcagcagccgcaagtcaaccagtttgtggaaaatgttcctgatattgatgatgtggctcagtttgaactggatcactcgaataagctctacatatatccttatatgcaggagctgcctcgaatttttacagagcatttcaagagtattttggcagtgggctatgaaattccccgcctcgagtttgtcatgtctggcggtgaacccgaaaccaagggctttctgcatttcattgatgaagaccacgtggactttctggaactctgcgagaaagtcgagcagattgtcaaagtcaactggcagggagtgcacgtttacctgaagcccgtctacaagtattactttggactcttccaaaagttaatattgcccatggtgcagaaggtctggaccgagaataacctgccggaacttggggctgtccaggagctgttgaaaaaattgcaggccgtgagcgatacgacctattatctgcgcgatttcattccgctcaacctgttcatgctggataatcggcacgtgaagctatcgctgcggatgtatgtgcgcgaaatctacgatttcataattgatttttacaaagccctcaattggaacgagaatcgagccatctgtgaggagctggaggagatgtcgatgaaggccggcgagcggccggaggagacgcccgaggtggtggccctgcagaactacatcaacgactgccgggagatgcgcatatttgccatcaaggatgaaatcaagaacgtgttgaagcgcgtcgtcttcctgctgacacacacctacctgtccagcgacgaacttcatctgaactcgcgcacattcatcctgccgggcgaactggaggaggtcctggatctgagcgccgcccgcctggcggtggtgcgtgataatctggagctggccttgcgggagcggcgcatggagttcgagaagctgctggcccaggagaagcgcacgatggacggctttcgtattcgggaaatccgggatgtgctcacgctggaggagctcaaggagcgggtggatacggtcgatttgctcttcaccaccattgagaatctcagtcgtgaggccaaggccatcaacacagaggagactctactccaaatcgatgtttccgcctttccacttcttgccgagatcatcgagaaaatggagcctatcgagaagttgtggaagacctcgtacgagttcgaaaaggattatctcatttggatgttcgagcgcttcgaatgccttaatgcggatggcgtgcgggagcaagtggagaatatgcacaagataatgtacaagctgtcccgtcagttggcctacaatccagtggccaaacgagctgccgagcagatgcgcatgaagatcgagaagttccgcgtgtatctgcccgtcctggactcgatttgccgtcatggattggagaagcggcattgggatcagatctcaaagatactcggtcgcaaagtcaatccgaaattgttccccaccctgaaggacatgattgatgtggatatcatgagcattctgccgcagctggaagagatcgctaatgctgcgggcaaggagtacgacctgaacaatggactgaggatcatgcaggcggactggagggacgtaatgttcgaggtgctgcagtatcgcgactcggacacgcacatcctggccagcctggatgatattcaaacgctgctggatgatcatataatgcgaacccaggccatgaaacgctccccattcatcacagccttgggctccaaggcggacgactgggaagcccgtctgctcctcattcaaaatatcatcgatgcttggacacaggtccagatcacctggatgtacctggagccgatcttcagcagcgaggacatcatgcgacaaatgcccttggaggggcggaactttaaggcggtggataagctgtggcgcaagattatgaagcacacgctcaaggatcgacatgtgatggctgccaccgagtatcctgaaatgcttgaagtcttcacgaaggccatcgaggacttggaaacggtcacaaagggcttgaacacatatctggagcagaagcgccttttcttcgctcgcttcttctttttgtccaacgacgagttattggagattctttccgagaccaaggatcccatgcgtgtgcagccccatttgaggaagtgtttcgaagggattggcagtctgacctttgacgataacatggagatcgtggagatggtcagtgatgaggaggagcgtgtggccctggtgcggaaaattaacccgcagttggccaatggattagtggagatgtggcttaaggaggtggagatggtgatgctggacagcgtgaaggagcagatgcgcgaggcctgggaggactacgccatggtggagcgcatctcctgggtggtcagttggcccggtcaggtggtgcagggcatctcctgcatggcctggacctacgaggtggaggaggccatcgagacgaaggagctgccggcttatttggagaagtccaatctgcagattgccgacctggtgcaattggtgcgcacggatctgcaagccggagtccggattgctgtggaggcgctgattgtcctggatgttcatgatcgcgatgttgtgaaatacctgacggattgccggattacgaacatccaggactttgattggatctcccagctacgatactactggaaggttaacgagaaaaacgaggattgggtgtgcgtcagcatggtggtcacagatgtcgaatatggcatggaatacttgggcaacctgccccgcttggtggtaactcccctaacggatcgctgctaccgcacattgatgggcgccctgaagctgtgtttgggtggagctcctgaaggacctgccggaactggcaagacagagacctgcaaggatctggccaaggcggtggccaagaagtgcgtcgtcttcaactgctccgatggactggactacaaggcgctgggcaagttcttcaagggcttggcacaatcgggcgcttgggcctgcttcgacgagttcaaccgcatcgagctggaggtgctctccgtggtggcgcaacagatcctgaccatacagcgggccattggacgcaaggttgtgaaattctttttcgaggatacgatgctcaaactggatccgacttgttccatattcataaccatgaatcccggctacgccggacgaacagagctgccggacaatctgaaggtcctgttccgcacagtggccatgatggtgccggactacgccatgattggcgagatcaccctgtactccaacggattcgatatggccaggaatctctcacagaagattgtccaggcctacaagctgtgctccgagcagctgtcctcgcagtcccactacgattacggaatgcgcgccgtaaagtccgttctgttggcctccgcctcgctgcgacggctttatgttgacctgccggagccggagattgtcctgcgcgccattgtggatgtcaatttgccaaaattcctggagcaggacatctctctcttcatcggcatctatatggatctattccccggcgttgagctgccaatgccgcaacgtggcgacatactcaagtggctgcacatcaacctggcggatcggaatctgcaggcgacgccatggtatttggagaaaattctgcagatatacgagatgctgctggtgcgtcacggcctgatgatagtgggtggctcgatgggcggaaagaccactgcctaccaggtcttagcgcagactttgcgaaacgtttccaccgacgaggaggcgacattaaaggagttcccggtcacattccgcatcatcaatccaaaggccataactatgggccaactttacgggcgcttcgatccggtttcccatgagtggtacgacggagtgctggccaaaaccttcagggagcaggtgcaaggacccaaaggggagagggcatgggtgatgttcgatggaccagtagatgcggtgtggatcgagaatcttaacaccgtgctggacgacaacaagaaactctgcctgatgtccggcgagattatgcagatgaccaagctgatgaacatgatgttcgagccggcggacttggagcaggcatcgccagccacagtgtcgcgttgcggaatgatctacatggagccatcgcaactgggatggcgggcgctccacaagagcttcatcaatgttttggtgaataaggtgggtcttggtgatatctacatgacgctgttcgaggacatgacggagtggttggtgccggcggccttggaattcctgccccagtgcaagcaaatgctggaactttcacctatctatcagtaccagaccttctcgcggttcttcttgcacttcctagagaagcacaagcagttcaatcaagcctggttccaacaaatgttcctcttctgtttcgcctgggcctactgttcggctctcactggccagggtcagaagacctttgatgcactgctgcgaaaggttatctacggttcgaatgagaatttccccaagcccaagtacttctctctgaaccgcggtcaaatgttcccagagaaactgctcttcctggactaccgattcgatgaggctgaaaactggtggacgtggcagaagagcgacgacagcgctagcaccacgtccaatttccccgagaatgcccagatcagtgagcttattgtgcccaccaaagaaacgggatacatatcctattggcaagaattttgcatttccaagtcatacgccatgttggtcgttggaccaacaggaactggaaagagtgccatcattaccagcaatctgctggccatgcccaaattcgccaacctggtcaacgtcataaacttctcagcccggacctcggcgcaaatggtacaggataccattatgagcaaattggacaggcggcgcaaaggagtttttggaccctcactcggaaagaagtgcactgttttctgcgacgatgtggccatgccatcgaaggatacttatggctcccaggctccactggagctcctccgcacttggctggatcacggttattggtcggatctcgtggacaccaccaaaatcgagctggtggacatgactctgatgtgcgccatgggcactttgggtggcagtaacttcatttttccgcgtctctatcgccacatgttcgtggtggccgtcgattcctttgaggactcaaccatcgttcgaatattcacaacgattggtgattggcatttttccaagggctatccggaaaaggtggctctgctatcccgtggcttatcggaggctatggtcagtgtgtaccgcgatgcgattcgcagcttcctgcccacgccagcaaaatcgcactactccttttccctgcgggacatcacccgcgtcttccagggcatcgtgatggtgccccccaagcggatgcccgatcccgagaagctgggtcgcctgtgggcccatgagacatatcgcgtattttacgaccgcttggtggaccaacaggatcgagatcgtctgctcgtaatggccgtggatgcctgcaaatccaatctgcgttttcccttggagcaggcatttggtgagcgcatcgaaccgggtgaaaagctgaccgacaacgatctacgaaatctcttctacggcaattacatggaaccggatgccgagcctaagttttacgatgagggtgatacctatgagaagctggagaaactgatgaagtactacctaagggagtacaactctttctcgagtacgccaatggacttggtcatgttccgttttgctatcgaacatggtttcccgggtgctgcaaatgccgcgcggcaacatcctgatggtgggcatgggaggatcaggacgtcggagctctgcgcgtctggccgcctacatagcggactgccggcttatgacggtgcaggtgtccaagagctacaccatcacggattggcgcgacgacctcaaaaagatactaatgtcggccagcttcaatcttaaccacaccgtgttcctcttctccgacgcacaggcaacggatgaaggctacgtggaggatatcaatggcatacttaataccggtgatttgcccaatctctatcagctggaggacaaggcaaccattatggagaatatggcaaatgtagccaaacaattgggcaagattttggacactctgccgagcgaggtgtacgcctactacatcgaccgtatccgggaacagctgcacatcgcactggccttctcacccatcggggattcctttaaggagcgaatccgtgtgtatccttcgttgatcaactgctgcaccatcgattggtatatgccctggccggaggaggccttgtcccgcgtgggagtttactttgtcagttcaatgaaccttaaccgaccgcatggagaggagacacaggagccggtccagagcaaggatgccgctgatccagacgaggaggaagtgcgtcgcgaaacggttggtgtcgagcgggagcagacccaattggaggcagacctggtcgactgcgttatgtacttccatcagtctgtggtggatgctagtgaaaagtgctacttggagctaaatcgccgaaactatgtgacaccatctgcttatttggagttgcttaaggcatttcgcactttctacacccgaaagctcgacgagattactcggttaagggatcgctatacaacaggtttggagaagctcgacttcgccgctggtcaagtgggtgaaatgcagacgaacctctatgatctgcagcccaagctgaaagtcctgtccgaggaaacggatcgcataatggtgaacatcgaacgtgagacggccgaggcggagaaaaagaaggaagtggtgggtgcggacgaggcggcggccaatgaagccgctgctgctgctcaggccattaaggatgattgtgaaaccgatctggctgaggccattcccgccatggaggccgccttggaggctctaaacaccctgaagccagcagatattttcatagtaaagtccatgaagaacccaccatatggcgtcaagttgaccatggaggctgtgtgtgtgatcaggggcatcaagccggatcgaaagccggatccaagtggtcacatggtggaggactactggggtccctctatgcgcatgctcagcgacatgaagttcttggattccttgaaaaccttcgacaaggataacattccaccgcccattatcaagaggattcgggagaagtacatagcagatcgtgactttgtgccggaaaagatcaaagctgcctcgatggcctgcgagggaatttgtcgctgggtgcgcgccatggatgtatacgacaaggtggccaggatcgtgatgcctaaaaaggcggctttggccgaggctgaaggggagctatcccaacagatggagaagctcaatgccaagcgtgcggagctccaggttattctcgacaaactgcaaaagctcaacgacttctttgcggaaaagtcgcgagaaaagaagagattagaggatgagatcgacaactgcgagaaaaagttgaacagagctgaaaagctgctaggcggacttggaggtgagaagacccgctggtcagaggcggccaagaatcttcacgaatccattagcaacattgtgggcgatgtcctgctggccggcggttgcactgcttacttgggctatttcacgacggagtaccgtgttaatatcctagacgactggaatgccctgtgcaagcgcaagcacattccgagtagtgaaaccttctcactggccaccactttgggtcatccaatgaccattcgtgcttggtctctggctggtttgcccgcggataacttttcagtggagaatggcatcatagtgaccaattccagtcgttactcgctgctcatcgatccgcaggtgcaagccaacaaatggatcaagaacatggaaaagaataacaacctaaaagtgatcaagcagagtgatgctaattatatgcaagtactggagctagccatcacctttggccagcctgtgctcatcgagaatgtgggtgaaaagctcgactcgaacttgacgcccattctggagaagaacgtcatcaagcacaagggcggtctgtttatcaagagcggcgaccaaatgatagaatacaatcccaactttcgtctatacataacgacctgtctccgcaatccgcgttatccgccggaagtgatggttatggtaacagtattaaatttcatgataacggaacagggattacgcgaacaattgctggcgattgtggtggctcacgagcgtcccgatttgcaagagaagaaggaacaattgattattgagtccgcaaggaatcgtgatgcattgtacaccatcgaatcgaagatattagaggttctttccacctcagagggcaatgtgctagaagacgagaacgccatcaatatcctttcgtccagtaagattctgtcagaggacattcaggaaaagcaggtgatcgccgtggccactgaaattgagatcgatgccgcacggcagcaatatattcctgtgtccaagcactcggccatcctgttcttctgcatcagcgagttggccaatgtggatcccatgtaccagtactccttatcttggttcctcaatctcttcgtcaacacgatcctgaaggctccgaaatccgatcaattgagcgaacgtttgaaaaacctcaatgactacttcacaaagtccatatacacgaatgtgtgtcgctctctttttgagaaggataaattggtgatctccctggtcatgtgcctgggcatcctggtctcgcagggacgagtggagaaggcagcactgctcttcttcctcacaggaggcattggttacaagactattcccccgaatcctttgggagcctggctgcccgataaatcctgggcttctgtctgcaaggctgcggatctggaaggcctcaagaacctgccgcagatgatggaaacctactcggatgagtggcacaacttctacgacgcaagcaatcccgaccagctgcagctgccggcaccgcacaacacggtgaacgacatgtacttcctgatcgtcatcaagtctctccgtccggacaagttggtgccagccgtgcgggctttcattacgcgaaacctggaccgctcgtttgtggagccgccacccttcgatttggctgcctcgttcgcggacagctcgccgaaaattccgctggtgttcctgctctcggccggatcggatcccatggccagtctcttcatgttcgccaaacaacgcaacatgtacgacaaattgaaaaccatctcactgggtcagggacagggtccgcgagcggagaagatgattatggaggccgcccgacatggccagtgggtggtgctgcagaactgtcacgtcgccatcagctggatgggcgacctggagcggatttgcaacgacaccaccttgacggatggagccaaccatgattaccggctgtggtgcacctcctatcccagcgccgtcttccccgtctctgtgctgcagaactccgtcaagatgacgaacgaaccgcccaaggggctcagggctaacatgcatcgctccttcacctcggatccgctgatgcgggacaagttcttcaccaacgctttcctcttctcggacagcgccaacaagtgctggttgaggggcgtctttgctctggtcttcttccacgccgtcgtccaggaaagacgagagtttgggcccttgggctggaacattccctacgagtttaacgagtccgatttgaaaatctccctgttgcagttgaagatgttcatcaaccaaagtcagagtattcccttccgcggccatgtatatttgactggagagtgcaactacggaggtcgagtcactgacgacaaggatcgtcgcttgatactttccctgctcaacatgatatataatcctaataccatcgaagaggataagtcctgtttatccagctatgccctatctcaatctggaacctatcgggtccccttaagtcccactcgcttgaattccatagagtatgtctccagtttcccgttgagtccccatcccgaggtctacggactgcatgaaaatgcggatatcaaccgcaatgttaaggaaaccaatgccctcatcagtggcgttttgctgacccagaccgatttgatggcctccgtgaaggccagttcctctggcggcgccaaggaggacccggccatagccatctgcaagcaggtcctcaagcaactgcctgaggaattcaacattgacgaggtgtccaaaacgtatcccgtgatctacaccaattcgatgaacaccgtgctgcgacaggagttgattcgcttcaatcgcctgctctcatatatccggaagagtctggtcaacgtgggcaaggccgtggtgggtcagattgccatgattcccgaactggagcgaacacacgcctcgatggtcattggcaagctgccggcggactggctgaagaaaagctatccgtcgcttaagccattgggcagctacgtgagcgaccttctggcccggctggccttcttccaggagtggatagacaacggcgaaccgatggtttattggatatctggcttctacttcacccaatccttcatcacgggcgtcctgcagaactattcgcgcaagaatcgcttccaaatcgatatgatattgatcgagttcgcggtgaccaagttcgaggtacaagtccctggaactcccgacataggagcctacatccggggcatttttatcgagggcgcacgctggaatcgcaaaactaaggaggtggacgagtccttctcgaaggtactgttcgatacactgcctgttatttacctgcgacccgtgctgaaggccctggaggatctaccccgctccacagccggcggtgagccggagaccatctacgactgtcccgtttataagaccagcgaacgaaggggcgtcctgtccaccactggccattcgaccaatttcgtgatgtacctgcagctgaggtgttcccggaaacccatgcattggattaatcggggcacggcttgtctgtgccaactggacgactga

SEQ ID NO: 25332 - protein, 317 aa, DROSOPHILA
MQKKVAPERRPYCDPRLQDDKLRRKRTLHLPRVSQAQKKGEKRQLNDCPFYNLTYGFDQLPLDPVKEFLQEKICKAPLCHFNFPQLNTNLYLAHMQTDKIVGHCNREFDFHRYDLDNVKDEYDECDDDSLQELQLEDIIMPEQFEMLRDAKDHLYNFDSTVRPSEQEIYEMTSHLLEIYCNRRVRIFYPGCGTSSSLWTNQLRRQHGSPSELIGAYRTPSARHMRVNNMRGPPKKEKFTAGDHYAFRTPQECRNELMRVGKIIDELIEPVLKAAEHKIGHGLTKYPDPPSCKDNTNRILRSAGKEKELLCRQVSHTS

SEQ ID NO: 25333 - DNA, 3891 bp, DROSOPHILA
aaagatatgatcttacttgaccctttcgtgtgatattccgtaggagcggggcaggttaaaggccggcctctccggtagcctcaccttgggcagcttgacttgctctgcatcaagcacgtgggatgccagaatcgcatgccggacactcttgtctacggaatttggcaactgctgacttgcaatggcatcctcgatgtgcttgggaaatgtttggatcacaatggagttggtcagcacctgggcctgcggcaatccaccaattagcacgctgttgtcggagtaagtgttgcaaactgtggggtgccagtcagggtgcctgctgtcctcgggaacgggtttttcgcgtgcgccaacaatgtccactctgtaggtaaagttagatatgttaccttttaccatcagtacatatttcccattaatactcacagttttttttcaactttggcgttcaagagatcctcgggattcttcaccagaacacctagcttcaggagctccgccgcggcgccagtttccttggggactcgcctaccctggaccagccagtgcttcttgaaatgccagccgatgtgctgggcacagagagtgttcgtcagcctcatttaagttaggatttgcttatgttttcgttcaatgaaatgaagcccggcggactggttatgaaactcagtgctgccagatggtgagagaaattccctgccccatcggcaataaatattagtgatgtgatcacttcatccacggttcaagctgtaaatcgttacatcgtgatttttaattttatatgtattcaatttcttgtataaggccgtataatttaacaattttagtgaatgaaattgcaatatcttataattgttgtttttttggcacttgtaatggttagagaaatattataaaaatatttaataacaagaaaatgtaacatatcagaaactggcgatagcgatgtatcggttttcgatgccaccactatttccgcgtctggtcacacttttcggtaattgtaataaataaaggaaaggcggagatttttgttaaaattttaacaaaattggatgacattttagaaggtaagtgtggaaattagtgtttatacaacagctcattgcacggataatataagtaacccgtatactcgtgttttagccgcttgctcacctcccgcaatactcacgataccgcaccgcccgacaaaaatgccgcgatatagggagtgggacttggcctgcaaggtgtacgtgggaaacctgggctcctcggcgtccaagcacgagatagaaggcgcatttgccaaatatggacccctgcgaaacgtgtgggtggcccgcaatccaccaggtttcgcctttgtcgaatttgaggatcgccgtgacgcggaagacgcaacgcgtgccctggacggaacacgctgctgcggcactaggattcgcgtagagatgtcttcgggtcgctcgcgcgatcgccggcgcggagaaggcggcagtagtggtcgctctggttccggacgctacaggtaattccacgacaaaaaaactgtacttctcatgttacttggctcaatgtgtctcccaaatggaacaatggatcacttgactccaaaaattgggtactttcttcaggtttctaagcatatgatggcggtcttgcctgtaaccgtcaaaattaatcaatccttatcaaaacgtataaaatttgttatcgaaatttcattggaatcgtcgcaaaaaacattaattgcgaatagcaaacatgtacattttcccgcctttttctgcacgtgatagaacagccttcgaaatgtcagttttatgagtacttcttcgcaggctgttttattcatgtccaactgacatcacatcgctattcataacatttctaattaaaaattgacttggtactttatttagaccaaacttacaaactgtatacatatattatctacgatccaatcatttagtggttgttaaattcgagttatcgacactttttcaggataactccttcggctagaactacttccactgctacttcttccttctacaacatcaacaatctacaacagcaaccatcttcacagccacagccagcaaccttcaacttgcaactctaaattaaccatgttcagcgtcacagcctcacagaagttttgattagcaacccaaatgatttcatcctagaagaagcaatgcagtcgcccaaagagttcttttttaaagttatcctgcgtatccttcaaataattgcttacaattatttctttaatttagttgcctatgatatgagggttcgtccgctttctcaagtacttgactctgatgtcgagaaaactggccttgaacgcgtttaacgctgatgatcacagctactatagatttgttcgaccattttcttattgcatatgtatccgacaaagtagaaagctttaaactctaattataggatatcagttggtaatagatagtaaatgtaattgcagcagctaaatgtaatagcagcattagcaataatactcttatcttaattggttcacagcttaattcatagaaacaaaacagtttgcacagctttcatttttgttccccctggtaattagtttaagtaactatttagcagtatttaacactcctattttgcagctctttgtaaggcgcgtatgtacatacacttcttaccattctaagctgatttaaataattttattaagcttttaagtaatcatttcttctttaccaatgcgtttatttcaggtcacgttcgccacgtcgctcccgatcgccccgcagccgcagcttctcgcgcgatcgtcgaagtcgctcggattctcgggatcgtcattaatgtttccaaaaggatatcgtttaagcagtgtcgcatcaaagaacaagccggccaaggccgtattttctgtaggaattcctatgtcgattgcgatccaagtaaatttacttcagatgacaatataaatctttcgatgcattcttgaaattccttttttttttttactaaaaaataaagacgcacaatcagcgagttttgattggtttcatatatcatcaaaaacagtttgtttccagcaaaaggggacgtgcttagtgcactgtttattatgtgagaattgacgtgctgctgtacaacttgcttagaagtatgttcgaataataatttaaacaggcgcacgagtgtaaaatattatgtatactaacaaaggtacactttaaacttaggagaagacgcaacacgaattcgttgcacatttcgcactggaataaaccttacgtctagtcattgtatgtatcctcgctgcagggctctgagccccatcccaaatggcagatcggattggttatggctgcccctagcgcatgcggtatgtgttcgactcctgaatttgagacaattcgcccttgaaattaatgtcgatgacgaagtccaggtcacggttgttccgctcgttgggcttcatctggaacgtgccagtgatctcctcgttcttctttgccgtcatgtggtcatcgaggtagaacacggtttgcttccaatgcgtgtatgtggagtctggtgacgtactgaacccaagacgcttgtggcacttggtgaactctatattaaagtaggtgactaatgcctgcacgaagtcgttgcgcttgatgcataggctgaacttggacgagaagttaagatcggccttttgcacggtatacagatccacctccttgaccatgcaagatgtggataccacttgcttgggatcgaccacgtcgaccagtggctcggtcacggccaccttacgaatgcagctcatgtcgaagccgtagacatcgtcccaccagttgatcttctcgtccttgtactgtctgtcctcgatggccgtgatatacagcgtgcccc

SEQ ID NO: 25334 - DNA, 531 bp, DROSOPHILA
gtaattgtaataaataaaggaaaggcggagatttttgttaaaattttaacaaaattggatgacattttagaagatgccgcgatatagggagtgggacttggcctgcaaggtgtacgtgggaaacctgggctcctcggcgtccaagcacgagatagaaggcgcatttgccaaatatggacccctgcgaaacgtgtgggtggcccgcaatccaccaggtttcgcctttgtcgaatttgaggatcgccgtgacgcggaagacgcaacgcgtgccctggacggaacacgctgctgcggcactaggattcgcgtagagatgtcttcgggtcgctcgcgcgatcgccggcgcggagaaggcggcagtagtggtcgctctggttccggacgctacaggtcacgttcgccacgtcgctcccgatcgccccgcagccgcagcttctcgcgcgatcgtcgaagtcgctcggattctcgggatcgtcattaatgtttccaaaaggatatcgtttaagcagtgtcgcatcaaagaacaagccg

SEQ ID NO: 25335 - protein, 135 aa, DROSOPHILA
MPRYREWDLACKVYVGNLGSSASKHEIEGAFAKYGPLRNVWVARNPPGFAFVEFEDRRDAEDATRALDGTRCCGTRIRVEMSSGRSRDRRRGEGGSSGRSGSGRYRSRSPRRSRSPRSRSFSRDRRSRSDSRDRH

SEQ ID NO: 25336 - DNA, 4829 bp, DROSOPHILA
tattttatctggcgatcggatcgtgaggtgaaatgaatttaagttgccttttttaggagccacaataaaggggctaaaaaatcgatgagtgctcaattaactgttattcgtagtacgcccacacacacactcacgcgcgcgcacacatacagatgcagatacacttgcaaataaataaaaatacatatgtattaccttttttagttgaacttttggtggctttttggcaattgtctcaacaaaacaacatcgttttcgcaattgggccactcccactacgatttttcgttgccaatattacaatccgggctttatttagttgcccaccactgttaaatacaatttactttttgcagttatgtcaacttctctctttcagcgcggcgtcctttgttgttgtcgttgcaaaattgttcgtgtaaattatgtacaatggtggttgtttcaggttgcaggtggtctaaaacactcgcgttcgttgggtttacgtggtttcgattgcactaggtgccgcacgcataatttgcaaattgcaaatcgtcgttttcgtttgtaatttggctattggctggctttaacacggagaaaactttcgacgtttcttgttggttttcttataatggttggatcggccagtgtgtgcacaccgcgtcaaaagtaaaactcggcgaacagttactcgcatagggtgaccatcacatggatggtcatacaaaataatggttactactgcagggctttgcctgcaaatgcagtgacatggtctgcctaagaaagtaacagttcaatcactgctttgctgcctgggctgccaggtaacaaaaagttattaaaaacacaactacttctcctcttaagttatttgcagctaaatggcagaaagtcttttattttctacatcaattgtagacattcattttactttaaaaactatgtccttaaaaacatttctggaatatcgatagtttcagttgacttggcaaccctattgctgacgccgcaatcaaaggccaacaaatttgtttacatccaaagaaatgctaataaatcatttaatagtcgtattattaattagtttggtaggaacaggaggtgcagaagatgacggactttgcagtgccgatcaaaaatcctgtgcacaaagtgaacccgaccaaataaacgaggatgaatgtaagcaacttgttgccggcttcgattaattaattaatcaattaatttagttagcttcaagatacgtcgccagatcgaaaaagccaatgccgactacaagccgtgcagcagtgatccccaggacagcgactgctcctgccacgcaaatgttctgaaacgggatctcgcgccctacaagtcaacaggtgtcacccggcagatgatcgagagttcagcgcgttacggcaccaaatacaagatctacggacatcgcctgtaccgggatgccaactgcatgttcccagcccgctgtgagggcattgaacacttcctgctgccgctggtggctacgctgcccgacatggacttgatcatcaataccagggactatccgcagctgaatgcggcgtggggtaacgcggctggtggtcccgtcttctccttctccaagacaaaggagtaccgcgacatcatgtatccagcgtggacattctgggccggaggaccggccaccaagctccatcctcgtggcattggacgctgggatcagatgcgcgagaagctggagaagcgagcggcagctataccctggtcacagaaacgcagtctgggcttctttcgcggttcacgcacctcggacgaacgtgattctcttattctgctctcgcgccgcaatccggagctagtcgaggctcaatacaccaaaaatcagggctggaagtcgcctaaggatacactggacgcaccggctgctgatgaggtgtccttcgaggaccactgcaagtacaagtacttgttcaatttccgcggtgtggccgccagttttcgtctgaagcacttgttcctctgcaagtcgctggtcttccatgtgggcgacgagtggcaggagttcttctacgaccaactaaagccctgggtgcactatgtgccgctcaagagctaccccagtcagcaggagtacgagcacatcttgtcctttttcaagaaaaacgatgcgctggcccaggagatcgctcagcgtggatacgacttcatctgggagcatttgcgcatgaaggacatcaagtgctattggcgcaagctgctcaagcgatatgtgaagctgctgcaatacgaggttaagccggaggatcaacttatttacatagggcctaaaaaggatgagctgtagcgaaatgaaatgttattgtgtttaagcatttctcattttgtattaagttgcttagagcagcgtgaatctctctgtccgcattccatgcatttttgatgtccaagatttagagaacaactcgaatattttcctatttatatatatagcatttatacaatctttataacaatcgaaagccatttgttttaagactcaaagtttaaaatatatttggaagaaatatgtaaattctctttaaattttaattatgacccagccaaggatatgctttttagttggagccctaatcctctcctgcacttgcgtttcgtgctccaaggacaaatgcgctgtcaacgaacacaacccaaactcaaatagttaactatatagaatataatataatataaccttttcaagatttgtatccttcagccagctacgactttgtgccgcacatcctgcacgccctggcgatccatcgaccctgcgtaatcggtgatccgaaatgcctctgccatgtggcgaccattcaaagggatttggaaccgtatgtggacaaggggattacacctgagatgatggcgcaatccaaacgattgggcactttttaccagataatccgtggacgcatctatcgccagcagaagtgcctgcatcccaagcgatgtgccgatgtggaggatctgctcttggacatggccagtggtgtggcagacctggaattcgttctcaatgtgcgcgactggccgcaggtgcacttcctatccggcctaagtggtccggtgttttcctattccatcacgaatcgccacctggacatcatgtacccagcatggtcgttttggaccaccacgggacccatcctgcagcactatccccacggtgtgggtcgctgggactggatgcgaaaacatttggtggccagggcgtcggagttgccgtggagtgccaagcgcgctattggtttctttaggggctcacgatcctcgccagaacgcgatagtctagtcaggctctcgcaaaggcgtccagacctggttgatgcccagtacacgatactagcgacggatgccgatcccgtcgagaagatgcctttggtcgagcactgccaatttaagtatctgttcaattttcgcggtgtggccgccagtttccggctgcggcacatactgctctgccgctcgctggtacttcatgttggcgaccagtggcaggagttcttctacagccaactgaaaccctgggtgcattacgttcccgtggccagcgacgccgatgtggatgagctggcggagttgattctatatctgcgcgagcacgacgatctggcggaggagattgcggaacggggacagcagttcatttggctccacctccgaatggaggatgtgcagtgctattggagtaagatgctccaggaatacgcaaagttgctcacttataaagtgcaacgggagccgggacttctggaggtatccaacaagaaagcggtgcagctgtaccgcggaaaataaacttagtatttacaatcttagttttgtaccaaaaaataaaaatctgtataattaattttaaattcaaatttaaatcagccagtgctgccacacccaacagccaactccccccactagtgtgaccacacacaatcctgggtcaattgttacgtcactggccaacagctgtttgaaagttttgatttggattcgctagcattacatggattccgcatcatggcagcgcagctgaatccattccgcaatgccttccggctgccgtccaagcagcgcatcaactggtttcccggccacatgaccaagggtatgcggcaaattcagcaaaaactacgaaatgtagactgcatagtcgagattcacgatgcacgcatcccattggcgggcagaaactcccagttctttgacacaatcaccggtgagtacgtttacaaccataagctgccacttaatacgggactcatattccccaggaagtggtgttaaaccgcatattctggtgctgaacaaagtcgatctgctgggcgccaaacagcagaagagcgtgctccagcagctgaggagacagcagcccgaactgcagcacatcctgttcaccaactgcaaggatcagcgcaacaacggcgtgctggacatcctgcccctggcaacgcgcctcgtgagcgagagcagtcgcttcaatcgcacccaagctgccgagcacaatctgatgatcatcggcgtgcccaatgtgggcaagagttccgtgatcaatgtgctgcgaaatgtgcatctcaagaagaagagcgccgcacgcgtgggtgccgaggcgggtataactcgatccgtcggcgaacgcatcaaaatccaagagaatccgcctgtttacatgatcgacacacccggcatcctccagccctccattaaggatgatgaaatgggcatgaaactggccctggtgggctgccttcccgatcatattgtgggcgaggatctgatagccgactatctgctgtactggctgaatagccacc

SEQ ID NO: 25337 - DNA, 2417 bp, DROSOPHILA
caatcaaaggccaacaaatttgtttacatccaaagaaatgctaataaatcatttaatagtcgtattattaattagtttggtaggaacaggaggtgcagaagatgacggactttgcagtgccgatcaaaaatcctgtgcacaaagtgaacccgaccaaataaacgaggatgaatttagcttcaagatacgtcgccagatcgaaaaagccaatgccgactacaagccgtgcagcagtgatccccaggacagcgactgctcctgccacgcaaatgttctgaaacgggatctcgcgccctacaagtcaacaggtgtcacccggcagatgatcgagagttcagcgcgttacggcaccaaatacaagatctacggacatcgcctgtaccgggatgccaactgcatgttcccagcccgctgtgagggcattgaacacttcctgctgccgctggtggctacgctgcccgacatggacttgatcatcaataccagggactatccgcagctgaatgcggcgtggggtaacgcggctggtggtcccgtcttctccttctccaagacaaaggagtaccgcgacatcatgtatccagcgtggacattctgggccggaggaccggccaccaagctccatcctcgtggcattggacgctgggatcagatgcgcgagaagctggagaagcgagcggcagctataccctggtcacagaaacgcagtctgggcttctttcgcggttcacgcacctcggacgaacgtgattctcttattctgctctcgcgccgcaatccggagctagtcgaggctcaatacaccaaaaatcagggctggaagtcgcctaaggatacactggacgcaccggctgctgatgaggtgtccttcgaggaccactgcaagtacaagtacttgttcaatttccgcggtgtggccgccagttttcgtctgaagcacttgttcctctgcaagtcgctggtcttccatgtgggcgacgagtggcaggagttcttctacgaccaactaaagccctgggtgcactatgtgccgctcaagagctaccccagtcagcaggagtacgagcacatcttgtcctttttcaagaaaaacgatgcgctggcccaggagatcgctcagcgtggatacgacttcatctgggagcatttgcgcatgaaggacatcaagtgctattggcgcaagctgctcaagcgatatgtgaagctgctgcaatacgaggttaagccggaggatcaacttatttacatagggcctaaaaaggatgagctttggagccctaatcctctcctgcacttgcgtttcgtgctccaaggacaaatgcgctccagctacgactttgtgccgcacatcctgcacgccctggcgatccatcgaccctgcgtaatcggtgatccgaaatgcctctgccatgtggcgaccattcaaagggatttggaaccgtatgtggacaaggggattacacctgagatgatggcgcaatccaaacgattgggcactttttaccagataatccgtggacgcatctatcgccagcagaagtgcctgcatcccaagcgatgtgccgatgtggaggatctgctcttggacatggccagtggtgtggcagacctggaattcgttctcaatgtgcgcgactggccgcaggtgcacttcctatccggcctaagtggtccggtgttttcctattccatcacgaatcgccacctggacatcatgtacccagcatggtcgttttggaccaccacgggacccatcctgcagcactatccccacggtgtgggtcgctgggactggatgcgaaaacatttggtggccagggcgtcggagttgccgtggagtgccaagcgcgctattggtttctttaggggctcacgatcctcgccagaacgcgatagtctagtcaggctctcgcaaaggcgtccagacctggttgatgcccagtacacgatactagcgacggatgccgatcccgtcgagaagatgcctttggtcgagcactgccaatttaagtatctgttcaattttcgcggtgtggccgccagtttccggctgcggcacatactgctctgccgctcgctggtacttcatgttggcgaccagtggcaggagttcttctacagccaactgaaaccctgggtgcattacgttcccgtggccagcgacgccgatgtggatgagctggcggagttgattctatatctgcgcgagcacgacgatctggcggaggagattgcggaacggggacagcagttcatttggctccacctccgaatggaggatgtgcagtgctattggagtaagatgctccaggaatacgcaaagttgctcacttataaagtgcaacgggagccgggacttctggaggtatccaacaagaaagcggtgcagctgtaccgcggaaaataaacttagtatt

SEQ ID NO: 25338 - protein, 789 aa, DROSOPHILA
MLINHLIVVLLISLVGTGGAEDDGLCSADQKSCAQSEPDQINEDEFSFKIRRQIEKANADYKPCSSDPQDSDCSCHANVLKRDLAPYKSTGVTRQMIESSARYGTKYKIYGHRLYRDANCMFPARCEGIEHFLLPLVATLPDMDLIINTRDYPQLNAAWGNAAGGPVFSFSKTKEYRDIMYPAWTFWAGGPATKLHPRGIGRWDQMREKLEKRAAAIPWSQKRSLGFFRGSRTSDERDSLILLSRRNPELVEAQYTKNQGWKSPKDTLDAPAADEVSFEDHCKYKYLFNFRGVAASFRLKHLFLCKSLVFHVGDEWQEFFYDQLKPWVHYVPLKSYPSQQEYEHILSFFKKNDALAQEIAQRGYDFIWEHLRMKDIKCYWRKLLKRYVKLLQYEVKPEDQLIYIGPKKDELWSPNPLLHLRFVLQGQMRSSYDFVPHILHALAIHRPCVIGDPKCLCHVATIQRDLEPYVDKGITPEMMAQSKRLGTFYQIIRGRIYRQQKCLHPKRCADVEDLLLDMASGVADLEFVLNVRDWPQVHFLSGLSGPVFSYSITNRHLDIMYPAWSFWTTTGPILQHYPHGVGRWDWMRKHLVARASELPWSAKRAIGFFRGSRSSPERDSLVRLSQRRPDLVDAQYTILATDADPVEKMPLVEHCQFKYLFNFRGVAASFRLRHILLCRSLVLHVGDQWQEFFYSQLKPWVHYVPVASDADVDELAELILYLREHDDLAEEIAERGQQFIWLHLRMEDVQCYWSKMLQEYAKLLTYKVQREPGLLEVSNKKAVQLYRGK

SEQ ID NO: 25339 - DNA, 3259 bp, DROSOPHILA
ggatgttggttgtaacctacaatttcagtccgacttctgtgacatcgttactatatcctccgcaaaaagcatgcatattgaagtccctatcctccacattgaacaccgtgcggtagcccaagaggtaattcttgacaggctgcatcataatgtagcccatcaataagggttccttatagatgggaatatacatttccactttgccaggattgcgatcgaatccacacttcagcttgcattgaaacttgcgtctgtaaagaataatatgtacttacgaaagataatctcttgaatcccttccagcaaattcgaatcccacttacccttcagggtagctgaccatagacttcaatacagtggaccatgtgccgcccagcccatcaccatgcactccaagatccgatagcaagtctccatccgacaaccaggcgagggatgcatgaaagtttccactctccttgtacgcctccagtccgccgtagacagtgttccatgttggataaccctcgccgaagctgctcaaatagaaatccttttcggttttcgaggtgcactgcagcttccagcggccaatggtgtagccgtggatgaggcacatcttggccagcagaccaacgtggaaatagctgggcatctcaccctccatcggtggtggcggcagcatctccaccttgttctcctccttatcttcttctgcactccggttgtcctggacattgccaccaccttcatcgtggggttccaggtaatccgatgcagcccgctttcgcttgttccttctgaacaagttccgtatccgttctctcatgggcattgtgccatataaaaagtacaataattaaaagaaaaatttaattaaacacacttgaaattttggagttctttggaaattggataataatatcgaagcagctgtgatcaaaattaacaagattatttacttttaatttgtaatattttacagcctgtatttaagctgcttaattaattactcagattgttatattgccattatgaagaacaaaatatatttgtcatttgaataaagataaacttaaaaataaatttagaaattgaaatcgttaagtgattggcagtcattttagcactggagggcaattcccacgccgaaccgatggtttccgtccttaaagttgttgcaatccagcacggcggatatggaggcggtgatgccgtcgcgcagtttctgttcatagcccaggcccagctccaccaggttgttgaccttggcgcgtacgagggcatcctcctccaagtggtagatcatgcccagattgacgaccacatctccgccctgctgttcaccctcggcagcttcgccgccgccggctcccttggttacctcgataccggcatcgatcttctcgctcgccttgtagaacagcgaggccaaccaggtgtcgccgttcttcctgcaaattgattaaaagacataagataaagtcttcccacatctcgtcacacggggaacttacagctcgccatggagggtggcagtttcatttgtccaaccaagggccaccttccagcccttgagttcggtgttgccaacgtcaaattcggtgcccacgccgccgaggaactccttgtggcccacaaccagcgaacagttgagtatcggctccgagttcagtccaatgtcggccaggaagttaaagttgtcctgggcatagcccatcttgaacttgccatccgcctcactgttgacccgagatgtttatataattaaaggatgctacctaaacgatccccaaaggaatacgcactttgatcccggctgaaacttggcctcgacggccaacatcaggccctgtgccaacttatcccggtgcataatctcaccgaagagccagttctccgtgttccatcgctcggttagggtcaggccttggtcctcgatcttgtacttgctctgaagcgagccggtcaccttgctgttgtcctggctggcgaagccggtggtgaagaactcaatccccgaattggtcagggtcttgcagtcgatctgccagatgcccggatggtagccgcgcttgaagagatcgcgggccagcttgcccagatctgggtatgtcggtgttttggcggccattacgggctgtatgaataggtggtatggtatatatggcccgactaatttcgaaattttttgtctacttttcaacagcctcgattagccgaaaatttatgtctaacgctgcctgatcagtatcgagttttatacacgctggagacctgtgaactaaaacgcacggagtcctgtgcccaaccgaaaaagttaagtttttcaagcacaaagaacttgggatcagtataaggtacttatcttattatacagttttttctttcaagcttaaatccttaaattaagctaaccattcccaagccttccaccaccaacgctgcaatcaagataatttatttcttctcgatttatttctcaggtaaatgcacaacgaaaaggtaaagattgttattaaggatgtgattttggtgttatgtgtgtcctagtttcgccgcaggattttgcaggcaatccgtaaagccttgagaactgaaaaaaatgcaatgccttttgagccataatattccgtcttttccattttgtttttttttttcgtttaataggtaaatgtatttttactgcacttttgtcaacaacaatttcgctaatattcaatgcactaatcaaagctacatccaacgacgacggactgacctgaccgacccatcgattgcaccacccatccatccccctgcatcgtttgtttggcagtgtctctcctgcagattcgcgtggctggggcagggaatgggcggatgtggtgatggccggctgacaactaatccaatccaatcgaatcgctaagatgtgcagattctctttatatttgactgtgtgttgtttgtttttaaagaatatcgtatcttttattttgtttgatcttgttgttgtttctgcacttgtctggctgctgttattgttgttgttgttgttgttgggcgtgtggggatgttagacaacgttcaaggatttcacgactagcggaaaaccacggacttaggcctccagctccagacccacaccgatcttgtggccgccggcattgaagttcttgccatcgaccagcgtggacagggtcagggtgactccgtcgcgcaacttctgctggtagcccagacccacctggctggcgttgttcaccttagcgcgcacgctggcatcatcatccagctg

SEQ ID NO: 25340 - DNA, 1130 bp, DROSOPHILA
caggtctccagcgtgtataaaactcgatactgatcaggcagcgttagacataaattttcggctaatcgaggctgttgaaaagtagacaaaaaatttcgaaattagtcgggccatatataccataccacctattcatacagcccgtaatggccgccaaaacaccgacatacccagatctgggcaagctggcccgcgatctcttcaagcgcggctaccatccgggcatctggcagatcgactgcaagaccctgaccaattcggggattgagttcttcaccaccggcttcgccagccaggacaacagcaaggtgaccggctcgcttcagagcaagtacaagatcgaggaccaaggcctgaccctaaccgagcgatggaacacggagaactggctcttcggtgagattatgcaccgggataagttggcacagggcctgatgttggccgtcgaggccaagtttcagccgggatcaaatgaggcggatggcaagttcaagatgggctatgcccaggacaactttaacttcctggccgacattggactgaactcggagccgatactcaactgttcgctggttgtgggccacaaggagttcctcggcggcgtgggcaccgaatttgacgttggcaacaccgaactcaagggctggaaggtggcccttggttggacaaatgaaactgccaccctccatggcgagctgaagaacggcgacacctggttggcctcgctgttctacaaggcgagcgagaagatcgatgccggtatcgaggtaaccaagggagccggcggcggcgaagctgccgagggtgaacagcagggcggagatgtggtcgtcaatctgggcatgatctaccacttggaggaggatgccctcgtacgcgccaaggtcaacaacctggtggagctgggcctgggctatgaacagaaactgcgcgacggcatcaccgcctccatatccgccgtgctggattgcaacaactttaaggacggaaaccatcggttcggcgtgggaattgccctccagtgctaaaatgactgccaatcacttaacgatttcaatttctaaatttatttttaagtttatctttattcaaatgacaaatatattttgttcttcataatggcaatataa

SEQ ID NO: 25341 - protein, 293 aa, DROSOPHILA
MAAKTPTYPDLGKLARDLFKRGYHPGIWQIDCKTLTNSGIEFFTTGFASQDNSKVTGSLQSKYKIEDQGLTLTERWNTENWLFGEIMHRDKLAQGLMLAVEAKFQPGSNEADGKFKMGYAQDNFNFLADIGLNSEPILNCSLVVGHKEFLGGVGTEFDVGNTELKGWKVALGWTNETATLHGELKNGDTWLASLFYKASEKIDAGIEVTKGAGGGEAAEGEQQGGDVVVNLGMIYHLEEDALVRAKVNNLVELGLGYEQKLRDGITASISAVLDCNNFKDGNHRFGVGIALQC

SEQ ID NO: 25342 - DNA, 3150 bp, DROSOPHILA
ccacttcggtcctcccattattgtagcccaggcacagggcgtgcttatcgaatcccttttcgtcaaagttgtactccgttcgatatcccagcacccaattctctacaggcgccaccaggacatagcccagaaataggggttcgttgtacagaggcaccaccagttccaccttcacgggatcgcgctccaacccgcacttcagcttcgtttgaaagctcactcttcagggtttaatttgcatagtttttaatgctgttaagaaaattctgaaaaaatggaggacactcactcgtcttttgtgccaattgttgacttgagcagtccatacaatcgactgccaaagttcatgccgcgcacagcgatctccgagagaagatcattgttggtgaaccagccgagggacgtgctgtagttgcccacttccttgaacacctccatgccgccaaatacgttcttcatggtgggatagccctcgccgaaggtgttcagatagaagtcattatcggttcgcgtgctgcagtgcatctgccatgcgccgatcttgaagccattgatgaggcaatccttcgccaaggcgcccacatggaagtaggtgggcatttcgccctctgacgttggcgagggtattatctccacttcgacttccttgggtggcttttcgggctcttcctgcttaggtggctcctgcttggaggcatcctgcttagttttcttctgtttgcttggctcctgcttaggtggctccggctgctccttattcgcatcactggccactgtagtgggccgtgcgcgcattttgttccggcgaaacaagttgcgcagccgttgcttcatatttgtcattttgaaaatactttaaaaaaatagcaaaaataaataggtataaatttaaaattttgattaaacgatctgacaccggaaacataaacttctgatttgtttttcagtttctccccatcatgacatagaaatgaatacaaacgtatgtttgctagccatcctacatattgaagtaccatgatgagccgaacttgtgcttcccattgatgggatcacttccttcgaagccaacgtggaacagaacttcgatgtcttcgcgaagttttttctgaaagataagcccgatgcgggaatctccacgcactttggccttcagcatgcttccaggttcccactcgtactgacctccaatggagacactcttggcactcacgtttccatacaggttggccttcaaagccactgcccacttttcaccaatgcgctggaatattgatcctcgcagcgccttgaaattctcactgaaatatataaatgtagttttttgcgggttggaggatgttggttgtaacctacaatttcagtccgacttctgtgacatcgttactatatcctccgcaaaaagcatgcatattgaagtccctatcctccacattgaacaccgtgcggtagcccaagaggtaattcttgacaggctgcatcataatgtagcccatcaataagggttccttatagatgggaatatacatttccactttgccaggattgcgatcgaatccacacttcagcttgcattgaaacttgcgtctgtaaagaataatatgtacttacgaaagataatctcttgaatcccttccagcaaattcgaatcccacttacccttcagggtagctgaccatagacttcaatacagtggaccatgtgccgcccagcccatcaccatgcactccaagatccgatagcaagtctccatccgacaaccaggcgagggatgcatgaaagtttccactctccttgtacgcctccagtccgccgtagacagtgttccatgttggataaccctcgccgaagctgctcaaatagaaatccttttcggttttcgaggtgcactgcagcttccagcggccaatggtgtagccgtggatgaggcacatcttggccagcagaccaacgtggaaatagctgggcatctcaccctccatcggtggtggcggcagcatctccaccttgttctcctccttatcttcttctgcactccggttgtcctggacattgccaccaccttcatcgtggggttccaggtaatccgatgcagcccgctttcgcttgttccttctgaacaagttccgtatccgttctctcatgggcattgtgccatataaaaagtacaataattaaaagaaaaatttaattaaacacacttgaaattttggagttctttggaaattggataataatatcgaagcagctgtgatcaaaattaacaagattatttacttttaatttgtaatattttacagcctgtatttaagctgcttaattaattactcagattgttatattgccattatgaagaacaaaatatatttgtcatttgaataaagataaacttaaaaataaatttagaaattgaaatcgttaagtgattggcagtcattttagcactggagggcaattcccacgccgaaccgatggtttccgtccttaaagttgttgcaatccagcacggcggatatggaggcggtgatgccgtcgcgcagtttctgttcatagcccaggcccagctccaccaggttgttgaccttggcgcgtacgagggcatcctcctccaagtggtagatcatgcccagattgacgaccacatctccgccctgctgttcaccctcggcagcttcgccgccgccggctcccttggttacctcgataccggcatcgatcttctcgctcgccttgtagaacagcgaggccaaccaggtgtcgccgttcttcctgcaaattgattaaaagacataagataaagtcttcccacatctcgtcacacggggaacttacagctcgccatggagggtggcagtttcatttgtccaaccaagggccaccttccagcccttgagttcggtgttgccaacgtcaaattcggtgcccacgccgccgaggaactccttgtggcccacaaccagcgaacagttgagtatcggctccgagttcagtccaatgtcggccaggaagttaaagttgtcctgggcatagcccatcttgaacttgccatccgcctcactgttgacccgagatgtttatataattaaaggatgctacctaaacgatccccaaaggaatacgcactttgatcccggctgaaacttggcctcg

SEQ ID NO: 25343 - DNA, 1023 bp, DROSOPHILA
atgcccatgagagaacggatacggaacttgttcagaaggaacaagcgaaagcgggctgcatcggattacctggaaccccacgatgaaggtggtggcaatgtccaggacaaccggagtgcagaagaagataaggaggagaacaaggtggagatgctgccgccaccaccgatggagggtgagatgcccagctatttccacgttggtctgctggccaagatgtgcctcatccacggctacaccattggccgctggaagctgcagtgcacctcgaaaaccgaaaaggatttctatttgagcagcttcggcgagggttatccaacatggaacactgtctacggcggactggaggcgtacaaggagagtggaaactttcatgcatccctcgcctggttgtcggatggagacttgctatcggatcttggagtgcatggtgatgggctgggcggcacatggtccactgtattgaagtctatggtcagctaccctgaaggacgcaagtttcaatgcaagctgaagtgtggattcgatcgcaatcctggcaaagtggaaatgtatattcccatctataaggaacccttattgatgggctacattatgatgcagcctgtcaagaattacctcttgggctaccgcacggtgttcaatgtggaggatagggacttcaatatgcatgctttttgcggaggatatagtaacgatgtcacagaagtcggactgaaatttgagaatttcaaggcgctgcgaggatcaatattccagcgcattggtgaaaagtgggcagtggctttgaaggccaacctgtatggaaacgtgagtgccaagagtgtctccattggaggtcagtacgagtgggaacctggaagcatgctgaaggccaaagtgcgtggagattcccgcatcgggcttatctttcagaaaaaacttcgcgaagacatcgaagttctgttccacgttggcttcgaaggaagtgatcccatcaatgggaagcacaagttcggctcatcatggtacttcaatatgtag

SEQ ID NO: 25344 - protein, 338 aa, DROSOPHILA
MRERIRNLFRRNKRKRAASDYLEPHDEGGGNVQDNRSAEEDKEENKVEMLPPPPMEGEMPSYFHVGLLAKMCLIHGYTIGRWKLQCTSKTEKDFYLSSFGEGYPTWNTVYGGLEAYKESGNFHASLAWLSDGDLLSDLGVHGDGLGGTWSTVLKSMVSYPEGRKFQCKLKCGFDRNPGKVEMYIPIYKEPLLMGYIMMQPVKNYLLGYRTVFNVEDRDFNMHAFCGGYSNDVTEVGLKFENFKALRGSIFQRIGEKWAVALKANLYGNVSAKSVSIGGQYEWEPGSMLKAKVRGDSRIGLIFQKKLREDIEVLFHVGFEGSDPINGKHKFGSSWYFNM

SEQ ID NO: 25345 - DNA, 3274 bp, DROSOPHILA
gctccactgctgggcgagctgggcgggattagcgctctgctgctgctgttgctgcatctcctgcagctgcggaataaggggcggcggagcactcatggcatctgacatggtactcccacaatctgcctctcttggttctttgctaatttcttttttacctgaacttacctttgggtttttgcgatttcggcccctgatttcatgacaaagggtaccaaaaatgggaaaaatgtgcgcattagtctgtgtgtatgggtgtgtgtgtgaatgttggcatgtgacgccatttttatttcttacctacttcttggtcaccgagaactggcactttttgcttcgatttgctcgtttgaaacgccgttttctccaaaataacttattaaaaaggtggcgcagtgcaaaaatatatctgcatacgcacgaaaacactcggaatacgctattttttgccttattttctcacgatatataaacacgtccgaacagttgaactattttttcgtataaagaaaaggagacagaataatcgatgactagatatgtcgcagtgctagtgtggccgtagcttgctgagccgaaaatccattcctataatttaaaagatgcgcgccataatagcggaggaattgtggaatatggaacatgtgaacgttttctatttatttatttcttcgttttttggacgtggatttaaaaaaataaaaaatctaagtatctatgtacgatttaaggatttacgatgtaattaaaaatggaattgtcgttaatttcaaatcgatttttaatattaagactgttgtagaacaataaaacattaaaatataaggtacaatacgctgcagtattcagattccattaattaaaaataagttttacttagtttacttacggaaaccaccaaaatcatgatcagataagttagaaaaacactttgtatacaaattatttatttatattaatcatgtatagtaaaatcatagtacatagtaaaccattcttttcaacagtgaaaaccccaggaaacgccaatcctatgggctccaccaatgggatctactccatcgaaggccaagtgatagccaacatcgatgttctccccaatctttgattggtagacgaaccccattctggagtcctcccgcagcttggccttcaccatggtgccattctggaagtcgtactgaaccccaatggcaaactgtttcacattttccgaactgtagagattcgtcttgatggcaaaggcccaggcttcgccgatcctttggaagatcgagcctcgaagatcctcgaaattctcgctacaagtaaaatataatgggatgttggctatattaaataagctattggacaacctacagttttagacccacttcggtcctcccattattgtagcccaggcacagggcgtgcttatcgaatcccttttcgtcaaagttgtactccgttcgatatcccagcacccaattctctacaggcgccaccaggacatagcccagaaataggggttcgttgtacagaggcaccaccagttccaccttcacgggatcgcgctccaacccgcacttcagcttcgtttgaaagctcactcttcagggtttaatttgcatagtttttaatgctgttaagaaaattctgaaaaaatggaggacactcactcgtcttttgtgccaattgttgacttgagcagtccatacaatcgactgccaaagttcatgccgcgcacagcgatctccgagagaagatcattgttggtgaaccagccgagggacgtgctgtagttgcccacttccttgaacacctccatgccgccaaatacgttcttcatggtgggatagccctcgccgaaggtgttcagatagaagtcattatcggttcgcgtgctgcagtgcatctgccatgcgccgatcttgaagccattgatgaggcaatccttcgccaaggcgcccacatggaagtaggtgggcatttcgccctctgacgttggcgagggtattatctccacttcgacttccttgggtggcttttcgggctcttcctgcttaggtggctcctgcttggaggcatcctgcttagttttcttctgtttgcttggctcctgcttaggtggctccggctgctccttattcgcatcactggccactgtagtgggccgtgcgcgcattttgttccggcgaaacaagttgcgcagccgttgcttcatatttgtcattttgaaaatactttaaaaaaatagcaaaaataaataggtataaatttaaaattttgattaaacgatctgacaccggaaacataaacttctgatttgtttttcagtttctccccatcatgacatagaaatgaatacaaacgtatgtttgctagccatcctacatattgaagtaccatgatgagccgaacttgtgcttcccattgatgggatcacttccttcgaagccaacgtggaacagaacttcgatgtcttcgcgaagttttttctgaaagataagcccgatgcgggaatctccacgcactttggccttcagcatgcttccaggttcccactcgtactgacctccaatggagacactcttggcactcacgtttccatacaggttggccttcaaagccactgcccacttttcaccaatgcgctggaatattgatcctcgcagcgccttgaaattctcactgaaatatataaatgtagttttttgcgggttggaggatgttggttgtaacctacaatttcagtccgacttctgtgacatcgttactatatcctccgcaaaaagcatgcatattgaagtccctatcctccacattgaacaccgtgcggtagcccaagaggtaattcttgacaggctgcatcataatgtagcccatcaataagggttccttatagatgggaatatacatttccactttgccaggattgcgatcgaatccacacttcagcttgcattgaaacttgcgtctgtaaagaataatatgtacttacgaaagataatctcttgaatcccttccagcaaattcgaatcccacttacccttcagggtagctgaccatagacttcaatacagtggaccatgtgccgcccagcccatcaccatgcactccaagatccgatagcaagtctccatccgacaaccaggcgagggatgcatgaaagtttccactctccttgtacgcctccagtccgccgtagacagtgttccatgttggataaccctcgccgaagctgctcaaatagaaatccttttcggttttcgaggtgcactgcagcttccagcgg

SEQ ID NO: 25346 - DNA, 1148 bp, DROSOPHILA
tttaatcaaaattttaaatttatacctatttatttttgctatttttttaaagtattttcaaaatgacaaatatgaagcaacggctgcgcaacttgtttcgccggaacaaaatgcgcgcacggcccactacagtggccagtgatgcgaataaggagcagccggagccacctaagcaggagccaagcaaacagaagaaaactaagcaggatgcctccaagcaggagccacctaagcaggaagagcccgaaaagccacccaaggaagtcgaagtggagataataccctcgccaacgtcagagggcgaaatgcccacctacttccatgtgggcgccttggcgaaggattgcctcatcaatggcttcaagatcggcgcatggcagatgcactgcagcacgcgaaccgataatgacttctatctgaacaccttcggcgagggctatcccaccatgaagaacgtatttggcggcatggaggtgttcaaggaagtgggcaactacagcacgtccctcggctggttcaccaacaatgatcttctctcggagatcgctgtgcgcggcatgaactttggcagtcgattgtatggactgctcaagtcaacaattggcacaaaagacgaagtgagctttcaaacgaagctgaagtgcgggttggagcgcgatcccgtgaaggtggaactggtggtgcctctgtacaacgaacccctatttctgggctatgtcctggtggcgcctgtagagaattgggtgctgggatatcgaacggagtacaactttgacgaaaagggattcgataagcacgccctgtgcctgggctacaataatgggaggaccgaagtgggtctaaaactcgagaatttcgaggatcttcgaggctcgatcttccaaaggatcggcgaagcctgggcctttgccatcaagacgaatctctacagttcggaaaatgtgaaacagtttgccattggggttcagtacgacttccagaatggcaccatggtgaaggccaagctgcgggaggactccagaatggggttcgtctaccaatcaaagattggggagaacatcgatgttggctatcacttggccttcgatggagtagatcccattggtggagcccataggattggcgtttcctggggttttcactgttga

SEQ ID NO: 25347 - protein, 358 aa, DROSOPHILA
MKQRLRNLFRRNKMRARPTTVASDANKEQPEPPKQEPSKQKKTKQDASKQEPPKQEEPEKPPKEVEVEIIPSPTSEGEMPTYFHVGALAKDCLINGFKIGAWQMHCSTRTDNDFYLNTFGEGYPTMKNVFGGMEVFKEVGNYSTSLGWFTNNDLLSEIAVRGMNFGSRLYGLLKSTIGTKDEVSFQTKLKCGLERDPVKVELVVPLYNEPLFLGYVLVAPVENWVLGYRTEYNFDEKGFDKHALCLGYNNGRTEVGLKLENFEDLRGSIFQRIGEAWAFAIKTNLYSSENVKQFAIGVQYDFQNGTMVKAKLREDSRMGFVYQSKIGENIDVGYHLAFDGVDPIGGAHRIGVSWGFHC

SEQ ID NO: 25348 - DNA, 3456 bp, DROSOPHILA
cgcgactggccgcaggtgcacttcctatccggcctaagtggtccggtgttttcctattccatcacgaatcgccacctggacatcatgtacccagcatggtcgttttggaccaccacgggacccatcctgcagcactatccccacggtgtgggtcgctgggactggatgcgaaaacatttggtggccagggcgtcggagttgccgtggagtgccaagcgcgctattggtttctttaggggctcacgatcctcgccagaacgcgatagtctagtcaggctctcgcaaaggcgtccagacctggttgatgcccagtacacgatactagcgacggatgccgatcccgtcgagaagatgcctttggtcgagcactgccaatttaagtatctgttcaattttcgcggtgtggccgccagtttccggctgcggcacatactgctctgccgctcgctggtacttcatgttggcgaccagtggcaggagttcttctacagccaactgaaaccctgggtgcattacgttcccgtggccagcgacgccgatgtggatgagctggcggagttgattctatatctgcgcgagcacgacgatctggcggaggagattgcggaacggggacagcagttcatttggctccacctccgaatggaggatgtgcagtgctattggagtaagatgctccaggaatacgcaaagttgctcacttataaagtgcaacgggagccgggacttctggaggtatccaacaagaaagcggtgcagctgtaccgcggaaaataaacttagtatttacaatcttagttttgtaccaaaaaataaaaatctgtataattaattttaaattcaaatttaaatcagccagtgctgccacacccaacagccaactccccccactagtgtgaccacacacaatcctgggtcaattgttacgtcactggccaacagctgtttgaaagttttgatttggattcgctagcattacatggattccgcatcatggcagcgcagctgaatccattccgcaatgccttccggctgccgtccaagcagcgcatcaactggtttcccggccacatgaccaagggtatgcggcaaattcagcaaaaactacgaaatgtagactgcatagtcgagattcacgatgcacgcatcccattggcgggcagaaactcccagttctttgacacaatcaccggtgagtacgtttacaaccataagctgccacttaatacgggactcatattccccaggaagtggtgttaaaccgcatattctggtgctgaacaaagtcgatctgctgggcgccaaacagcagaagagcgtgctccagcagctgaggagacagcagcccgaactgcagcacatcctgttcaccaactgcaaggatcagcgcaacaacggcgtgctggacatcctgcccctggcaacgcgcctcgtgagcgagagcagtcgcttcaatcgcacccaagctgccgagcacaatctgatgatcatcggcgtgcccaatgtgggcaagagttccgtgatcaatgtgctgcgaaatgtgcatctcaagaagaagagcgccgcacgcgtgggtgccgaggcgggtataactcgatccgtcggcgaacgcatcaaaatccaagagaatccgcctgtttacatgatcgacacacccggcatcctccagccctccattaaggatgatgaaatgggcatgaaactggccctggtgggctgccttcccgatcatattgtgggcgaggatctgatagccgactatctgctgtactggctgaatagccaccgcaaatacgactacgtggagatgctaaagctcagctccggacccagtgacgacatcagcgccgtgctggcggagtacgctcatcgggaggagctattccacaaggtcaagcagtacgacggacgcgtggaggtgatgacaaatttattggcggccgcgcgaaagttcattcacttctttcgctccggccagttgggtcacatgaatctggacgaacccagtggtttcagatagctatacatatgtatgaattaaacttaggggcttagattaaagactgaacagtcgattctgctcgcgtccttattgattttccgccatgggcacatcgatggcaatgtcgccaacgccgggcacgggaatcgagtacgaaacactagccaaatcgtcggtatcattggctagatccatgggtgcatggtgctgcggcgcctggtccacctgtggcgcgattccaccaagatgtccagccaactcagcggactgatccacctccggcggcacttcgacgggcgcactgctaatgtgcggataactggtgcgcgaggccgccaaacgcagctcctccggcacgcccttcattcgcatcgcaatgtgacgggagtaaggtgccatcttctggaaatagtcaatcagcatttgcggatccttctccacgatctgtgccgatggcaccaagtcgaactcgtcgcagaactgccagcgcaccagatacttgatgtcgcccgtcacatccgttgcgcccacgatctcggccagctccaagccgcgctcgtagccgcgcagcttctggatctcttcgcacttgggtttcttctcgccgcgcttcttggacttggcgcgcgactcctcgaatttctggatgagattcgggcaatcgcagttctcctcgggctcccaggtgttgtccgccgacgtgtagccacgccacttgatgtagtactcaaccttgccttcgctggtaatgcgcttgtccatgatgcgctccaccacgaagttgggctcgtttttaaccattttttattgtgtttttacaagattgtttacaatatttaaaatcggcttggtttttttcactagtgccagtgtgaccgtttgctgacttcaacaacagttacaatagcaacatacttctgacagcatagaaaacggtcacactcgcacgcgcttgcaattcgaattcaggtgaaattttaaagctcaggtgcaatggaatccgaatcctcgcaggatgattggtccgcattcgatccaatgtccagggaatactatgaccaagtgggcaaccgttacactaacgagtctggccagaaactaatcatggaagccccgctgccgccaaaggacgaaaaggagcaacgtgccaccaggcaggcgaagtatccatacttggtggttccaaaaagcagtccctatgtgaccgaaaagatgctaatcaacttcttcggtcgggcgctcatcaaggagatggagttccgccgcttgtcacgcgtatactttgtctactttgaaaatatcgcgtgagtttcttcaagcactttcgcaggtcattcaatatttcgagcgtataatcctttttccagatccctggagacagcgcaacagcgggtgcagcgttacccgaacctgatcaagtgcatcactggtcgcccgcaaaaggagcgggaaat

SEQ ID NO: 25349 - DNA, 1401 bp, DROSOPHILA
cgcagctgaatccattccgcaatgccttccggctgccgtccaagcagcgcatcaactggtttcccggccacatgaccaagggtatgcggcaaattcagcaaaaactacgaaatgtagactgcatagtcgagattcacgatgcacgcatcccattggcgggcagaaactcccagttctttgacacaatcaccggaagtggtgttaaaccgcatattctggtgctgaacaaagtcgatctgctgggcgccaaacagcagaagagcgtgctccagcagctgaggagacagcagcccgaactgcagcacatcctgttcaccaactgcaaggatcagcgcaacaacggcgtgctggacatcctgcccctggcaacgcgcctcgtgagcgagagcagtcgcttcaatcgcacccaagctgccgagcacaatctgatgatcatcggcgtgcccaatgtgggcaagagttccgtgatcaatgtgctgcgaaatgtgcatctcaagaagaagagcgccgcacgcgtgggtgccgaggcgggtataactcgatccgtcggcgaacgcatcaaaatccaagagaatccgcctgtttacatgatcgacacacccggcatcctccagccctccattaaggatgatgaaatgggcatgaaactggccctggtgggctgccttcccgatcatattgtgggcgaggatctgatagccgactatctgctgtactggctgaatagccaccgcaaatacgactacgtggagatgctaaagctcagctccggacccagtgacgacatcagcgccgtgctggcggagtacgctcatcgggaggagctattccacaaggtcaagcagtacgacggacgcgtggaggtgatgacaaatttattggcggccgcgcgaaagttcattcacttctttcgctccggccagttgggtcacatgaatctggacgaacccagtggtttcagatagctatacatatgtatgaattaaacttaggggcttagattaaagactgaacagtcgattctgctcgcgtccttattgattttccgccatgggcacatcgatggcaatgtcgccaacgccgggcacgggaatcgagtacgaaacactagccaaatcgtcggtatcattggctagatccatgggtgcatggtgctgcggcgcctggtccacctgtggcgcgattccaccaagatgtccagccaactcagcggactgatccacctccggcggcacttcgacgggcgcactgctaatgtgcggataactggtgcgcgaggccgccaaacgcagctcctccggcacgcccttcattcgcatcgcaatgtgacgggagtaaggtgccatcttctggaaatagtcaatcagcatttgcggatccttctccacgatctgtgccgat

SEQ ID NO: 25350 - protein, 297 aa, DROSOPHILA
MTKGMRQIQQKLRNVDCIVEIHDARIPLAGRNSQFFDTITGSGVKPHILVLNKVDLLGAKQQKSVLQQLRRQQPELQHILFTNCKDQRNNGVLDILPLATRLVSESSRFNRTQAAEHNLMIIGVPNVGKSSVINVLRNVHLKKKSAARVGAEAGITRSVGERIKIQENPPVYMIDTPGILQPSIKDDEMGMKLALVGCLPDHIVGEDLIADYLLYWLNSHRKYDYVEMLKLSSGPSDDISAVLAEYAHREELFHKVKQYDGRVEVMTNLLAAARKFIHFFRSGQLGHMNLDEPSGFR

SEQ ID NO: 25351 - DNA, 4239 bp, DROSOPHILA
ttgactaagttcgcctggtaaagtgcttaatgattttgctttttgttgggaaccttgtgagatttttgtaaatgatcgcagtcacttgggccttcagttgaattctcgattaatttggaaggtttcagccgaacatagattatgaacgaaaactttaacttgcaattagtgaaattagcaaaacaaaacaaaaagaaccgaaaagaatatgaaaacaaaaacttaatgagccaaaataactgccatttatcgaagcaacattttgttaggacttttttcatttttacaatgaaatttaaaattaattgtaaacgtaaactaaacgacggaattcaataagaatttgataaactatgtatcagtgctaagggaacgtcgaacattttaaaactaatagtggaaaacgagaaattgttgcaaacgaattgaatatcaaatatcgaatatgtcttaatcttgaatattggaacattgccaagtgactgctgcaaataattagcaataaacaaaataccgaacaatgcgaaatgttgaaattgaaatgaaaatgaaaacgaatattgaaattgcaaatatttatacctagttcgtaatagttgaaagacaaacatttttcgggcactaaattgctggacttttgtggaggtgaaaatcgtaggtatacatatatgtaagccagcttaaagaagtaattgcggctcaaatgccgcctacaaggctttaaatcttgagcattaacaatattatgggttccttttataattaattgcaagtgtaatacgcattagccagataattgaagttgtagctagttatatatattatatatatacatattatatatatatgaaagcgagtgttaactgatgaaaacgtaaatttatacatgtacttatatacacacatatgtatggttaaatgttgggcaataaagtgtatgtagcgtatgtttaatgtggatcgaaagcagatccataactatctataagtactaatcccgatgttgaagcgtatcgcatcctttcaggaagatcgtgagacctacttgcgatcctgaacgattattggaaccatatatgcatatgtagcccccggcgaatcactcacacacacatagacacgaaatgaaggcttcagattttccactcctctacattttccattatccattatcctttaggctccccgattttgattttgaccggctaaagctcgcacacatccaccaagaaaaaacaaagctataaccctcctcttgatttatcgcacactaatgtcaaactctttctgtatctttcaacttgactctgggattaactaacaaaaaaacaaacaatacttacaatttgtgtctgtaactatttaatgacccaaactaaaactgcaattgagcgaaagttgtcgagggccgcttaagactagagtaaaaatgcattttaagccttaattgggtgagttctctcctaatgcaaacacatttgattgttgtatgtaccgaaataaaaataaccaaacaccgaaatttaatcaaagctttagagtttcgtttgaaattagctacaccataaccatacatatatctttgagtttgattttctgctgcttaaatcgccactgcgaaatagctgatattctattatgttgctcatgtcgatgatttgtttccaccattaacccaaaatgcatcaccattcaatataaaacaaccatccgaacacaaaacaaaagtcaaagtttaatatggtatttagcagtaatttattggcaagctacctactaattgcactcacaacattttgaaagcatgctttaaattgttcaattggcaccgacttaaccactgaatccattatccattaattagcgtccagtttccgtctttatttgcgcatactctacggcgtttgtcattcaattttcagttatcattgttgtttattcggttttaggagcttatcaactgatgagtttcgaattaagttgatttccaaccagttccgaggcagtttctcctcagattgcaattacacgtgtattagttcgattgaacacacaaaacaaaacccgcccccgcatttgattgaattacgattttaatttggcgcccttttcagcatttatgattatttgcatatttaaatagttttattttgccacagctaaacgatagcgaacctaaacaaatcatcaatgaccactagcaaaagagcaataaaaccactagatacaaatgctccaaattgaaatttgaattttaaattagttggcaaattcgttgtaatgagcatttcaattatatacgtgcattaattaaacatacaatagaacgaaattaaatatcaattactaatcacgcgctttcgttgcgcccttctcccctttttttttccgtctcgtttccaggtaattccaatagtctagctcagctggtggacaacgagataccgctggtccaaatggacattccggcttatacccaccaaacggccacccaggcgcgtcagtaccgccatcgtcatcacaaacagcgccagatatgcaatggcggcactgttagctatgagaatcagttggccaacgccagcagcgaggatgagctggatgatccagatgttgtggtcgtgggcagtcccgaagtggtggctgccgtggcagccatagcctccaataaggcaagagaaatgcgcaaccgcagcggaagctatagcaatctcttcgatgctgacttcgaggcggcactggtcaactcctcattggcggataaccatgtcagaggtgaaggagcaagcagttccggaaagccctctgcgggcgcagctctattagcggctgccatcagtggaaaaacggagaacatgtatagcaatgtgttgccagtggacaatgatacggatccggccgattccacgctgcatgtatactccaatatcatcgatgaacgcaagcagcaggaacaggcaaacaatgtactgtcctccactctgctctgcgacgatctcgacctggacgatccggttagtgcttcgtgtcatgtgaaaagaaagtccctgggcgatggagccgagcaggtgaagtcggcggagagattgagaatgctgcacgacaacacgatgatagacacggccttggatttggacagcttggatggctccagcatgggcaacaactcacagtcgtgcctggtgaagtcgggcaaaccgaatgccacttccgtgaccacaaacgtggccatagtctaagcggtcctctttgtcctgtacataagtgtagatattcatgtcaagggggagagtattgttaagttttccctacttttaactgaatcgattttcatttactatgtgtggtggggggagggggtgcggtgattcgatggagaggggggatataatgaaacgacctatcagcaggcagataaaaaatattaccttaaagcgttacgcatttgaaacagaaagagaaatatatctatgcatatatgtagatgataataactaaagcatttacggatatatgtatgcatatgtataatacaaatgtggtgaacaatgttaacaatttgagggcattaacaaaggacaaattaaaggagcaaccaatactatggagaaactgtttatacaatacacgacgcatacatataaatgagttataggtaacatatacataatgataaacaatatacaatgtacggttagttatagtgtataatttttgtatttaagtttttacaaacagcagaaacagaaaggggttcgtttcgcagttcagagtttaaaaaacatttgcggtgtagccagaaaccgaagaaacaaagaaaagaaagccaactagaaatatcctgcaatatacgtgaagttgaaattgtcgagtcgatgagaaaatgttaacagcataagagttaaaagcaacaatgtggtgtattaaatgttcataaatctaccaataagtgtattttcaaggtgtaaaatgttatatgacatcaattaaaacgagttcgagatttcgacaagctccattgcatgagagggcaagaaatgttaagcgtatgttatgcgaaactaacaaaactacaattatacaaagaataaagatttataaatagagaataatggtgtattgctttttgggaaaggccatctaggtgttgaattgaataagaatgatgcaaactgaaacttagaaattagggtttcagaaattttttcttaagttaaagttactccaaatttcaaaaac

SEQ ID NO: 25352 - DNA, 870 bp, DROSOPHILA
atgttgaagcgtatcgcatcctttcaggaagatcgtaattccaatagtctagctcagctggtggacaacgagataccgctggtccaaatggacattccggcttatacccaccaaacggccacccaggcgcgtcagtaccgccatcgtcatcacaaacagcgccagatatgcaatggcggcactgttagctatgagaatcagttggccaacgccagcagcgaggatgagctggatgatccagatgttgtggtcgtgggcagtcccgaagtggtggctgccgtggcagccatagcctccaataaggcaagagaaatgcgcaaccgcagcggaagctatagcaatctcttcgatgctgacttcgaggcggcactggtcaactcctcattggcggataaccatgtcagaggtgaaggagcaagcagttccggaaagccctctgcgggcgcagctctattagcggctgccatcagtggaaaaacggagaacatgtatagcaatgtgttgccagtggacaatgatacggatccggccgattccacgctgcatgtatactccaatatcatcgatgaacgcaagcagcaggaacaggcaaacaatgtactgtcctccactctgctctgcgacgatctcgacctggacgatccggttagtgcttcgtgtcatgtgaaaagaaagtccctgggcgatggagccgagcaggtgaagtcggcggagagattgagaatgctgcacgacaacacgatgatagacacggccttggatttggacagcttggatggctccagcatgggcaacaactcacagtcgtgcctggtgaagtcgggcaaaccgaatgccacttccgtgaccacaaacgtggccatagtctaa

SEQ ID NO: 25353 - protein, 289 aa, DROSOPHILA
MLKRIASFQEDRNSNSLAQLVDNEIPLVQMDIPAYTHQTATQARQYRHRHHKQRQICNGGTVSYENQLANASSEDELDDPDVVVVGSPEVVAAVAAIASNKAREMRNRSGSYSNLFDADFEAALVNSSLADNHVRGEGASSSGKPSAGAALLAAAISGKTENMYSNVLPVDNDTDPADSTLHVYSNIIDERKQQEQANNVLSSTLLCDDLDLDDPVSASCHVKRKSLGDGAEQVKSAERLRMLHDNTMIDTALDLDSLDGSSMGNNSQSCLVKSGKPNATSVTTNVAIV

SEQ ID NO: 25354 - DNA, 5378 bp, DROSOPHILA
cacgacaaaatctccaagattaaacatcttctcaccgcaccactgctcgtcatatccgtaagcgaatccaaacagatacaggcctttctgtactatattagttgatgattgcccatacagcggatgtgccacctcaataaattgtacgtgttagtattttaaaagctcgaatagtttattttatttaccagacattgtttataaagaatgccggcacgagaatgcccaaaagaacaagcaaaactaatcaaaatatccaaatatccgaaaaaatgtatttattttgatattcaggcattgtttctgaacaatttgtgttcagctacggtattctgttagttataccctacattaaaaatctaatacaaatatgttacaggaggatgttcctatggtgaactcatgaccagaaaattcaaatgaagtatatccccatcgcattggtcaaaatggaggtaatcaggaggagacgggagacagacacaatgttaaaggaaatccaattaaatatggataagatcataaatcgtcacaatagcactttaaagagttggattcattactgttccaacacaagctgaaacaaaattagcacaaatatacatagattcaatgagttaagaagataagccaggatcataagaatcaaatttgaatttgatcatgacaatacgaatttcctacgacaatacactcaaaatttgaattgaccaattcgggttatactcgaaaacggccaaaataaaagcactgttaatcggaaagctttgtgcgaaaagctcgcgtgtctgtgcgcagtgaaaccgttagccgaatcggatcgaatcgaaacggaatcgaaagccttttcattcactcagtcactctcaactcacgcagcacagagggtgggtggaaaacagtcgggcggagcattcgagaatctgggcgagaatcgaccgaccaagtggcgctaagggaaggctagtaaggcatccggctaacaaactaccgaatatttcgcgatttcttcagcgaaaggcccgcagcagcgacgtgtatatctagtatacatcatcatcatcatggtgagtgttttcagtgcgcggttgctgtgatttgtgttttcgtttctgcttaatgcccaatttatttttatttgtttgtaacccacacacacacaccccaaatgtttcactctgatttaaaacggccttgcactccaacgggggaaagtgaagcaatggctttaaaattgaggattcagagcggtcaaatcggccttgagccacttgcattgcacttgaccttgcagcccagcgttgcaattaagaaagtttcggggccacaagcttactcagcttttttttttttttttgaagctgagaatggggtatgagatgagaatgagaatgagaagctcccggtcagctgttccatgtttacggttttgttataaatagagcctctcctaattccaacgattacgaatctgtgaaattccctacccgaacaaaacaaattagcaactgaaagaaacaaacaaacaaaaaataaataccaaaatttcacattccaagctcgaacaaacgaattttgacgtcaaaatcccgatttgaataaatttatgaccagttgctcggcacacaggaatttctggcggggcttgattcattagcaagtccccagcctcgtcgccaaaaaaagcagtttaaatgtgtttattggcgctactcgaactagacagtcatgccggtttttagtcttggtcgcgtcgcattattaaagtgtcaaaacaaagcaaaaaaattaaaaagaacaccatataaaagatctagaggcgggttccataaaaattcctctaagtttgctggatagttttttagttccgtttgaacggaaagcatgtgtgcagttcttcctagaaaattatagttatagttagttctaaaaataaacaaaggaaaatcatcctaaaaatacatatatcgaaatcaaaagccgagtttcgtaaaaatccacgtgagttagctagctgaatagtttgaatagaaagcacttgtgatgtcgctgctataattttctataattacccttaagtatttgggaacctcgacacttgttaaatcaccatgtacaggttagttttgaattattaacaacggcgaatccttggaaatgacattgaaaagtcactgaactacacaatctatataaatgtgaagagaaattacgtaaatgagcttgaaaatcataaattctcacacgcaacaatttaaatgcgtagaaatgtgccataagaaaagtcggtgaaaaacaacgtctgcgtttttatgctctgaggaaaatcgaaaaatctataggtgccaggcagcaaacaacctgggcattattaagctgtccgaatccgaattcattcattttctatattgtattttcatttttttttttaccccatttttcgacgggtgcgacaatgcggaacaggcgaaaatcggcgggggccttcaaaatacaaaatactatatcaaaagctgatctgcacacacgctatatctatctatctatatggtcacgggccgacaacgggagcgatggcattgtttatactaatctagatttttgttgatgagatcaagccattatcaataccatttgtgtgaatggagcagaggtgccaattgccccaaattaccccaaattgaaatgatatgtgtgacgcgggggttttctgtacaagatcaatgtcaggggccaatgaaatatgtgtaacctatatatatataaaatcccatttttgtagtaagaacactatttcgtgctggcaaagtgcccaaactactaataactacatattaacctatgccaaaatacatctcggatgtagttcaaactataagtcggagatatctaaccatcctcaccaactatctcgattgtgtagttatttatgtgtcaccaaagggttatgaagaaggaggccgaggagaagctcaaagccgaggagctccgtagggcacgtgccgccgtaagtagcccaactggatcgaatccgagtcaacgggcactatatcctatttactaggattagttgatgtatggcatgttaactgtctggccgccgcttcaccaaaaaacaaacgaatttcgatccgagaatattgaaaaaaataaaccctcttttgaaaccctctatccatgccccttaatccaactaagcttgcgtacgtgttaccactaaaccagctaattgtagatgttcctatgcctcggtgttgtgtgcctgctaactcaaatcttgtccttacaggctgatatacccatcatctggatcttgggtggacccgggtgcggcaagggcactcagtgcgccaaaatcgtggaaaaatacggattcacacatctgagcagcggcgatttgctgcgcaatgaggtaatttgggcggaaatactggaatagtcggtgctatctgttgcttgcagatggcaagggtgtatggcgattttggaaaatgattatatttggatcgcaaaattcattgctattcattgttattacccaaagtattgcgatgcgaacttaaactattgagataattatacgtttccattgaaagaatcatttaatatctatatggttactttcaattcaaattagcttagaatttcaattgttaataattatttattagtttctaatattcctctatcttgtaggtggcttctggatcggacaagggtcgtcagctgcaggctgtgatggccagcggtggcctggtgtccaacgacgaggtgctgtccctgctgaacgacgccatcacgcgggccaagggtagctcgaagggattcctcatcgatggatatccgcgtcagaagaaccagggcattgagttcgaggcgcgcattgcacccgccgatctggcgctgtactttgagtgctccgaggacacgatggtgcagcgcatcatggcacgtgccgctgcctcggcggtgaaacgggacgatgacaacgagaagaccattagggcacgcctcctgaccttcaagcagaacaccaatgcaattttggaactttatgagcccaaaacccttacggttagtatcgcatatgcattttccatgtgcaaaagtcccccaataattagcaactctttcgttttaatcacagatcaatgccgagcgtgacgtggacgacatctttctggaagtcgtccaggccattgactgtgtgctgaagaagaagcagcagaatgccgccgcccagtgctagtagaatgctaatccattaggaaaccggtaccaaagtcaacatttctagtgcactttttagcgcgaaacacacaatctcagagctgagcacaaatgaatgcgaaacaccaaataaattagtctaaatctatgttatgttatgttatggcattatcctttaattcgtgacaagcaataattgatctagtgctttaaataaatttacacatacaaatggaatgtttcgaatcaactttaggcaccctccactcgttttgcctgagagatcataaaatgttaataattaattgagcaatgactgtaatttgatagtttgcattttctccaagtattctataaaaatgctaatcttgactaggcacgatttagggctttaatttagctaattattcataaactaattgaatgatccaagggcgcgtgtgtttgaatggaaaacatttgaaaacgattgccttgaatgttgtgattgccacgtgatttattatcgaaaactataagactacattttgttcactgaaccagtttgctatcagcgtttaaatgtggaagttccagtagaacaaatttatctaaaataccttgctaaatatctcatttacatggacattttcgttgtgaacgaatacactgattaattgctgctctacaaggagttttatagacacatataagatttcgtccatttacttatttatggttaaatggcgaagacgctttttatagaggcactttccaaattctttgcatatatgtatctttgctacacattaacaagttgcacccgataaactgctctagtcacaataaattatatggctttgctagcgaatttaaatcagatcaagtcattggattaattgatcaactgccagaaatccgttggggatttcttgctgagcccagttaaatcagaaaagtattttgggccataagatgatatcaatttgtgataaatctgccatcgaaaggaatgttctgccaacgaaacgagtgcgtcacgaacatcgatttgaacgcaaaatagaactgacacaatttgaactgaaatgaaaatctccaatctcgaaactggtaactggtagtaatagaatcgtccatctatcacggaactaaataccagacgtcat

SEQ ID NO: 25355 - DNA, 799 bp, DROSOPHILA
cgcgatttcttcagcgaaaggcccgcagcagcgacgtgtatatctagtatacatcatcatcatcatggctgatatacccatcatctggatcttgggtggacccgggtgcggcaagggcactcagtgcgccaaaatcgtggaaaaatacggattcacacatctgagcagcggcgatttgctgcgcaatgaggtggcttctggatcggacaagggtcgtcagctgcaggctgtgatggccagcggtggcctggtgtccaacgacgaggtgctgtccctgctgaacgacgccatcacgcgggccaagggtagctcgaagggattcctcatcgatggatatccgcgtcagaagaaccagggcattgagttcgaggcgcgcattgcacccgccgatctggcgctgtactttgagtgctccgaggacacgatggtgcagcgcatcatggcacgtgccgctgcctcggcggtgaaacgggacgatgacaacgagaagaccattagggcacgcctcctgaccttcaagcagaacaccaatgcaattttggaactttatgagcccaaaacccttacgatcaatgccgagcgtgacgtggacgacatctttctggaagtcgtccaggccattgactgtgtgctgaagaagaagcagcagaatgccgccgcccagtgctagtagaatgctaatccattaggaaaccggtaccaaagtcaacatttctagtgcactttttagcgcgaaacacacaatctcagagctgagcacaaatgaatgcgaaacaccaaataaattagtctaaatcta

SEQ ID NO: 25356 - protein, 201 aa, DROSOPHILA
MADIPIIWILGGPGCGKGTQCAKIVEKYGFTHLSSGDLLRNEVASGSDKGRQLQAVMASGGLVSNDEVLSLLNDAITRAKGSSKGFLIDGYPRQKNQGIEFEARIAPADLALYFECSEDTMVQRIMARAAASAVKRDDDNEKTIRARLLTFKQNTNAILELYEPKTLTINAERDVDDIFLEVVQAIDCVLKKKQQNAAAQC

SEQ ID NO: 25357 - DNA, 3691 bp, DROSOPHILA
gaactggacaagggttccgaggagccacctggcaaactgaagatcttcccgcagggcagcgatgtggacatcaattacctggccttccatcgcgatttcttgatagttggtgcagtgggtcttatttacggattggaatggaacgaggaggaggaatctctggccaccaaacggtcctgggaggtaaagatacccatgcaagtggatgccgtcgaagtgccggatgtgaactccatgtggctggactcggaaaatagcatcctgtttgctggctgtggcgacggagtgatctaccaagtgagtttggaggacggacgaattcagcgcgagtaccgcggacacacagactacgtgcacagtgtggtgggcaatgccaacggacagatcttctctggcgccgaggatggcactgtgcgagtgtggagcaccaagcagcagcagcacacttcaatgctggagccttacaagaacccaaatctgttacgtccggattggggcaaatggataggagcagtggctgtcaacgaggattggctgctctgcggtggtggacccaaagcttcaattttccacctgcgttccatggaaagcacatgtgtctttagcttccccggacgcgtgcatctatgtgactttgtggacgattgtgtcttaatcggtggagagcacaatcatgtgcaatcctacactctaaatggagtactgcaagccaatattcccgtggagcacactgcctgctactctgctgtttggcaaacatcgcccattaaattcatttccattgctggtttcagcaacaagttgcatatcctcaaggattttcgcttcctcgacagcaagattgagatgtatgggaatgtggagggcgaggaaaacgacccagaagaagaagacgaacttattgaaaaacctctgacagttgaggcggcataaaggtgtaataaatttgttctttaattacattattatactgtttacattttttaaatgcatttattccttagggaaaccgagcatattcctcgtttttacaagcgtttcgtgaaatacgcagcacttgatattccttgctgttcacattattttggaaattacattctccaaatgttaatgttcccttatcgttgagtgcgaaatcctccagcatacctataaacttttttgaaataacttcttcatccggacgaatgccggtacggtatgcagctgtattgaaaatcaagaaaaagtcatctccgtggacagtacctttaataataagaaagctagagctttaagtatttgaaacgcaagtatgtacccaccaaaatgtacatctgttcgattggaaagcaattgacccactccggaatcggtaggattatcgtagacaaaagaataaaccggacttttgccatactttcggtgaagatctattgcacttggcacgctattcttgaaaagaacatcagtaaacattcgctgcacgttccaataactttccacactgaatcgccgatctgctagatactgctgcctgagatcaaatgaaagatcatccatatctttgatggttttcttggcgtcccgatagaagagcaagtatggtgcccaatcaaaccatcgatcattgagtaggtcaatccaactctcgccagttaatttgtttctttccaacagctgagcagcgttgtatcccccgtcctcagtggtgtacgtcacagcccaagggacttgggcaaacttcccgctcttaatcactgctcttgggtcctcggttagaaaggcgtctggtgcatctgacggctccacaacaggtccaaaagcactgaagggtacataggaaaacacaaggaagcttcggacagcagagactatatcgctagccggcttagacttcaagcagtccttgagttctgcggagacatttgtgtgtccacaaccgacaatacgacccagttcaaatgcacgtcgtcgtccaccctgctgtatgacccaaggatccaatgcattgccgctcaccgaaatcgctcctttggccaaatgtttgaaatcctcgtgcaacagctgcaaatgagccgaagcaccgcctgcagagtgaccaatgagcacaatattatctggcattccaccaaagtgagcaatgttcttcttgatccattgtagggccagacgttgatcctttagaccatagtttcccggcaagtgtctatcgccggtacttgcaaaacccaatggtccaagaccaaaacttatttttaccacaagcaaagttccctcacgcataatggagtcgtgtccatatatggatccactaccgaacatgaaagcacctccatgcaggagtactacgacaggaaagctgctccgattgggtttctttggcttatagatgcttaccgttaagcaatcctcatcacccatcagcttattgttttcgtttataaactgattccactgcatgcactcaactggagactgcgtggcattgaaaacatcagtccaatgatgactatacggctgaggtgcttcaaaacggagggcaccagttggatgctcggcattgggaatcgattcgtagctgtagtacaacccattatctttgccacggatttttccatttgttatctcaacaatcaagggatcagcttcagattctaaagctgctatccacagcaaagtcaggcacaacagccgtttgaatatactcatgatctggaactccacaaagtactaatcaaactgcgggtaaacaaacgtttattattctttataaagaaacaacaaaaaccaaaatataaagcgacaaacacgttttgtacaaatgatatttaaagccagttgagaataattaaataattaaaaattacacagaacgaaaaatttttgattttattcatgtaacttacggaaattccacatgctgcctattctggcagccatcaatataaatagctaataattggaatttctcactacctacattatctttgaaatcgcattcaccatattttagagagccattatcactcgaagcaaaatctgccagcatattgataaaatttctcgaaattatctgctcatccggacgcatttccacatctcgtacgaaattttcgaatatcaaaaagtagtcgtcaccgtgtacagttcctataaaagtaatgatttaactaagtccatttaaaagtacgatttccttaccaaaatcataatcggttcgattggccaggacctgtgcgattcctttttcggctggattgtcatagacataagcgtaggcaggactctttccatatttgcgatgaagatccaatgactcctgcgtgctattcttgaagagaatatccgtgaatagccgctgcaattctgaatagctttcgatgtcaaatctctgattgcctatatactcctgcttaattttccgcgagtagtcgtccatatcctttttggtcttcgtgtcccggtagaatagtaaatatggtgccaactcaagccaacgctcgtttagatcatcgataactattccagatttccgttccttcaaaagcaaggcggcattgtagccaccatcctctgtgacataggaaacagcccacggaacctgtccgaactttccgctcttaatgacatccctgggatcctgggtgataatggcgtctggagcatccgatggctccaatacaggactaaatggagcaaagggcacata

SEQ ID NO: 25358 - DNA, 1635 bp, DROSOPHILA
atgagtatattcaaacggctgttgtgcctgactttgctgtggatagcagctttagaatctgaagctgatcccttgattgttgagataacaaatggaaaaatccgtggcaaagataatgggttgtactacagctacgaatcgattcccaatgccgagcatccaactggtgccctccgttttgaagcacctcagccgtatagtcatcattggactgatgttttcaatgccacgcagtctccagttgagtgcatgcagtggaatcagtttataaacgaaaacaataagctgatgggtgatgaggattgcttaacggtaagcatctataagccaaagaaacccaatcggagcagctttcctgtcgtagtactcctgcatggaggtgctttcatgttcggtagtggatccatatatggacacgactccattatgcgtgagggaactttgcttgtggtaaaaataagttttggtcttggaccattgggttttgcaagtaccggcgatagacacttgccgggaaactatggtctaaaggatcaacgtctggccctacaatggatcaagaagaacattgctcactttggtggaatgccagataatattgtgctcattggtcactctgcaggcggtgcttcggctcatttgcagctgttgcacgaggatttcaaacatttggccaaaggagcgatttcggtgagcggcaatgcattggatccttgggtcatacagcagggtggacgacgacgtgcatttgaactgggtcgtattgtcggttgtggacacacaaatgtctccgcagaactcaaggactgcttgaagtctaagccggctagcgatatagtctctgctgtccgaagcttccttgtgttttcctatgtacccttcagtgcttttggacctgttgtggagccgtcagatgcaccagacgcctttctaaccgaggacccaagagcagtgattaagagcgggaagtttgcccaagtcccttgggctgtgacgtacaccactgaggacgggggatacaacgctgctcagctgttggaaagaaacaaattaactggcgagagttggattgacctactcaatgatcgatggtttgattgggcaccatacttgctcttctatcgggacgccaagaaaaccatcaaagatatggatgatctttcatttgatctcaggcagcagtatctagcagatcggcgattcagtgtggaaagttattggaacgtgcagcgaatgtttactgatgttcttttcaagaatagcgtgccaagtgcaatagatcttcaccgaaagtatggcaaaagtccggtttattcttttgtctacgataatcctaccgattccggagtgggtcaattgctttccaatcgaacagatgtacattttggtactgtccacggagatgactttttcttgattttcaatacagctgcataccgtaccggcattcgtccggatgaagaagttatttcaaaaaagtttataggtatgctggaggatttcgcactcaacgataagggaacattaacatttggagaatgtaatttccaaaataatgtgaacagcaaggaatatcaagtgctgcgtatttcacgaaacgcttgtaaaaacgaggaatatgctcggtttccctaa

SEQ ID NO: 25359 - protein, 544 aa, DROSOPHILA
MSIFKRLLCLTLLWIAALESEADPLIVEITNGKIRGKDNGLYYSYESIPNAEHPTGALRFEAPQPYSHHWTDVFNATQSPVECMQWNQFINENNKLMGDEDCLTVSIYKPKKPNRSSFPVVVLLHGGAFMFGSGSIYGHDSIMREGTLLVVKISFGLGPLGFASTGDRHLPGNYGLKDQRLALQWIKKNIAHFGGMPDNIVLIGHSAGGASAHLQLLHEDFKHLAKGAISVSGNALDPWVIQQGGRRRAFELGRIVGCGHTNVSAELKDCLKSKPASDIVSAVRSFLVFSYVPFSAFGPVVEPSDAPDAFLTEDPRAVIKSGKFAQVPWAVTYTTEDGGYNAAQLLERNKLTGESWIDLLNDRWFDWAPYLLFYRDAKKTIKDMDDLSFDLRQQYLADRRFSVESYWNVQRMFTDVLFKNSVPSAIDLHRKYGKSPVYSFVYDNPTDSGVGQLLSNRTDVHFGTVHGDDFFLIFNTAAYRTGIRPDEEVISKKFIGMLEDFALNDKGTLTFGECNFQNNVNSKEYQVLRISRNACKNEEYARFP

SEQ ID NO: 25360 - DNA, 5834 bp, DROSOPHILA
caattcgtcaaattacgtagccgataaagagcaacgaacttagaagggaattttttgtactgttttccccaaacgtttttggtagtttaattcaaatcataactaaaatgtttgcagattttactagttgcaccagtaactaagatacattcaaactaaagagcttcaattatttagctttgaaactaggtttttcggtttcgctgcaatactaatatttaccccatgattaatctatttgttttgtttgtaaagcagcaacattgcccaaatccagaagggtttgcacaaaatatttaggccaatcgataggaacgatagtgcacttcttattgtgctctattttcagctctaacgtcagtagcttcggtcgatgacccggctcaaggccattgctaatgcgaacatacactcgcggcggacttactcgtatatgcaagctactatacaagtagttagaaaagaatgcgattcaggaaaacaaaaatcaaacttaactttttgtcataccatcataccataccaaaccaaaccatgcccaccgccgaagctttttgagtattacccgcgaaccgtaaatatcggccattgaacttgacaatcgtggtacatgcacgcccccaagaaagctcgtgcacggtatagcacgatcggatctaacccgttctagcggcacacatgtacgtatgtatgtatacgtttacatatattcacccccaccgatcggctctaaccgagtgcacttccgagcttttcgcccctgagacccaccaatgctaattcgtagaagtttgcaaacaggagcttttaacggctaaggttaagctttcgtttcattgccattgaaagcgaacttgggtggaggtcgttgaactgacacaatttcgaaagaagttgcccaactgcccgagacccaaaacattaccgttttcacttttcgatacccactagtttcggggtataatgaagtacgaactgcctaataaaaagtcgaaggattaagcttacattatattttaaaactcaatttatgccatgatttgcgtacacatttttctacatcgtattttatcaagataacaataagatattaaaaaaattgaaagtgtttttaagttggaagtaatatgaaatttgtacttaaattaaattaacctaattaaaaatatcggcgtcaatttaatttactattttcaaatttaatttacaaaatacttattgaaaacaatcttataggcgataatatacttaaaagatatactcctcattggcgggtaagtggtacggaaagttatgatagatgattgcatttgttgatcaattataggcgcacagaggttggtttactttgatctgaaggaaacactgaagaggatttgctttgttgggtgttattgctttttatcttaatttataattggttgaatgaaagtggtctatgcttagttgaatagtcttaggtatttacagcggcctagcttcgttttaaacagcgagccccagttgtatgatacaaaactaaacgctctaggagtaactgctggggaccaaatccatcacgctaaatacattgttactgtagctccgtagagtcggcagtgtttgagtttgaattctcctccgacttctttgacgacggggaggagtcagatagattgggcgagaggtcgcgcagcttgacaacatttcccacggacaccagattggccgcctcagccaccgagtagccaatgtccggcggtgttccctctggatagccgagatagtaatccgcaatacgtcccgcctcgcgcaatccgctcaagtacgctccatgcacagtggccggataattccgtatcgtatgctcacccgcgaagaatagccgtggcaatccttccgcatccttactggacggcggaatgaccggcgccgccagcagatcgtagtcactgcccgaggaaccaacggatacgtagctgtacgacccacgggcccagggatcgctgcgccaacgcgttaccactgtttccttgggttgtggaacagaggtattcccgaagatgttttttagcaccgacatacaacgcccgattatgatgtcatccgtcacgctctccaccagattcgctgccattccggcgactagagcgagcaacaccggagatgagcttatactccagaacagaaacatttctcctgcaattaatacgttgaacacatttaattaccaatacaatttgggctgttgaaagtctttccaggtctggtaatggatgaataggataagcaaatgccaaaagtcacatcacttacctctactcgccgtcgtgctgcccacgtgtccgaagagattagcgttgggatcccaaaaaatgcgatcgaagcagagcacaaccttattgagattcccaaatcccagccttttgatggcctgctgtttccagtccggcaatggcgggtcgaacttgactgtgttactctgctgtgactccttatgtgctaccgccactttgaggacgcccagagtaagtgtgcagacgacaaggtctgccttgtatgtcatctgcgaattggatgtcttcaagttttcagccactacttccacacctttggtgccgtactttatctccttgacggcgctattgacacggatgtccaggttttcagtaagagctacaggcacacatgaataaccgttccgcacagttgtgtggtggccaataaactcgaagtcatcgtcctgatcccagtgcttcaacgacaggttatttagtcgggtggcattagcaaattccaagttggcaaaatgccagtccaagatcaggcggtcgcgggacgagaggtacacatcgctgaacgaatggagttaattaggccatttaacgtatttcaagctttcaaagactacttgaaaggctacttacctaggtcggttctgctccagttcgtggagtttggctaacatctgcttttcctcggcatggagatcgtgaaacgtactgatcgtttcctccattttgatctgggtgttccgaatgttaaactcttggtaacagtatttcagatcgccatccgtgcctttgggtttccgctggttgatcattgccaagtgctcattctttagtttgccgatggtatctctaagggttttcagtcgacgacgctgttcaatgatcttcgtttgggtggctatgatctcctgcatgtgctgcccccgtttgtgcatcacctgcatctcctgcatactgattatccactccaaggcatcgcccagcgaaactgggcaatcgccggcgtagttaaaatcaaggcggtgggacaggtagctggctgattccagcagtcggttaaattctctctcgatcacgtcatccttctccttgggcacgggctttccatctgggccgtaaagtggacatgtctgctggatgggaactaggtccataccgatctgcttgctgaggatcgtcattggattgccatagacgccggtaaccaccattgctcccacatcggcaatatagctgttcttccgaaacgtagatatccgtccccctacccgatcccgcgcttccaagacgatcacatccatgccgaactgctgcaactggtgtgccactgctaagccggagatccctgccccaatcactatgactttgcccagctttttggcgggtataggcttaagtcgcttaaagatgccgaagttaatgaagccatgacgctccagaaacgagtgtactcgccttaccaaactgggctcgctgtcgaatggcggcggcaggttcttcagggcgatctcgaagctcagctggatcttgggattgtccacccacatgtgcaagaggctgttacgaatgttgaggaatacccgatggccgagaatgcccgagcgactgatgtccggaaagcaggcctcttcgttgggtgtcattttgttaaatggcaggcgagattggaagacggcgccctcttggccagacaaaaccgtgggcgtgccggcatcccggtccttggaatctccgttctgggacggtctggaatttccggcactgggtccggacacggaggaggaggtagcattggcttctgacttgcgggtttggctttggctgcgacgctctgcttgctggttgttaggtcccatggatgccgatcctgacttgtcattggaggcggtgtctccacttccactaggcctgttactataatccacttttggccgattgcgcctacttgtgcgtcgctcatcgctggtggcaggtgcgtcatttgagtcctcatccgggtgcttttgtttctgaccaggattgggtgctgacaatgccgacggcgggtgattgacgtttcttttgggcgtgggctcaccatcggaatcgtcgctaattagcgtcacatactcaattggctcggtcatcttggagctactgcctccgaactgggtgggtttcatctccggattatggaactgccaccgggacactgaaaagttggcccttcaaaagtggaacccgtttaaatttttctcgaactcatttccaattccaataaagctagctcacgttcgaaaatcacgaattctttagtccaccaaaccggaatattgccgcattattctttcgatatttttctgattgttccgtgattttattatcacacgttttgaggatcggactgcgggtgtagtttttttttttggtctaaactccctgcttctctgatgacaatgaagtattattatcaaatgctgtatcagctgatccatgcgtcgcttttcatattaggttggctcacagattgattttccgacatttaaaagtgcaaaatataaaaattgtttataccgttctggcggtgtggcagccgcacaacgccaccaacatctctttaccgggtacacatggtcactctgcgcgcgcattcgttttttgagcatcatacaacgcattattggaaacattaattaattcaatttaagcattaaaagacatcgtggagctaagttgtataagttatttgaggaattattattaggtacaacttaaagtacaacaacacgcaaggcgcagtgctgcgacttaaattctctgtgcgggtgtatttatcgataacagccgaaaccgaatcggtaaaattttaattacgaatgtaacggtcgttgatgatttcaaaaatgcaacaacaaagcggcaacttcgtatggaaaacgcaaaactaattgagttttctaaaaaaaaactgcggatttattttttacttcccattgtcctacgcatacatataaaaaagttcttattttcctgagcataagctctcgttttattgcaaattaactcaactacgttttgtagataaacaaatagaaacagttaacaagacggtactattaatcttggtattttcatgtggatgttgttctacattttggtaactgatcaacagaacgataaaactaattgatttctaaatttagaaagattagaaatgtgttgtctaattttaatgcgtaccatacgggcaattacctgaattttaaatgtgtgctattaatggattgctcataaagcacatagtatatgtttgtattgtacccaaaaaaactgaaatttcaagccaaatcgtaaatataattgttttgaaaacaaaataaaaacaaaaaaaaatgctatagtcgaagtccccgatatttttgaatattagtagaaattaaaaaccaaaccataatttaaaaattgttcgaaagtgtggtcgtgacagttttgggtggtttgtggaatattgatcctgatcaagaatatatactccatatggtcgaaaacgcttccctctgcttgttacatacttctcaacga

SEQ ID NO: 25361 - DNA, 3645 bp, DROSOPHILA
ccagaacggtataaacaatttttatattttgcacttttaaatgtcggaaaatcaatctgtgagccaacctaatatgaaaagcgacgcatggatcagctgatacagcatttgataataatacttcattgtcatcagagaagcagggagtttagaccaaaaaaaaaaactacacccgcagtccgatcctcaaaacgtgtgataataaaatcacggaacaatcagaaaaatatcgaaagaataatgcggcaatattccggtttggtggactaaagaattcgtgattttcgaacgtgagctagctttattggaattggaaatgagttcgagaaaaatttaaacgggttccacttttgaagggccaacttttcagtgtcccggtggcagttccataatccggagatgaaacccacccagttcggaggcagtagctccaagatgaccgagccaattgagtatgtgacgctaattagcgacgattccgatggtgagcccacgcccaaaagaaacgtcaatcacccgccgtcggcattgtcagcacccaatcctggtcagaaacaaaagcacccggatgaggactcaaatgacgcacctgccaccagcgatgagcgacgcacaagtaggcgcaatcggccaaaagtggattatagtaacaggcctagtggaagtggagacaccgcctccaatgacaagtcaggatcggcatccatgggacctaacaaccagcaagcagagcgtcgcagccaaagccaaacccgcaagtcagaagccaatgctacctcctcctccgtgtccggacccagtgccggaaattccagaccgtcccagaacggagattccaaggaccgggatgccggcacgcccacggttttgtctggccaagagggcgccgtcttccaatctcgcctgccatttaacaaaatgacacccaacgaagaggcctgctttccggacatcagtcgctcgggcattctcggccatcgggtattcctcaacattcgtaacagcctcttgcacatgtgggtggacaatcccaagatccagctgagcttcgagatcgccctgaagaacctgccgccgccattcgacagcgagcccagtttggtaaggcgagtacactcgtttctggagcgtcatggcttcattaacttcggcatctttaagcgacttaagcctatacccgccaaaaagctgggcaaagtcatagtgattggggcagggatctccggcttagcagtggcacaccagttgcagcagttcggcatggatgtgatcgtcttggaagcgcgggatcgggtagggggacggatatctacgtttcggaagaacagctatattgccgatgtgggagcaatggtggttaccggcgtctatggcaatccaatgacgatcctcagcaagcagatcggtatggacctagttcccatccagcagacatgtccactttacggcccagatggaaagcccgtgcccaaggagaaggatgacgtgatcgagagagaatttaaccgactgctggaatcagccagctacctgtcccaccgccttgattttaactacgccggcgattgcccagtttcgctgggcgatgccttggagtggataatcagtatgcaggagatgcaggtgatgcacaaacgggggcagcacatgcaggagatcatagccacccaaacgaagatcattgaacagcgtcgtcgactgaaaacccttagagataccatcggcaaactaaagaatgagcacttggcaatgatcaaccagcggaaacccaaaggcacggatggcgatctgaaatactgttaccaagagtttaacattcggaacacccagatcaaaatggaggaaacgatcagtacgtttcacgatctccatgccgaggaaaagcagatgttagccaaactccacgaactggagcagaaccgacctagcgatgtgtacctctcgtcccgcgaccgcctgatcttggactggcattttgccaacttggaatttgctaatgccacccgactaaataacctgtcgttgaagcactgggatcaggacgatgacttcgagtttattggccaccacacaactgtgcggaacggttattcatgtgtgcctgtagctcttactgaaaacctggacatccgtgtcaatagcgccgtcaaggagataaagtacggcaccaaaggtgtggaagtagtggctgaaaacttgaagacatccaattcgcagatgacatacaaggcagaccttgtcgtctgcacacttactctgggcgtcctcaaagtggcggtagcacataaggagtcacagcagagtaacacagtcaagttcgacccgccattgccggactggaaacagcaggccatcaaaaggctgggatttgggaatctcaataaggttgtgctctgcttcgatcgcattttttgggatcccaacgctaatctcttcggacacgtgggcagcacgacggcgagtagaggagaaatgtttctgttctggagtataagctcatctccggtgttgctcgctctagtcgccggaatggcagcgaatctggtggagagcgtgacggatgacatcataatcgggcgttgtatgtcggtgctaaaaaacatcttcgggaatacctctgttccacaacccaaggaaacagtggtaacgcgttggcgcagcgatccctgggcccgtgggtcgtacagctacgtatccgttggttcctcgggcagtgactacgatctgctggcggcgccggtcattccgccgtccagtaaggatgcggaaggattgccacggctattcttcgcgggtgagcatacgatacggaattatccggccactgtgcatggagcgtacttgagcggattgcgcgaggcgggacgtattgcggattactatctcggctatccagagggaacaccgccggacattggctactcggtggctgaggcggccaatctggtgtccgtgggaaatgttgtcaagctgcgcgacctctcgcccaatctatctgactcctccccgtcgtcaaagaagtcggaggagaattcaaactcaaacactgccgactctacggagctacagtaacaatgtatttagcgtgatggatttggtccccagcagttactcctagagcgtttagttttgtatcatacaactggggctcgctgtttaaaacgaagctaggccgctgtaaatacctaagactattcaactaagcatagaccactttcattcaaccaattataaattaagataaaaagcaataacacccaacaaagcaaatcctcttcagtgtttccttcagatcaaagtaaaccaacctctgtgcgcctataattgatcaacaaatgcaatcatctatcataactttccgtaccacttacccgccaatgaggagtatatcttttaagtatattatcgcctataagattgttttcaataagtattttgtaaattaaatttgaaaatagtaaattaaattgacgccgatatttttaattaggttaatttaatttaagtacaaatttcatattacttccaacttaaaaacactttcaatttttttaatatcttattgttatcttgataaaatacgatgtagaaaaatgtgtacgcaaatcatggcataaattgagttttaaaatataatgtaagctt

SEQ ID NO: 25362 - protein, 890 aa, DROSOPHILA
MKPTQFGGSSSKMTEPIEYVTLISDDSDGEPTPKRNVNHPPSALSAPNPGQKQKHPDEDSNDAPATSDERRTSRRNRPKVDYSNRPSGSGDTASNDKSGSASMGPNNQQAERRSQSQTRKSEANATSSSVSGPSAGNSRPSQNGDSKDRDAGTPTVLSGQEGAVFQSRLPFNKMTPNEEACFPDISRSGILGHRVFLNIRNSLLHMWVDNPKIQLSFEIALKNLPPPFDSEPSLVRRVHSFLERHGFINFGIFKRLKPIPAKKLGKVIVIGAGISGLAVAHQLQQFGMDVIVLEARDRVGGRISTFRKNSYIADVGAMVVTGVYGNPMTILSKQIGMDLVPIQQTCPLYGPDGKPVPKEKDDVIEREFNRLLESASYLSHRLDFNYAGDCPVSLGDALEWIISMQEMQVMHKRGQHMQEIIATQTKIIEQRRRLKTLRDTIGKLKNEHLAMINQRKPKGTDGDLKYCYQEFNIRNTQIKMEETISTFHDLHAEEKQMLAKLHELEQNRPSDVYLSSRDRLILDWHFANLEFANATRLNNLSLKHWDQDDDFEFIGHHTTVRNGYSCVPVALTENLDIRVNSAVKEIKYGTKGVEVVAENLKTSNSQMTYKADLVVCTLTLGVLKVAVAHKESQQSNTVKFDPPLPDWKQQAIKRLGFGNLNKVVLCFDRIFWDPNANLFGHVGSTTASRGEMFLFWSISSSPVLLALVAGMAANLVESVTDDIIIGRCMSVLKNIFGNTSVPQPKETVVTRWRSDPWARGSYSYVSVGSSGSDYDLLAAPVIPPSSKDAEGLPRLFFAGEHTIRNYPATVHGAYLSGLREAGRIADYYLGYPEGTPPDIGYSVAEAANLVSVGNVVKLRDLSPNLSDSSPSSKKSEENSNSNTADSTELQ

SEQ ID NO: 25363 - DNA, 3908 bp, DROSOPHILA
gtaaccattgcgtagataaacactatccaaattatttggcggctggattcgtggaagtcttcgtacggcctcccgattctcgtcgggagtcacgttgagcatctgccccggatgttccgctcgttggttttggcaggagactctcggttccggggatctgtagaactccgtgttccttcggcgcggatacatctcacaggtggtcaggatctacagaaaagcacggagataaatttgaaagaccaaaagagaaatgaaatacttacgggctgatttgaagacgtacccctatccatggttaaaaaacttttatattcgaaataaacaaattttgaaaatttagaaatttttcaatgattttgtccggttactcgaaagatatgaaaagaaacctaaccgaaacgggtgaaaatagtttatgaaaacccgaaaccataatcatggcatacttttttttagatttgcgtttcaagttttgaaattggtattggtatatcttgaaatatatatttttatattattcagacttcgagaacatatgagtctcgtctattcaaggtgatcacattgctgcgtcattcgcaaagtcttcaaaatatgattcatccgatttagaataaacaacaccttatcattagaagtatacattaatgcaaaatgttgttcaaatgtttagttgctaatcaaaagaaaatgatttcttttataaatgcataatcttattgctttttagaaactcaaataaaaaaaaacccattttattgcaaaccttccgtttactttcattcattttctgtaatgtccttttattccttttataattattttgtagaaatcaagttttgataacttttttcaagttaccccaaaaatattagccaactaatgaactgctcacgcatcgcttttcctaattgggaattacggctcccatgggaaatcctctacaggtgttgtgttcacccaaaggatatttcactggttagtctgctcgtagaacatgaagtttttggttggattgctgctccaatggtatcttcctggcatttatgcccttgccgagattgcctgtcgcatagccgtagagcagaatgtccaggtgacctatctgtaccgctgtgccagctgcccggcatccttcgatgcggattactctgccttggaattggatctctatcggtgtgtgggcagtagactgcccgtaatcacacggaacatggaagcacatgagctggaaccatttagacgaacggacagcctaagcatctttcaaattccggctgccgaaaagggtgattccttggtacgccgcatcctggacatgttgaatcctcaccagaggcgcaagcatatgcacaagtatctgtttgtttggccaaatgccggaaggcatcagttactgcgactttttcgcggcagttgggccaagaagctgctctacggattggccattaccggcagggaaaatggcacctttgactttgatccctttgcttggggtggtctccaagtgattcagcggctggatggcgaagtgccgtacgcaagaaaggtgaaggacttgcgcggctacccattgcgtttctccatgtttacggatccgttgatggcgatgcccaggagtcctgtggagacagctggctatcaggcagtggatggagtggcggcccgagttgttggcgagatgttgaatgcctcagtaacatatgtcttcccggaggataacgaatcctacggtcgttgccttccgaatggaaactacaccggcgtggtcagcgacatagtcggtggtcacacccactttgcacccaattcccgcttcgtgctcgactgcatttggccagcggttgaggtgctgtatccctatacccgtcgcaacctgcacctggtcgtgcccgcctccgcaatccagccggagtacctgatcttcgtgcgtgtctttcggcgaactgtgtggtacttgctcttggtcacccttttggttgtggtgctggtcttctgggtgatgcaacgtctgcagcgaagaattccccgtcgcggagtcatccagtttcaggcaacgtggtatgagattctcgagatgttcggcaagacacatgtgggtgaaccggcgggcaggctatcctccttcagctcgatgagaacgttcctcatgggttggatcctcttcagctacgtcctgtccaccatctactttgccaaactggagtccggatttgtgcgaccaagctacgaggagcaggtggaccgagtggacgatttggtacatttggatgtgcacatttatgcggtgaccacgatgtatgacgcagttaggagcgccctgacggagcaccaatacggtctgctggagaaccgtagtcgccagctgccactgggaatagccacatcctattaccagccggtggtccggcgcagggatcgacgagcggcctttatcatgcgggattttcacgcccgtgactttctggccatcacctatgactcgcaggcagagcgaccagcctaccacatcgcccgggaatatctgcgctctatgatatgcacctacatcctaccaagaggatcgccctttctgcaccgcttggaatctctgtacagtggcttcctcgagcacggcttctttgagcactggcgtcaaatggatctgatcacccgggttggtgcgtcgccggatgctgaggagtttctcgaggatctgggcgaccagacggacacggattccggctccaacgagttggcgattcgtaacaaaaaggtggttctcactctggacatcctgcagggcgccttctatctctggtccgtggggattggcataagctgcttgggatttgcagtggagcacgctcattggttttggcggagacagacacttcggaatgcggttgaagctagaacaagctaactaaaaatattaaaaattactaaataaaaggtacatatatgtttgttattgtaaatactatactaagttttcaataaatttcaccgctgtttagttggacatgttgttttatacattttaatgataaaactgtagttttatattattctaaccatttaatgaatttaaccatttattccaattaacctttcttgtaaatttaaatgtaacggctttttatgttgttatggcttaacattccgcgcgtaacagcacactggagacccccagtatcagagcatcgatagcacccatcgatagtccgatcaccagcaaccctgcctccggctgtcatgtttcacttccggagcttgcgaacaaaatagaatcgctaaggcaaagaaaaccctgcgagtggcgagtgttttaagatcacactcaaaaacaacatccaaagtggttagtggcagttgagagagtgcccaagaccccgaataccagccgggcagacacgaacaacaccagcagcagcagcaccaccatcatcaacagcagcagcagcatttcccgcttttcgttttcgtcgtcgccgaacaacaaataacaaaaccacgacaaacgatggctgatgccgcggagagtaagccactggccgccgaacagcagcaggcgcagcagcagccggagcagcagcagaatccgccgaatccgcaggagcaggatcacgagcaggagccgctggacgagctgcagggacagcagggccagcccgctccgcccaccaaggaagtcatcggtaaggctgaaactcgcatgttaaacccaattcccaaccaatttcattcatgtgccgcgaacacatggcggctgctaccaaaatagcaatgaaaaaaaggaggaaaaaagaacaagaaacatgcctccctgtatgcgtgtgtgtgtgtgtgttttgagtcttaaaatatacgcgcgtcggccattttgtgcggccaaaggcaacgcaacgcatgtatatatgtat

SEQ ID NO: 25364 - DNA, 1908 bp, DROSOPHILA
atgaagtttttggttggattgctgctccaatggtatcttcctggcatttatgcccttgccgagattgcctgtcgcatagccgtagagcagaatgtccaggtgacctatctgtaccgctgtgccagctgcccggcatccttcgatgcggattactctgccttggaattggatctctatcggtgtgtgggcagtagactgcccgtaatcacacggaacatggaagcacatgagctggaaccatttagacgaacggacagcctaagcatctttcaaattccggctgccgaaaagggtgattccttggtacgccgcatcctggacatgttgaatcctcaccagaggcgcaagcatatgcacaagtatctgtttgtttggccaaatgccggaaggcatcagttactgcgactttttcgcggcagttgggccaagaagctgctctacggattggccattaccggcagggaaaatggcacctttgactttgatccctttgcttggggtggtctccaagtgattcagcggctggatggcgaagtgccgtacgcaagaaaggtgaaggacttgcgcggctacccattgcgtttctccatgtttacggatccgttgatggcgatgcccaggagtcctgtggagacagctggctatcaggcagtggatggagtggcggcccgagttgttggcgagatgttgaatgcctcagtaacatatgtcttcccggaggataacgaatcctacggtcgttgccttccgaatggaaactacaccggcgtggtcagcgacatagtcggtggtcacacccactttgcacccaattcccgcttcgtgctcgactgcatttggccagcggttgaggtgctgtatccctatacccgtcgcaacctgcacctggtcgtgcccgcctccgcaatccagccggagtacctgatcttcgtgcgtgtctttcggcgaactgtgtggtacttgctcttggtcacccttttggttgtggtgctggtcttctgggtgatgcaacgtctgcagcgaagaattccccgtcgcggagtcatccagtttcaggcaacgtggtatgagattctcgagatgttcggcaagacacatgtgggtgaaccggcgggcaggctatcctccttcagctcgatgagaacgttcctcatgggttggatcctcttcagctacgtcctgtccaccatctactttgccaaactggagtccggatttgtgcgaccaagctacgaggagcaggtggaccgagtggacgatttggtacatttggatgtgcacatttatgcggtgaccacgatgtatgacgcagttaggagcgccctgacggagcaccaatacggtctgctggagaaccgtagtcgccagctgccactgggaatagccacatcctattaccagccggtggtccggcgcagggatcgacgagcggcctttatcatgcgggattttcacgcccgtgactttctggccatcacctatgactcgcaggcagagcgaccagcctaccacatcgcccgggaatatctgcgctctatgatatgcacctacatcctaccaagaggatcgccctttctgcaccgcttggaatctctgtacagtggcttcctcgagcacggcttctttgagcactggcgtcaaatggatctgatcacccgggttggtgcgtcgccggatgctgaggagtttctcgaggatctgggcgaccagacggacacggattccggctccaacgagttggcgattcgtaacaaaaaggtggttctcactctggacatcctgcagggcgccttctatctctggtccgtggggattggcataagctgcttgggatttgcagtggagcacgctcattggttttggcggagacagacacttcggaatgcggttgaagctagaacaagctaa

SEQ ID NO: 25365 - protein, 635 aa, DROSOPHILA
MKFLVGLLLQWYLPGIYALAEIACRIAVEQNVQVTYLYRCASCPASFDADYSALELDLYRCVGSRLPVITRNMEAHELEPFRRTDSLSIFQIPAAEKGDSLVRRILDMLNPHQRRKHMHKYLFVWPNAGRHQLLRLFRGSWAKKLLYGLAITGRENGTFDFDPFAWGGLQVIQRLDGEVPYARKVKDLRGYPLRFSMFTDPLMAMPRSPVETAGYQAVDGVAARVVGEMLNASVTYVFPEDNESYGRCLPNGNYTGVVSDIVGGHTHFAPNSRFVLDCIWPAVEVLYPYTRRNLHLVVPASAIQPEYLIFVRVFRRTVWYLLLVTLLVVVLVFWVMQRLQRRIPRRGVIQFQATWYEILEMFGKTHVGEPAGRLSSFSSMRTFLMGWILFSYVLSTIYFAKLESGFVRPSYEEQVDRVDDLVHLDVHIYAVTTMYDAVRSALTEHQYGLLENRSRQLPLGIATSYYQPVVRRRDRRAAFIMRDFHARDFLAITYDSQAERPAYHIAREYLRSMICTYILPRGSPFLHRLESLYSGFLEHGFFEHWRQMDLITRVGASPDAEEFLEDLGDQTDTDSGSNELAIRNKKVVLTLDILQGAFYLWSVGIGISCLGFAVEHAHWFWRRQTLRNAVEARTS

SEQ ID NO: 25366 - DNA, 3481 bp, DROSOPHILA
gggcacctgatcttccgcctccacaatctcaatctcgtcttccggctcctctggttcagtcgacaagttctcctcggagaagagcttcagcaggggtctggagtgggaggattccaattcacgttttgatttcagctgcaggataatctaaattatgtagtttcagcttgacttgtatgggtataaaagtgcagtacttacagtctgctcctcctccaaagaagcctcaatctcatcatccagatcgctgtactgggtctccggatccatggtgacctcatagaactgctcacactgcgtagaataggatgtcggccgcctggtcttcggtttctggacgcgcggcgacggttggctagctggtggcgcgggatcatggtcgtaggagtgactgccgtcggtgagatggccgttctgcttgatataccgtacgtggcacttgtggatgcgcagattggaggtggtgccgccggtgctctgcatcacacgcttgcagcccatgcagaagtatcgccatttcaacttggtgccgtccggacgagcgatttcccggtagacgttccaaacggaactgcgcttgttcttcttcaccagccgatattcaccggagttgatcttcataaggatgtccagctgcgcctccatgcacttctcctcctcgggggcgtgtatgaaaaacatatttcgcctcgcaatccttatggtcatagtaaaaaaaattaaaaacacagagctccgaaccaggtggcatcaccggtgagttggttgcgatgttcgattacaatcgatatcgacattctatgtaataccatgtatcgaatttaatttaataggaaaagaaaaaatattaaccacacaattaaaaaaataaaatacatataatgtcatctacaacaaatattctaaaaccaatcaaattaatagttatttcactacttttcgtttcaaatttcagatatacatggtttatatataaataaattatataaacggcgaagatattacgacttcattttattaaatcttaaacatatctgctgaattgtaataaaacgcaatgaatcacaaatcattttatacttattcgtatttgaaataaaaaattgagtgactgccgaaatgagatatttaaactttctgttacatgatttttttaaaaattcgttgaatgtgatgccttttaagtttacgttaataacggtggaaatgaactttattgtgcaatcactcaaatcgcgaacaggtatttatgcatgtgcgccgcctttgggattagatagaagatccatgaagtccttatgaaacgacgacatctctcgcacgaaaaatttcatcagtttgcattttttcctctctatgaccagcttttcctcctctatttccataattctggcagctctttgacgcttagcaattttcatgtcctcggtcttggaattctgttgatcgagctcgtcttcatagttttcctgggaatgaactgtggacgactcttcgatttccctgattatgttatccttcagaatacgcagttcatccacgtcttcttgtgcttcatccgcatattcgttcatatcgaagctatccccttctccagggtgtactttttgggaccttaagtagttcctatctatcaatggttcgtcaagttgactgccaaatgaattgtgttcgctggtcgtattgggtgcacttccagacttatccagaggcatattgtcaattatgttacgatcggaactaaatatcatcttcatggtctcgaagtattcccactgggatttgtgtccagttgtcttttccatgtgcgattctcgcctgaaataaattgtaatattagataaggaatatgcttaaataagtatattcacttattaccgatactgttggcccatgtcatcaattttgttctttatctccgtgaacgtgaaacccagtgacttcatctcgcccgtcattttccagataacctggacccgcttgcgtgagtctcgcaaatcgacgcagtgccttgcccaaagctcgagcagcagttcgaccgcgtggaatgaccactcggacggctgaaaggagttccagctcaggcggcgctccaacgaatcctgcaagtgagacatggtaatttggactactattgacttctaatggcgtcgttgtacgtacgtctagtttagggggatggatttccgcgatcccctcctcgcacagttcctcggtacgcaggtagtccacatggcacttgtgggtgcgcagattggacgtgttgaaggatcgcatgacgcgcttgcagcccgtgcagaagtagagtccattgattatggcaccatcggtgcgcacgatttcccgatacaccttccacacggagccgcgctgcttgcgtcgtagtagccggtactcgccgcggagcaccttcgccgagatcacctggttggattcgaattttgatacgtcctgcatcgtgcgggcctcaatcatgtcgtccttacgctcgaaaagtataaacaaaatgtgcctagagatgggcagcagctcgatatcgatttttctagaaatggtcggtattggcttcatatatctatcgatagttctatgatatcgatttaaattatatctaaaatacaaataaaaaaacattttacgaattgagaaactaaatgtaacaaatacgatttaaaacaaatttataatattaaagtaaagtaagtaattaaagttttgctaaaaaaagtaaaatataatttcattgcatttatttttacttaagaaactaatttgtaagatcataacaatgcaaaatctagctttttacaatatatatatatatatttagattaatttgaagttgaagcaatattacattaaatattcactgttttagttgtatattttgctgaaaaagtaacaccacgctacttctacgtataacacttaatatttacactactgattgttatgcttaagcaaataaacaatatctttgtgaaatgcgtttagctccagcagtgcatccttcataacctgcagcttttctcgctcgatcgccagtttttcctcctctatttcaaggagtctgtccgaatggttgttcgatgctttccgttttgtctgacattttgaaattggcgatggggagagatccttcatgtggtcatcatcctcctcctcctcctcctcctcctcgtcttcttccgggatttccggaatactgggagagggagttcgcgttcttttcatggctttgctagcaaccatatcactttcgaatacgttcccatcgtccccggccataggctcgtcttttaatgaagacaattcctcaggctcataatcctcatcgctgaacaaagcttgagctgtaaaattagcgtatttttaagacataatgacataactagcatttattgcactacgactttacctggattttcggcggtaatatcttcgaagacatcaactgatttcgtgccaatcagaagtgctt

SEQ ID NO: 25367 - DNA, 1360 bp, DROSOPHILA
gacgacatgattgaggcccgcacgatgcaggacgtatcaaaattcgaatccaaccaggtgatctcggcgaaggtgctccgcggcgagtaccggctactacgacgcaagcagcgcggctccgtgtggaaggtgtatcgggaaatcgtgcgcaccgatggtgccataatcaatggactctacttctgcacgggctgcaagcgcgtcatgcgatccttcaacacgtccaatctgcgcacccacaagtgccatgtggactacctgcgtaccgaggaactgtgcgaggaggggatcgcggaaatccatccccctaaactagacgattcgttggagcgccgcctgagctggaactcctttcagccgtccgagtggtcattccacgcggtcgaactgctgctcgagctttgggcaaggcactgcgtcgatttgcgagactcacgcaagcgggtccaggttatctggaaaatgacgggcgagatgaagtcactgggtttcacgttcacggagataaagaacaaaattgatgacatgggccaacagtatcggcgagaatcgcacatggaaaagacaactggacacaaatcccagtgggaatacttcgagaccatgaagatgatatttagttccgatcgtaacataattgacaatatgcctctggataagtctggaagtgcacccaatacgaccagcgaacacaattcatttggcagtcaacttgacgaaccattgatagataggaactacttaaggtcccaaaaagtacaccctggagaaggggatagcttcgatatgaacgaatatgcggatgaagcacaagaagacgtggatgaactgcgtattctgaaggataacataatcagggaaatcgaagagtcgtccacagttcattcccaggaaaactatgaagacgagctcgatcaacagaattccaagaccgaggacatgaaaattgctaagcgtcaaagagctgccagaattatggaaatagaggaggaaaagctggtcatagagaggaaaaaatgcaaactgatgaaatttttcgtgcgagagatgtcgtcgtttcataaggacttcatggatcttctatctaatcccaaaggcggcgcacatgcataaatacctgttcgcgatttgagtgattgcacaataaagttcatttccaccgttattaacgtaaacttaaaaggcatcacattcaacgaatttttaaaaaaatcatgtaacagaaagtttaaatatctcatttcggcagtcactcaattttttatttcaaatacgaataagtataaaatgatttgtgattcattgcgttttattacaattcagcagatatgtttaagatttaataaaatgaagtcgtaat

SEQ ID NO: 25368 - protein, 368 aa, DROSOPHILA
MIEARTMQDVSKFESNQVISAKVLRGEYRLLRRKQRGSVWKVYREIVRTDGAIINGLYFCTGCKRVMRSFNTSNLRTHKCHVDYLRTEELCEEGIAEIHPPKLDDSLERRLSWNSFQPSEWSFHAVELLLELWARHCVDLRDSRKRVQVIWKMTGEMKSLGFTFTEIKNKIDDMGQQYRRESHMEKTTGHKSQWEYFETMKMIFSSDRNIIDNMPLDKSGSAPNTTSEHNSFGSQLDEPLIDRNYLRSQKVHPGEGDSFDMNEYADEAQEDVDELRILKDNIIREIEESSTVHSQENYEDELDQQNSKTEDMKIAKRQRAARIMEIEEEKLVIERKKCKLMKFFVREMSSFHKDFMDLLSNPKGGAHA

SEQ ID NO: 25369 - DNA, 3336 bp, DROSOPHILA
attgctgcctcggttgtaattgttgtggttgctacttctgccacgattataaccttggcctcctctattattgttatttggacttcgtcgataatacagtactgtgttaccttgacctgttatctccggcaactgtttacaaatttggaaatggcagcacaacacgcacacatgtacgcgttctcgcctcttgtttttacccacacaagcaagcaaattctatttttagatttcttatgctctcagcgggagcgagcggaaagagtgcaattttggccgtcactaaaaaagtggctgcatagtgccaaaccaatatatggccgttactcatcttgttattctagtgtctttggcaaaaccctccactgcacagtggttttttatgtgttttttttttgcagaatttcgaaatgaagacctatcttcaccaaatttggtttgtggtctttaggactaccgactgcgccagttatgataagtaggttcttgtgggttgatagaggttgcggggagttgcggagtgtcgtcgagcttggtatttaatttggattttattaagagaaattaaacgtctgttcgttttgccttcgattttcagaatgaatctttattctgtggtgtcgaggggtatcgatgtttgtagcgactcagaatttcaagtgccgttcgataccaaatacttgtggatatcatctaaatctccgattgtcaagaggggcctcggcggtgcccgccgagggtaattgctgaggcgacacttaagtctctggctgacgagggggtttcggcggagggctgccgagggcgtatgctgaggaggtaactcgagttttttggagaatgggaagtccatcggccaattttatttggcctacacacagcagatcagagaaaaggctagcgcctatcagcaagtcaatttttttgaccctgaagaattgggtataggccaagtgaagattagctggtattttccagtctttagagtttacaattagttgggctagttgtccgtgatagtaggagctaccaaagctgcgatgttggcaacgaactcttaagtttgggatttgagattaatatttaccatacattcatctgctctaaatctggctttaccaattccagaaactgtagctgcagacatgtacttgggcaattctaaagtgtgtgccagacgagaggttattatgtgtagttgcgagccggagtcaagcaaagcgcgacaaggaacccaagatcctgatttattttaaatactgatcacggcagtggccaacaacacaaattctgctccgagatttttagccactatggaagaagattgtccaaggcatgattcctgcgcaactacttgcaatgcgttggaatgagcatcagaagctagctgaggttgagcaggctggaagcgagatggcgaaggccttgagccaaaatgtagcaatatgttgtgcttcgttccacaaatacgacagcgatcggcattgcaatgtcgcatgtgatgtccacctttaaggcagttttggcataaagccaacatttttgcctcctgtaagcgatcttgaggcgacagttttctgaattgtgggcaatcgaaaattgtgtggtctacagcattgcagacagggcagcaagcgacaggggtagtgtcgacaaatgaatttctagaattgtggatggctttcctaggttttacaacctgtggcatgattccaagtgcaacattggcacgttcaatgtttccaaccttctcgcaccttgtctctaagaacttaacaaatttattacattttggaagcctttcagtgaggatgctgcctcccataatagctgggtttcacggtcgatttttggagaagacaataaatgagaatacactcgggatattttcacaggggtgcccaagttgtgaagtgtttggtcggacatttcacgcagctttacataaaatgacattttaccattggtaggtttatgatcgccgaaatgtgagactcaaaaataagccgcttattgttgtagcgcttatccaacaactctagggcagacgggtaattggcatcaataacctctaaagcaccaacggcatccaaagcgggagctcttaggcaagacttgaggtgttgaagcttctccatgtcagctagtactgggtttttaccgatgacagcggaaaacatcgacataaaatctgtgtattttgtataaattccactaaaggttggtagcttcaggtcaggcacattcggtcgtcgaaatagggaacaagaagatcactcagttcctggatcttgacgcatagttgaacaatcagtctctcgcactttgcgtctactgagttccgtatttatcatacaccgcatgaactgaactggtcacgcaattcgcttcccatttgtctgagatccagttcctctagggaatcgtgagccaagttaaactaggcctctgtctggtttattaaatccagctttaaatgcaggccatcatcattcagacaggtgaccgattcggtgggtaatcctgcagcaatttttgtagcgtcgacatatatggagttttccttgcgttttaaaaatgtaatcccctcagttggcaaactgactgtgtcgttgtttgacattttaatttatttaattacactgaattttaacccggtcatttaaaaatgcacgcacaattgtgaacagttttacatgcactgtatttgcacctgcgaccaaactgcacacacaatagcattgatgtgtgtgagtgtgtttctgcacaaagtcaattctttttgcacaaccgaaacgacacgaattgggtcaccaaatgtttaggcatgagcttcttcattgactttgaaaaatggtgtgacaatttatacgcacggtagagttaatctttaaattaatatttcagtttatttcaatatacattttgccacacagggctgtagggtataacaaaggcaccagtgcccgtaccgaaccgataaatagttaaagtgtatcacagcaataacaatgcgatcaacacatgattggtaactgaacttgctatgcaaaggcaactgagcaagttttacagaataaagattaaaacagctgtgctcgctctctattgagagaaatgaacatatcataaagggaatgcaaaatctattgctgcacacagcaatgtataagagcgataaataaaataactcaaatttatgatgagctgcagctgccttgtgtttgtcagcgatagtttctcaatataccagcgatgttctttatcctcctcattctcaagagctttcgttagggcgcgtgttgccgtctttagccggtgctttgtggctggtga

SEQ ID NO: 25370 - DNA, 1143 bp, DROSOPHILA
agtagacgcaaagtgcgagagactgattgttcaactatgcgtcaagatccaggaactgagtgatcttcttgttccctatttcgacgaccgaatgtgcctgacctgaagctaccaacctttagtggaatttatacaaaatacacagattttatgtcgatgttttccgctgtcatcggtaaaaacccagtactagctgacatggagaagcttcaacacctcaagtcttgcctaagagctcccgctttggatgccgttggtgctttagaggttattgatgccaattacccgtctgccctagagttgttggataagcgctacaacaataagcggcttatttttgagtctcacatttcggctaataaatttgttaagttcttagagacaaggtgcgagaaggttggaaacattgaacgtgccaatgttgcacttggaatcatgccacaggttgtaaaacctaggaaagccatccacaattctagaaattcatttgtcgacactacccctgtcgcttgctgccctgtctgcaatgctgtagaccacacaattttcgattgcccacaattcagaaaactgtcgcctcaagatcgcttacaggaggcaaaaatgttggctttatgccaaaactgccttaaaggtggacatcacatgcgacattgcaatgccgatcgctgtcgtatttgtggaacgaagcacaacatattgctacattttggctcaaggccttcgccatctcgcttccagcctgctcaacctcagctagcttctgatgctcattccaacgcattgcaagtagttgcgcaggaatcatgccttggacaatcttcttccatagtggctaaaaatctcggagcagaatttgtgttgttggccactgccgtgatcagtatttaaaataaatcaggatcttgggttccttgtcgcgctttgcttgactccggctcgcaactacacataataacctctcgtctggcacacactttagaattgcccaagtacatgtctgcagctacagtttctggaattggtaaagccagatttagagcagatgaatgtatggtaaatattaatctcaaatcccaaacttaagagttcgttgccaacatcgcagctttggtagctcctactatcacggacaactagccc

SEQ ID NO: 25371 - protein, 246 aa, DROSOPHILA
MSMFSAVIGKNPVLADMEKLQHLKSCLRAPALDAVGALEVIDANYPSALELLDKRYNNKRLIFESHISANKFVKFLETRCEKVGNIERANVALGIMPQVVKPRKAIHNSRNSFVDTTPVACCPVCNAVDHTIFDCPQFRKLSPQDRLQEAKMLALCQNCLKGGHHMRHCNADRCRICGTKHNILLHFGSRPSPSRFQPAQPQLASDAHSNALQVVAQESCLGQSSSIVAKNLGAEFVLLATAVISI

SEQ ID NO: 25372 - DNA, 3514 bp, DROSOPHILA
acttgcatgttagaaagtacacatatttttaagttagagcaacataagctacaccctaagatcctcaacttaaaacacgggccccttaaaattggagacaaattgatctaagccggcgaggacaaggaaataggcccacatttgaaatgcaggaaaaaataccgtaatccctcttatagtattattaggttccctgtgcacttaaaggcgcataccgtcggtggacttactatatgtttttggccaggtaatggatcttggcgcagttcttgtccgagacaatgggtccctcggtggctcgcgtatcggcgcccagaataacaccatccttgtagatgatgccaacgattgtggttcccgtcttggtggtggtcggtggcttgaagcctcgattcaaaagagttgcattgctgaaagcaaataaaacaccaattaataaaagccgatggggtattgctgaacaacttggacgattcttaccgcttgcagttgtcgaaattgaaaccagcgcggggcagatcgcgtgcgttatccaaatccattatatatattcttcaattcaactatattagcaaggaaaactaaggttttaattctgccgagcgcgatgacaaacaaaattgttaaatgcttgctagagctggaagtacaatcgatattgtatcgatatatattcatggactcaactagagcgatagtattgaagaaataaattattaataatttgacgttattaataatttgacttatgtaacttaaattattcaatgttgtattattttaatattttaatgttgcattgtataattttaaaactttttaatgtttggaaatattccccgcagtatacatgcaataagtgcttaggaaggccccttatcttttgtaagcgaatagtcatgtttgaaaaatatcgatatactgtttccacctgaccatcttggcatagtaccatcacttttgtgaactgcatccctgaagagtattttggtaatttaccatgtctgcggccaccaaattacataaaacaagctggtgcgccctgcggcagcttcaacaatacagaactaagggtaagtaacactaattaggagtccttttattgaccaaagatggaggaagtggtttacataatgccggcagtcattcacgttccgcggagctcttcggctagtgatggcagttcgttgatgtcttggcggaaaaatcgctagaatttctatagatcccagttattattttagatagtcaaccataatttaaattcaatttgttgaaactgtactataaaatatgtcttttaacttattaattatccctacagccaactttagtggcagttctgcatcgttagccaagcggaatgacctgttcaaccaggagcagcgccgtcaacgggatgcagtgggtcgaatcgataagatcgaggtgcggtatctgggacttcccgaggatgtcactctggtgatgaacggcaacatctcaacgcccttcaattgcgcccagcatctgagtgaggggcactgtaagcgatcggcactggccttgatcgacggcagtgttccctgggatatgcacagacccttgcaggaatcctgtactctgcagctgcttaacttccatgtttccgagccacatgtggtcaacaagtgagtgctatactatttataatatggcatttatattaaacttgcttatgttgtttacttttagagcattctggcgcacttgcagctttatgttgggagccgccttgaaccgcgctttcaagccggaggccaatcttcagctccacagctttcctggacccaatagtaagcagaatcactttttaggatttaagattaggatattttttttactaggtttcgtctttcccccttttaattggatgaaaatttcatagatatatatcttaaaactaatactgtctggaatattctataagcgagacaaattataaaattactcctattacatttcacagtcaaatcaggtagcttcgtacacgacattgtgctccaaacccagaactgggagccaggaaaagaagagatgcgcgccctttcggcagagatggttaaactggctgctcaggatctgcgcatcgagcgtttggacgtccaacaggatctggcccaggagatgttcaaggattccaagtataagagcgaacagttgcccagcatctcgcagcagaccaatggaagggtcaccttgtatcgcctgggtgatcatatcgacatctcacgcggtccaatggtggcgtctaccagctttttggggaaatgcgtcatctcggctgcccacaaagttgcggaggagggtccctctggtgctttctatcgcattcagggcgttgcactgccgtctggcttccaactgaatcatgttgcatttggtgtattggaggagcgttctaagaaacctgtgagtatatctcgacgtttttcgataaagagctgtgtcacaaatttaaaacacattttagagccccgcacgactgcccaatgaaccatttgaggaacaacaacaactgcaattatcttaaaacgttctttaatatttaaaactatactgtaagtgttaaaaaagtaaatcattaaagagcgtcctaatttgttataacaaagaaaatccgtctttaaaaggatatgagcaaacaaaattctgcttttaccattttaacttacaagctaattatcttatggaatgaaattctggatagctcttattatttatagatttagcattcgtaaggcagaatttatataaaagaacactttggtcttattttacgatttaatgattctatattcttttaattgccaatgctagggtttctcttttttgctcacagttcttttattttaattgtctctttaaaaacatttatattttaatattaaagtttcaataacactaaggaaggtgctgtttaaatcatacataaagctgaccacagactaacatttggtaacgatttcatctctaacaagtaaggcatgcttaaagaagcaagagaatcagagattccacagaaacatattcttaaactactatctacaataagaaaacaaaattaacaaagctgtttgagactcagagctattctttaaaagctcttgaacaggccctctaaatcgtgttcattgagggcaatagccaacattatcagtccacccagaaggataccaaaaatttgtattattataccctttggatctttggccttttccggattgtgggccacactcattgtgggcaccagatcggcaaaagcaatatacaggaaggaaccagcggtggctgcataaatccattgggtcatgccgtctccaattccagcaataaagagacccaccgacatgcccacaaagctaagaactgagctaacaatgttcatatagacggctcttcgcatggagacacctgtttgcagcaacagagcaaagtcgcccagttcgtgtggcaactcatggcagagaacggcaaaggcggtagcaaatccagt

SEQ ID NO: 25373 - DNA, 1026 bp, DROSOPHILA
atgtctgcggccaccaaattacataaaacaagctggtgcgccctgcggcagcttcaacaatacagaactaaggccaactttagtggcagttctgcatcgttagccaagcggaatgacctgttcaaccaggagcagcgccgtcaacgggatgcagtgggtcgaatcgataagatcgaggtgcggtatctgggacttcccgaggatgtcactctggtgatgaacggcaacatctcaacgcccttcaattgcgcccagcatctgagtgaggggcactgtaagcgatcggcactggccttgatcgacggcagtgttccctgggatatgcacagacccttgcaggaatcctgtactctgcagctgcttaacttccatgtttccgagccacatgtggtcaacaaagcattctggcgcacttgcagctttatgttgggagccgccttgaaccgcgctttcaagccggaggccaatcttcagctccacagctttcctggacccaatatcaaatcaggtagcttcgtacacgacattgtgctccaaacccagaactgggagccaggaaaagaagagatgcgcgccctttcggcagagatggttaaactggctgctcaggatctgcgcatcgagcgtttggacgtccaacaggatctggcccaggagatgttcaaggattccaagtataagagcgaacagttgcccagcatctcgcagcagaccaatggaagggtcaccttgtatcgcctgggtgatcatatcgacatctcacgcggtccaatggtggcgtctaccagctttttggggaaatgcgtcatctcggctgcccacaaagttgcggaggagggtccctctggtgctttctatcgcattcagggcgttgcactgccgtctggcttccaactgaatcatgttgcatttggtgtattggaggagcgttctaagaaacctgtgagtatatctcgacgtttttcgataaagagctgtgtcacaaatttaaaacacattttagagccccgcacgactgcccaatga

SEQ ID NO: 25374 - protein, 341 aa, DROSOPHILA
MSAATKLHKTSWCALRQLQQYRTKANFSGSSASLAKRNDLFNQEQRRQRDAVGRIDKIEVRYLGLPEDVTLVMNGNISTPFNCAQHLSEGHCKRSALALIDGSVPWDMHRPLQESCTLQLLNFHVSEPHVVNKAFWRTCSFMLGAALNRAFKPEANLQLHSFPGPNIKSGSFVHDIVLQTQNWEPGKEEMRALSAEMVKLAAQDLRIERLDVQQDLAQEMFKDSKYKSEQLPSISQQTNGRVTLYRLGDHIDISRGPMVASTSFLGKCVISAAHKVAEEGPSGAFYRIQGVALPSGFQLNHVAFGVLEERSKKPVSISRRFSIKSCVTNLKHILEPRTTAQ

SEQ ID NO: 25375 - DNA, 6085 bp, DROSOPHILA
tccgggtgcttaacgatatcataacacagttcgatagactggtgagcttcctttaccaaattctaatatgggtattctaatatttccaaacgatcgcagttgactgcttacagggaatattacgtagtcgagaagatcaaagtcgtgggctgcacttatatggcggcctgtggattggactttaacctggcgtcaaacatccgccaaacggaccactttcgcaatagttccctacatgttgagggtaagtgattaatcatgaattaagttttgcaatatctgttgctttaacattcctcagaaagtatagagatatacttcctaacttataactatcatcctatcctctcattccagtggaacacgcacgtaatcatcgtatgaccgacgaaaactacgacagcgatatgaacaatgatgaagtggtcttcataatgaccaccttcgccctggacctgatgcgaactctagcagcatgcaaccgggcgtactcaagctcatttttcgagcggtccttgtcccaggggaagatctgcatcggtatctccagcggtgagataatggccggcgtggtgggagcttctcagccgcactacgacatatggggaaaccctgtgaatatggcttctcgaatggaatcgacagggctgcctggacacatccaggtgacggaggagtcagcgaaaattcttcaggagtttgacattaaatgtatataccgcggcatgaccttcgtgaagggtcgtggtgacatacccacctattttgtgggcattgacgagaaccttaaatttatgtccgcaaaattggtaaatcgtagtttgtcaagacgtttctcagttatgtcttcactagatccggatagccttaggaagagttcgtctagtgatcaagaatctggcgaataacttggtatattttttcaaacatttccgaaaaaaaatatatatttttgatatgtaaccttatgcttttcaatcagtgtgtgtggaatatcattctatattaaatcgagatacaaaaaaatttttagaatcattagggacttttaagtagtagtataggctttattaataagagcgattttcaaaaaatccaaaatatgtacaaaaaaacagcgtatgcgccaaggaaatgttatctggactacactgatgagcgactgtgggaacggggctatttaaaggtgaaaaaatcccccaatcttcaggatacttaatggtttccttgcaggccaaatgtaaggaattgtgtctagaagaagagtataaaaaatatcagatccgccttatgatcagttacctcaccgtcttcttccctttgtttatatttgtggtcgtaggatgcgagctctgtccatggattttctctgaggtgagagttcaaacttgatccataatgcgtttctgataagtctagctaaaccttgcagcaaaaaaaactcatctactacgaatcattaacggctatagttgtattagttgccgttcctggcatattgagcattaatttctttgagagctttgtgcttcgccacaggtggattatggtgttttcttcaatattgtccgcgtatattgtggtattagttggtaagtttattagccatgaccccatctgttgatccttactgactttcattttcagatatatttcagatactagtgttccatttcaagtatcactggccacttaatacattatacgacgtcttcgtcctctgcatgatttacatgttcttgccaattccttcgatcaggggagcagccctgttggccacctctgtcagtctcatgtacattggattattcatttactttttaaagtctgacgatgaagatatttcagaggtagttcatgaccttgatacgatttgcgtcgacatatttcactatttgggtttcaatctgatggggattttctttcggataatgaacgacaccatggtgcgctcttcctttctggatcggcaccagttcctcaaggaggagatgtggctccgacaagctcggcaacaagagtctatgcttctggatagcatacttcccccccagattgcaaagcccatccaacaaagcattaaggaaaggatcatgttgtccgaaaccgattcagaccgcatcgtcgtgaatgcccggcgaacagaaaactttatggccatccaaatccatcccgacgtttccatcctgtatgcagatgtggtgaactacacccatttaacgacaacactgacggttgagaagttggtgaaggtcctgcatgatctatacggcagattcgatatggctgcttctactttcaaggtgcagcgcattaagttccttggcgattgctactactgtgtggcgggtttgggggaagctgatcccgatcacgctaggatggctgtatctctgggaatttccatgattgcaaacattcaggaggtgcggtatgtttcccataaaacaaaccaccaaatatatagtaataacccttcacaatccacagggcccatcgtgcactagatatcgatatgcgaattggtgtccattcaggaacattgcttgcaggtgtgatcggacaagccaagctgcagtatgacatatggggtaggtctaacccaggtgttagtggctttgttatctaataattgacatatcaggtcccgacgtggatattgccaatcgactagaggcaaccggcaagcccggttatgtgcacgttagcggtcgcactttaagtagcttgaacgtagctgagtacacggtatttccgggaaccgaagtggcccaaagtgatcccatactgcagaaacaaccgatgaccacctaccttcttacggccgctcccagccgcaattcagtcagatctgtggatgcagtgcactcctacgctgagatcgacataaacgctttgggagcttcccggaaaagcccgattttgaggccaaccttaatgtccgatgaattgcgtgaggagtttaaaaagatgccagtgggaggcttcaagtaggtgttcaaagaaaattgaataatattcagtttaaaaattaatattgtgcacagcattcgatcgccgtgctgccgagacaattcgaatgatgagaaagtcaaccacggcttaggcatgttttgtgtagccttcaaggattcgtctctcgaatggagttatttgcataagccagatttcatcttgaaatactcagtgcttctagcttggggaatcgggtgctgccttatctatatccagatagtcaacgacaaattcaccatttgtgtagaatgcatcgtgatcgacatggttgtatttaccttcctgacttcattgctctttatctcctggttcaaaaaagtgtgttggtggagatgcgtcgaaaatgactcccgtaagtatgggagagtcagctgcaagttgttcaagatttgggaaagaatccagcacagttttgttctgcgagttactatatatatgagtatagttgcgagctattacttgttaatctctacgatactggtaagtttagagctactaagtatacacccttgcgttaacgaatcttatcattctattcagctaaactgtgacaaaaatcaatatgagctagatgttatcaatagcaagctctatcactatgacattgttactgacaactgttttaatccgtgggtcttcacagacatgatttccctgatcgtgggcgtaagctacaccttcgcccgaattccatttgccctaaagatgctcattacatgttgcgcaaccgttgcttacttggttatcgtattctttcagtactcatttattttcgagcacagtgccaccacaacaccatttatgaaggcggaactagctcattgtcttcgggtgtgcatgatgttactcacgatgtacgcaaaggagcgtcagtcagagtttaatacgaaaattaactttaagtatgtttttaatgctctttctacttctcaataaagagaattttcgccttgttaacaggatcaatcaggatttgcaaggcaagcaaaaagcggctgacatcacgaacaaatccatcataattctactcactaacattcttccctcccacgtgggtcagttcttacctgaatacaagcccaaagcttagggttcttatcaaacacgctttcacccacagttgaggtttatctcgattcagtagccaatcacgaactgtactacgaaaactataaaatggtgtccgtcatgtttgccatgctcatcaattttcaaatggatttgcccagccttcgagttttaaacgatattataacagaatttgatagactggtaagcttatgtattgatttctagataataaggtatcatcactttcgaacccagttaaatgcctacaaggaatattatgtcgtcgagaagattaaagtcgtgggctgcacttatatggcagcttgtggacttgattttaccctggctaagtcaaaatttggaagcagaacacatgcttcttactcatccgaatgtaagtacaccctcttgatggacttccaatgatgaagggtttaaattttgttaataaactcatttcttttagtggaacaggtgctttatcgcaaagagtccaaaggcacagaaaatgaccacgatgaggtggcctttataatgaccacgtttgccttggatctaatgagagtgctttccgtctgcaataaggcatacgctggtagacccttcgatcgtgctctatctaccggagagatctgtatcggaatctcaacgggtgaaataatggccggagttgtgggggcgtctcagccacactatgacatctggggaaaccctgtgaatatggcttctcgaatggaatcgacagggctgcctggacacatccatgtgacgcaagagacagccaatattctcgagcagttcgatattatgtgcatgtaccgtggcatgacctttgtaaagggtcgtggcgaaattcccacctactttgtgggcatcgacgataacttgaagtttttgccctcaaatgtgaagaagaacaatatgtcaaagcgtttttcaatcttgtcctctctagtgccagttcacagccgaagtacaacttcaagtgaatacatttaatactttttaaaatttttagagatttatattctgtacgctacctcgtataagatattttcaatcatttatatcatatgttataatatgtaaaataaaggttaatgacattcaattaagttaaatgtaggttcatgggtctaagcaggctttgagtcctggaacctagttctcattcatacaataactcaaacgtaaaaaaaatactacttaaaaatatgaacaaaaaaaacacttacaaaacgccgtacagggaaaggtttaggcgatgtaatctggaatatactaatgaacgcctttgggaacaaagttatttgaaggtaagaaatttgctcagatatccgtttcttaaatgcaacagatattcgtaggccagatgtaaggagttgcacttagaggaggaatatatgaaatataagattcgtttgatgatcagttcccttaccgtttttgtccccatgttaatactactgatcgtagctcttcaagtaatcatatggtcatttaccgaggtaagcgttttcagttggcgatctagttattttgacgtatattactctacgcagtatacaaaatacatctatataaatgcgatatttgacttgggatcattaattttagtcacgggcctactaagcataaatttctttgaagactttgtaatccgccacagatgggtcatgactttcacctcgactttgtcggcatatgttgtggtattgggtggtaagtttaagaagttaaatatgcccttatattatagttacaccagctacttgtagagtgtttgtactagattcaatgataattagtcgatccttaaaatccacaacttctttccatatacactcaactatagtgttttctcttgttttcagatatagcctttaacacttattattattacaaatccaactggcctcttaataccttatacgatgtctttgtgctctgcatgatctacatgttcctgccaataccttcgagcaaggcagcagctctg

SEQ ID NO: 25376 - DNA, 3447 bp, DROSOPHILA
ctatattaaatcgagatacaaaaaaatttttagaatcattagggacttttaagtagtagtataggctttattaataagagcgattttcaaaaaatccaaaatatgtacaaaaaaacagcgtatgcgccaaggaaatgttatctggactacactgatgagcgactgtgggaacggggctatttaaaggccaaatgtaaggaattgtgtctagaagaagagtataaaaaatatcagatccgccttatgatcagttacctcaccgtcttcttccctttgtttatatttgtggtcgtaggatgcgagctctgtccatggattttctctgagcaaaaaaaactcatctactacgaatcattaacggctatagttgtattagttgccgttcctggcatattgagcattaatttctttgagagctttgtgcttcgccacaggtggattatggtgttttcttcaatattgtccgcgtatattgtggtattagttgatatatttcagatactagtgttccatttcaagtatcactggccacttaatacattatacgacgtcttcgtcctctgcatgatttacatgttcttgccaattccttcgatcaggggagcagccctgttggccacctctgtcagtctcatgtacattggattattcatttactttttaaagtctgacgatgaagatatttcagaggtagttcatgaccttgatacgatttgcgtcgacatatttcactatttgggtttcaatctgatggggattttctttcggataatgaacgacaccatggtgcgctcttcctttctggatcggcaccagttcctcaaggaggagatgtggctccgacaagctcggcaacaagagtctatgcttctggatagcatacttcccccccagattgcaaagcccatccaacaaagcattaaggaaaggatcatgttgtccgaaaccgattcagaccgcatcgtcgtgaatgcccggcgaacagaaaactttatggccatccaaatccatcccgacgtttccatcctgtatgcagatgtggtgaactacacccatttaacgacaacactgacggttgagaagttggtgaaggtcctgcatgatctatacggcagattcgatatggctgcttctactttcaaggtgcagcgcattaagttccttggcgattgctactactgtgtggcgggtttgggggaagctgatcccgatcacgctaggatggctgtatctctgggaatttccatgattgcaaacattcaggaggtgcgggcccatcgtgcactagatatcgatatgcgaattggtgtccattcaggaacattgcttgcaggtgtgatcggacaagccaagctgcagtatgacatatggggtcccgacgtggatattgccaatcgactagaggcaaccggcaagcccggttatgtgcacgttagcggtcgcactttaagtagcttgaacgtagctgagtacacggtatttccgggaaccgaagtggcccaaagtgatcccatactgcagaaacaaccgatgaccacctaccttcttacggccgctcccagccgcaattcagtcagatctgtggatgcagtgcactcctacgctgagatcgacataaacgctttgggagcttcccggaaaagcccgattttgaggccaaccttaatgtccgatgaattgcgtgaggagtttaaaaagatgccagtgggaggcttcaacattcgatcgccgtgctgccgagacaattcgaatgatgagaaagtcaaccacggcttaggcatgttttgtgtagccttcaaggattcgtctctcgaatggagttatttgcataagccagatttcatcttgaaatactcagtgcttctagcttggggaatcgggtgctgccttatctatatccagatagtcaacgacaaattcaccatttgtgtagaatgcatcgtgatcgacatggttgtatttaccttcctgacttcattgctctttatctcctggttcaaaaaagtgtgttggtggagatgcgtcgaaaatgactcccgtaagtatgggagagtcagctgcaagttgttcaagatttgggaaagaatccagcacagttttgttctgcgagttactatatatatgagtatagttgcgagctattacttgttaatctctacgatactgctaaactgtgacaaaaatcaatatgagctagatgttatcaatagcaagctctatcactatgacattgttactgacaactgttttaatccgtgggtcttcacagacatgatttccctgatcgtgggcgtaagctacaccttcgcccgaattccatttgccctaaagatgctcattacatgttgcgcaaccgttgcttacttggttatcgtattctttcagtactcatttattttcgagcacagtgccaccacaacaccatttatgaaggcggaactagctcattgtcttcgggtgtgcatgatgttactcacgatgtacgcaaaggagcgtcagtcagagtttaatacgaaaattaactttaagatcaatcaggatttgcaaggcaagcaaaaagcggctgacatcacgaacaaatccatcataattctactcactaacattcttccctcccacgtggttgaggtttatctcgattcagtagccaatcacgaactgtactacgaaaactataaaatggtgtccgtcatgtttgccatgctcatcaattttcaaatggatttgcccagccttcgagttttaaacgatattataacagaatttgatagactgttaaatgcctacaaggaatattatgtcgtcgagaagattaaagtcgtgggctgcacttatatggcagcttgtggacttgattttaccctggctaagtcaaaatttggaagcagaacacatgcttcttactcatccgaattggaacaggtgctttatcgcaaagagtccaaaggcacagaaaatgaccacgatgaggtggcctttataatgaccacgtttgccttggatctaatgagagtgctttccgtctgcaataaggcatacgctggtagacccttcgatcgtgctctatctaccggagagatctgtatcggaatctcaacgggtgaaataatggccggagttgtgggggcgtctcagccacactatgacatctggggaaaccctgtgaatatggcttctcgaatggaatcgacagggctgcctggacacatccatgtgacgcaagagacagccaatattctcgagcagttcgatattatgtgcatgtaccgtggcatgacctttgtaaagggtcgtggcgaaattcccacctactttgtgggcatcgacgataacttgaagtttttgccctcaaatgtgaagaagaacaatatgtcaaagcgtttttcaatcttgtcctctctagtgccagttcacagccgaagtacaacttcaagtgaatacatttaa

SEQ ID NO: 25377 - protein, 937 aa, DROSOPHILA
MYIGLFIYFLKSDDEDISEVVHDLDTICVDIFHYLGFNLMGIFFRIMNDTMVRSSFLDRHQFLKEEMWLRQARQQESMLLDSILPPQIAKPIQQSIKERIMLSETDSDRIVVNARRTENFMAIQIHPDVSILYADVVNYTHLTTTLTVEKLVKVLHDLYGRFDMAASTFKVQRIKFLGDCYYCVAGLGEADPDHARMAVSLGISMIANIQEVRAHRALDIDMRIGVHSGTLLAGVIGQAKLQYDIWGPDVDIANRLEATGKPGYVHVSGRTLSSLNVAEYTVFPGTEVAQSDPILQKQPMTTYLLTAAPSRNSVRSVDAVHSYAEIDINALGASRKSPILRPTLMSDELREEFKKMPVGGFNIRSPCCRDNSNDEKVNHGLGMFCVAFKDSSLEWSYLHKPDFILKYSVLLAWGIGCCLIYIQIVNDKFTICVECIVIDMVVFTFLTSLLFISWFKKVCWWRCVENDSRKYGRVSCKLFKIWERIQHSFVLRVTIYMSIVASYYLLISTILLNCDKNQYELDVINSKLYHYDIVTDNCFNPWVFTDMISLIVGVSYTFARIPFALKMLITCCATVAYLVIVFFQYSFIFEHSATTTPFMKAELAHCLRVCMMLLTMYAKERQSEFNTKINFKINQDLQGKQKAADITNKSIIILLTNILPSHVVEVYLDSVANHELYYENYKMVSVMFAMLINFQMDLPSLRVLNDIITEFDRLLNAYKEYYVVEKIKVVGCTYMAACGLDFTLAKSKFGSRTHASYSSELEQVLYRKESKGTENDHDEVAFIMTTFALDLMRVLSVCNKAYAGRPFDRALSTGEICIGISTGEIMAGVVGASQPHYDIWGNPVNMASRMESTGLPGHIHVTQETANILEQFDIMCMYRGMTFVKGRGEIPTYFVGIDDNLKFLPSNVKKNNMSKRFSILSSLVPVHSRSTTSSEYI

SEQ ID NO: 25378 - DNA, 6363 bp, DROSOPHILA
tgatagactggtaagcttatgtattgatttctagataataaggtatcatcactttcgaacccagttaaatgcctacaaggaatattatgtcgtcgagaagattaaagtcgtgggctgcacttatatggcagcttgtggacttgattttaccctggctaagtcaaaatttggaagcagaacacatgcttcttactcatccgaatgtaagtacaccctcttgatggacttccaatgatgaagggtttaaattttgttaataaactcatttcttttagtggaacaggtgctttatcgcaaagagtccaaaggcacagaaaatgaccacgatgaggtggcctttataatgaccacgtttgccttggatctaatgagagtgctttccgtctgcaataaggcatacgctggtagacccttcgatcgtgctctatctaccggagagatctgtatcggaatctcaacgggtgaaataatggccggagttgtgggggcgtctcagccacactatgacatctggggaaaccctgtgaatatggcttctcgaatggaatcgacagggctgcctggacacatccatgtgacgcaagagacagccaatattctcgagcagttcgatattatgtgcatgtaccgtggcatgacctttgtaaagggtcgtggcgaaattcccacctactttgtgggcatcgacgataacttgaagtttttgccctcaaatgtgaagaagaacaatatgtcaaagcgtttttcaatcttgtcctctctagtgccagttcacagccgaagtacaacttcaagtgaatacatttaatactttttaaaatttttagagatttatattctgtacgctacctcgtataagatattttcaatcatttatatcatatgttataatatgtaaaataaaggttaatgacattcaattaagttaaatgtaggttcatgggtctaagcaggctttgagtcctggaacctagttctcattcatacaataactcaaacgtaaaaaaaatactacttaaaaatatgaacaaaaaaaacacttacaaaacgccgtacagggaaaggtttaggcgatgtaatctggaatatactaatgaacgcctttgggaacaaagttatttgaaggtaagaaatttgctcagatatccgtttcttaaatgcaacagatattcgtaggccagatgtaaggagttgcacttagaggaggaatatatgaaatataagattcgtttgatgatcagttcccttaccgtttttgtccccatgttaatactactgatcgtagctcttcaagtaatcatatggtcatttaccgaggtaagcgttttcagttggcgatctagttattttgacgtatattactctacgcagtatacaaaatacatctatataaatgcgatatttgacttgggatcattaattttagtcacgggcctactaagcataaatttctttgaagactttgtaatccgccacagatgggtcatgactttcacctcgactttgtcggcatatgttgtggtattgggtggtaagtttaagaagttaaatatgcccttatattatagttacaccagctacttgtagagtgtttgtactagattcaatgataattagtcgatccttaaaatccacaacttctttccatatacactcaactatagtgttttctcttgttttcagatatagcctttaacacttattattattacaaatccaactggcctcttaataccttatacgatgtctttgtgctctgcatgatctacatgttcctgccaataccttcgagcaaggcagcagctctgctagccatatctgttagtttaacatatgtgatatattttattcacttcatggcgtttaacgagcataatgttgctaaatatgttcatggtctggatatagtatcaatcgatttttttcactacctgggcttcaatatgatgggaatattcttcagaatcatgaacgacaccatggtgcgctcgtcgttcttggaccgataccagttcattacggaggagatttggctacgccaagctcgccgtcaagaatccttgctgctggatagcatacttccaccacagattgcgaagcccattcagaaaagcattaaggaaaagatcatacagcccgataacgacttctaccatctgggcacttcgcggacagcagaaaacttcatgtccatccagattcacaacgatgtcagtatcctttatgctgatctggtgaactacacccaattgaccacaacattgacggtggagaagctggtgaaggtcctgcacgacctctacgccagatttgatttggctgccttatctttcaaggtgcagcgcatcaagttccttggcgattgctactactgtgtggcgggtttgggggaatctgatcctgatcacgccaccatggctgtgtctctgggaatttccatgattgctaacattaaggaggtgaggtatgttgattactatgatcccattaggtttagaatctatgatttatggcgtcccacatcggcagaaagggattcgttttttttttagttattttgctctaatttggctttcattttgagtaccatttcgtccgcagtgtgaatcgttctttgaatattggcatgcgaattggtgtccattcgggaactttgtttgcaggtgtaatcggcaaggccaagctacagtacgacatatggggtatggtacgatgcaacaaatcaatgacacaaaacatattcgtgagttttccaggtgccgacgtgaatattgccagtcgtctggaagcaaccggaagtcccgggtatgtgcatgttagtggacgaactctgagcagcttgaacgctgaggaatacaatatatatccgggcacggaatcggcccagaaggatcccgtactgcagaaacatccgatgagcacctacctcctcaccgctataccatccctcgattcggataaaacaattagcatagttgagggcgttcctaacctggaccttcaaaccgtgggatctaaccgaaaatcacagattttgaagcctaacttactgtcccatgagatgcgtgaggaatttagaaagatgccggtggggggtttcaagtgagttgtggggaaaactgtgcattgtgcacctgcaatgaaataacgaactactaccgcagatttcaattcccttggtcgcgaagagaaagaaatttgaaaaacgagaaagtcgaacgcgatttgggcattttttgtgtcgcatttaaggacaaatctgtggaatggaattatttgcatcagcccgattatatttttaaatattcagtggcgctcggctggggaattggttgctgtcttatttatatccagtccgtgaacaactcagatatcttttatacgggtgttgtcattaacattatcgcgtttttcgtcctgactttcctactattcatttgctggtacaagaaagtgtgctggtggcatagtggacaaaacgagcacaggagttacggcaaactcagctgcgccatattccacttgtttgaaaagatccagcacagttttgtccttcgcctcactgtctacatgatgataatattgtgctattacatggtgatctccttgatattagtgagttatgaaacaacgcatgtatttaatatatatatatatttttttgtatgcccaaagatgagctgtgaaaaggaccaatatgagttggacattatagagagcaagctctacaactatgacatggatccgtttacctgcttccacccctgggcctatacgaacatgatggcccttatcctgggaatgagttacaccttcgcccgcattcccttcgccctcaagacctttatcggttgcgccgaagcagtggttttcgtcctggttgtgtgtttccagtacgcgttcattttcgagcacagtgttaccacatcgccctatttaaaggctgaaatagctcattcctgcagggtgtgcatgatgttgattactatgtacgctaaggagcgtcagtcagagttcaacactaaaatgaactacaagtaagcaaatactttctttaaatcagctgatttactgattttcctaactgattgcaggctcaacctggacttgcaaaacaagcaaaaatcggccgatgtaactaaccagtccatcataatcctgcttaacaacattcttccatctcatgttggtcagtttgctaagaatatcgccccaagaagcttagtatctcagttcttagttctctttcgcagtcgaggtatatctcagctctatagccaaacacgaactctattatgaaaactatcgaatggtatcagtcatgtttgccatgctcacaaactttcaaatggatttgcccagcttaagagtgctaaatgatatcatcacagcgttcgacagattggtaagtattgattttaatttacgactatactatactttccgattgcagctttctgcgtacaagcaatattacgtagtcgagaagatcaaagtcgtcggatgcacttatatggcagcctgtggattggactttagcctgattgaaaaccttgatagcaactcgaattttggcagtacatcattgtcatccgaatgtaagtgccaaatgcattggttcttaatataggtcttctaatgtgatatgggtatatttgattaattcagtagaacaggtgcgttctcgtttggagtcatctataaaagagaagaaccatgatgaggtggcttttataatggctacgtttgctctggacctgatgcgcgttctgtcggtgtgcaacaaggcttacgccggagaaccatttgatcgggctttgtccaccggcgagataaggatcggtatctctacgggtcagataatggctggagtggtaggcgcttcccagccgcactacgacatctgggggaacccggtcaatatggcctcccgaatggaatcgactggtttgtctggacatatacaggttacaaaggagactgcccaaacgctcgaggagttcgatgttatgtgctattatcgcggcttaacctttgtgaagggtcgtggtgaaattcccacctattttgtgggcatcgataaagacctaaagttcatgtccaagaaaatcgatagactttctgagaacccatctaatccagatctaaaccatgacctggacggctcctaagacagatacaaattttttcggcaaattcttctcaatatggaattcgaatcgcaaatgcatattgaaggcttcgtttctcaaattttgagatcgtagttcttgtctgtaaaatttgagatgcgtagccttacaaaatgatgtggactcaaatcttgtaaaaattatgtggaaaatacatatttgtaataccttagaacgttttgtcccatttttttcaatcctttggagggttcaacaagttccttttataaagcgaaaaatctggttaaagtaggctgtgtgttcgatgcttaaattgttctgctgagtcttgtcaatcgaaaacaaaagccaggtaagataagctggtaaaacgaaatgcctcgctccctaggaaattgtcagcttaattattcaaaggaacgcatgtgggaacctggctacctcaaggtaaaattaagtctttggacctggaattcttttattaatattctatgtccgaatattctaggctaaatgtgcagagttgcgtttggagagcgagtttcgactgtatcggatacggctttggaagagttacctactcactttttttatgctgcatatattcgttacctccgtgcactgtgccctacttttagcaacgattgaggtaagaaccgcctaacctagatacaattttagaccaacagttgcacaacatatttaaaaaaccattaaatgagatgtttttcttccatcttgtaattcttttatatatatgttttattctcgttattgtaccttttgtagcgccgatcaattatttatttcgatgtagccctttccataggatgcgcattggtccttatacttgtgctgagtgttaacttctgcgatgaatttattgcgaaacacacgtggtacatgtatgccagctcgatatttgcctccctgactttggtattcgctggttggtatttcgttatcatcattaaaacatatcccttatattatatacatttattaccattagacctaactgaatcaatttaccacacgtatgcgcacagctggatactgggcacattttacgacacctacataatatacatgatatacatgttcctgccgatccacttcatcagcggtgcagtcctgctggctctgttggtgtccggtctctatatactctactttgtgatcttcattgcccagggcttcgcccagtttg

SEQ ID NO: 25379 - DNA, 3554 bp, DROSOPHILA
taaaaaaaatactacttaaaaatatgaacaaaaaaaacacttacaaaacgccgtacagggaaaggtttaggcgatgtaatctggaatatactaatgaacgcctttgggaacaaagttatttgaaggccagatgtaaggagttgcacttagaggaggaatatatgaaatataagattcgtttgatgatcagttcccttaccgtttttgtccccatgttaatactactgatcgtagctcttcaagtaatcatatggtcatttaccgagtatacaaaatacatctatataaatgcgatatttgacttgggatcattaattttagtcacgggcctactaagcataaatttctttgaagactttgtaatccgccacagatgggtcatgactttcacctcgactttgtcggcatatgttgtggtattgggtgatatagcctttaacacttattattattacaaatccaactggcctcttaataccttatacgatgtctttgtgctctgcatgatctacatgttcctgccaataccttcgagcaaggcagcagctctgctagccatatctgttagtttaacatatgtgatatattttattcacttcatggcgtttaacgagcataatgttgctaaatatgttcatggtctggatatagtatcaatcgatttttttcactacctgggcttcaatatgatgggaatattcttcagaatcatgaacgacaccatggtgcgctcgtcgttcttggaccgataccagttcattacggaggagatttggctacgccaagctcgccgtcaagaatccttgctgctggatagcatacttccaccacagattgcgaagcccattcagaaaagcattaaggaaaagatcatacagcccgataacgacttctaccatctgggcacttcgcggacagcagaaaacttcatgtccatccagattcacaacgatgtcagtatcctttatgctgatctggtgaactacacccaattgaccacaacattgacggtggagaagctggtgaaggtcctgcacgacctctacgccagatttgatttggctgccttatctttcaaggtgcagcgcatcaagttccttggcgattgctactactgtgtggcgggtttgggggaatctgatcctgatcacgccaccatggctgtgtctctgggaatttccatgattgctaacattaaggaggtgagtgtgaatcgttctttgaatattggcatgcgaattggtgtccattcgggaactttgtttgcaggtgtaatcggcaaggccaagctacagtacgacatatggggtgccgacgtgaatattgccagtcgtctggaagcaaccggaagtcccgggtatgtgcatgttagtggacgaactctgagcagcttgaacgctgaggaatacaatatatatccgggcacggaatcggcccagaaggatcccgtactgcagaaacatccgatgagcacctacctcctcaccgctataccatccctcgattcggataaaacaattagcatagttgagggcgttcctaacctggaccttcaaaccgtgggatctaaccgaaaatcacagattttgaagcctaacttactgtcccatgagatgcgtgaggaatttagaaagatgccggtggggggtttcaaatttcaattcccttggtcgcgaagagaaagaaatttgaaaaacgagaaagtcgaacgcgatttgggcattttttgtgtcgcatttaaggacaaatctgtggaatggaattatttgcatcagcccgattatatttttaaatattcagtggcgctcggctggggaattggttgctgtcttatttatatccagtccgtgaacaactcagatatcttttatacgggtgttgtcattaacattatcgcgtttttcgtcctgactttcctactattcatttgctggtacaagaaagtgtgctggtggcatagtggacaaaacgagcacaggagttacggcaaactcagctgcgccatattccacttgtttgaaaagatccagcacagttttgtccttcgcctcactgtctacatgatgataatattgtgctattacatggtgatctccttgatattaatgagctgtgaaaaggaccaatatgagttggacattatagagagcaagctctacaactatgacatggatccgtttacctgcttccacccctgggcctatacgaacatgatggcccttatcctgggaatgagttacaccttcgcccgcattcccttcgccctcaagacctttatcggttgcgccgaagcagtggttttcgtcctggttgtgtgtttccagtacgcgttcattttcgagcacagtgttaccacatcgccctatttaaaggctgaaatagctcattcctgcagggtgtgcatgatgttgattactatgtacgctaaggagcgtcagtcagagttcaacactaaaatgaactacaagctcaacctggacttgcaaaacaagcaaaaatcggccgatgtaactaaccagtccatcataatcctgcttaacaacattcttccatctcatgttgtcgaggtatatctcagctctatagccaaacacgaactctattatgaaaactatcgaatggtatcagtcatgtttgccatgctcacaaactttcaaatggatttgcccagcttaagagtgctaaatgatatcatcacagcgttcgacagattgctttctgcgtacaagcaatattacgtagtcgagaagatcaaagtcgtcggatgcacttatatggcagcctgtggattggactttagcctgattgaaaaccttgatagcaactcgaattttggcagtacatcattgtcatccgaattagaacaggtgcgttctcgtttggagtcatctataaaagagaagaaccatgatgaggtggcttttataatggctacgtttgctctggacctgatgcgcgttctgtcggtgtgcaacaaggcttacgccggagaaccatttgatcgggctttgtccaccggcgagataaggatcggtatctctacgggtcagataatggctggagtggtaggcgcttcccagccgcactacgacatctgggggaacccggtcaatatggcctcccgaatggaatcgactggtttgtctggacatatacaggttacaaaggagactgcccaaacgctcgaggagttcgatgttatgtgctattatcgcggcttaacctttgtgaagggtcgtggtgaaattcccacctattttgtgggcatcgataaagacctaaagttcatgtccaagaaaatcgatagactttctgagaacccatctaatccagatctaaaccatgacctggacggctcctaagacagatacaaattttttcggcaaattcttctcaatatggaattcgaatcgcaaatgcatattgaaggcttcgtttctcaaattttgagatcgtagttcttgtctgtaaaatttgagatgcgtagccttacaaaatgatgtggactcaaatcttgtaaaaattatgtggaaaatacatatttgtaatacctt

SEQ ID NO: 25380 - protein, 993 aa, DROSOPHILA
MTFTSTLSAYVVVLGDIAFNTYYYYKSNWPLNTLYDVFVLCMIYMFLPIPSSKAAALLAISVSLTYVIYFIHFMAFNEHNVAKYVHGLDIVSIDFFHYLGFNMMGIFFRIMNDTMVRSSFLDRYQFITEEIWLRQARRQESLLLDSILPPQIAKPIQKSIKEKIIQPDNDFYHLGTSRTAENFMSIQIHNDVSILYADLVNYTQLTTTLTVEKLVKVLHDLYARFDLAALSFKVQRIKFLGDCYYCVAGLGESDPDHATMAVSLGISMIANIKEVSVNRSLNIGMRIGVHSGTLFAGVIGKAKLQYDIWGADVNIASRLEATGSPGYVHVSGRTLSSLNAEEYNIYPGTESAQKDPVLQKHPMSTYLLTAIPSLDSDKTISIVEGVPNLDLQTVGSNRKSQILKPNLLSHEMREEFRKMPVGGFKFQFPWSRRERNLKNEKVERDLGIFCVAFKDKSVEWNYLHQPDYIFKYSVALGWGIGCCLIYIQSVNNSDIFYTGVVINIIAFFVLTFLLFICWYKKVCWWHSGQNEHRSYGKLSCAIFHLFEKIQHSFVLRLTVYMMIILCYYMVISLILMSCEKDQYELDIIESKLYNYDMDPFTCFHPWAYTNMMALILGMSYTFARIPFALKTFIGCAEAVVFVLVVCFQYAFIFEHSVTTSPYLKAEIAHSCRVCMMLITMYAKERQSEFNTKMNYKLNLDLQNKQKSADVTNQSIIILLNNILPSHVVEVYLSSIAKHELYYENYRMVSVMFAMLTNFQMDLPSLRVLNDIITAFDRLLSAYKQYYVVEKIKVVGCTYMAACGLDFSLIENLDSNSNFGSTSLSSELEQVRSRLESSIKEKNHDEVAFIMATFALDLMRVLSVCNKAYAGEPFDRALSTGEIRIGISTGQIMAGVVGASQPHYDIWGNPVNMASRMESTGLSGHIQVTKETAQTLEEFDVMCYYRGLTFVKGRGEIPTYFVGIDKDLKFMSKKIDRLSENPSNPDLNHDLDGS

SEQ ID NO: 25381 - DNA, 5920 bp, DROSOPHILA
tttgctctggacctgatgcgcgttctgtcggtgtgcaacaaggcttacgccggagaaccatttgatcgggctttgtccaccggcgagataaggatcggtatctctacgggtcagataatggctggagtggtaggcgcttcccagccgcactacgacatctgggggaacccggtcaatatggcctcccgaatggaatcgactggtttgtctggacatatacaggttacaaaggagactgcccaaacgctcgaggagttcgatgttatgtgctattatcgcggcttaacctttgtgaagggtcgtggtgaaattcccacctattttgtgggcatcgataaagacctaaagttcatgtccaagaaaatcgatagactttctgagaacccatctaatccagatctaaaccatgacctggacggctcctaagacagatacaaattttttcggcaaattcttctcaatatggaattcgaatcgcaaatgcatattgaaggcttcgtttctcaaattttgagatcgtagttcttgtctgtaaaatttgagatgcgtagccttacaaaatgatgtggactcaaatcttgtaaaaattatgtggaaaatacatatttgtaataccttagaacgttttgtcccatttttttcaatcctttggagggttcaacaagttccttttataaagcgaaaaatctggttaaagtaggctgtgtgttcgatgcttaaattgttctgctgagtcttgtcaatcgaaaacaaaagccaggtaagataagctggtaaaacgaaatgcctcgctccctaggaaattgtcagcttaattattcaaaggaacgcatgtgggaacctggctacctcaaggtaaaattaagtctttggacctggaattcttttattaatattctatgtccgaatattctaggctaaatgtgcagagttgcgtttggagagcgagtttcgactgtatcggatacggctttggaagagttacctactcactttttttatgctgcatatattcgttacctccgtgcactgtgccctacttttagcaacgattgaggtaagaaccgcctaacctagatacaattttagaccaacagttgcacaacatatttaaaaaaccattaaatgagatgtttttcttccatcttgtaattcttttatatatatgttttattctcgttattgtaccttttgtagcgccgatcaattatttatttcgatgtagccctttccataggatgcgcattggtccttatacttgtgctgagtgttaacttctgcgatgaatttattgcgaaacacacgtggtacatgtatgccagctcgatatttgcctccctgactttggtattcgctggttggtatttcgttatcatcattaaaacatatcccttatattatatacatttattaccattagacctaactgaatcaatttaccacacgtatgcgcacagctggatactgggcacattttacgacacctacataatatacatgatatacatgttcctgccgatccacttcatcagcggtgcagtcctgctggctctgttggtgtccggtctctatatactctactttgtgatcttcattgcccagggcttcgcccagtttgcgtctgcactattctcggtcggcggaatgtcggtggacattgtgcactatctgtgcctaaatcttgtaggcattttctaccgcgttatgaacgacacggtggtgcgctcctcctttctggaccgacaccagtacatcaaggagaagatttggctgcgcaacgcacggctgcaggagaagcagttgctggacagcatcctgccgccgcagatctccctgcccctgcagaaagacattcagggcaggatcgtaatggcaaagcaaggtattcactcctggaccgccatggagcgcacaatggccatacagatccatcccgatgtctccatcctgtatgcagacgtcgtgaactacactcacttgactaccacactgacggtggagatgttggtgaaggtcctgcacgatctctacggcagattcgatttggctgcctatcgctacaaggtgcagcgcatcaagttcctgggggactgctactactgtgtggcgggtctgtcggaccccgatcccgatcacgccaataactgtgttatcctaggtctttccatgatcaaccacattatggaggtgcggtaagttacatataagatacatatacagtttcttaaactcccaaaattctcactactattcttggccccaatttcgtagggacattcacggcttggacataaatatgcgcattggagttcattcgggcaatctgtttgctggggtcatcggggaggccaagctgcagttcgatatatggggtaaataaataaactatcacttgctgttgattacaagtgcttcccaatttcttctaggattggatgttaccatagccaatgttctagaatcaactggagtgccgggatgtgtgcacataagtggtgccaccttaaacaatctagacgttaatcgcttcgatattgaggatggacctgaagaagccagggatcatcctcttctgaaaaaataccgaataagatcatatataattcgacaagacttgcatatggatgacgaagatagtgacgagtttctcggcgatctgcattcaatttctctgtgcaatatgggagctcagccaagaataagtgattctgctaatcaaagtctaagggcgcttttccacgaagaattgcgggaagagtttcgcaaaatgccggtcagtgcatttaggtaactacacaactttttatcgacacaaaatatttcctaattataaaccgttttgggtcacagtcccaaaaggctattggggatttgtcgattcaacacaggaaaagaagttcctgcacaccaaaacttaaacatttgcttgacctttaccgatccgattttggaaagagcctatctgaagcaaaccgactatatgtacaaatacagcattattctgagcgcgagcgttggctgctccctggtgtacattgaactaatggacacacaaatgatatgctcctcctgcttcgttttgccagcctcagtagccacaatacagtgcattctggccttaatcgcgtggtacaagaagtattgctggaccagatatggccgaaacaacgtgccacatcattacaatggattcagttgttttatatttcggatccatgacaagatcctaaacagtctccccatccgcatctgcatatacctcttcctaatgatatcgagtttttttgttatgtgcttaattgtggtaagtacttaaagttggctgcaacgatagtacggtttaagtgagcggtgaatcttgtaaccagatgagctgccaacgcgaagaattcgagatggcatatatcgaggaaagactctttcactatgaacaggaggcccatatatgctttcatccctgggtgacgaccaatatgttatccctgatgatttgtttgaccttcacattcgcccacatacccatcatggtcaagacggcagtggccattttggagacgctcgcctatctgctgttgattttcttccagttcgatttcgtcttccatcacagcgttacgacaaacccctatttcaaatcggagtacgctcatgccctgctaatatgcatcacctttctaattatgtttgtaaaggagcgccaaatagagttcaccaacaaagtaaacttcaagtgagctcggtataaaattatatccattttaattgttattcaatcgtgttttcttagctggcgtgttgatctgcgaaaggaggagaatgccgccagccttacaaatcattcgatcataattattctcaacaacatactgccatctcatatcggtgagtttcgaaactggtaaattggaaacgttaatattgatattacaatatatttcttagtggatgtgtatctcaattctttggccaaacatgaactctatttcgaaaactatcgaatggtgtctgtcatgtttgccatgctaattaactttgaaatggatcttcgaagcttaagggtgctcaatgagattattgctgagtttgataccttggtagggttctatattttaacaagataattaatttctcttatagaaaaaaatatcgcatttttagttgctgttttataaggagtactacaccgttgagaaaatcaaaatcgtcggatgcacctacatggcggcgtgtggacttgatcttaactttgccggctccactagtacaaatcgcaaagagagcatacccccaactggttgttataaatcttatgaaaaaccatgtgaaaaaagtatcaaatagtacattacagaattcaatgaagaacaaagccgaagaattttgttccagcagagcaatgaggaccttgatgaagtggtctttgtgatgacctcgtatgcgctggacatgatgcgaaccctggccaagagcaatgaggcgtaccagagtattgctggtgatcgcaatattacggatggaacaatcgccatcggcatctccagcggtgaggtgatggccggcattgtgggtgcctcgcagccgcactacgatatatggggcaatccagtcaacatggcctcgcggatggaatccacggggctgccaggacacatccatgtaacggaagagacgtccgaaattctgcaacagttcggcattacctgttcatatcgcggcatgacttttgttaaggggcgcggcaaaataccaacctatttggtgggtatcgatgagaaccttaacttcattccacagaaggcaacgcgatttcccagtcaccaggagcgcagtacggttatatcgttgcagtcaacctatactcatgcggagaataataacagtatagctagcacgtctaggcacactttgcaaagtctataaataagttttatgttagttaaataactaagcaatgtggcttttgactaataaactaattcctcctttctaaatgacgatttattttcggtaatagctctttaaagacctgcccaattgtctctgtattccctgatccggaaagtgacatgcattttccattcgaatttcgaaacataattaatgattttgctgtgcctatccattaaaagtgtcaaaaacatgaacagagcaaagcaaaagactggttgctaactagattgagcctttttgcttcattcccgcatttcagttttaattgaattaataccagaccgtgttaaaatttggagtgtcaagtgtgcccacaggatgggttggaatcccttttctcgcaaccaattaaatggtatttttacaagcaatttggaaaatatgatgtcgccgacagatgtggaaggtgagatcgcatacctttgatgctgatggtgcttgtcattatttgctgtaattgacgagttttcgccgggatgaaacatcaaaaaagcacgacagcacggaaatgcaaaaacacgctttagagaaacagccatttccggtgaaagcccccaggattcggtgtccctttccggtccgcaaagagttgttttatctgcacggacacggtactactcctttgacatgtaaaacgctttcgtccaactgcacgccgtccaaaaataaaagatagaaaaaaaaacatgttggcacgatttaagaagaaaaactcgatggtagcaattaaaaattcacgtgttttcaaatgcaaattataatggtaagcttatcagagctaaaaaccgacgagatatatgacaactatcttgttgcaattcaaaagatgtttaataattaccatataattgtataatttttaagtaaatccattggataacatatagcaacatttttccttgtgtatatattccatttaaattcctttgctacagagtatttaagtctcgttatgttgaacatattttat

SEQ ID NO: 25382 - DNA, 2715 bp, DROSOPHILA
atgctgcatatattcgttacctccgtgcactgtgccctacttttagcaacgattgagcgccgatcaattatttatttcgatgtagccctttccataggatgcgcattggtccttatacttgtgctgagtgttaacttctgcgatgaatttattgcgaaacacacgtggtacatgtatgccagctcgatatttgcctccctgactttggtattcgctgacctaactgaatcaatttaccacacgtatgcgcacagctggatactgggcacattttacgacacctacataatatacatgatatacatgttcctgccgatccacttcatcagcggtgcagtcctgctggctctgttggtgtccggtctctatatactctactttgtgatcttcattgcccagggcttcgcccagtttgcgtctgcactattctcggtcggcggaatgtcggtggacattgtgcactatctgtgcctaaatcttgtaggcattttctaccgcgttatgaacgacacggtggtgcgctcctcctttctggaccgacaccagtacatcaaggagaagatttggctgcgcaacgcacggctgcaggagaagcagttgctggacagcatcctgccgccgcagatctccctgcccctgcagaaagacattcagggcaggatcgtaatggcaaagcaaggtattcactcctggaccgccatggagcgcacaatggccatacagatccatcccgatgtctccatcctgtatgcagacgtcgtgaactacactcacttgactaccacactgacggtggagatgttggtgaaggtcctgcacgatctctacggcagattcgatttggctgcctatcgctacaaggtgcagcgcatcaagttcctgggggactgctactactgtgtggcgggtctgtcggaccccgatcccgatcacgccaataactgtgttatcctaggtctttccatgatcaaccacattatggaggtgcgggacattcacggcttggacataaatatgcgcattggagttcattcgggcaatctgtttgctggggtcatcggggaggccaagctgcagttcgatatatggggattggatgttaccatagccaatgttctagaatcaactggagtgccgggatgtgtgcacataagtggtgccaccttaaacaatctagacgttaatcgcttcgatattgaggatggacctgaagaagccagggatcatcctcttctgaaaaaataccgaataagatcatatataattcgacaagacttgcatatggatgacgaagatagtgacgagtttctcggcgatctgcattcaatttctctgtgcaatatgggagctcagccaagaataagtgattctgctaatcaaagtctaagggcgcttttccacgaagaattgcgggaagagtttcgcaaaatgccgatgagctgccaacgcgaagaattcgagatggcatatatcgaggaaagactctttcactatgaacaggaggcccatatatgctttcatccctgggtgacgaccaatatgttatccctgatgatttgtttgaccttcacattcgcccacatacccatcatggtcaagacggcagtggccattttggagacgctcgcctatctgctgttgattttcttccagttcgatttcgtcttccatcacagcgttacgacaaacccctatttcaaatcggagtacgctcatgccctgctaatatgcatcacctttctaattatgtttgtaaaggagcgccaaatagagttcaccaacaaagtaaacttcaactggcgtgttgatctgcgaaaggaggagaatgccgccagccttacaaatcattcgatcataattattctcaacaacatactgccatctcatatcgtggatgtgtatctcaattctttggccaaacatgaactctatttcgaaaactatcgaatggtgtctgtcatgtttgccatgctaattaactttgaaatggatcttcgaagcttaagggtgctcaatgagattattgctgagtttgataccttgttgctgttttataaggagtactacaccgttgagaaaatcaaaatcgtcggatgcacctacatggcggcgtgtggacttgatcttaactttgccggctccactaaattcaatgaagaacaaagccgaagaattttgttccagcagagcaatgaggaccttgatgaagtggtctttgtgatgacctcgtatgcgctggacatgatgcgaaccctggccaagagcaatgaggcgtaccagagtattgctggtgatcgcaatattacggatggaacaatcgccatcggcatctccagcggtgaggtgatggccggcattgtgggtgcctcgcagccgcactacgatatatggggcaatccagtcaacatggcctcgcggatggaatccacggggctgccaggacacatccatgtaacggaagagacgtccgaaattctgcaacagttcggcattacctgttcatatcgcggcatgacttttgttaaggggcgcggcaaaataccaacctatttggtgggtatcgatgagaaccttaacttcattccacagaaggcaacgcgatttcccagtcaccaggagcgcagtacggttatatcgttgcagtcaacctatactcatgcggagaataataacagtatagctagcacgtctaggcacactttgcaaagtctataa

SEQ ID NO: 25383 - protein, 904 aa, DROSOPHILA
MLHIFVTSVHCALLLATIERRSIIYFDVALSIGCALVLILVLSVNFCDEFIAKHTWYMYASSIFASLTLVFADLTESIYHTYAHSWILGTFYDTYIIYMIYMFLPIHFISGAVLLALLVSGLYILYFVIFIAQGFAQFASALFSVGGMSVDIVHYLCLNLVGIFYRVMNDTVVRSSFLDRHQYIKEKIWLRNARLQEKQLLDSILPPQISLPLQKDIQGRIVMAKQGIHSWTAMERTMAIQIHPDVSILYADVVNYTHLTTTLTVEMLVKVLHDLYGRFDLAAYRYKVQRIKFLGDCYYCVAGLSDPDPDHANNCVILGLSMINHIMEVRDIHGLDINMRIGVHSGNLFAGVIGEAKLQFDIWGLDVTIANVLESTGVPGCVHISGATLNNLDVNRFDIEDGPEEARDHPLLKKYRIRSYIIRQDLHMDDEDSDEFLGDLHSISLCNMGAQPRISDSANQSLRALFHEELREEFRKMPMSCQREEFEMAYIEERLFHYEQEAHICFHPWVTTNMLSLMICLTFTFAHIPIMVKTAVAILETLAYLLLIFFQFDFVFHHSVTTNPYFKSEYAHALLICITFLIMFVKERQIEFTNKVNFNWRVDLRKEENAASLTNHSIIIILNNILPSHIVDVYLNSLAKHELYFENYRMVSVMFAMLINFEMDLRSLRVLNEIIAEFDTLLLFYKEYYTVEKIKIVGCTYMAACGLDLNFAGSTKFNEEQSRRILFQQSNEDLDEVVFVMTSYALDMMRTLAKSNEAYQSIAGDRNITDGTIAIGISSGEVMAGIVGASQPHYDIWGNPVNMASRMESTGLPGHIHVTEETSEILQQFGITCSYRGMTFVKGRGKIPTYLVGIDENLNFIPQKATRFPSHQERSTVISLQSTYTHAENNNSIASTSRHTLQSL

SEQ ID NO: 25384 - DNA, 6366 bp, DROSOPHILA
gatggctcggcaaacaccttgagctgaaattatttgaaatcccccacaacacaaaattgtacacatacatatatatttgacactttatttctgtggtttaacttttgctgtgatttcagtttcggttctctcattttttctgcttttccgcttagcaatttaatttttgtgcttccctttttctgaatttttttttttgtgttggccttcccgccgtgtttgcgtagctgaaattgttttccatttcaggttttccagtccggccatggggacgaaaaaatagggaactgtaagatgggtgctcgaggggttgtcatggatcctggttgctgaatggaatggtcgggagtcccagtttcgactccctgttgggtatacatttcaagtggctgtgcagccacaacctgtgcgatgataacgagtaaatgctgctcagggcattgcgaattgcattgggtttcccacaaatttatgctgcttctttctggggtgtccaaaagttggaatgagtttgctgacagcgaataaggtataggtaatcctgtgtagcacacgggccattctttaacgataaggttgcttccgataaattattgtgcagcttatttaagtttttatgttttttgtttaaagtacggaatatattattgatgtagaaaaatgttcaacaaacaagctacgtagatgttgaatttgtaagaaatgtatgatttctattgaaagtttcggatccctcctcgttggttaatatcaaaagcgtgaaaatcgattgatgctcactgctcttcatcaatagcaactaatagttctctctgtgcccagttagttgaacttggcaggccagtggcagaggttcgtggaccgcagtaaacgtgacgaaaatgcaaccaaaggtaagttctgtggatcgaccatcaaagatgtgttcatttagcattgcgaatgtcatgcacaggtatcgattgcattactacttccactgctattagcaattacggcgatgaggcaccaagtaaacattcctgaatctggcggtgcttttggtgcatcaaaagcatcttcggaaatagatctgtgcgaggactacgatgatattgccaagtggagtgataagcagttaaagattaatgaccaattaagaaaccttcagatggtaatgagctcgataatagtttctattaacagaaccacgtctatagagaagtgctgtttctatgaaaataactcaatggcactattaattgaaaatgtcaatgaaattgatccagttaaccaaattgaatcaagcaatgatctttcaacgaatctcaaaaatattctttctaaaatcaagaaaattatcgtgaaggcctttaatagttgctgtgaaaatttgcggggcacaatcgaaaaggcaaagagagaggtagaaaaaaaagtaaaggatatagaaataaaatatgaagagatggacaccgaacgttctaaaaggagtgacggtattcggaaaaaggtaaaacaactggagcgccgaatagaagctgtgaaatcaagtttggataaacttcaaaagaaaatggacacaaatgatgggaaaaccaattgtggtgaagaattaaaggaacaaatttcagttttgggtagtaacattagcacatccaaaactgaggcagagaacgaattcaacaaattaaataatcaactcaaagagatacaggaagagctaaggaatcaagataaaatatctgatgcgttaaaaaaaactttagaggacggtgccgaaattactaaaaatataatcgacaaaaccaaaaacaactgcggaattatgaatagtggtctagataagcaaattcaaaaggaggaccttatcgatttgaaaaagagaaccgaaaaccttcagaggctggttataagccttaccaataaaatggcaaactttgacaatcaaggatccgcaacaagccttagtgtaacgttaaatacgtgcatgacaaataatgaaaaacttaatacaattcaatctttacttcaggaaatgatacaagaacaaaatcaaacatgttctaaggcaacaacagaaatgattaaaaatggtagtccaccaggtagtccaagctgttcctcagatgaacagctgaaggaacatttgaaaacactacaaaatgaatctgcaattctggacgacgaacttaaaaagttccccaagtgctgccaaaaaattgataagcttaccgaacgggcggaacaaataactaatgtacttcaaaacatgaacacaacattcaataatcaaattcaagacaatgcaaataaatttaattccttaaaggatggcttggatgcaactgttaggaggacgggcaaaattaatcctccaaacgttaataatagtgttcaaaagcaagtaaaagaacttgaaagaaaggtatatagagctgtcttaaatttagatgcattgaaagaaacacaatatgatttcataaagcttatggaaagtaccaaacatcttaaatattcgcccaatgagatggagaagcttagaaaagatttcgaagagttccgacttaaaattctaagacagttagtcgattatgatcagaaaaagatacaagaaccatcaactgatgctagacagcgggagatacgactacaaaaaatccacgctaatgttcgccaggacatggataaattgaataatactattcagctccaagacaaactaaaaataaaggcgcaagatgaaataaaaaaacagaaaacgccatcaaagcttatgctcgcttgcgagagaaagtgcaaggaaatggaccattttgataaactcctagaacttatagaagaagcaaaaaatctggttaaaattaagagtacaactgaaatatcaacggcgaagccaactcagaaatatatcaaaaagaagaaacaaaaaaataaatctaagcgtaagcccaagccgaagccaacacgagaatggtctggtgtcatggttgggggcatcgattttgaacccaatcgggagataattcgtaaatacaaattaaacaaaaaaatgttaatgttaaattaaacaaatgttgtatttgaaaatcaaaaaagacaaattaaacatatttacttataacaaaaggtttacctttttctggtttgacacgttatgaaaaattccttctcgtaggggcacaataggtttcgttttattgttgttaagcattttttggaattaaaaatttcccctttttgcgcatattaagatctactgtagtctatttatttcgtatatactgaaactcccctcgcagggtaataagcgcgcaaatcgattgatgctcactgctcttcatcaatagcaactaatagttctctctgtgcccagttagttgaacttggcagaccggcgacagaggtccgtggaccgcagtaaacgtgacaaaaatgaaaccaaaggtgagttcactggatctaccaacgaagatgtgttcattcaacaatgcgaatgtcatgcacaggtatcgattgcgtcactgctacttgtgatatctgcaattaccgtggcgacgaacacgcatgactacggaaatatttataatcaaataagagcaccaccggtaaaagagcggtgtgatgactacaatgacatttcaaagtggattgctgagcaggtaaagcttagcgcccagttgaggaaatttcaaagagatcagaatgctatactgagctatttttacaaaacacctacttcaatgacctgtcggttttacgaagaaatcaccctgaatcgaatagtggaaaaggtcaataggataaatgaaataagtgaaagtcaagtagaaaagctgaaaatcagcggagatctggaaaaggacgtggaaaatgttttaccccaaattaaaaagttcgtttctaagggcatcaaaagctgctgtgaaaacttcactaaattaatagaacattataaaaaggatctacatttaaaaatcaagaatctgccaaataaattaaatgagacagaatctgaaaaattaaatgaaagtcactctattcaaaagaatctaggctacatagaaaaacaagttgaagaaataagaccactttttcagaagctacaaaaatattttcgtgatagtcaagcaaattcgaaatgttgtgatggcctaaaagaatcgtttcagtcattggaaaataaattatcgataatcaaaagcaatggatataaccagtctctaaagatagaaaatcagctaaaagaactgaaagataaaatacaggaaaatgtagaaaagacaaaagacataaagacaactttaagtcaccgctttgaaaatattaaaaatattcttggtatctgcaatcaaagctacatacatcaaaatgttccaatggatacaactatttttcttgacttggaaaaaaatgcagaaaccttagagaaactcgccgaaacgcttttcaaaaagttaggcgtcttggacattcataaaccctcaataaatttaaatgtaacccttaacacatgccaggaaaataatgaaatgctaaccaatatccaatctaaaatggggtatttgcttaagcaaaattctaaagattgttttgagggatcgcccacagactccaaaaattctaagtctttgattattaaaacttgttcatctaacgaaaagctacagaacagtattgcggagctggaaaaggaaataggaatcttgcgtaaagaactaaataaattcccgaaatgctgtaaaaaaatcgacgaccttatcgtgcatatgggaaaactagaaaatatgattaataaaatgaaccaaacttacaatgatcatctaaaagccaactcaaatcaacttaattctataaaagagggcatagataagtccttaagaaatttgggccataaccatgatgacgatgataataaaaaacttcaggagcaggcaagaaaacttaaaaaagatcttataaaagctagtttgaccttgagcattctaaaagaacgacaagatgacttattgaaagataataataaaattcaaacttcactatactctcctgatgagatggatggtttaaaaaaggagctatatgagcttagacaggacattgagggaaagttaaaggacttagctttaaagaagcaaagcaaaatggacgctgttaaacatctcgatacattcaataaagaagtaattcagaatctagataaagctaaaacaagtacccttgaacacaaggaactagatatgcggatcaaggatcagacagagaatcaaatcaagcaaacaaatgaaatgcttcattgttcaaaaaagtgtttgaaaattaacatgatgaacgatcttatggaccaagtggaagacatggaacgaattgtaaagataaacaaatagtgttctacatctatttctgatctatgatgtataagacgatattgttgaataaagcaattcaaatagccaattttttttattttttttttaaaataatgttttaaaaattatgttgaataaatttaattaataaaaacttactacaaaaatgattttaagatatcgggctttctgattcttttgtcagagctgtactgagttaaatataaatcatgctactacaagcggaatttacaaaaatcgacgatgcccttgacatctgtagctccatggaggaggatctgaacgagtgtctgaatatcgtaggggccatgatcgagaagtacaatgctcccggacgctacatcatatccatggatccattcgctgaggattttcaactgagcaatagcgagtccacggacttggatgggtcgtctataggaagttgtgactccgagctggacatgctaagccaactctacggagccagaagtgcccaggagttggatgaatcttacgtcgatgtgcgctataagtttatcaagctgaagcggttcttcgagggtacctttacccattttctaaggatcgttgactgtgctgatcgtcaaaataagatttcacatcgcatttttatgaactcgcaggataccaaggggaagcggtgcaggcactaggaatgcaaatttcctccaactattccatcaaacttgcgcgcgtgtgtaaactgcaaattgtgtcgacacttggcaggttttattaaaaattactgtcaccattagtcgagttgcccgatgactttcagcgaaaaaaagtggtgcagggatgaactttccaaaactcatttggcctgacatgaaaatgaggcaaagttttttatcagagcctcagtttttcttgcgacacaagttgcgcctgacgttaagcacgacgacgatgatgacgtcgatgttggtgggacagtaacaagtcagctgcatgtttatgagcacgacaatgggtaaatacaaatacggac

SEQ ID NO: 25385 - DNA, 4003 bp, DROSOPHILA
atgaggcaccaagtaaacattcctgaatctggcggtgcttttggtgcatcaaaagcatcttcggaaatagatctgtgcgaggactacgatgatattgccaagtggagtgataagcagttaaagattaatgaccaattaagaaaccttcagatggtaatgagctcgataatagtttctattaacagaaccacgtctatagagaagtgctgtttctatgaaaataactcaatggcactattaattgaaaatgtcaatgaaattgatccagttaaccaaattgaatcaagcaatgatctttcaacgaatctcaaaaatattctttctaaaatcaagaaaattatcgtgaaggcctttaatagttgctgtgaaaatttgcggggcacaatcgaaaaggcaaagagagaggtagaaaaaaaagtaaaggatatagaaataaaatatgaagagatggacaccgaacgttctaaaaggagtgacggtattcggaaaaaggtaaaacaactggagcgccgaatagaagctgtgaaatcaagtttggataaacttcaaaagaaaatggacacaaatgatgggaaaaccaattgtggtgaagaattaaaggaacaaatttcagttttgggtagtaacattagcacatccaaaactgaggcagagaacgaattcaacaaattaaataatcaactcaaagagatacaggaagagctaaggaatcaagataaaatatctgatgcgttaaaaaaaactttagaggacggtgccgaaattactaaaaatataatcgacaaaaccaaaaacaactgcggaattatgaatagtggtctagataagcaaattcaaaaggaggaccttatcgatttgaaaaagagaaccgaaaaccttcagaggctggttataagccttaccaataaaatggcaaactttgacaatcaaggatccgcaacaagccttagtgtaacgttaaatacgtgcatgacaaataatgaaaaacttaatacaattcaatctttacttcaggaaatgatacaagaacaaaatcaaacatgttctaaggcaacaacagaaatgattaaaaatggtagtccaccaggtagtccaagctgttcctcagatgaacagctgaaggaacatttgaaaacactacaaaatgaatctgcaattctggacgacgaacttaaaaagttccccaagtgctgccaaaaaattgataagcttaccgaacgggcggaacaaataactaatgtacttcaaaacatgaacacaacattcaataatcaaattcaagacaatgcaaataaatttaattccttaaaggatggcttggatgcaactgttaggaggacgggcaaaattaatcctccaaacgttaataatagtgttcaaaagcaagtaaaagaacttgaaagaaaggtatatagagctgtcttaaatttagatgcattgaaagaaacacaatatgatttcataaagcttatggaaagtaccaaacatcttaaatattcgcccaatgagatggagaagcttagaaaagatttcgaagagttccgacttaaaattctaagacagttagtcgattatgatcagaaaaagatacaagaaccatcaactgatgctagacagcgggagatacgactacaaaaaatccacgctaatgttcgccaggacatggataaattgaataatactattcagctccaagacaaactaaaaataaaggcgcaagatgaaataaaaaaacagaaaacgccatcaaagcttatgctcgcttgcgagagaaagtgcaaggaaatggaccattttgataaactcctagaacttatagaagaagcaaaaaatctggttaaaattaagagtacaactgaaatatcaacggcgaagccaactcagaaatatatcaaaaagaagaaacaaaaaaataaatctaagcgtaagcccaagccgaagccaacacgagaatggtctggtgtcatggttgggggcatcgattttgaacccaatcgggagataattcgaccggcgacagaggtccgtggaccgcagtaaacgtgacaaaaatgaaaccaaaggtgagttcactggatctaccaacgaagatgtgttcattcaacaatgcgaatgtcatgcacaggtatcgattgcgtcactgctacttgtgatatctgcaattaccgtggcgacgaacacgcatgactacggaaatatttataatcaaataagagcaccaccggtaaaagagcggtgtgatgactacaatgacatttcaaagtggattgctgagcaggtaaagcttagcgcccagttgaggaaatttcaaagagatcagaatgctatactgagctatttttacaaaacacctacttcaatgacctgtcggttttacgaagaaatcaccctgaatcgaatagtggaaaaggtcaataggataaatgaaataagtgaaagtcaagtagaaaagctgaaaatcagcggagatctggaaaaggacgtggaaaatgttttaccccaaattaaaaagttcgtttctaagggcatcaaaagctgctgtgaaaacttcactaaattaatagaacattataaaaaggatctacatttaaaaatcaagaatctgccaaataaattaaatgagacagaatctgaaaaattaaatgaaagtcactctattcaaaagaatctaggctacatagaaaaacaagttgaagaaataagaccactttttcagaagctacaaaaatattttcgtgatagtcaagcaaattcgaaatgttgtgatggcctaaaagaatcgtttcagtcattggaaaataaattatcgataatcaaaagcaatggatataaccagtctctaaagatagaaaatcagctaaaagaactgaaagataaaatacaggaaaatgtagaaaagacaaaagacataaagacaactttaagtcaccgctttgaaaatattaaaaatattcttggtatctgcaatcaaagctacatacatcaaaatgttccaatggatacaactatttttcttgacttggaaaaaaatgcagaaaccttagagaaactcgccgaaacgcttttcaaaaagttaggcgtcttggacattcataaaccctcaataaatttaaatgtaacccttaacacatgccaggaaaataatgaaatgctaaccaatatccaatctaaaatggggtatttgcttaagcaaaattctaaagattgttttgagggatcgcccacagactccaaaaattctaagtctttgattattaaaacttgttcatctaacgaaaagctacagaacagtattgcggagctggaaaaggaaataggaatcttgcgtaaagaactaaataaattcccgaaatgctgtaaaaaaatcgacgaccttatcgtgcatatgggaaaactagaaaatatgattaataaaatgaaccaaacttacaatgatcatctaaaagccaactcaaatcaacttaattctataaaagagggcatagataagtccttaagaaatttgggccataaccatgatgacgatgataataaaaaacttcaggagcaggcaagaaaacttaaaaaagatcttataaaagctagtttgaccttgagcattctaaaagaacgacaagatgacttattgaaagataataataaaattcaaacttcactatactctcctgatgagatggatggtttaaaaaaggagctatatgagcttagacaggacattgagggaaagttaaaggacttagctttaaagaagcaaagcaaaatggacgctgttaaacatctcgatacattcaataaagaagtaattcagaatctagataaagctaaaacaagtacccttgaacacaaggaactagatatgcggatcaaggatcagacagagaatcaaatcaagcaaacaaatgaaatgcttcattgttcaaaaaagtgtttgaaaattaacatgatgaacgatcttatggaccaagtggaagacatggaacgaattgtaaagataaacaaatag

SEQ ID NO: 25386 - protein, 679 aa, DROSOPHILA
MRHQVNIPESGGAFGASKASSEIDLCEDYDDIAKWSDKQLKINDQLRNLQMVMSSIIVSINRTTSIEKCCFYENNSMALLIENVNEIDPVNQIESSNDLSTNLKNILSKIKKIIVKAFNSCCENLRGTIEKAKREVEKKVKDIEIKYEEMDTERSKRSDGIRKKVKQLERRIEAVKSSLDKLQKKMDTNDGKTNCGEELKEQISVLGSNISTSKTEAENEFNKLNNQLKEIQEELRNQDKISDALKKTLEDGAEITKNIIDKTKNNCGIMNSGLDKQIQKEDLIDLKKRTENLQRLVISLTNKMANFDNQGSATSLSVTLNTCMTNNEKLNTIQSLLQEMIQEQNQTCSKATTEMIKNGSPPGSPSCSSDEQLKEHLKTLQNESAILDDELKKFPKCCQKIDKLTERAEQITNVLQNMNTTFNNQIQDNANKFNSLKDGLDATVRRTGKINPPNVNNSVQKQVKELERKVYRAVLNLDALKETQYDFIKLMESTKHLKYSPNEMEKLRKDFEEFRLKILRQLVDYDQKKIQEPSTDARQREIRLQKIHANVRQDMDKLNNTIQLQDKLKIKAQDEIKKQKTPSKLMLACERKCKEMDHFDKLLELIEEAKNLVKIKSTTEISTAKPTQKYIKKKKQKNKSKRKPKPKPTREWSGVMVGGIDFEPNREIIRPATEVRGPQ

SEQ ID NO: 25387 - DNA, 3302 bp, DROSOPHILA
gaaaacgaaattgcatttacgcacgtatgcgaatctattgttaacagaaaacagaattacattaaccatttcataaacacacctgataaaaccaccgaacatgcatcaaaatgcttgactcgtgtaaatatcgaatttgtgtgccataaagtaatcagtttcgtgatcaatttcgtgattacaattttgtgatagctagtaattaatccattcccatacaattttagggactaaagcaaaacacaattatatttacattttttatgcaaacaactgatgataataaaatctttactaaaaaaataaaacaactttcaacctttttgaatgtgaacaattgtacgaatctaaaaaaagggaagcataagctgatcttcttaataacgttggtattcaacgctattgcgaggctgcagcaatactttccttctcagtggaagctctggatgagttccatgatccataaacctggcaaaccgaaacaaaagggagcccgcttccaacaggccgatcagctttctcctttcgatctcaaaggtgtttgacagactaattgctgcccagatagtcaggataacggaatcgaaaaggattactccttacagtaccgtttagcaactccatgccgtgtacagtatccgcccatcaatgaggcttaattgaagccaaccgaggtacctcattcttcgatctcctttaaggcgggtacgaatggtccgaattaatatgcctttctatatatgcctttactatatgagtaattaagcttaaaaagctagtttaaaaacacgcgctttagtgtatttgaaatgtgttttacctattttcgtttcgtttttcaaaacatcggcttttcaaatataccgttatttatcaacggatagttaggaaattctatcgatacttcgaagcgcgctggccacacttttcatctctatcaatagttccaccactactttcttttttagcaattgattcgttttttttttggacgcacctgcgtgcttcagccacatttttggcctaaaacaatttttggccccaaacaatggaggccctagtgaattatagtagtgaggacgaccaggaggatgctggctttcagatacgggtaaatatgcctacaccgcaaggccggaagcagctgaaaaaagaaagaatcatcagagcgcattttgtgtacacatacatcttcatcacttttttcttccttgcgtatatgggaaccgcgtgtgtgtcgtgtttgtgttgtgtgtgtgcgaatgcgcggaaacgcaaaataaagaactgatcccatcaattcaaaaaacataaaaaaacgaggaaaattcaaaaccactaaccactccaataatacatttcaagtatgctttggtaaaataatgccaatttgctgtttcttaaaagttgcaaaattcccttggcaccacaacaactgcagcatttgccgcatgctaaatcctcgagaacaacaacaactgctaacttactagagcagaacaacaataactatgttagcggcaacagtccgcgcggcaaggaaagagattgccgtatttgagaaccgtgtgtgtgtgtgtgtgcttgtgtgtgtgtacgaatgcgcggaaacgcgaaataaagataactgatcccatcaattaaaaaaaacataaaaaaaacgagcaaaaatcaaaaccactaaccactccaataatatagttcaagtatcctagtgctttagtaaaataatgcgaatttgctgtttcttaaaagttgcaaaattcccctaggcaccacaacaacaacaacaactgcggcatttgccgcatgctaaatccccgaaaacaacaactgatagcttattaaagcagaagaacaacaataactatggcagcggcaacagtccgcgcggcaaggaacgagaaagagagcgcgagcgggagagagagaagacaaagccgatgtcgcagcagcagagtcataggagcagcagcagaggacgcattgatgaggtaaagacttgccgttgcaccaaatcgatatttacttcccataatatataccaaataccatatgctattgtactccatacgtatgtgtgtgtgtgtgtatctgggttggagcgcaagcggatctttcatgtgccgtttccttccgctgccgcaaagggcgacgccatcgccgactgcgctgccagcagcagcacttacagaggcaggcaaaataatagcacagagtccgctttaaatcaaacgtctaatgtatagatatcaatcaaatcgaaaccgagatcttttaaacttttgagttaaagttaatcccagttgtatacattggccaattcacttcaaataaaaaagagaaaatgccacgtaatgaatgaaaagtacttgtgccaaaaaaacaggacactgcatcaaatcaataatgcagcctagttttcagtgcctccattcctttacgccagcaaaagtaataattctatacataggcaaggtcattggcagcagtacttcattgttaaaactaaattaatggaatgttaaaacacaataatgcatgcagtccattccccactggttctatagtttatattgcaattaaagaaaagaacagattcacaatcttttcttgtagtcttgtagttcagctttacttcgggttatcattgattaatacttccattagttacagatataaatcgcagatcttgttagattctgcatctttaggggcttcaggcattttcttgtgctattatttagtcatctgctgttcccaactgaaaaattcaatattcatatatttatgtatattgatctccacgatcgactgcatgcgctccaacccgttacatccaaatttcgctactgccagatttatatgggccaaaaactcaaaattaaatccaaagacagaaaattctgtttgttcggtccgcttgcgatttacacacacattgttgttgttgttgttcggccagcttagttaagtctacaaactttatatgccaatcaatatttaaatgactaaactctaccattttattatcattgttattgttgttacgtaaacgaaaccgaatcgaaccaaaacgaaaaaccattttccaaacaaacaagtcaaaaacaaaaaacgaaaacaaacctgaccgacgataattgacgatagcccgatcgtagtaatcgctcgattaccaatagcttcttcgatagtgcgacaatcgatcaaatttgttatgaccaccactgtgtgtgtagtcctgtgtgcgactctgtggctgtgttggtgggtgtgtgtgagccactgaaaaaggtaaa

SEQ ID NO: 25388 - DNA, 641 bp, DROSOPHILA
cgtgcttcagccacatttttggcctaaaacaatttttggccccaaacaatggaggccctagtgaattatagtagtgaggacgaccaggaggatgctggctttcagatacgggcaccacaacaacaacaacaactgcggcatttgccgcatgctaaatccccgaaaacaacaactgatagcttattaaagcagaagaacaacaataactatggcagcggcaacagtccgcgcggcaaggaacgagaaagagagcgcgagcgggagagagagaagacaaagccgatgtcgcagcagcagagtcataggagcagcagcagaggacgcattgatgaggtaaagacttgccgttgcaccaaatcgatatttacttcccataatatataccaaataccatatgctattgtactccatacgtatgtgtgtgtgtgtgtatctgggttggagcgcaagcggatctttcatgtgccgtttccttccgctgccgcaaagggcgacgccatcgccgactgcgctgccagcagcagcacttacagaggcaggcaaaataatagcacagagtccgctttaaatcaaacgtctaatgtatagatatcaatcaaatcgaaaccgagatcttttaaacttttgagttaaagttaatc

SEQ ID NO: 25389 - protein, 179 aa, DROSOPHILA
MEALVNYSSEDDQEDAGFQIRAPQQQQQLRHLPHAKSPKTTTDSLLKQKNNNNYGSGNSPRGKEREREREREREKTKPMSQQQSHRSSSRGRIDEVKTCRCTKSIFTSHNIYQIPYAIVLHTYVCVCVSGLERKRIFHVPFPSAAAKGDAIADCAASSSTYRGRQNNSTESALNQTSNV

SEQ ID NO: 25390 - DNA, 2900 bp, DROSOPHILA
ctttagatgccgctcgtccgcatagagtttctgcagttcgcggatcatgagcatttggttgttggtctctttctcgcgctcctgtcgctccacgatccacttggccttgatctcgtccacgtcgcttttggcccgagcagcctgctccttggcccgggtattaagctcctgaatggtctgctccttttgggcgatttggctgcgcagttgctttttatccgcctgaaaggaggcctccatgcgggatttctcagcggaaagagtggccagcgagttcatcagggtgataatttgggtctgcagttgaccctcggccgggggagcaggcggacccggtgcagcgccctcggttgctccatccgcagagtcggtgctggtttttttggactccaactccctggccggcgatccggactcgcccaccgccgtggcctccgcatgcgccgccagactcgtctccaatgcctccttctccttaagcagacccttgtaggcagtgaccacgtctacaaattgggctcattaatccatttgcattgcgaattcatctatgtctcaccttttagacgcttttcatagcgccccagttgctccttttgggtggacaccagcgcctccagctccctctgtcgcttctccatttcgccttgaaagggaattagttcatttactttcagttcgcttagtagttcaatttatttatctcccgtgtcatttttgcatttcttttaattaacaaatttcagcagctggcacgcgggcctgccaacttgtcatgtttgctcaggcactaaaaattgccatcattctgatttaaacttttttttatttttgcggtttttcaaaaaataattaataaccaaatttacataaattaaaaactattttaaatgtaaatgtattataaatcagctgcatagttgctaaattgagatattttcaaacattaatattagtccaattaaagtaaattaaatgttgagcctaactaaatcttatttcattcgccctcctcgtccttcatcatctgctcaatgagtctcttacgttcctcagcttggcgcagctttcgcatgaccaggtcctcgtagtcggtggatgacgcactgcacccagtggtggccgatttggttgtctgcttgtctgccgccggcggcgttacccactcgaagtgcagcggcttggcgggatcgcctttttcgtaggccaagaccatgtcgcaggcttcgcgcgtggccagctccaccatggcgcgtccgcgtcgcttgctgttgaccaccagggccaccacgtcgccgtacttcttcagatacttgagcagctcttgctgtgtgtaatcctggccaggttcggccttccacttcatcttgatgcgatgctgggcggaatcaaactggaccggctgttgctgcagtttctgttgctccgcgtgattccgccggaactgctcctgcatggctcgctgctcctcctccagcagacgggagccctcgcgtcgcaaccgctcgatctgctcatgcagcacctcctcgtcgcttttggccaccgtgctgtagggttggctcttcgccagtttgtgcagtgccgcccgttcacgttcctccagttccagcttcagcttctgccgcttcccgtccagttggcgactcctcagctccgccgccttcttggccttcagcactttgtcataagctgcgcgcgcggattcatccgtgaggatctccagagccttggacaactcatggaagcgctcgactgccttcggattgtccggattcttgtcgggatggcactcgagggccttcttgcggtacgccttgcgtatctcattttgatcagactcgagagaaatgcccagaagatcgtaaagattcacgtcactgtactttttgctagccatttagtcttattttactccttattcaacaactggaacatgggtttgttttgcagtttgtcttttttgggcaaaagttagctaaaatatactattttatacgagacttatttcacaactgcagccggcggtccaaaaatgtccaaataaaacatttgcaattgtttactggatcagctgttcgctgcaacgagttggcagccccgcaacacaacgtgcccatttgtttggcgtggattaatctaagttatcgcaaaaaaaactcaaatataatatgacctttaggcgctgaattaagctgaaggtacgtcatgagcatctatcacgacgaggtggagatcgaggacttcgagtacgacgaggaggaggagatgtactactatccctgtccatgcggcgatcgatttcagatctccaaggtaacgagtcgtatacgcaacctttttttttctggactccccatatcacttggtaaatttccactttaggaggagctaatcgagggcgaggaggtggccacctgtcccagctgctccctagtcatcaaggtcatatacgatccggtaagtgactcattcagaaatacacctagaactccccagaaaactcaagcaatctgattttccgaatttcaggagatgttcaaagctgaggaggatgaagaaagtgcgctgaacgagaagctcggcgacctgaagctcgagaagaactaacacacagtttggtgtaattaaatagtttttatttatatatttttatatatatatagacttcattttagtgtaaataatacgatgactagtaaaacaatgatttcaaattatgcaagctcgcaaaaacagtttcgattcgttatggattattcgttttgggtgaattacaaaggatttatacacacattctagaatatctaaaactaaaacactcatattgcaccgagtacactttgttatatatgttttacaagcgcggaggacaacaatatgatgataatcgaacgaaa

SEQ ID NO: 25391 - DNA, 828 bp, DROSOPHILA
atggctagcaaaaagtacagtgacgtgaatctttacgatcttctgggcatttctctcgagtctgatcaaaatgagatacgcaaggcgtaccgcaagaaggccctcgagtgccatcccgacaagaatccggacaatccgaaggcagtcgagcgcttccatgagttgtccaaggctctggagatcctcacggatgaatccgcgcgcgcagcttatgacaaagtgctgaaggccaagaaggcggcggagctgaggagtcgccaactggacgggaagcggcagaagctgaagctggaactggaggaacgtgaacgggcggcactgcacaaactggcgaagagccaaccctacagcacggtggccaaaagcgacgaggaggtgctgcatgagcagatcgagcggttgcgacgcgagggctcccgtctgctggaggaggagcagcgagccatgcaggagcagttccggcggaatcacgcggagcaacagaaactgcagcaacagccgcaagagctgctcaagtatctgaagaagtacggcgacgtggtggccctggtggtcaacagcaagcgacgcggacgcgccatggtggagctggccacgcgcgaagcctgcgacatggtcttggcctacgaaaaaggcgatcccgccaagccgctgcacttcgagtgggtaacgccgccggcggcagacaagcagacaaccaaatcggccaccactgggtgcagtgcgtcatccaccgactacgaggacctggtcatgcgaaagctgcgccaagctgaggaacgtaagagactcattgagcagatgatgaaggacgaggagggcgaatga

SEQ ID NO: 25392 - protein, 275 aa, DROSOPHILA
MASKKYSDVNLYDLLGISLESDQNEIRKAYRKKALECHPDKNPDNPKAVERFHELSKALEILTDESARAAYDKVLKAKKAAELRSRQLDGKRQKLKLELEERERAALHKLAKSQPYSTVAKSDEEVLHEQIERLRREGSRLLEEEQRAMQEQFRRNHAEQQKLQQQPQELLKYLKKYGDVVALVVNSKRRGRAMVELATREACDMVLAYEKGDPAKPLHFEWVTPPAADKQTTKSATTGCSASSTDYEDLVMRKLRQAEERKRLIEQMMKDEEGE

SEQ ID NO: 25393 - DNA, 3068 bp, DROSOPHILA
accagcataaccagccacatgggcacccaaactatgtccaatcacctcaagggtttcaagtgacatatcgtgattttcgtgcatgtactggatcatctctcccactttggttccagctccaggaacagctcgtacggacatggcatagtcaacggactgggaccgagcccagttcacaacgatcacgttaaagtctccctttgagagccaggccttggttatatcgacattcatgctatcggtatattttcccttccatccatgaatgacaaaacgcgttccatggtccttgttgaaatgagaagctacaattgaagaagcatcggcagtaatttcttggccttccgtcgggttttgtttggtgtacagatagaaggacacttcattggaacggaattcgagaggggaaatgttttctaagagctctttagcgtcctttttgtccatccactgaaatgtgccatcctcctggggcacaaaccacccattttcgccattgatacgctcctcaataggaagggcattacctaagaacgaggaaattattatttaaaccgaaatgattttgaaaatcaatatatacccgctactaatagtgctgctagaaaaaataactccctcatgttggtatctccgtaatatgtagtctgctaaaggcttattacaatcgtttttataggctgtaaattatcaatagacagtctacttaagatcaggaaacgagtcttatcatttgatagtgttatatatatggtaatgccattaactgatagtatggtaatggcattattaagtttcgtgtgttgcatctatctaataaatttatattacagcccgtgggaatatgctatctataaaggtttgcttttgtttaagtggtttgaaatcctggtacacttcacctgcgagtacttgaaaatcgaaatcaaaaaatagctgaattttattggagtactaattttttgtattttgataagatgttcaatataatagttcccctctattcgatctttccgaagggggcctgtccgtttacgggcacatagaagtcaccgtcgaccatgtaggcgttggtaacagctcccatgcgaactccactgtaggtgcttccgcactcgttggccaacgcagcctggtagtcgtgacacttgatcgttccaaagttatcctcagtgactgcctccacgtaatacgttacggatcgtccgtgggcgcaggttcctccgatgtctgaaccgcaacctggttgatttcttcctccattcggatagaaagtgcctttgccaatgggttttaggaaacccttttcacccccattggtctgaatagactcgacatagaaggcatcttcggtggacagtcgcttgtcaggcttatcgtaggcaaaaagaggcatggcaggatccagaccgacaatcgtgtgaacccttttgccgcccacctgctttccagcatagccagccacatgggcacccaaactgtgtccgattacttccaggctctccatggacaaatgatggtgttcatgcagatattcaatcatttctcccactttggctccagctccaggaacagctcgcaccgatgagatatagtccacggactgggcacgatcccagttaacaacgatcacgttgtagtctcccttcgaaagccaggctcgggtgatcttgacgttcatgccatcagtgtagcgaccattccacccgtggattacgaaacgagtaccctggttcttatcgaaatgagagtcttcgattgatgaagcatcagccctgatttcctttcccacggttgggttatgtttggtgtacaggtaaaaggacacgtcattggaacgtgtttcgatgagtgaatttctatttaagagctcctcggcatcctgtttgtccatccactcgaaactgccgtctatctgaggcacataccaaccattttcaccattgacacgttcctcaatgggaagagcacttactagaaaccaagaaatgttaccactaaatcgcaataatacgctctataactcacctgttgccaacaaagccgctagagctatgaacactctcatattgatatcttcgcagaatctaacgcactaagccaatttaccacagcttttataggctgtaagttatcaaaaagcagcaccacatataagatcaggatagtattgtaagataatcttatcatttgagggctatttattcgtttttaatgattgtatatttaatccccaatatgacgacatttacccgcataggaaagcacacaaaagctacacaaatatttgtaatctatgtcatgtatttaatctattgccagtcagatcaagatattctcgattgatttcgagtgcttcgaaaatcccagtgtacttcaggtatgagtactttttgaacggtggtaggtcctccaaaatcgatgggggttgctaagtataatttaggggctggcgaaatacgactcaaagagcaaatcataaatacaagtcaaattaagtcaattaataattgaaatacaaatgttcatatttttcaatagaaggcctaattgaatgaaagaaagactataattttttgagtattcagtaatgtattttattcagagaacatggttctactcaatcttgccgaagggtgcctcgctgttcacggggacatagaagtcaccctcgaccatgtaggcgttggtaattgctcccatgcgaacgctggagtaggtgcttccgcagttcttggcaacggcatcctcgtagtcatggcacttaatggatccaaagttgtcctcggtgacggcctcggcgtagtagagaacggagcgtgcgtgagagcaggatccggtggcgtccagtccgcatccgggctggctcttgcctccattggggtagaaggctcccttgccgatgggcttcaggaatcccagtttgccgccgttggtctggatggactctacgtagtgggcatcatcggtggatagacgcttagcgggcttatcgtagctgaagagggggagggcaggatccagacccacaatggtgtgaacgcgcttgtctccgacggtctttccgg

SEQ ID NO: 25394 - DNA, 1014 bp, DROSOPHILA
atgagagtgttcatagctctagcggctttgttggcaacagtaagtgctcttcccattgaggaacgtgtcaatggtgaaaatggttggtatgtgcctcagatagacggcagtttcgagtggatggacaaacaggatgccgaggagctcttaaatagaaattcactcatcgaaacacgttccaatgacgtgtccttttacctgtacaccaaacataacccaaccgtgggaaaggaaatcagggctgatgcttcatcaatcgaagactctcatttcgataagaaccagggtactcgtttcgtaatccacgggtggaatggtcgctacactgatggcatgaacgtcaagatcacccgagcctggctttcgaagggagactacaacgtgatcgttgttaactgggatcgtgcccagtccgtggactatatctcatcggtgcgagctgttcctggagctggagccaaagtgggagaaatgattgaatatctgcatgaacaccatcatttgtccatggagagcctggaagtaatcggacacagtttgggtgcccatgtggctggctatgctggaaagcaggtgggcggcaaaagggttcacacgattgtcggtctggatcctgccatgcctctttttgcctacgataagcctgacaagcgactgtccaccgaagatgccttctatgtcgagtctattcagaccaatgggggtgaaaagggtttcctaaaacccattggcaaaggcactttctatccgaatggaggaagaaatcaaccaggttgcggttcagacatcggaggaacctgcgcccacggacgatccgtaacgtattacgtggaggcagtcactgaggataactttggaacgatcaagtgtcacgactaccaggctgcgttggccaacgagtgcggaagcacctacagtggagttcgcatgggagctgttaccaacgcctacatggtcgacggtgacttctatgtgcccgtaaacggacaggcccccttcggaaagatcgaatag

SEQ ID NO: 25395 - protein, 337 aa, DROSOPHILA
MRVFIALAALLATVSALPIEERVNGENGWYVPQIDGSFEWMDKQDAEELLNRNSLIETRSNDVSFYLYTKHNPTVGKEIRADASSIEDSHFDKNQGTRFVIHGWNGRYTDGMNVKITRAWLSKGDYNVIVVNWDRAQSVDYISSVRAVPGAGAKVGEMIEYLHEHHHLSMESLEVIGHSLGAHVAGYAGKQVGGKRVHTIVGLDPAMPLFAYDKPDKRLSTEDAFYVESIQTNGGEKGFLKPIGKGTFYPNGGRNQPGCGSDIGGTCAHGRSVTYYVEAVTEDNFGTIKCHDYQAALANECGSTYSGVRMGAVTNAYMVDGDFYVPVNGQAPFGKIE

SEQ ID NO: 25396 - DNA, 3070 bp, DROSOPHILA
tatctaaggcgacatgggtgcattgctcaaaaacatgtaatttaagtgcacactacatgagtcagtcacttgagatcgttccccgcctcctaaaatagtcccttagtgggagaccacagataaggtcctcgccgctcaagataggcagatgtgcccgagcgtgggacctcgataaggcggggactatttacgtaggcctctgcgtaggccatttactttaagatgcgattctcatgtcacctatttaaaccgaagatatttccaaataaaaccagtttcttacaaaaactcaacgagtaaagtcttcttatttgggattttacattcatttcacgcacaagtgaatgataggggcttgtcctaccatttgttgtctgccaaagtaagcatttagtagctttcactatcagttgcttgcttttggccacttcttcaattctaatcaatattcaatattcgctgccaaaatatcacagctggttaccaatttaaatataatattaatcgcaaaagcttttgagtcctcaaatcagtgaatggtttatcaaagaaatattccttgtcactgctgcaaaggaattttaatagtttatcaatattttaattacagagataagaagcttgctttgaacataaacaaggcaatacactacatatatgtatatcatcatcgtgattacttagtttaaatgttttcctatcaataaaaaccaaaaagccaatgaagatgaatcccatgcaaaatgatttgattaaaaattcagactatctagagacaacgtgaccatgacgtgcacaaagaaactcttcatgaatggcgactcgaattccaaacaggatgggtgggtgaacccgtccttatccactgacgtgcgacaaagcacttgtcgatttgacagtgattagaaccccctaagagccctatcaagatgcagatagactgacgaaaatagaccatctgatttttgggagctcagtttattgttattcattctgcattctattcagtttgcccgaatggagcctcactgtttacaggcacatagaagtggccctccacattgtacgcattcgtatcctctgccatgcggacgctgctgaaggagctgccacactcattgtccagagcagcctggtagtcctggcactggatagctccgaaactattctcggtgatggcctcggcgtagtaaatcacggaccgggcatgggaacaagttcctgcaaggtctactccacatcctggttgtttccgtcctccactcacatagaatgcggcttttccaatgggctttacgaatccctttacgccaccattggtctggatggactcgacatagaaggcatcttcgctagatagacgcttgtccgggttatcgtagctgaaaaggggcagggcaggatccagacccacaatcgtgtggactctcttctgcccaacttgcttaccagcataaccagccacatgggcacccaaactatgtccaatcacctcaagggtttcaagtgacatatcgtgattttcgtgcatgtactggatcatctctcccactttggttccagctccaggaacagctcgtacggacatggcatagtcaacggactgggaccgagcccagttcacaacgatcacgttaaagtctccctttgagagccaggccttggttatatcgacattcatgctatcggtatattttcccttccatccatgaatgacaaaacgcgttccatggtccttgttgaaatgagaagctacaattgaagaagcatcggcagtaatttcttggccttccgtcgggttttgtttggtgtacagatagaaggacacttcattggaacggaattcgagaggggaaatgttttctaagagctctttagcgtcctttttgtccatccactgaaatgtgccatcctcctggggcacaaaccacccattttcgccattgatacgctcctcaataggaagggcattacctaagaacgaggaaattattatttaaaccgaaatgattttgaaaatcaatatatacccgctactaatagtgctgctagaaaaaataactccctcatgttggtatctccgtaatatgtagtctgctaaaggcttattacaatcgtttttataggctgtaaattatcaatagacagtctacttaagatcaggaaacgagtcttatcatttgatagtgttatatatatggtaatgccattaactgatagtatggtaatggcattattaagtttcgtgtgttgcatctatctaataaatttatattacagcccgtgggaatatgctatctataaaggtttgcttttgtttaagtggtttgaaatcctggtacacttcacctgcgagtacttgaaaatcgaaatcaaaaaatagctgaattttattggagtactaattttttgtattttgataagatgttcaatataatagttcccctctattcgatctttccgaagggggcctgtccgtttacgggcacatagaagtcaccgtcgaccatgtaggcgttggtaacagctcccatgcgaactccactgtaggtgcttccgcactcgttggccaacgcagcctggtagtcgtgacacttgatcgttccaaagttatcctcagtgactgcctccacgtaatacgttacggatcgtccgtgggcgcaggttcctccgatgtctgaaccgcaacctggttgatttcttcctccattcggatagaaagtgcctttgccaatgggttttaggaaacccttttcacccccattggtctgaatagactcgacatagaaggcatcttcggtggacagtcgcttgtcaggcttatcgtaggcaaaaagaggcatggcaggatccagaccgacaatcgtgtgaacccttttgccgcccacctgctttccagcatagccagccacatgggcacccaaactgtgtccgattacttccaggctctccatggacaaatgatggtgttcatgcagatattcaatcatttctcccactttggctccagctccaggaacagctcgcaccgatgagatatagtccacggactgggcacgatcccagttaa

SEQ ID NO: 25397 - DNA, 1014 bp, DROSOPHILA
atgagggagttattttttctagcagcactattagtagcgggtaatgcccttcctattgaggagcgtatcaatggcgaaaatgggtggtttgtgccccaggaggatggcacatttcagtggatggacaaaaaggacgctaaagagctcttagaaaacatttcccctctcgaattccgttccaatgaagtgtccttctatctgtacaccaaacaaaacccgacggaaggccaagaaattactgccgatgcttcttcaattgtagcttctcatttcaacaaggaccatggaacgcgttttgtcattcatggatggaagggaaaatataccgatagcatgaatgtcgatataaccaaggcctggctctcaaagggagactttaacgtgatcgttgtgaactgggctcggtcccagtccgttgactatgccatgtccgtacgagctgttcctggagctggaaccaaagtgggagagatgatccagtacatgcacgaaaatcacgatatgtcacttgaaacccttgaggtgattggacatagtttgggtgcccatgtggctggttatgctggtaagcaagttgggcagaagagagtccacacgattgtgggtctggatcctgccctgccccttttcagctacgataacccggacaagcgtctatctagcgaagatgccttctatgtcgagtccatccagaccaatggtggcgtaaagggattcgtaaagcccattggaaaagccgcattctatgtgagtggaggacggaaacaaccaggatgtggagtagaccttgcaggaacttgttcccatgcccggtccgtgatttactacgccgaggccatcaccgagaatagtttcggagctatccagtgccaggactaccaggctgctctggacaatgagtgtggcagctccttcagcagcgtccgcatggcagaggatacgaatgcgtacaatgtggagggccacttctatgtgcctgtaaacagtgaggctccattcgggcaaactgaatag

SEQ ID NO: 25398 - protein, 337 aa, DROSOPHILA
MRELFFLAALLVAGNALPIEERINGENGWFVPQEDGTFQWMDKKDAKELLENISPLEFRSNEVSFYLYTKQNPTEGQEITADASSIVASHFNKDHGTRFVIHGWKGKYTDSMNVDITKAWLSKGDFNVIVVNWARSQSVDYAMSVRAVPGAGTKVGEMIQYMHENHDMSLETLEVIGHSLGAHVAGYAGKQVGQKRVHTIVGLDPALPLFSYDNPDKRLSSEDAFYVESIQTNGGVKGFVKPIGKAAFYVSGGRKQPGCGVDLAGTCSHARSVIYYAEAITENSFGAIQCQDYQAALDNECGSSFSSVRMAEDTNAYNVEGHFYVPVNSEAPFGQTE

SEQ ID NO: 25399 - DNA, 2737 bp, DROSOPHILA
tgtgttttctgatttgatgttgacgagttaagcattacgtaaaaattttctttaaaaacattgcttaattttccagtgagttccatcatgcggcaaaggacttctcagcgagggagatataaaagtccagagtcctcgctgacccataataagctggcagttatttcggaaacccaaatcgtgatggcgactggaaatttgatagtacgttgagtttaactttagaatctgcacttgaaatctcaacatgagggcagggaatccgagggcaaatatattgagaatcaagcacacgtaccgaaagtaacttaaagattttactgtgtttccaaaaccagccttcattctgtgcaaaagataaaagctccttcccacatcaacaaatagggttgccatgctcatgaaaatcccaaatgccaaatagaatgtaagccagaagaaatatcggtgattattgtgtccgatgcaagtggctgcgaagatgcagtggtggtctcgcttcaaaatgcagcatttacacagtgcacagtgccaggatcgtggaggcatcagtttctgacagatatcgcaataatgccacaggtgctccgttcccggtttcggaatttgccgctcctgaggcagacttttcactgctgagcttgtacggtagcaggccagcaagtttcccaggatattgtatgttgtaaaaatcgctgatatcacaaagaacttatacataaaaccatcatgcacatcgggggccacataaaagacctgcagcgtgaagaaaaaaaccgtgctcaccagtaaaaaaatcactgacaaaggatgtcctatgctcacggccttcttaggatagagattggcatattcgcggcaccaatcatttacgatacacatgattgtaggattttgaatacaacaccgtattttccacaacttgacattagatgaaaataagttatgattggcttgttaaaatcgatatatatttttcaataatttagtaatacgtctattaatttagtgagactgcttcatctgccaatgtgcaccgtcatggggcaaaggactcttcagcaagggcgatataaaagtccaaagtcctcgttggcccattattgtctggcagttctttcggaaacccagatcgtaggtgcaatcaaaaatattatagtaggtagagttttggcttaaaatctgcatttgatatgccaacataaaggcaggcatatagctggcgcttatattcaagaggaaggcaatggtctcaaaagtattgccagtataattttggaaaaaagtcctagttattaaattaaaaatcacagacgagagactcatgaagttaccgccattctgcaggataaacatacaaaatgttgcaaagcttgtgactaagccgagcgttaaataaaatgtgaaccagaagaaaaagcgttgattattgtgtccaatgcaagtgcccgtgaatatacagtggtggtcccgtctcaaaatgcaggtgttgcacaaaacgcagtgccaggatcgtggcgatctcagctttttacacgattcgcaatagtgccacaggggctcatcctctggattcgggcatcgggagtccttggacaaggtgtttaccgatgagctagtcatatagcaggccagcatgttaccaagtatgttgtgcgttatgaaggtgaccaatatccagtagagcttgtaagcaatgtcgccaaacactttgggcgcaatgtaaaacatctgcagtgagaagaagaaagctgtgctgcacaggacgaaaactatcgaaagtggatgcactatcctcacaaagttcttcgggtagcgattggcaaagtaatggcaaaatctattcacgtagcacattttttaggattttgaaaacttctgttgtaaattatagactaaatagaaacatttacatcacagaagaagaaacgccaacccgacatattataatagaatttattcgctatcttatattcaaagtttttacaaacaaaatttacactgtctgcttctggaaccactgagtgccatcggtaggaagaggacttgagatcgttggagagaaaaaaatccagaagcgccgttttcccaagaccatatcaaaatttcttctccaaccaacatcatagctgcgatcgagcatcttatagcatgtactattccgatataccattatcatttgaaagacgaacatgaagagggggacgccaaaaagaaataaattcagtttgaaaaggttggcgattgtgtacttccatttgaaatcagcatcttgggttgtatcctggaacattagcaacaaaggatcgacgaccaaaaaggccttgtttgtccaattcaaaatgccattgtagacgagcgcctgtccgctgccaaagctcaggtgaaacaagaaggcaaggaaatacctctgatttttatggccaatgcaactggcaaagaaggtgcagtggtgatcccgcttcagaatgcaaatgttgcacaaactacagtgccaggacctcggtggcaccagcttttggcatgtggagcagtagtgccacaggtgagcctcacctgccacaggatactgtctttccagaactaagctatcgactgaggtattggtcatacagccgagccaccagttgcccaatatattgatgactgtataaattcccataaaccaacacaatttgtgccatataccatggggatcagttatttgcggcaaaacgtagcataattcatagacaaa

SEQ ID NO: 25400 - DNA, 737 bp, DROSOPHILA
ctgcagatgttttacattgcgcccaaagtgtttggcgacattgcttacaagctctactggatattggtcaccttcataacgcacaacatacttggtaacatgctggcctgctatatgactagctcatcggtaaacaccttgtccaaggactcccgatgcccgaatccagaggatgagcccctgtggcactattgcgaatcgtgtaaaaagctgagatcgccacgatcctggcactgcgttttgtgcaacacctgcattttgagacgggaccaccactgtatattcacgggcacttgcattggacacaataatcaacgctttttcttctggttcacattttatttaacgctcggcttagtcacaagctttgcaacattttgtatgtttatcctgcagaatggcggtaacttcatgagtctctcgtctgtgatttttaatttaataactaggacttttttccaaaattatactggcaatacttttgagaccattgccttcctcttgaatataagcgccagctatatgcctgcctttatgttggcatatcaaatgcagattttaagccaaaactctacctactataatatttttgattgcacctacgatctgggtttccgaaagaactgccagacaataatgggccaacgaggactttggacttttatatcgcccttgctgaagagtcctttgccccatgacggtgcacattggcagatgaagcagtctcactaaattaa

SEQ ID NO: 25401 - protein, 241 aa, DROSOPHILA
MFYIAPKVFGDIAYKLYWILVTFITHNILGNMLACYMTSSSVNTLSKDSRCPNPEDEPLWHYCESCKKLRSPRSWHCVLCNTCILRRDHHCIFTGTCIGHNNQRFFFWFTFYLTLGLVTSFATFCMFILQNGGNFMSLSSVIFNLITRTFFQNYTGNTFETIAFLLNISASYMPAFMLAYQMQILSQNSTYYNIFDCTYDLGFRKNCQTIMGQRGLWTFISPLLKSPLPHDGAHWQMKQSH

SEQ ID NO: 25402 - DNA, 2831 bp, DROSOPHILA
aacactatgattaaaatacaaaaggtggtatatcatgtcagtttcaatatagttaaaatttttaaacttgctgatgtcgtaccgtttgatcttccactgggcaccatcatggggcagaggactcttaacggtgggtgagaggaaagtccaaaagccttttccgcccaaaatcagcttgaaattctcccacaagcccagatcgtaggtatcactgtaaaacttatgcaaagtgccattatttttaagtacagataattgcataagcaccgaagatacaggggctgcaaatacgtaggtgtttagtataagagtgatgaccagccaaaatggaggtaagttatccctagggatatttaggaatatcaggtccgaatagctaaaatactttagggtggcaataatatgggtagccaaggccacaccagttcccaaagccatgaagagggtgaaccagaaaaagtatctctgattattgtgtccgacgcaactggcagtgaaaatgcagtggcggtcccgcttcagaatgcagcacttgcacaatatacagtgccaggatcttggaggcattagtttttcacaaacatcgcagtaatgccactggtgctcctcttccggctccggaatttgccgatcctttggcaggctctccaccgaagtgcttgtgatatgacacgcaagcatattgccaaagatattatatgttataaagattgccactagccagccgagcttgtacatgaatccttgaacatcaaacaattggggtaccacgtaaaacatttgcaggaccacaaaaaagatcgttgtcacgattacgaatagtactgcggtcggatgggagattcgaacgaatatctttggatttcgacgcgccaagtacttggtgcaggcccatatcaaacacataattttccgattttaaaattatatataattcagagtgtaagcttgtgttttctgatttgatgttgacgagttaagcattacgtaaaaattttctttaaaaacattgcttaattttccagtgagttccatcatgcggcaaaggacttctcagcgagggagatataaaagtccagagtcctcgctgacccataataagctggcagttatttcggaaacccaaatcgtgatggcgactggaaatttgatagtacgttgagtttaactttagaatctgcacttgaaatctcaacatgagggcagggaatccgagggcaaatatattgagaatcaagcacacgtaccgaaagtaacttaaagattttactgtgtttccaaaaccagccttcattctgtgcaaaagataaaagctccttcccacatcaacaaatagggttgccatgctcatgaaaatcccaaatgccaaatagaatgtaagccagaagaaatatcggtgattattgtgtccgatgcaagtggctgcgaagatgcagtggtggtctcgcttcaaaatgcagcatttacacagtgcacagtgccaggatcgtggaggcatcagtttctgacagatatcgcaataatgccacaggtgctccgttcccggtttcggaatttgccgctcctgaggcagacttttcactgctgagcttgtacggtagcaggccagcaagtttcccaggatattgtatgttgtaaaaatcgctgatatcacaaagaacttatacataaaaccatcatgcacatcgggggccacataaaagacctgcagcgtgaagaaaaaaaccgtgctcaccagtaaaaaaatcactgacaaaggatgtcctatgctcacggccttcttaggatagagattggcatattcgcggcaccaatcatttacgatacacatgattgtaggattttgaatacaacaccgtattttccacaacttgacattagatgaaaataagttatgattggcttgttaaaatcgatatatatttttcaataatttagtaatacgtctattaatttagtgagactgcttcatctgccaatgtgcaccgtcatggggcaaaggactcttcagcaagggcgatataaaagtccaaagtcctcgttggcccattattgtctggcagttctttcggaaacccagatcgtaggtgcaatcaaaaatattatagtaggtagagttttggcttaaaatctgcatttgatatgccaacataaaggcaggcatatagctggcgcttatattcaagaggaaggcaatggtctcaaaagtattgccagtataattttggaaaaaagtcctagttattaaattaaaaatcacagacgagagactcatgaagttaccgccattctgcaggataaacatacaaaatgttgcaaagcttgtgactaagccgagcgttaaataaaatgtgaaccagaagaaaaagcgttgattattgtgtccaatgcaagtgcccgtgaatatacagtggtggtcccgtctcaaaatgcaggtgttgcacaaaacgcagtgccaggatcgtggcgatctcagctttttacacgattcgcaatagtgccacaggggctcatcctctggattcgggcatcgggagtccttggacaaggtgtttaccgatgagctagtcatatagcaggccagcatgttaccaagtatgttgtgcgttatgaaggtgaccaatatccagtagagcttgtaagcaatgtcgccaaacactttgggcgcaatgtaaaacatctgcagtgagaagaagaaagctgtgctgcacaggacgaaaactatcgaaagtggatgcactatcctcacaaagttcttcgggtagcgattggcaaagtaatggcaaaatctattcacgtagcacattttttaggattttgaaaacttctgt

SEQ ID NO: 25403 - DNA, 831 bp, DROSOPHILA
atgtgtatcgtaaatgattggtgccgcgaatatgccaatctctatcctaagaaggccgtgagcataggacatcctttgtcagtgatttttttactggtgagcacggtttttttcttcacgctgcaggtcttttatgtggcccccgatgtgcatgatggttttatgtataagttctttgtgatatcagcgatttttacaacatacaatatcctgggaaacttgctggcctgctaccgtacaagctcagcagtgaaaagtctgcctcaggagcggcaaattccgaaaccgggaacggagcacctgtggcattattgcgatatctgtcagaaactgatgcctccacgatcctggcactgtgcactgtgtaaatgctgcattttgaagcgagaccaccactgcatcttcgcagccacttgcatcggacacaataatcaccgatatttcttctggcttacattctatttggcatttgggattttcatgagcatggcaaccctatttgttgatgtgggaaggagcttttatcttttgcacagaatgaaggctggttttggaaacacagtaaaatctttaagttactttcggtacgtgtgcttgattctcaatatatttgccctcggattccctgccctcatgttgagatttcaagtgcagattctaaagttaaactcaacgtactatcaaatttccagtcgccatcacgatttgggtttccgaaataactgccagcttattatgggtcagcgaggactctggacttttatatctccctcgctgagaagtcctttgccgcatgatggaactcactggaaaattaagcaatgtttttaa

SEQ ID NO: 25404 - protein, 276 aa, DROSOPHILA
MCIVNDWCREYANLYPKKAVSIGHPLSVIFLLVSTVFFFTLQVFYVAPDVHDGFMYKFFVISAIFTTYNILGNLLACYRTSSAVKSLPQERQIPKPGTEHLWHYCDICQKLMPPRSWHCALCKCCILKRDHHCIFAATCIGHNNHRYFFWLTFYLAFGIFMSMATLFVDVGRSFYLLHRMKAGFGNTVKSLSYFRYVCLILNIFALGFPALMLRFQVQILKLNSTYYQISSRHHDLGFRNNCQLIMGQRGLWTFISPSLRSPLPHDGTHWKIKQCF

SEQ ID NO: 25405 - DNA, 2951 bp, DROSOPHILA
tttatagtctattacattctttatttagcgacaaatacaacataacggaaatagaatataatcttaatggtcaagaatagatagatgatatcaaatttggactagacggcacgcttcgatttccatcgggtgccattgtggggcaggggacttttgatatttggcgataggcaagtccataatcgccgacttcccaggatcagggtcaaattattccctaatccaaggtcataggttcgatcagaataatcgtgcattactgagtttttgatgaccgtcactacttgggtgcaaaacagtgctgctggaaagagaacggcgaatatgttgacacctaagacactgactattcgatagaatatcactaattcttttctaccaggattcatgtaagcattaaaaataatgtaattggctttgactaaatcaaaaaatccaacaccgtgcttatgggccaacatgaagttatcaaataaggccactgcgctaccgatggccgcgtaaaatgagaaccatatgaaatatcgctgattattgtgtcccacgcagttgcccacaaaattgcagtggtgatcgcgtttcagaatgcacgcatcacagatgttgcagtgccaggaccttggcggtacattcctttggcatattttgcaaaaatgccacaggtgctcttcacctttcattggctgctgcatttgcggcggcaaagagtccacagtgttcaacgtcgtgacgcacagccttaagttttccagaatattgtagacaatccaagtggtgactaaaaaatgaaccgcctgtccaaacaatcccaaaaactgtggcattacgtagaaagcttcgaagaagtagaaaaacaagattatgcagacatttatggatactcccatgatatctgtccaggatttgatggcccccacgcgtcttgggatgttgatggtctgcatttgaacttgtgattgcatgatgccccgaagctgtacaaatacatgagaaattttcatcaatcggatacacggagaaactgtaattttggtgaatgatgctgaacactatgattaaaatacaaaaggtggtatatcatgtcagtttcaatatagttaaaatttttaaacttgctgatgtcgtaccgtttgatcttccactgggcaccatcatggggcagaggactcttaacggtgggtgagaggaaagtccaaaagccttttccgcccaaaatcagcttgaaattctcccacaagcccagatcgtaggtatcactgtaaaacttatgcaaagtgccattatttttaagtacagataattgcataagcaccgaagatacaggggctgcaaatacgtaggtgtttagtataagagtgatgaccagccaaaatggaggtaagttatccctagggatatttaggaatatcaggtccgaatagctaaaatactttagggtggcaataatatgggtagccaaggccacaccagttcccaaagccatgaagagggtgaaccagaaaaagtatctctgattattgtgtccgacgcaactggcagtgaaaatgcagtggcggtcccgcttcagaatgcagcacttgcacaatatacagtgccaggatcttggaggcattagtttttcacaaacatcgcagtaatgccactggtgctcctcttccggctccggaatttgccgatcctttggcaggctctccaccgaagtgcttgtgatatgacacgcaagcatattgccaaagatattatatgttataaagattgccactagccagccgagcttgtacatgaatccttgaacatcaaacaattggggtaccacgtaaaacatttgcaggaccacaaaaaagatcgttgtcacgattacgaatagtactgcggtcggatgggagattcgaacgaatatctttggatttcgacgcgccaagtacttggtgcaggcccatatcaaacacataattttccgattttaaaattatatataattcagagtgtaagcttgtgttttctgatttgatgttgacgagttaagcattacgtaaaaattttctttaaaaacattgcttaattttccagtgagttccatcatgcggcaaaggacttctcagcgagggagatataaaagtccagagtcctcgctgacccataataagctggcagttatttcggaaacccaaatcgtgatggcgactggaaatttgatagtacgttgagtttaactttagaatctgcacttgaaatctcaacatgagggcagggaatccgagggcaaatatattgagaatcaagcacacgtaccgaaagtaacttaaagattttactgtgtttccaaaaccagccttcattctgtgcaaaagataaaagctccttcccacatcaacaaatagggttgccatgctcatgaaaatcccaaatgccaaatagaatgtaagccagaagaaatatcggtgattattgtgtccgatgcaagtggctgcgaagatgcagtggtggtctcgcttcaaaatgcagcatttacacagtgcacagtgccaggatcgtggaggcatcagtttctgacagatatcgcaataatgccacaggtgctccgttcccggtttcggaatttgccgctcctgaggcagacttttcactgctgagcttgtacggtagcaggccagcaagtttcccaggatattgtatgttgtaaaaatcgctgatatcacaaagaacttatacataaaaccatcatgcacatcgggggccacataaaagacctgcagcgtgaagaaaaaaaccgtgctcaccagtaaaaaaatcactgacaaaggatgtcctatgctcacggccttcttaggatagagattggcatattcgcggcaccaatcatttacgatacacatgattgtaggattttgaatacaacaccgtattttccacaacttgacattagatgaaaataagttatgattggcttg

SEQ ID NO: 25406 - DNA, 951 bp, DROSOPHILA
atgtgtttgatatgggcctgcaccaagtacttggcgcgtcgaaatccaaagatattcgttcgaatctcccatccgaccgcagtactattcgtaatcgtgacaacgatcttttttgtggtcctgcaaatgttttacgtggtaccccaattgtttgatgttcaaggattcatgtacaagctcggctggctagtggcaatctttataacatataatatctttggcaatatgcttgcgtgtcatatcacaagcacttcggtggagagcctgccaaaggatcggcaaattccggagccggaagaggagcaccagtggcattactgcgatgtttgtgaaaaactaatgcctccaagatcctggcactgtatattgtgcaagtgctgcattctgaagcgggaccgccactgcattttcactgccagttgcgtcggacacaataatcagagatactttttctggttcaccctcttcatggctttgggaactggtgtggccttggctacccatattattgccaccctaaagtattttagctattcggacctgatattcctaaatatccctagggataacttacctccattttggctggtcatcactcttatactaaacacctacgtatttgcagcccctgtatcttcggtgcttatgcaattatctgtacttaaaaataatggcactttgcataagttttacagtgatacctacgatctgggcttgtgggagaatttcaagctgattttgggcggaaaaggcttttggactttcctctcacccaccgttaagagtcctctgccccatgatggtgcccagtggaagatcaaacggtacgacatcagcaagtttaaaaattttaactatattgaaactgacatgatataccaccttttgtattttaatcatagtgttcagcatcattcaccaaaattacagtttctccgtgtatccgattga

SEQ ID NO: 25407 - protein, 316 aa, DROSOPHILA
MCLIWACTKYLARRNPKIFVRISHPTAVLFVIVTTIFFVVLQMFYVVPQLFDVQGFMYKLGWLVAIFITYNIFGNMLACHITSTSVESLPKDRQIPEPEEEHQWHYCDVCEKLMPPRSWHCILCKCCILKRDRHCIFTASCVGHNNQRYFFWFTLFMALGTGVALATHIIATLKYFSYSDLIFLNIPRDNLPPFWLVITLILNTYVFAAPVSSVLMQLSVLKNNGTLHKFYSDTYDLGLWENFKLILGGKGFWTFLSPTVKSPLPHDGAQWKIKRYDISKFKNFNYIETDMIYHLLYFNHSVQHHSPKLQFLRVSD

SEQ ID NO: 25408 - DNA, 2873 bp, DROSOPHILA
cgtatcagctgttatttttctcctgccctactagttttatttttttgggaggaagttgctcaattgagagcgctgcaatcaggaatcagaggtcatcagacatcagttgtccgcaggaggcgaaggcggaatgagaatcggaatcgtgaacttagatatgaccgtcgcaataagcgattgccggaacaaatgtcgctaacggagaatcaccgccttttccgattggccaaaaagtgttgacaatgccatttctcagtggaccccgggcgggaatcccgctcacggccaaaggcatctgttccatggctcctctcgaatggttttgttcatttttcagccagttttgattaatggtcaggcggtttgagccggcggcgacttttttatttggcaattatgttgtttagacctcgcagcagatttcgcacctcgaacatttttcatgcaccgaaacacggaaacgcccactcatggactttgattccatgttttggggcatgtcactggcatgcgccgtcattaattctaccatttcccagccccctggactcccatgaattgtctataccgaccgagctgttgttctagccgctttcatttttcaaaacggatttcagcttttttcgacacttgacaagtgttttcgacttgcggcagaaggtgtcacaagccatggacagatttgaggttgatttcgttgggcaggatgtacttctcagcaattttcgtgggcggagagatatgcaaatgtagggcgtttatggcttgaattaaggacttctatctaggcgaattgtttttgttttgtgttttgtctgcattcaatttttatacatagatataaagtcactgtacacctttacacgtttatttttgaactaagaaaattgtccgtgttatttatagtctattacattctttatttagcgacaaatacaacataacggaaatagaatataatcttaatggtcaagaatagatagatgatatcaaatttggactagacggcacgcttcgatttccatcgggtgccattgtggggcaggggacttttgatatttggcgataggcaagtccataatcgccgacttcccaggatcagggtcaaattattccctaatccaaggtcataggttcgatcagaataatcgtgcattactgagtttttgatgaccgtcactacttgggtgcaaaacagtgctgctggaaagagaacggcgaatatgttgacacctaagacactgactattcgatagaatatcactaattcttttctaccaggattcatgtaagcattaaaaataatgtaattggctttgactaaatcaaaaaatccaacaccgtgcttatgggccaacatgaagttatcaaataaggccactgcgctaccgatggccgcgtaaaatgagaaccatatgaaatatcgctgattattgtgtcccacgcagttgcccacaaaattgcagtggtgatcgcgtttcagaatgcacgcatcacagatgttgcagtgccaggaccttggcggtacattcctttggcatattttgcaaaaatgccacaggtgctcttcacctttcattggctgctgcatttgcggcggcaaagagtccacagtgttcaacgtcgtgacgcacagccttaagttttccagaatattgtagacaatccaagtggtgactaaaaaatgaaccgcctgtccaaacaatcccaaaaactgtggcattacgtagaaagcttcgaagaagtagaaaaacaagattatgcagacatttatggatactcccatgatatctgtccaggatttgatggcccccacgcgtcttgggatgttgatggtctgcatttgaacttgtgattgcatgatgccccgaagctgtacaaatacatgagaaattttcatcaatcggatacacggagaaactgtaattttggtgaatgatgctgaacactatgattaaaatacaaaaggtggtatatcatgtcagtttcaatatagttaaaatttttaaacttgctgatgtcgtaccgtttgatcttccactgggcaccatcatggggcagaggactcttaacggtgggtgagaggaaagtccaaaagccttttccgcccaaaatcagcttgaaattctcccacaagcccagatcgtaggtatcactgtaaaacttatgcaaagtgccattatttttaagtacagataattgcataagcaccgaagatacaggggctgcaaatacgtaggtgtttagtataagagtgatgaccagccaaaatggaggtaagttatccctagggatatttaggaatatcaggtccgaatagctaaaatactttagggtggcaataatatgggtagccaaggccacaccagttcccaaagccatgaagagggtgaaccagaaaaagtatctctgattattgtgtccgacgcaactggcagtgaaaatgcagtggcggtcccgcttcagaatgcagcacttgcacaatatacagtgccaggatcttggaggcattagtttttcacaaacatcgcagtaatgccactggtgctcctcttccggctccggaatttgccgatcctttggcaggctctccaccgaagtgcttgtgatatgacacgcaagcatattgccaaagatattatatgttataaagattgccactagccagccgagcttgtacatgaatccttgaacatcaaacaattggggtaccacgtaaaacatttgcaggaccacaaaaaagatcgttgtcacgattacgaatagtactgcggtcggatgggagattcgaacgaatatctttggatttcgacgcgccaagtacttggtgcaggcccatatcaaacacataattttccgattttaaaattata

SEQ ID NO: 25409 - DNA, 873 bp, DROSOPHILA
cttcggggcatcatgcaatcacaagttcaaatgcagaccatcaacatcccaagacgcgtgggggccatcaaatcctggacagatatcatgggagtatccataaatgtctgcataatcttgtttttctacttcttcgaagctttctacgtaatgccacagtttttgggattgtttggacaggcggttcattttttagtcaccacttggattgtctacaatattctggaaaacttaaggctgtgcgtcacgacgttgaacactgtggactctttgccgccgcaaatgcagcagccaatgaaaggtgaagagcacctgtggcatttttgcaaaatatgccaaaggaatgtaccgccaaggtcctggcactgcaacatctgtgatgcgtgcattctgaaacgcgatcaccactgcaattttgtgggcaactgcgtgggacacaataatcagcgatatttcatatggttctcattttacgcggccatcggtagcgcagtggccttatttgataacttcatgttggcccataagcacggtgttggattttttgatttagtcaaagccaattacattatttttaatgcttacatgaatcctggtagaaaagaattagtgatattctatcgaatagtcagtgtcttaggtgtcaacatattcgccgttctctttccagcagcactgttttgcacccaagtagtgacggtcatcaaaaactcagtaatgcacgattattctgatcgaacctatgaccttggattagggaataatttgaccctgatcctgggaagtcggcgattatggacttgcctatcgccaaatatcaaaagtcccctgccccacaatggcacccgatggaaatcgaagcgtgccgtctag

SEQ ID NO: 25410 - protein, 280 aa, DROSOPHILA
MQTINIPRRVGAIKSWTDIMGVSINVCIILFFYFFEAFYVMPQFLGLFGQAVHFLVTTWIVYNILENLRLCVTTLNTVDSLPPQMQQPMKGEEHLWHFCKICQRNVPPRSWHCNICDACILKRDHHCNFVGNCVGHNNQRYFIWFSFYAAIGSAVALFDNFMLAHKHGVGFFDLVKANYIIFNAYMNPGRKELVIFYRIVSVLGVNIFAVLFPAALFCTQVVTVIKNSVMHDYSDRTYDLGLGNNLTLILGSRRLWTCLSPNIKSPLPHNGTRWKSKRAV

SEQ ID NO: 25411 - DNA, 3212 bp, DROSOPHILA
tgatattttgaaacatttcccagactgcaaattggaattgctgacattgcgtaaataaatggctcagcttgaactgaaaaaccaaattgtgaatatttttcttttttagctgagctgcaatgcaaaaacgttagagctaggcttagtcaaataatcaattctgctattttcgttggcgataatcaacatcgcattaaaaacgtgtcgaaccacaaaacaggacatcattaaacagccccatctccactgaccgaccgctcgggatatttaaagggttctggctcttaagctatgggggtcggcaaatgcagccctaaatcgcatgaaattatccacatttgcatgccaatacaaaacacacagagctaatggcaattccagccacaccacatttatatagctcatgaatttttgattacgcatttggcaatgcggccaaatacggtcaaaagcaccagccgtacccaaatgaaccaaaccaatccaacggaagtgactccgtgcaatttaatattacgcatacgcagcgtatgcaactgattggcagcggttaataaatgcgctcaaaccgtcgttcacgcccagcccacacacatgcaaatatttgaatgcgtattccataattcactggacgccaatcgagcagctttgcgtgtgaccagaaaagcatcgttataatataaatacgcgcatcatacataatatcccatcattttggtgctctatctgtggtgaaaacaaactgggaatcgcggtgtttcctcgagcctcgttcggtcatacgatggccattatcgcgggggttagtagctataaactatggtaacgatattatagaagaggtaagcagaattcaaactccttttagccattgggaaaatgccaccttagcaataaaagcaaattatctatctatttgtctgaaattatttatttattgtgcaaatatttattgtaagaaattatttatttattgtgcaaatatttattgtaagtatttctaacgaactttctgctttcgttgttttttaacaactaaacgcgttgagatattcttagaaatcttacaaacactaaaaacaataataagaagaatggcaatgataacaagcaaaataacaagaagaacagtgcccaagacatccagactgtggtgggtgaagaagctcaattttctcccggccacccgcatatgaggtgctcccttgtgacgcaggacgtagtgagtccaccagacagctgtctccaaaggcttcattggttgatctcgatagcgagcacctgctatccttgccgtgacctcaaatctcttctccgtcagcaactggagtattgtggccttcaactcatcacttgtcatatcatgatagttcaaagacaggcaaaagccatgttttttgatgtgatccacattggtaaattggtcgtagaagaagggcaatcccagcatgggcttaccatagtgaatgctctcaatggtgctctgcatacctccgtgggttataaagagtttcacttttgggtgggccagtaggtcctgttgcggtaaccatttgcgtactagaacattcgacggtatatcctgcagctcttcatcctcgaatttccacaagacgcgttgtggcaggctgccaaaggcttctatcaatattctcttgcggtcatctaccatatttttcgtccttacattggtgcccagagaaaagtaaattacaccatgctcaccagaaccttggataaagtcctccagatcctgggctaaagctttaggttgttcatcaatatgcataccaccaacttcgattacattcggaacatacggacgtggtggacccaatgtgaaatgttgatttaccaaaactaaagcaatgtcttggctaatttcagacagtggctttgtttcagctatttttgggaaatactttttgtaaagtgcctcatgcttttgctcataacgccagtgccagttgaaccaagaaatggcgacttccacaacgtgtgccacgcgacccccaaaagtatccaggttgtaaaggtaagatgagggcgactgaagataggacatcggcgatggattaccaaccatttcgtctattttccaatcgattccacagggagctaatccgataattggagcctcaaaataggcggcaaggctataaaaagcatcgtacttccatatgtccacaataatcagatcaaactgagcctttcccggcctgagtatctctcgtcgcactccgtcgttattaaatacatctttagtaatattatacacaaattcattggttgcgtcgaagaactcccacgtgtttttcggggttgtcatttgtttcaatagttctaataagaatataaacgtatagatgcaaaaatctgattgtatataaaatatatattgccttacttaccgtcaaaactatttaacacttccggaacataaatgtcgtatatatttttcactggttcttcagatggaaatggacttactgaagttatttcgtgacccaaagaggccaagtttttgagatatggaagggcatgataatagtgcgaatgggagggaaccggaaacaaagccaaaattcgagctccatacaagaaaccaggaaatagtaaaattataaggtaaaacaagcccgatgccaacatttttagaacgcaactttgcttttatcaagatttcaacgaagactaagtgaatttcagccacaaaccattttaaaataaatattgataagattaacccgataagagtgttaggaagtataatatattttagcattaactaacaacatgcttacatcttcctaatctatatgtcataaatcatacatctacctttctacgaatgtacacagatatgtattctctattgatatatttgtaagttaatttattttttgcttgggtgatatattaccctttttactctttaagatagcccttaacagtttaattgcacaaaggacaacaatactaaggatcgcccaaacggccaggagaaaagttcccaaaacatccaagctgtggtaagttataaaatccagatttctgcccgctacccgcatatgaggtgctcccttgtgacgcaggacgtagtgagtccaccagatcgccgtatccaaaggattcattggctgatcccgatacctgtccgctgttctttttgccttgacaccaaaactcttctctgtcagcaactgatgaat

SEQ ID NO: 25412 - DNA, 1212 bp, DROSOPHILA
aaggctcagtttgatctgattattgtggacatatggaagtacgatgctttttatagccttgccgcctattttgaggctccaattatcggattagctccctgtggaatcgattggaaaatagacgaaatggttggtaatccatcgccgatgtcctatcttcagtcgccctcatcttacctttacaacctggatacttttgggggtcgcgtggcacacgttgtggaagtcgccatttcttggttcaactggcactggcgttatgagcaaaagcatgaggcactttacaaaaagtatttcccaaaaatagctgaaacaaagccactgtctgaaattagccaagacattgctttagttttggtaaatcaacatttcacattgggtccaccacgtccgtatgttccgaatgtaatcgaagttggtggtatgcatattgatgaacaacctaaagctttagcccaggatctggaggactttatccaaggttctggtgagcatggtgtaatttacttttctctgggcaccaatgtaaggacgaaaaatatggtagatgaccgcaagagaatattgatagaagcctttggcagcctgccacaacgcgtcttgtggaaattcgaggatgaagagctgcaggatataccgtcgaatgttctagtacgcaaatggttaccgcaacaggacctactggcccacccaaaagtgaaactctttataacccacggaggtatgcagagcaccattgagagcattcactatggtaagcccatgctgggattgcccttcttctacgaccaatttaccaatgtggatcacatcaaaaaacatggcttttgcctgtctttgaactatcatgatatgacaagtgatgagttgaaggccacaatactccagttgctgacggagaagagatttgaggtcacggcaaggatagcaggtgctcgctatcgagatcaaccaatgaagcctttggagacagctgtctggtggactcactacgtcctgcgtcacaagggagcacctcatatgcgggtggccgggagaaaattgagcttcttcacccaccacagtctggatgtcttgggcactgttcttcttgttattttgcttgttatcattgccattcttcttattattgtttttagtgtttgtaagatttctaagaatatctcaacgcgtttagttgttaaaaaacaacgaaagcagaaagttcgttag

SEQ ID NO: 25413 - protein, 361 aa, DROSOPHILA
MVGNPSPMSYLQSPSSYLYNLDTFGGRVAHVVEVAISWFNWHWRYEQKHEALYKKYFPKIAETKPLSEISQDIALVLVNQHFTLGPPRPYVPNVIEVGGMHIDEQPKALAQDLEDFIQGSGEHGVIYFSLGTNVRTKNMVDDRKRILIEAFGSLPQRVLWKFEDEELQDIPSNVLVRKWLPQQDLLAHPKVKLFITHGGMQSTIESIHYGKPMLGLPFFYDQFTNVDHIKKHGFCLSLNYHDMTSDELKATILQLLTEKRFEVTARIAGARYRDQPMKPLETAVWWTHYVLRHKGAPHMRVAGRKLSFFTHHSLDVLGTVLLVILLVIIAILLIIVFSVCKISKNISTRLVVKKQRKQKVR

SEQ ID NO: 25414 - DNA, 8370 bp, DROSOPHILA
ctccccaagaagaacctggcccgattcatcgtctctccagaagcccaactggcgccaggcactccactaaatgtcaaccactttcgcgttggtgacttcgtcgatgttcgcggcaaaacgtaagtacatacgtctaagcgctggttatacgtactctacttatattttgcagagttgaccatggcttccaaggtgttgtcaagcgacacggatttaagggcatgccagcatcgcacggtgtgacgaaaactcatcgacgtgccggcaacattggcggtggtggcgagaagggtcgcgtctggccaggcacaaagatgccgggacacatgggaaaccggtggcgcatcatcaagggtctgcgcgtgtggcgcattaacaccaaatataatgttatgtgggtgcaagggagctcggtggccggccccaccggcggtctggtctacatatacgataccatcttgccaacgcgaaagaataaggaagccccaccgttcccaacgttttacggcgagccgcagcaagatggggatgatgtgtggtacgaacaggtgcacaacttcaaaagcgagtcaataacgtatgaaaacgaataactttagtgcttaaggtattatagaaacctaattgtttgttttgaaataaaagaaataactaattttatatatgcagagtagttttaaaagttggttgtaacttatttaagaggttttattcaaacctaaatcgaataagacctcagatggttaggtttcttatttgtttcattatattcatataggaattttaatgagcttctttttaaggggaagctcatttaaaataaaacctattggatttttgaatgcccctctgtgcagttattattcttattggcgtaaagcggctccaatccgttgttccgccacgcacgtgggtcacactgccatcgtatatcgatacatcctcgatgtggcaatcggggatggagccgcgaagcggtcacactaaatccaacttctaaaaaatcgtgccggttatttatttatttgtattattattacattaattatttaagcgggcacgattgtccaattggaaccatgccgaaggagcagtttcgcgcatctgcgctgaacaaaaagatgtgagttgcgcccccaaccaaaacaaataacagaaattaaccgaaacaacttcagttcacatgtgcaattcggaatcagcggcgccgatgaaatccaacaggaggctctggtgcggattatctcgaagaatctgtaccaggcccagcggcagccggtgccttacggcgtcctggatcgccggatgggcatcagtaccaaggatgccatgtgcgagacctgcggacagggcttgaacgagtgcatcggccactttggctacttggatctggcgctgccggtctttcacatcggccactttcgttccaccatcaacatactgcaaatgatctgcaaggtctgtgcccatgtgatgctcaagccagaggaccggcagttgtacgaaaagaagctgcacaacccgaacttctcgtatttgggcaagaaggcgctgcatgtgcagatgttggccaaggccaagaaggtaaccaaatgcccgcattgtggctcgccaaatggtggcgttaagaaggggccgggtctcctgaaaatcctccatgatccgtacaagggacgcaaaatggactcgctcttcaccagcaacatgaacgagatgctgcgctccacgcaaacgaatcgtgacctcaactcaacgctgggcaattacagcacagccgaggagctgactccactcatggtgctcgacctcttcgaacagataccccagcgagacgtggccctgctgggtatgtgctcgcacgatgctcatccaaagcatttgattgtcactcgcgtatttgtcccgcccgcatgcatccgtccgtcggttttgtctgaagtcaaggccggcaccacggaggacgatctgaccatgaaacaaagtgaaattctgctcatcaatgatgtaattcagcgtcacatggccaccgggggaaagatcgagctgatacacgaggattgggactttctgcaacttcatgttgccctatatttccacagtgagatcagcggaatacccattaatatggctccaaagaagacgacgcgcggaatcgtacagcgtttgaagggaaagcaaggacgctttcgttgtaatctatcgggaaagagagtggatttcagcggacgcactgtcatttcaccagatcccaacttgatgatcaaccaggttggagtaccagtgcgcgtggccaagattctcacataccccgagcgcgtgaatccagccaatataaggcacatgagggaactggtgcgcaacgggccaagcatgcacccgggcgccaactatgtgcagcagcgagggtcgagctttaagaagtaccttgcctacggcaatcgtgagaaggtggcgcaggagctgaagtgcggcgacgtcgtggaacgacatctgcgcgacggagatattgtgctgtttaatcgccagccgtcgctgcacaagatgtccattatgtgccatcgggccaaagtgcagccgcagaggacatttcgctttaatgagtgtgcatgtacgccatataacgccgatttcgacggcgatgaaatgaatctacacttgccacaaacggaggaggccagagccgaggcactcattctgatgggcaaccagtcgaatctggtgacgccaaagaacggtgagattctaattgccgccacacaggacttcattaccggcggctatttgctcacgcaaaaggaggtctttctgaccaaggaggaggccatgcagttggccgcctgctttttggccaacgaagactcgacaatgcacataaagctgccaccacccgctcttctcaagccgcgtcgtctgtggacgggcaagcaaatgttcagcctgctaatgcgtcccaatgacgactcccaagtgcgtctcaatatggtcaacaagggtcggaactacacgcgcaacaaggatctctgcagcaatgattcctgtgagtagttgattatcaaattatcaaattacaaattacaattgcatgctaaattgtatttgctctatggacagggattcatatacgaaactcggagctgatgtgcggtgtcatggataaggccacaatgggttcgggcaccaaacagtgcatcttttacttgctgctaagagactttggcgaatcgcatgccaccaaggccatgtggcgactggcgagggttcgtatgacacgtttattttgtctgtttgtttaccttgtttttacttatttggtgtcatttgatggatttaaggggtcatagctaattgtttgaatgatttcctgaattccgaaacatgttcgaactcgatatttcattgtctacttaaactttctcacgaatttgatcgattctataatcgaattgacatagatatacatgtgctttggtttagtaaatgcttttattagtgtccgtgtcgatttcatacagcaatgcccgttttgtctgcaatgaagccgaggaaggacgagacccgtgcgtatccagatggtagccggtatgtgcattgatcctcagcgacgaatgagttgatgccaatttgttgccattgttggatggttttgttgtacagaatgagaggaccgccagagtcgccggtgcaagtggacatgtcgctaccatcgaatcctttggcacacatggtcgagtccactacaacatatttaccatagatggccacacaatccgcattgtcaatgatctcgacttgggcatacaaaagggtttccgagtagtccaggtactcatcttccgtataaccgaatccagcgattgtggccacgctgcccacataatcgatcgagtccccgtactggccgaccagttgtatggcctgaatgttggccgagaatgtcagtggttctggcagttggatcagcgagacatcgttattcaatttgtcattgtagtccggatggattatgatattgttggacgtcatgttcagggcattcgcgttaaacagatccacagtgccgaacatcaggaagatggagctcaggccatttgtacaatgggccgccgtgagcacccaggtgtccgatatgatcgatcctccgcaaagtagatcatcccaggcatctctcttcagtatgacctgccagggaaactggcccaatttcgcatcgctaccggacactatgcgattatcctgttgaaacgcaactattgaagtttacacactcaaatactgggcattggccagcgacgcggcgcaccactcactatttttatcggtgaactgttggcaggatcaaagggttggccaacaacggagatggcagccaataggactagcatcaaggatcgctcgctattcagcgccatgtcttgtctccgtctttgtgctctgtcggaagttgactttaatttcacgcttctctgttaaatgagtcaagggactcgatcgagttatcttttatctctgtattttgcgcgaatttttctttaacattgagactttctgataagattaagagctaacttagtaatttccacgtaggtcgcgctctaacactagggaatagtatctcgctaattccattgttattaataccgatttttaattacttctacgaacatgggtatttgaaaaagtaatttgtgactattgttccctcgaaacatttacttctccgcacttttttctttttgtaagtatttattgaactttgcattgccgagttttcggccattgaggagtactctttccaagggtattataatatctggctactcaataacgtattcaacgctgatttctatggacagttttcttatctgaagggagaacactaattaacttttgctgttatttcaagggtcaatcaaaattcgtgaaaagtatttcgttcgcctgcgacagatattgattgcccaaagattaaagataatttgcacgcgtattatttggaaagctatattatatatactttactttcattgggcattggataagcgcactgatagcaacctactttccagatcgcatcctactttctgcagaatcgcggcttctcatttggcatcagcgacgtaacgccgagcaagaaactgttgcagcacaaggaattgctcttgaacaatggttacgcaaagtgtaatgagtatattgaattgctcaaggcgggaaccttgcagtgccagcctggttgcacgcccgaagagaccctggagtccgtcatgctgcgggaattgtcggccatccgagagcaggctgccaagacatgcttcgccgagctgcatcccacgaacagcgcactgataatggcgctcagtggctcgaagggttcgaacatcaacatatcgcagatgattgcgtgcgtgggacagcaagccattagtggtaaacgagtgcccaatggattcgagaatcgtgcattgccccacttcgaaaggcactgtaagtctggacgaatgcagcatatatgtatatccgatttaaagcaaccaatctcttcttgcagctgcgatacccgcggccaggggtttcgtacagaatagtttctactccggcttgacgccaacggagttcttcttccacacaatggctggtcgtgagggtttggtggacacagctgtgaaaaccgccgagactggatatctgcagcgacgtttggtcaagtgcctcgaagacctggtggttcactacgacggcacagtgcgcaatgctgtcaacgagatggtggataccatttacggtggcgatggcctggatcccgtgtccatggagacgcgcaacaaaccagttgatctagtccatcagtatgacaatctgcgtgcgcagcatccgcagggcaaggatcgtccacttaatgccgaggaaatgtctgaggctttggaaacgcttttgagaacacctgagtttgccgaagctcgagatgatttcaaattggatgttcggtgagttaaataaacgaacaacatatttactaaaagtgctgctctataccatgctcttcgcattgcaggaaccacatcaacacagtgtccaagcgcattgggcaattgcagaaacgctacgagaagtgtatcgacctgtgccaccagattgagtgcctcactaccgagcagctgctgcagtttgtgcgccgtataaatgatcgatacaatcgagctgttaccgagcctggcacagcggtgggtgccattgctgcgcagagtattggcgagccgggcacccagatgacgcttaagactttccatttcgctggtgtcgcatcgatgaacatcacccagggtgtaccacgtattgttgagattataaatgcgacgaaaaccatatcgacgccaatcataactgccgagctggagaattgccatagcatggagtttgcgcgacaagtcaaggcgcgcattgagaaaaccactttggcggagttgtcctcgtacgttgaagtcgtatgcggaccatacagctgctacctggcgatcggtgtcgatatggccagaattaagctactcggcctacacattgatctggacacaattgtatttagcattctgaagtcgcgcatgcgcgtcaagccgacgcaggtggaggttgttgccagccaatcgcgcattgtggttcgtgtggaagccacgcgaacgtcgaccataaatgcagagttggcgcgcctggcactcagtctgcagaacgtcgtagtggcgggcctgccaaatatcaatcgagcagttattgctgtcgatgatgcacggcagccgcccacgtataagctgtgcattgagggctatggacttcgcgatgtcatcgccacgtacggtgtggtgggcaaacgcaccaggagtaacaacatttgcgaaatctatcagacgctgggcatcgaagctgcccgaaccatcattatgagcgagatcaccgaggtgatggagggacacggtatgagcgtcgattggcgccacatcatgctcctggccagccaaatgacggcgcgtggcgaggtgttgggtatcacgcgacacggcttggccaaaatgcgtgagagtgtcttcaatttggcatcggtaagaagagatttcactatgctaagccgtacgtatgtatattaatgtatttcttttttgccacgtcagtttgagaagacggcggaccacttgtttgatgcagcttactatggccagacggatgccatcaatggcgtttcggagcgcattatcctgggaatgccagcgtgcattggcactggcatcttcaagttgctacaacagcacgaggacaagcaggtgccacctattgagcccaccatctgcagttccctgaatctgttgccaagcaaaaccacataagaagcgggccttcttgacgttatacttttataacttcattattgtaaataaatagtatatacatatttgttctgtctagctatgttaagcaaatttacctagattgtacttagctgcggaaattaaagatggtatttcttatattttggagctttgattaaattcgatttaaaattgctgatgcaaataacgaaaatattattattagtagtatattcaaatttgaattaaccgcgcagttcacattccgccgttccacatttgcttatgttcaaattgccacgacatggtcacactgaacgcttgagtttatcaaaacaacgtgttgttattaaattatggttttgatttctgacgcattcggtctggaaatatccccaaacgggatcctggttggtatgtatattgccaaaaccttgcaacgccctctaataaacatcatatacacaggtcatggcgatcaggcggtgttatatagctcagaacccaaagtcgagttgccggttcaactgcgtgagggaaaggttcgaggatttgcgtggagttccttgcgtaaatcgcaaagattattattgctatatagcgagaacgaatactccctgattaggtgtacaaccagctccgaaaacgatctctttcagctcgtttacgagggcgaaaccagagattggattaatgccgctctgtttttggaagatgaaaacgagtcggaggatcgcaaacgatttgttcttcacacatcgcacagtgctctcctttatatggaatatgatctaacgtcgaatgcagattgcactgtcttggagctggctcgatgcaccgacagttccatactctattacacgaaactccatgggagttcctttaataaactggccatcataagcggtaatgcctttggagaacttttggtatggcaaacgcagtttcccacagaatccgatccaaaatctgtaatgaaaacatatcccttgctcttgcgcattgaagcgcacaatgg

SEQ ID NO: 25415 - DNA, 3859 bp, DROSOPHILA
aaaatcgtgccggttatttatttatttgtattattattacattaattatttaagcgggcacgattgtccaattggaaccatgccgaaggagcagtttcgcgcatctgcgctgaacaaaaagatttcacatgtgcaattcggaatcagcggcgccgatgaaatccaacaggaggctctggtgcggattatctcgaagaatctgtaccaggcccagcggcagccggtgccttacggcgtcctggatcgccggatgggcatcagtaccaaggatgccatgtgcgagacctgcggacagggcttgaacgagtgcatcggccactttggctacttggatctggcgctgccggtctttcacatcggccactttcgttccaccatcaacatactgcaaatgatctgcaaggtctgtgcccatgtgatgctcaagccagaggaccggcagttgtacgaaaagaagctgcacaacccgaacttctcgtatttgggcaagaaggcgctgcatgtgcagatgttggccaaggccaagaaggtaaccaaatgcccgcattgtggctcgccaaatggtggcgttaagaaggggccgggtctcctgaaaatcctccatgatccgtacaagggacgcaaaatggactcgctcttcaccagcaacatgaacgagatgctgcgctccacgcaaacgaatcgtgacctcaactcaacgctgggcaattacagcacagccgaggagctgactccactcatggtgctcgacctcttcgaacagataccccagcgagacgtggccctgctgggtatgtgctcgcacgatgctcatccaaagcatttgattgtcactcgcgtatttgtcccgcccgcatgcatccgtccgtcggttttgtctgaagtcaaggccggcaccacggaggacgatctgaccatgaaacaaagtgaaattctgctcatcaatgatgtaattcagcgtcacatggccaccgggggaaagatcgagctgatacacgaggattgggactttctgcaacttcatgttgccctatatttccacagtgagatcagcggaatacccattaatatggctccaaagaagacgacgcgcggaatcgtacagcgtttgaagggaaagcaaggacgctttcgttgtaatctatcgggaaagagagtggatttcagcggacgcactgtcatttcaccagatcccaacttgatgatcaaccaggttggagtaccagtgcgcgtggccaagattctcacataccccgagcgcgtgaatccagccaatataaggcacatgagggaactggtgcgcaacgggccaagcatgcacccgggcgccaactatgtgcagcagcgagggtcgagctttaagaagtaccttgcctacggcaatcgtgagaaggtggcgcaggagctgaagtgcggcgacgtcgtggaacgacatctgcgcgacggagatattgtgctgtttaatcgccagccgtcgctgcacaagatgtccattatgtgccatcgggccaaagtgcagccgcagaggacatttcgctttaatgagtgtgcatgtacgccatataacgccgatttcgacggcgatgaaatgaatctacacttgccacaaacggaggaggccagagccgaggcactcattctgatgggcaaccagtcgaatctggtgacgccaaagaacggtgagattctaattgccgccacacaggacttcattaccggcggctatttgctcacgcaaaaggaggtctttctgaccaaggaggaggccatgcagttggccgcctgctttttggccaacgaagactcgacaatgcacataaagctgccaccacccgctcttctcaagccgcgtcgtctgtggacgggcaagcaaatgttcagcctgctaatgcgtcccaatgacgactcccaagtgcgtctcaatatggtcaacaaggagaccctggagtccgtcatgctgcgggaattgtcggccatccgagagcaggctgccaagacatgcttcgccgagctgcatcccacgaacagcgcactgataatggcgctcagtggctcgaagggttcgaacatcaacatatcgcagatgattgcgtgcgtgggacagcaagccattagtggtaaacgagtgcccaatggattcgagaatcgtgcattgccccacttcgaaaggcactctgcgatacccgcggccaggggtttcgtacagaatagtttctactccggcttgacgccaacggagttcttcttccacacaatggctggtcgtgagggtttggtggacacagctgtgaaaaccgccgagactggatatctgcagcgacgtttggtcaagtgcctcgaagacctggtggttcactacgacggcacagtgcgcaatgctgtcaacgagatggtggataccatttacggtggcgatggcctggatcccgtgtccatggagacgcgcaacaaaccagttgatctagtccatcagtatgacaatctgcgtgcgcagcatccgcagggcaaggatcgtccacttaatgccgaggaaatgtctgaggctttggaaacgcttttgagaacacctgagtttgccgaagctcgagatgatttcaaattggatgttcggaaccacatcaacacagtgtccaagcgcattgggcaattgcagaaacgctacgagaagtgtatcgacctgtgccaccagattgagtgcctcactaccgagcagctgctgcagtttgtgcgccgtataaatgatcgatacaatcgagctgttaccgagcctggcacagcggtgggtgccattgctgcgcagagtattggcgagccgggcacccagatgacgcttaagactttccatttcgctggtgtcgcatcgatgaacatcacccagggtgtaccacgtattgttgagattataaatgcgacgaaaaccatatcgacgccaatcataactgccgagctggagaattgccatagcatggagtttgcgcgacaagtcaaggcgcgcattgagaaaaccactttggcggagttgtcctcgtacgttgaagtcgtatgcggaccatacagctgctacctggcgatcggtgtcgatatggccagaattaagctactcggcctacacattgatctggacacaattgtatttagcattctgaagtcgcgcatgcgcgtcaagccgacgcaggtggaggttgttgccagccaatcgcgcattgtggttcgtgtggaagccacgcgaacgtcgaccataaatgcagagttggcgcgcctggcactcagtctgcagaacgtcgtagtggcgggcctgccaaatatcaatcgagcagttattgctgtcgatgatgcacggcagccgcccacgtataagctgtgcattgagggctatggacttcgcgatgtcatcgccacgtacggtgtggtgggcaaacgcaccaggagtaacaacatttgcgaaatctatcagacgctgggcatcgaagctgcccgaaccatcattatgagcgagatcaccgaggtgatggagggacacggtatgagcgtcgattggcgccacatcatgctcctggccagccaaatgacggcgcgtggcgaggtgttgggtatcacgcgacacggcttggccaaaatgcgtgagagtgtcttcaatttggcatcgtttgagaagacggcggaccacttgtttgatgcagcttactatggccagacggatgccatcaatggcgtttcggagcgcattatcctgggaatgccagcgtgcattggcactggcatcttcaagttgctacaacagcacgaggacaagcaggtgccacctattgagcccaccatctgcagttccctgaatctgttgccaagcaaaaccacataa

SEQ ID NO: 25416 - protein, 1259 aa, DROSOPHILA
MPKEQFRASALNKKISHVQFGISGADEIQQEALVRIISKNLYQAQRQPVPYGVLDRRMGISTKDAMCETCGQGLNECIGHFGYLDLALPVFHIGHFRSTINILQMICKVCAHVMLKPEDRQLYEKKLHNPNFSYLGKKALHVQMLAKAKKVTKCPHCGSPNGGVKKGPGLLKILHDPYKGRKMDSLFTSNMNEMLRSTQTNRDLNSTLGNYSTAEELTPLMVLDLFEQIPQRDVALLGMCSHDAHPKHLIVTRVFVPPACIRPSVLSEVKAGTTEDDLTMKQSEILLINDVIQRHMATGGKIELIHEDWDFLQLHVALYFHSEISGIPINMAPKKTTRGIVQRLKGKQGRFRCNLSGKRVDFSGRTVISPDPNLMINQVGVPVRVAKILTYPERVNPANIRHMRELVRNGPSMHPGANYVQQRGSSFKKYLAYGNREKVAQELKCGDVVERHLRDGDIVLFNRQPSLHKMSIMCHRAKVQPQRTFRFNECACTPYNADFDGDEMNLHLPQTEEARAEALILMGNQSNLVTPKNGEILIAATQDFITGGYLLTQKEVFLTKEEAMQLAACFLANEDSTMHIKLPPPALLKPRRLWTGKQMFSLLMRPNDDSQVRLNMVNKETLESVMLRELSAIREQAAKTCFAELHPTNSALIMALSGSKGSNINISQMIACVGQQAISGKRVPNGFENRALPHFERHSAIPAARGFVQNSFYSGLTPTEFFFHTMAGREGLVDTAVKTAETGYLQRRLVKCLEDLVVHYDGTVRNAVNEMVDTIYGGDGLDPVSMETRNKPVDLVHQYDNLRAQHPQGKDRPLNAEEMSEALETLLRTPEFAEARDDFKLDVRNHINTVSKRIGQLQKRYEKCIDLCHQIECLTTEQLLQFVRRINDRYNRAVTEPGTAVGAIAAQSIGEPGTQMTLKTFHFAGVASMNITQGVPRIVEIINATKTISTPIITAELENCHSMEFARQVKARIEKTTLAELSSYVEVVCGPYSCYLAIGVDMARIKLLGLHIDLDTIVFSILKSRMRVKPTQVEVVASQSRIVVRVEATRTSTINAELARLALSLQNVVVAGLPNINRAVIAVDDARQPPTYKLCIEGYGLRDVIATYGVVGKRTRSNNICEIYQTLGIEAARTIIMSEITEVMEGHGMSVDWRHIMLLASQMTARGEVLGITRHGLAKMRESVFNLASFEKTADHLFDAAYYGQTDAINGVSERIILGMPACIGTGIFKLLQQHEDKQVPPIEPTICSSLNLLPSKTT

SEQ ID NO: 25417 - DNA, 6025 bp, DROSOPHILA
attaccgtttttatttcacttgcaaatttatgacataatattacttgattatctacaacgttaaaaacttattattattacaaaatgaagtttaaagacagaagaactcttttatttacattccgaattttgaatatagcagttctattagttttgtttaaattacagatcattcagttcatctgaactttaagaacgcgctccagttttctcagcgtgtaatatcttagtgaagcatcacgctcttgcaacgtgataacgggccacaacaataacaaaattaaaactactctcgttccatcttgctcttagcgcttactatcgctctcgttcgctcttgtgtaagctcccacgatgtccattcccttcgcgcaagaaattggcaaaagcagcggcaaatttcaagttcaatgcgtgcctctgataaatggtcaatgtttgctgactttgtattcgaatgtttgctgtcttttggtggcctctggtcggtttttaccggttttcgttctcgtggctcaacagcattcggctgttttgttgacatgctggcggcattagctttttctctctccctctctcactgtctctggccctttcttctttcgccatgttaaaagcttttgcgggtgatctgctgttcttgcattacacatacatgggtgcaattgcgaaattcttcttcttgccacctaatctgttaaaaatcagaggcatatgtaagactattttaaagaagggctcctgaggcacaaatactacatacaacaaatatgtataaaatgaaattagtattttttatgggttttccttaacgtaaactagtattcttaatatatatgtactaacgaaacaaaataaaaagtatttaaaaagtgatgttgatcaatgagttgtatggagtaccttataagaacccccgttgctgacgcctctggccgacattcttctaatcacctttctcgtgttcatttcgcgtaatcgtatgatttgtaagctcttgtttgaccgtaggttcacgtgttaaactggctaatggccccatcctggtttcgaagtgcacaactgtccagttttgtaataaccgctcgtctgataaaatcgcaattatcaggtgattcacatgcgattggataaagattcggtcagatacttaaaaacatatcaaacacatatcggcaagacacgtcgggttgttaagggcgactcttattagatatggccaaagtccccccgtatagagtctagacatatcaaatctaaccctgacctcagcaatgggcaaataaaaccgcccatttggccaacatctaccacatctaatctgctaatgagaatacacgcacataccacacatatgtatgtataggcgcgcgcacgcacacacctgcaaaagctttaactaatctaaagctcacgagcgagcttttcgtgaaatgctgcaggttcttcgtcgtcggcaatttttgcacatcagttttaaaacccaagttaaccgaaacggcttgttaatttctagctgcggcgtataaaacacctttttttttggtgtaatccaggtaaaacaataaacagtggtctcaaatgaaattccatcgaacttgcggctgttcacttttgctgaacagtttgcaattcttgttaatttaacactttctatggcgtgggagtgtgtgtgtgtgtgtataaaaaagcatgctaaagttgattgaagaaggaattttccacgaaacgtgtcacagcgttcctggcttcattcgtaaccttgagccaaggtttccatctgctccggttcccagtgacccacaaaacacatgttccacattaggaaatccacctggtgcttgttcccacaccggctttttacattatgcatgccatgcgaatcctgacacaaggacgcgcaagcagcgtttattgattttttcatccattagccattagccgattaaagcaacagaaatccgtattaggcaagaatatgcatatgtacacaatatcaaagggtactccactcaactcaactcagctcgactggacacctcggggtctggccataaagagccgctcggagtcacctagccaaagcgtgtcaagttcagtcattctgctcacctggctaattgcccaagtcaccaccaagttggcacacacactaattgctcttttgtttatgtcgttactaatttgttggttttatcttttttactcgcacaccagttgatgcaacatgccgcccaacgcccaagccggtgcccagtccatctcagactcactgatcgcagcagctagtgccgccgccgacgcgggtcagagccccaccaagctgcaggaggactccaccggagtgctcttcgagtgcgatgtggaaaccaccgacggtggtcttgtcaaggacatcaccgtgatgaagaaggccgagaagcgccgcctgaagctcgtctggcgcaacatcatcgccttcggttacctccatctggctgccctctacggagcctacctcatggtcacctctgccaagtggcagacgtgcatcttaggtgagtcaataattcattataatagaagtatataaggttaaatatatagtttggtgtccaaagatctgtaaactgctaccaaatagaatggtcataatgtcagatctgcttggtctatccaaaatgcactttggtttatgtaacgaaatatttctattacttaatggcaagaggtcaaggtcatgtcaattaagaaaattgctcaattgctagaatcacacacttcaaagtaaagttttaatgacaatgtctttcttgaaatatgcataaaacgcttttcgcactgatactgcgatactaagatgatatctcaataatcagcgttctgatgaaaatataagtaaaacgtaaaaaagcaaatattatggaaattttatacttttggtaaggcaccgacaaccatgacaacgtaaaacgtaaaaaagcaaatattatggaaattttatacttttggtaaggcaccgacaaccatgacaaccattgccatcttcctgtcgcgtgccgaactctcgaacatataggggttatctaaggcttgcgccctgataaccttcacaaagttgttattgtggaagtccagactaaacatggcacagacggctgatcgtactttccatatacgcgattaccttaatggtgcaggtgcttatttttgtcggaaatcaaattaccttatattaaaacgatcacctttgcgatcaaacttagtaagcattatcaaaatgtgtgtcaagtcaccaaggatctatgttaattaatttaaagtattaagtaaggctactagtaatggatactttaaacttaattaagctatactctttggacaacgtaagctaaccaactgatttcttattttcagcttattttctatacgtcatttctggcctaggcattaccgccggtgcccatcgtctgtgggcgcatcgctcctacaaggccaagtggcccctgcgagtgattctggtcatcttcaacacgattgccttccaggatgccgcctaccattgggctcgcgaccatcgcgtccaccacaaatactcggagactgacgccgatccccacaacgccacgcgtggtttcttcttctcgcacgtcggctggctgctgtgcaagaagcacccggaggtgaaagccaagggcaagggagtcgatctatccgatctgcgcgccgatccaatcctcatgttccagaagaagtatataaaatcatttcgtttcagtcgctgcaaattctaatatgtttattctattgtccagatactacatgattttgatgccgattgcttgcttcatcatcccgaccgtggtgcccatgtacgcctggggtgaatccttcatgaacgcctggtttgtggccaccatgttccgctggtgtttcattctgaacgtaacctggctggtgaacagtgctgcccacaagttcggtggccgtccctacgacaagtaagtgcttagagtttgaacaacttatggatgtgtacttacagaggtttgttctttttagatttatcaatccttcggagaacatctccgtggctatcttggcctttggagagggatggcataactaccatcacgtcttcccctgggactacaagacggccgagtttggcaaatactcgctaaacttcactaccgccttcatcgatttcttcgccaagatcggctgggcctacgacctcaagacggtgtccacggatatcataaagaagcgtgtgaagcgtaccggtgacggcactcacgccacgtggggatggggcgatgtggaccagcccaaggaggagattgaggatgctgtcattacacacaaaaaaagcgaataggcaggttgagcgtagggccaatcatgggagggtttagcagaaaatcaatcaaattcaagtaaagcaaagaaacataaatttccattttgcaaatgtccgcggaacatatttcctaacagagcagaagcccatttaattaattctaagataaagcgttgatgataactgtttgttgtatctcgaaaaactttataccgtctgtgttaaaccagctccggaaatgtttttatttcgctctctttttatggggagacgcaaaactaactttgtatttatacacgcatataattgcttaatacctggatatttatgtacaatagatggcaattggagattttcattcactgttatctcgaaatcacttttgtaatttgagagaaattttcagttaaaaatctaaaagaaaaaatgatacaaatggaggaaaactttccgcttcaaagaaaaagaaatacctgcaaatgaaagattttagtatttagcgtaagccaaaaacaacaagaattatcaaggaactaatatatataaactatataataaacgatcgatgttagaacactaaaagacactttcacctatacatatgatatttctttaaatgttattaaataaaatgggaaaacgcctctgggaaacaaaacatcccagtagacttttccataaactgaaaatgtcaatgctcgccccaacactttcctttcagttgattcccaaaccccaaaagtgaaacacgcacacactcggagaacttttgaaacacacataccaaaacaaaattatcgtattggtcttccaatggacgaatttagagtacccaaaaaggttaaccgtaacgttttcaaggccattagcattcttcaatcttcccgaaccgattttgtctgcgctaatgcaatcgtcgaccaggtaaagttccaaatgcggaaccgcattccggtcgagcatatagatgaggccataaaacagtcgctggccaacttgaccatgctgggcatagtgcggcgtctgggatcgtctaagtattcgcttagcaccatagtgtatggccggttgggaatgcccaatcccattgcacatccgccgggcaatcctggtagaccacatcggcgagctgcgcagaatgcggtatgaatgcaatccaaagggatgttcttaataaataaaaagctaaccataatgttcaacttgcagcgtcaaaagcgacctgtcgggcgcttggatccttggaaatcggtcagcaagatcttgagtgaggactctctgtctggaactgagatgaccaagatgcgcaagcggatgcgcaccaacacaaagcgcgttgtcaagaagaaacgaatccccaaccgtcgactatctcgagccaggaagtataaagaaacagaaatggccaccaccagtatcgacctaagatgttcagaaagtcgtttgggactagacaataacgtgcaaatactattcggatcaccgggatggacctataccaaacccattcaaagtactttggtgttgcccgatgcaccattaagattggatcaaaaagcgaatgatcctgagaccccgaaaacaacagttctttccgggaatagcagcagcacttctgtgacagacgtaaaagggaatgtggtgaaggatgaggagggaggatctcaaccttcaattagtggc

SEQ ID NO: 25418 - DNA, 1968 bp, DROSOPHILA
tttgaccgtaggttcacgtgttaaactggctaatggccccatcctggtttcgaagtgcacaactgtccagttttgtaataaccgctcgtctgataaaatcgcaattatcaggtgattcacatgcgattggataaagattcgttgatgcaacatgccgcccaacgcccaagccggtgcccagtccatctcagactcactgatcgcagcagctagtgccgccgccgacgcgggtcagagccccaccaagctgcaggaggactccaccggagtgctcttcgagtgcgatgtggaaaccaccgacggtggtcttgtcaaggacatcaccgtgatgaagaaggccgagaagcgccgcctgaagctcgtctggcgcaacatcatcgccttcggttacctccatctggctgccctctacggagcctacctcatggtcacctctgccaagtggcagacgtgcatcttagcttattttctatacgtcatttctggcctaggcattaccgccggtgcccatcgtctgtgggcgcatcgctcctacaaggccaagtggcccctgcgagtgattctggtcatcttcaacacgattgccttccaggatgccgcctaccattgggctcgcgaccatcgcgtccaccacaaatactcggagactgacgccgatccccacaacgccacgcgtggtttcttcttctcgcacgtcggctggctgctgtgcaagaagcacccggaggtgaaagccaagggcaagggagtcgatctatccgatctgcgcgccgatccaatcctcatgttccagaagaaatactacatgattttgatgccgattgcttgcttcatcatcccgaccgtggtgcccatgtacgcctggggtgaatccttcatgaacgcctggtttgtggccaccatgttccgctggtgtttcattctgaacgtaacctggctggtgaacagtgctgcccacaagttcggtggccgtccctacgacaaatttatcaatccttcggagaacatctccgtggctatcttggcctttggagagggatggcataactaccatcacgtcttcccctgggactacaagacggccgagtttggcaaatactcgctaaacttcactaccgccttcatcgatttcttcgccaagatcggctgggcctacgacctcaagacggtgtccacggatatcataaagaagcgtgtgaagcgtaccggtgacggcactcacgccacgtggggatggggcgatgtggaccagcccaaggaggagattgaggatgctgtcattacacacaaaaaaagcgaataggcaggttgagcgtagggccaatcatgggagggtttagcagaaaatcaatcaaattcaagtaaagcaaagaaacataaatttccattttgcaaatgtccgcggaacatatttcctaacagagcagaagcccatttaattaattctaagataaagcgttgatgataactgtttgttgtatctcgaaaaactttataccgtctgtgttaaaccagctccggaaatgtttttatttcgctctctttttatggggagacgcaaaactaactttgtatttatacacgcatataattgcttaatacctggatatttatgtacaatagatggcaattggagattttcattcactgttatctcgaaatcacttttgtaatttgagagaaattttcagttaaaaatctaaaagaaaaaatgatacaaatggaggaaaactttccgcttcaaagaaaaagaaatacctgcaaatgaaagattttagtatttagcgtaagccaaaaacaacaagaattatcaaggaactaatatatataaactatataataaacgatcgatgttagaacactaaaagacactttcacctatacatatgatatttctttaaatgttattaaataaaatgggaaaacgcctctgggaaacaaaacatcccagtagacttttccataaac

SEQ ID NO: 25419 - protein, 383 aa, DROSOPHILA; identical to SEQ ID NO: 24150

SEQ ID NO: 25420 - DNA, 5566 bp, DROSOPHILA
gtttgctgtcttttggtggcctctggtcggtttttaccggttttcgttctcgtggctcaacagcattcggctgttttgttgacatgctggcggcattagctttttctctctccctctctcactgtctctggccctttcttctttcgccatgttaaaagcttttgcgggtgatctgctgttcttgcattacacatacatgggtgcaattgcgaaattcttcttcttgccacctaatctgttaaaaatcagaggcatatgtaagactattttaaagaagggctcctgaggcacaaatactacatacaacaaatatgtataaaatgaaattagtattttttatgggttttccttaacgtaaactagtattcttaatatatatgtactaacgaaacaaaataaaaagtatttaaaaagtgatgttgatcaatgagttgtatggagtaccttataagaacccccgttgctgacgcctctggccgacattcttctaatcacctttctcgtgttcatttcgcgtaatcgtatgatttgtaagctcttgtttgaccgtaggttcacgtgttaaactggctaatggccccatcctggtttcgaagtgcacaactgtccagttttgtaataaccgctcgtctgataaaatcgcaattatcaggtgattcacatgcgattggataaagattcggtcagatacttaaaaacatatcaaacacatatcggcaagacacgtcgggttgttaagggcgactcttattagatatggccaaagtccccccgtatagagtctagacatatcaaatctaaccctgacctcagcaatgggcaaataaaaccgcccatttggccaacatctaccacatctaatctgctaatgagaatacacgcacataccacacatatgtatgtataggcgcgcgcacgcacacacctgcaaaagctttaactaatctaaagctcacgagcgagcttttcgtgaaatgctgcaggttcttcgtcgtcggcaatttttgcacatcagttttaaaacccaagttaaccgaaacggcttgttaatttctagctgcggcgtataaaacacctttttttttggtgtaatccaggtaaaacaataaacagtggtctcaaatgaaattccatcgaacttgcggctgttcacttttgctgaacagtttgcaattcttgttaatttaacactttctatggcgtgggagtgtgtgtgtgtgtgtataaaaaagcatgctaaagttgattgaagaaggaattttccacgaaacgtgtcacagcgttcctggcttcattcgtaaccttgagccaaggtttccatctgctccggttcccagtgacccacaaaacacatgttccacattaggaaatccacctggtgcttgttcccacaccggctttttacattatgcatgccatgcgaatcctgacacaaggacgcgcaagcagcgtttattgattttttcatccattagccattagccgattaaagcaacagaaatccgtattaggcaagaatatgcatatgtacacaatatcaaagggtactccactcaactcaactcagctcgactggacacctcggggtctggccataaagagccgctcggagtcacctagccaaagcgtgtcaagttcagtcattctgctcacctggctaattgcccaagtcaccaccaagttggcacacacactaattgctcttttgtttatgtcgttactaatttgttggttttatcttttttactcgcacaccagttgatgcaacatgccgcccaacgcccaagccggtgcccagtccatctcagactcactgatcgcagcagctagtgccgccgccgacgcgggtcagagccccaccaagctgcaggaggactccaccggagtgctcttcgagtgcgatgtggaaaccaccgacggtggtcttgtcaaggacatcaccgtgatgaagaaggccgagaagcgccgcctgaagctcgtctggcgcaacatcatcgccttcggttacctccatctggctgccctctacggagcctacctcatggtcacctctgccaagtggcagacgtgcatcttaggtgagtcaataattcattataatagaagtatataaggttaaatatatagtttggtgtccaaagatctgtaaactgctaccaaatagaatggtcataatgtcagatctgcttggtctatccaaaatgcactttggtttatgtaacgaaatatttctattacttaatggcaagaggtcaaggtcatgtcaattaagaaaattgctcaattgctagaatcacacacttcaaagtaaagttttaatgacaatgtctttcttgaaatatgcataaaacgcttttcgcactgatactgcgatactaagatgatatctcaataatcagcgttctgatgaaaatataagtaaaacgtaaaaaagcaaatattatggaaattttatacttttggtaaggcaccgacaaccatgacaacgtaaaacgtaaaaaagcaaatattatggaaattttatacttttggtaaggcaccgacaaccatgacaaccattgccatcttcctgtcgcgtgccgaactctcgaacatataggggttatctaaggcttgcgccctgataaccttcacaaagttgttattgtggaagtccagactaaacatggcacagacggctgatcgtactttccatatacgcgattaccttaatggtgcaggtgcttatttttgtcggaaatcaaattaccttatattaaaacgatcacctttgcgatcaaacttagtaagcattatcaaaatgtgtgtcaagtcaccaaggatctatgttaattaatttaaagtattaagtaaggctactagtaatggatactttaaacttaattaagctatactctttggacaacgtaagctaaccaactgatttcttattttcagcttattttctatacgtcatttctggcctaggcattaccgccggtgcccatcgtctgtgggcgcatcgctcctacaaggccaagtggcccctgcgagtgattctggtcatcttcaacacgattgccttccaggatgccgcctaccattgggctcgcgaccatcgcgtccaccacaaatactcggagactgacgccgatccccacaacgccacgcgtggtttcttcttctcgcacgtcggctggctgctgtgcaagaagcacccggaggtgaaagccaagggcaagggagtcgatctatccgatctgcgcgccgatccaatcctcatgttccagaagaagtatataaaatcatttcgtttcagtcgctgcaaattctaatatgtttattctattgtccagatactacatgattttgatgccgattgcttgcttcatcatcccgaccgtggtgcccatgtacgcctggggtgaatccttcatgaacgcctggtttgtggccaccatgttccgctggtgtttcattctgaacgtaacctggctggtgaacagtgctgcccacaagttcggtggccgtccctacgacaagtaagtgcttagagtttgaacaacttatggatgtgtacttacagaggtttgttctttttagatttatcaatccttcggagaacatctccgtggctatcttggcctttggagagggatggcataactaccatcacgtcttcccctgggactacaagacggccgagtttggcaaatactcgctaaacttcactaccgccttcatcgatttcttcgccaagatcggctgggcctacgacctcaagacggtgtccacggatatcataaagaagcgtgtgaagcgtaccggtgacggcactcacgccacgtggggatggggcgatgtggaccagcccaaggaggagattgaggatgctgtcattacacacaaaaaaagcgaataggcaggttgagcgtagggccaatcatgggagggtttagcagaaaatcaatcaaattcaagtaaagcaaagaaacataaatttccattttgcaaatgtccgcggaacatatttcctaacagagcagaagcccatttaattaattctaagataaagcgttgatgataactgtttgttgtatctcgaaaaactttataccgtctgtgttaaaccagctccggaaatgtttttatttcgctctctttttatggggagacgcaaaactaactttgtatttatacacgcatataattgcttaatacctggatatttatgtacaatagatggcaattggagattttcattcactgttatctcgaaatcacttttgtaatttgagagaaattttcagttaaaaatctaaaagaaaaaatgatacaaatggaggaaaactttccgcttcaaagaaaaagaaatacctgcaaatgaaagattttagtatttagcgtaagccaaaaacaacaagaattatcaaggaactaatatatataaactatataataaacgatcgatgttagaacactaaaagacactttcacctatacatatgatatttctttaaatgttattaaataaaatgggaaaacgcctctgggaaacaaaacatcccagtagacttttccataaactgaaaatgtcaatgctcgccccaacactttcctttcagttgattcccaaaccccaaaagtgaaacacgcacacactcggagaacttttgaaacacacataccaaaacaaaattatcgtattggtcttccaatggacgaatttagagtacccaaaaaggttaaccgtaacgttttcaaggccattagcattcttcaatcttcccgaaccgattttgtctgcgctaatgcaatcgtcgaccaggtaaagttccaaatgcggaaccgcattccggtcgagcatatagatgaggccataaaacagtcgctggccaacttgaccatgctgggcatagtgcggcgtctgggatcgtctaagtattcgcttagcaccatagtgtatggccggttgggaatgcccaatcccattgcacatccgccgggcaatcctggtagaccacatcggcgagctgcgcagaatgcggtatgaatgcaatccaaagggatgttcttaataaataaaaagctaaccataatgttcaacttgcagcgtcaaaagcgacctgtcgggcgcttggatccttggaaatcggtcagcaagatcttgagtgaggactctctgtctggaactgagatgaccaagatgcgcaagcggatgcgcaccaacacaaagcgcgttgtcaagaagaaacgaatccccaaccgtcgactatctcgagccaggaagtataaagaaacagaaatggccaccaccagtatcgacctaagatgttcagaaagtcgtttgggactagacaataacgtgcaaatactattcggatcaccgggatggacctataccaaacccattcaaagtactttggtgttgcccgatgcaccattaagattggatcaaaaagcgaatgatcctgagaccccgaaaacaacagttctttccgggaatagcagcagcacttctgtgacagacgtaaaagggaatgtggtgaaggatgaggagggaggatctcaaccttcaattagtggc

SEQ ID NO: 25421 - DNA, 1924 bp, DROSOPHILA
atttttgcacatcagttttaaaacccaagttaaccgaaacggcttgttaatttctagctgcggcgtataaaacacctttttttttggtgtaatccagttgatgcaacatgccgcccaacgcccaagccggtgcccagtccatctcagactcactgatcgcagcagctagtgccgccgccgacgcgggtcagagccccaccaagctgcaggaggactccaccggagtgctcttcgagtgcgatgtggaaaccaccgacggtggtcttgtcaaggacatcaccgtgatgaagaaggccgagaagcgccgcctgaagctcgtctggcgcaacatcatcgccttcggttacctccatctggctgccctctacggagcctacctcatggtcacctctgccaagtggcagacgtgcatcttagcttattttctatacgtcatttctggcctaggcattaccgccggtgcccatcgtctgtgggcgcatcgctcctacaaggccaagtggcccctgcgagtgattctggtcatcttcaacacgattgccttccaggatgccgcctaccattgggctcgcgaccatcgcgtccaccacaaatactcggagactgacgccgatccccacaacgccacgcgtggtttcttcttctcgcacgtcggctggctgctgtgcaagaagcacccggaggtgaaagccaagggcaagggagtcgatctatccgatctgcgcgccgatccaatcctcatgttccagaagaaatactacatgattttgatgccgattgcttgcttcatcatcccgaccgtggtgcccatgtacgcctggggtgaatccttcatgaacgcctggtttgtggccaccatgttccgctggtgtttcattctgaacgtaacctggctggtgaacagtgctgcccacaagttcggtggccgtccctacgacaaatttatcaatccttcggagaacatctccgtggctatcttggcctttggagagggatggcataactaccatcacgtcttcccctgggactacaagacggccgagtttggcaaatactcgctaaacttcactaccgccttcatcgatttcttcgccaagatcggctgggcctacgacctcaagacggtgtccacggatatcataaagaagcgtgtgaagcgtaccggtgacggcactcacgccacgtggggatggggcgatgtggaccagcccaaggaggagattgaggatgctgtcattacacacaaaaaaagcgaataggcaggttgagcgtagggccaatcatgggagggtttagcagaaaatcaatcaaattcaagtaaagcaaagaaacataaatttccattttgcaaatgtccgcggaacatatttcctaacagagcagaagcccatttaattaattctaagataaagcgttgatgataactgtttgttgtatctcgaaaaactttataccgtctgtgttaaaccagctccggaaatgtttttatttcgctctctttttatggggagacgcaaaactaactttgtatttatacacgcatataattgcttaatacctggatatttatgtacaatagatggcaattggagattttcattcactgttatctcgaaatcacttttgtaatttgagagaaattttcagttaaaaatctaaaagaaaaaatgatacaaatggaggaaaactttccgcttcaaagaaaaagaaatacctgcaaatgaaagattttagtatttagcgtaagccaaaaacaacaagaattatcaaggaactaatatatataaactatataataaacgatcgatgttagaacactaaaagacactttcacctatacatatgatatttctttaaatgttattaaataaaatgggaaaacgcctctgggaaacaaaacatcccagtagacttttccataaac

SEQ ID NO: 25422 - protein, 383 aa, DROSOPHILA; identical to SEQ ID NO: 24150

SEQ ID NO: 25423 - DNA, 3817 bp, DROSOPHILA
ggttttccaggagtgggcatgcacattaatgcactagctggctgtctaatttatgtgcgacctgttacttgcttacagtcaccttcttccgccagttaacaaattaaacgctctgcttccgctctcaatgggtccaatcagtccaaaaccacccttttagccaggtaacccactcctaccgccatcccttttccaactcggttcccaccaaaaaatacatacatagtcgtcggccctcctgcggaatttcccgtttattggtttctttccggatattgttatgttcggctgtgaacgccttttccttccgccgctcgacgccttcaaattaccacccccaaaccccgttgactaacctgtagtagcgggtcctacgtagttcctgttgttgcctcgaaaagtgcaaaatgattgcggtttcgtgttgctcaggggtgcccctccaccctcggctatttccacttgcaacccccaccctaagctctctcgccgctccatttaatgtcgaagcaacacgcaagctgaaattgttgctgctgctttgtgtgtgacccttttaatgttccacacaattggttaatgtttctttcttttagtgatcataatagaacaattaaaaatcatgagtaaaccgtttttatttttacgctgttcttatgttaactagctaatgagaaacagtaccaaactttatacatataaacgaatttaaaatttatttattttatacttctatcgtaaaatgtaaaaattatgaagataaagcaattgttaaaatattattttatttgttttgacagtcaagtttcaagatcagttcagaacgatcaccttacatatgccatcaacatttatttgttatactaaatttaagtcgttttaattaaaataccatttagacataaggtggatcgatcgtccattcgggagggctgctatatcactttcgattatctgtgcaggaaagaatccttttgggatgcgctaaactaacaccttgctatttggtaagattcctgccctgttcgctgatgtccttttcgcccttgtggagtgatcttctaacaaagcgtgcggacagcttagagaagaagccaactcgcgtgggacgatttgtgttttcggtggatggtggagtctggctgttggatgccaccaatttaagaacctttaggggagtgctggtcgagtccagcatttcgaaatgagtcggtggtgttctggtgcattctgaagcttgacttggcgactgagtaatgggactccgaatttggtgtgatgcgcttgtcagcttttggtttacagccaactttcgttgggcactcagtagagttgtcttcacatccactggtgaaccgactcctttcttgggcatcgcagattgtggaatgctggacggctcggaacgtctgggattggcggctttgctagcagagcagcagatgtattttttgggcggtggtgtcaatggtagcggagtgagggcatttgccaagcgcggagccatgggacgtatggaagtggcggcaggcctattcggtgtactcttgtccagtgcaaaggtcacctggcttatagtaacattgggagcagctatagggacaggaatccgactgctgcctggcatagccgtaggagtttccctaaacgaagatcccgatttctcgctgcaggctgttgagcgcggtttagcaacgtccaggagcatataggtgcaatagatgtcgtcgaacttctggttcttcagcgactgctctacatcacgaggtttgtgacccatgttcgacagcaaactcaatcgatttacatcatgcagatccataggtttctcttgaaacggtctcaaaccgttaccttgttcgtagcccatgttgatccagcgatccgccatgacagccgataaactagtacgttgcgttggattcagaacgaggaacttcctaataagactctcgcattcaatggagacgtaatacggaacacgatacttgccacgtagaacacggtcgcggagctccttcagattggttccatcaaagggtaaggaaccactcaccaaggtgtacagcaccacacccagtgaccatgagtccacctccggtccagagtacttctttcctctgaacagttctggggcggcatacggtggacttccgcagaacgtctccagtggcgcttttggttcaaacgtggtgctgaaaccaaaatcagcgatcttcaatttcatttgctggtccaacaacaagttctctgcctttagatcccgatgcacaatggacttgctgtgacagtattcaatagcagacaccaactggcggaagagcaccctggcatctcgctcccgcatccttccgtttttgaccagataattgaagagttctcccccgctgacatactccattaccaagtagagagtcctttccgactcgataacttgcaagaggcgcacaatattcgggtggttgagctttttcattatatttacctctcggtacaacttctgccgggcaatcgtatttagcgcagttttatcgatcagcttaatggccacttcccgaccggtgggcagatgaatcgccaacttgactttcgcaaagttgcccttcccaagggtcttgatgatcttgtacactccgtagccgttgccatttacataggactgaaacttagggctcgatctgcctccactgctcccaaaacatccccccacattctgggcagctgcagaagggggcgtggcggtagtggatatcgatgtattgggaccgggatcgttctccttgtcggtcgttttgtttgtgtttgctgccgtcatttctggtaggattaatttatctaaatcccagcaaagcgttcgccgcacacttgtaagacaaactgatttgctgagttttgacttaatttcgttagaatgctcggtcagggccgactgtatcactttctttatcactctatcattctatctctatcaccttgacattgccccaaacaacccgacttctggctatttggtgaggttcttgcgctgctcggtgacatccttttcgttcaagtggattacccttcgaccgaaacgtgcggtcagcttggagaagaaacctacccgcgaggcgggcttggtgtcgtccgcggataagggtggcgtctgatagctgtcctcctctccgcctgcgccatttcctgatccaccgccccgtttgccactgcgcgcttggccgaaatgaaaagtggcccgtgccacattttgtcgggtgaagggcttgtcggaggtcttttccactgctccacctccgggaatccgttctagcagtcgagcacccatggccggcgacttgggcaccagaagtggagtgactgcaggttccgctttctcgtacagggtcgtgggccgcctggaggatccctgagcttgattcggagtttgggcaacggggtactggaagcgcggaggagtgttggccagcttttgggtctgggccaattgtcgctgggcactcagcagcgtgggcttcacatccatgttggcactggctctctttgactgcggagtgtgcggaagactcgaaggctccggacgtccttggccgctcgtatggttggtggccttccgggctggtgtcctggctggagtgcgtcttgtgggcttggcaggcggtcccgttggtggcgttgaagtcggtgtattgggtgcatttgccaaacgtggcgcaatgggtctacccgatgctgaggaggagtggatgggcggattcttgtccagcgcaagcgtgacatgagctatggtaacagtgggtgtggtgatattaggaagcgggct

SEQ ID NO: 25424 - DNA, 1817 bp, DROSOPHILA
aaatgacggcagcaaacacaaacaaaacgaccgacaaggagaacgatcccggtcccaatacatcgatatccactaccgccacgcccccttctgcagctgcccagaatgtggggggatgttttgggagcagtggaggcagatcgagccctaagtttcagtcctatgtaaatggcaacggctacggagtgtacaagatcatcaagacccttgggaagggcaactttgcgaaagtcaagttggcgattcatctgcccaccggtcgggaagtggccattaagctgatcgataaaactgcgctaaatacgattgcccggcagaagttgtaccgagaggtaaatataatgaaaaagctcaaccacccgaatattgtgcgcctcttgcaagttatcgagtcggaaaggactctctacttggtaatggagtatgtcagcgggggagaactcttcaattatctggtcaaaaacggaaggatgcgggagcgagatgccagggtgctcttccgccagttggtgtctgctattgaatactgtcacagcaagtccattgtgcatcgggatctaaaggcagagaacttgttgttggaccagcaaatgaaattgaagatcgctgattttggtttcagcaccacgtttgaaccaaaagcgccactggagacgttctgcggaagtccaccgtatgccgccccagaactgttcagaggaaagaagtactctggaccggaggtggactcatggtcactgggtgtggtgctgtacaccttggtgagtggttccttaccctttgatggaaccaatctgaaggagctccgcgaccgtgttctacgtggcaagtatcgtgttccgtattacgtctccattgaatgcgagagtcttattaggaagttcctcgttctgaatccaacgcaacgtactagtttatcggctgtcatggcggatcgctggatcaacatgggctacgaacaaggtaacggtttgagaccgtttcaagagaaacctatggatctgcatgatgtaaatcgattgagtttgctgtcgaacatgggtcacaaacctcgtgatgtagagcagtcgctgaagaaccagaagttcgacgacatctattgcacctatatgctcctggacgttgctaaaccgcgctcaacagcctgcagcgagaaatcgggatcttcgtttagggaaactcctacggctatgccaggcagcagtcggattcctgtccctatagctgctcccaatgttactataagccaggtgacctttgcactggacaagagtacaccgaataggcctgccgccacttccatacgtcccatggctccgcgcttggcaaatgccctcactccgctaccattgacaccaccgcccaaaaaatacatctgctgctctgctagcaaagccgccaatcccagacgttccgagccgtccagcattccacaatctgcgatgcccaagaaaggagtcggttcaccagtggatgtgaagacaactctactgagtgcccaacgaaagttggctgtaaaccaaaagctgacaagcgcatcacaccaaattcggagtcccattactcagtcgccaagtcaagcttcagaatgcaccagaacaccaccgactcatttcgaaatgctggactcgaccagcactcccctaaaggttcttaaattggtggcatccaacagccagactccaccatccaccgaaaacacaaatcgtcccacgcgagttggcttcttctctaagctgtccgcacgctttgttagaagatcactccacaagggcgaaaaggacatcagcgaacagggcaggaatcttaccaaatag

SEQ ID NO: 25425 - protein, 604 aa, DROSOPHILA
MTAANTNKTTDKENDPGPNTSISTTATPPSAAAQNVGGCFGSSGGRSSPKFQSYVNGNGYGVYKIIKTLGKGNFAKVKLAIHLPTGREVAIKLIDKTALNTIARQKLYREVNIMKKLNHPNIVRLLQVIESERTLYLVMEYVSGGELFNYLVKNGRMRERDARVLFRQLVSAIEYCHSKSIVHRDLKAENLLLDQQMKLKIADFGFSTTFEPKAPLETFCGSPPYAAPELFRGKKYSGPEVDSWSLGVVLYTLVSGSLPFDGTNLKELRDRVLRGKYRVPYYVSIECESLIRKFLVLNPTQRTSLSAVMADRWINMGYEQGNGLRPFQEKPMDLHDVNRLSLLSNMGHKPRDVEQSLKNQKFDDIYCTYMLLDVAKPRSTACSEKSGSSFRETPTAMPGSSRIPVPIAAPNVTISQVTFALDKSTPNRPAATSIRPMAPRLANALTPLPLTPPPKKYICCSASKAANPRRSEPSSIPQSAMPKKGVGSPVDVKTTLLSAQRKLAVNQKLTSASHQIRSPITQSPSQASECTRTPPTHFEMLDSTSTPLKVLKLVASNSQTPPSTENTNRPTRVGFFSKLSARFVRRSLHKGEKDISEQGRNLTK

SEQ ID NO: 25426 - DNA, 4457 bp, DROSOPHILA
aatcattttgacatgcaactcgcttcaaaaccgaattaagtggcattcagcgtcagtcacgagaagggctcgagcctcgagagccgagaatccctattcctatccccagccccatcaccattcctattccattcctcccagtttgagcccagtttgagtttgcagccccaaatgacagtgattgacactcacgcagccgcttagaagggcaatttaaagaatttgcaacgatttaaataaatcatttcagcagaagcggtaaaataacatttttagttatggctctgtaatttaaaataacgatttttagattttgaacaaggaaaacatagcattgcttaattatattcactatgcctttgtattatttataggttggtactatattaggttaagaatatgacttactttttaaaaagttacacagatactttaattttagactagttaatgaatggtgcaatgttaaaactttaaacttggaaatcaaaatccttttacatacattctacatttcatttgacattttaatgcgtcgccaccttgcggacttattgagaagtatgtgattatcgaccctaatcgaacacaaatgtttaatagttagtatggcaactctggtcatttatggtattaggatgacagctcccggaatgtgtaaaatttaaagtggcaactgtagaaatgcgaaaattacggtgatggttggaagcatattatttttaaaattagatattaaaaattttaaaacttaagacctaagtgtgttttattaacgtattttttcaaaggaaagacatgtataattttgaattaaattaattttttctgtgtttcttaaaatctctcttaagtagtgttatacatattatgttagcaatttttttttttttttgtatttttgttttcattttcctgaattgtatattaatcttaacacgccctctaggcggcgaacacgatggttagcggcgctgtaaaacagctgatttgatttccgtccctggtatcagtcagctgctgcgttacgcgacatctaaaacataaactataagaatataatttcatctataaaaaatgttgcggatcattaatataagtcgacttggtaatactctccacttcagcagagcagtcacacagtggcaactgccactggcgtttcaaagagaattccatgtgagcgccgccaggttgaaacgccggaaaacagcagaagagaaggtaggttttagagccactatgccagtgaatctcaaagccggaaaacttgaatctcttaataatccccttgatcccagagggcacactcactaattgatttagaaatccccaagaattatagagtactcccccaagaagtttcaaacggcgggcggaggcgcctctgacatctggaggcacatgaccgtggcccaactggccaaggaactggaaaggtcactgggtaaacattctattcactggttatatcttaatatattaaagtaattgtgatcatcatttatcttccagatgatgttcaagaggcgatgctatatgtcaagggcgctgacaatattgaaccggcttttaagcttgcagacctcaaaatcatccaggagattgccaagaaactgggtgccaaaacacgggtggtggccacacctgaagaaacaaacgcagatgagcagaaggaacgcgatgtggcacccaggccgccagctgctccagagctcctgcagccccgtccgcctgtggtgacagtaatgggtcacgtggatcatggcaagaccacgctcctggattccctgcgaggtgctgatgttgctgccggcgaggctggcgggattacccagcatataggcgcctttaccgtcaccttggagaacggagaacgtgtcactttcctggatacaccaggacatgctgcctttagcgcgatgcgagctcgtggagctgttgccacggacattattgtccttgtggtggccgcagaagatggcgtaatggcgcaaacacgtgaagtcatccaactggcgaaggaagctcaagttcctattatcgtagcgctcaacaaaattgataagcccgaggctaatattgtaagttagaaaacaagtttttaaaaagcacgcctattaccccattcatttcaggaaaaaagtaaacgagagctagcgcaaatggggcttgctctcgaggagcacggtggtgatgtacaagtgattccgatctcagcccttaagggcaccaacctcgagcttctggccgaggctgttagcacacaggccaccctaatgggacttaaagcagatcccactggtcttgttgagggaattgtagtggaatcaaagactgatccccgtcgtggcaaactatcgacagccatcgtctcccgcggaactcttcgtaaaggctctgtgctgctaagtggcttagctcacgccaaggtgcgaggtctcttcgatcacaatggccagcctttgagcgaagccccaccgggcacaccagtggaaattctgggctggcgcgagctgcctcttgctggtgatctcatactcgaggtggaaacggaggtagatttagtgcagcatttcatttatattcataatacaataataagtgtcatctttgcgattagaaaaaagcccacgccgtgctgaagtaccgcgaacacgagtcgcagcaggaaaagatcgagtcgagcagtgatgaaatccgcaagaaggaggaggagcaccaggccaagtatagagctgagcgagaagcccgtcgactggccggacgcttccggatgcgcggtggccagcgggtcaaacaggtggatgaaaacgagggcaagcctcgggtcagtgtcattatcaagggcgatgtgcatggctctgtggaggccatacttgatgtgctggagacctataacagcaacgagagctgccgcctggatatcgttcactatggcgtgggaaatgtgaccgagggcgatctcgagctggccaaggctttccatgccattatctatgccttcgcagtggagactccccagctgaaggctgccaaagaagtgaacatacgaagctacaacatcatctaccggctaatcgacgatctgaaggagcaactcagcagtaagttgcctccagtggaagtagaggaggttctgggcgaggccaatgtcctgcaaaacttcctcatcaatgagggtcgcaaggaagttcccgtggcgggctgtcgttgcacgaagggagtgctgaaaaaggcccaaaagttccgcctcttgcgtgatggagaggttgtctacgatggccccctggagtcaatgcgacatctgaagaacgaagtggatactatcaagaaggacgtggagtgcggactacgcttcagagacaccaaggtgctgccccaggccggcgatatactgcagtgctacaccaccaaaatggaggcccagcaaacggactgggatccaggtttctagtttgtacgcgctgccaaatctgccttgttatcgccttgtaatctatagttctctattatatactgtttatataaaacaatccactatccgacttcctgttgatcccactgctgccgctgtggccgttgctaccacccttcacccacatacttaggcgtttaggataccgatatagagtggcagcggaactgaccgatgataagggagacgttctagcatcgagagcgacagcgggagaagcgcccctgtcccatagacggaagctgtactaaatgggtcatcgccatgctaattggagttcacccaaaccaaggcggtgtccgtagccccatatcgactggtggagatagcaggcttccgccgcggagccaattagaacttggtcctatattcatgaatggatgctttttatatcaagtccgcgcctctcagcatatatatttgcgaatttctataatatcaagcgcgttccctgtatcgccagtcgctggttcgccttgaaatgtggataatttatttctgcgacttattagctaactggaggcgactttccctggccgagtgctgataaggcggtgggtaaaaataactgtaacatcagtcttatataattatgctcaaggacttttataaccgcacacacattattcggtttttcggcataaaattgtaaatcagcgagcacgaactatttttggcggaaatatgaattgcggttgagataatatcgttgtatttgaaccactcatatttgtaagtagaagcttcctgccaagatccaaaaaaaaaaaagcttggaactatcaaaataatattttgatagtgcgtgcgatgatgtacttgtaaaactcaaaatccttatcccatttggctgttaccatgctaaagttcttagtttttttcaaagcaatcccgataaattgtcaaccaaattttgttaaaaatttgttttttgtagcatttacatgaaagtttgatgatttttgaatttctatataat

SEQ ID NO: 25427 - DNA, 2168 bp, DROSOPHILA
tccctggtatcagtcagctgctgcgttacgcgacatctaaaacataaactataagaatataatttcatctataaaaaatgttgcggatcattaatataagtcgacttggtaatactctccacttcagcagagcagtcacacagtggcaactgccactggcgtttcaaagagaattccatgtgagcgccgccaggttgaaacgccggaaaacagcagaagagaagaaatccccaagaattatagagtactcccccaagaagtttcaaacggcgggcggaggcgcctctgacatctggaggcacatgaccgtggcccaactggccaaggaactggaaaggtcactggatgatgttcaagaggcgatgctatatgtcaagggcgctgacaatattgaaccggcttttaagcttgcagacctcaaaatcatccaggagattgccaagaaactgggtgccaaaacacgggtggtggccacacctgaagaaacaaacgcagatgagcagaaggaacgcgatgtggcacccaggccgccagctgctccagagctcctgcagccccgtccgcctgtggtgacagtaatgggtcacgtggatcatggcaagaccacgctcctggattccctgcgaggtgctgatgttgctgccggcgaggctggcgggattacccagcatataggcgcctttaccgtcaccttggagaacggagaacgtgtcactttcctggatacaccaggacatgctgcctttagcgcgatgcgagctcgtggagctgttgccacggacattattgtccttgtggtggccgcagaagatggcgtaatggcgcaaacacgtgaagtcatccaactggcgaaggaagctcaagttcctattatcgtagcgctcaacaaaattgataagcccgaggctaatattgaaaaaagtaaacgagagctagcgcaaatggggcttgctctcgaggagcacggtggtgatgtacaagtgattccgatctcagcccttaagggcaccaacctcgagcttctggccgaggctgttagcacacaggccaccctaatgggacttaaagcagatcccactggtcttgttgagggaattgtagtggaatcaaagactgatccccgtcgtggcaaactatcgacagccatcgtctcccgcggaactcttcgtaaaggctctgtgctgctaagtggcttagctcacgccaaggtgcgaggtctcttcgatcacaatggccagcctttgagcgaagccccaccgggcacaccagtggaaattctgggctggcgcgagctgcctcttgctggtgatctcatactcgaggtggaaacggagaaaaaagcccacgccgtgctgaagtaccgcgaacacgagtcgcagcaggaaaagatcgagtcgagcagtgatgaaatccgcaagaaggaggaggagcaccaggccaagtatagagctgagcgagaagcccgtcgactggccggacgcttccggatgcgcggtggccagcgggtcaaacaggtggatgaaaacgagggcaagcctcgggtcagtgtcattatcaagggcgatgtgcatggctctgtggaggccatacttgatgtgctggagacctataacagcaacgagagctgccgcctggatatcgttcactatggcgtgggaaatgtgaccgagggcgatctcgagctggccaaggctttccatgccattatctatgccttcgcagtggagactccccagctgaaggctgccaaagaagtgaacatacgaagctacaacatcatctaccggctaatcgacgatctgaaggagcaactcagcagtaagttgcctccagtggaagtagaggaggttctgggcgaggccaatgtcctgcaaaacttcctcatcaatgagggtcgcaaggaagttcccgtggcgggctgtcgttgcacgaagggagtgctgaaaaaggcccaaaagttccgcctcttgcgtgatggagaggttgtctacgatggccccctggagtcaatgcgacatctgaagaacgaagtggatactatcaagaaggacgtggagtgcggactacgcttcagagacaccaaggtgctgccccaggccggcgatatactgcagtgctacaccaccaaaatggaggcccagcaaacggactgggatccaggtttctag

SEQ ID NO: 25428 - protein, 621 aa, DROSOPHILA
MTVAQLAKELERSLDDVQEAMLYVKGADNIEPAFKLADLKIIQEIAKKLGAKTRVVATPEETNADEQKERDVAPRPPAAPELLQPRPPVVTVMGHVDHGKTTLLDSLRGADVAAGEAGGITQHIGAFTVTLENGERVTFLDTPGHAAFSAMRARGAVATDIIVLVVAAEDGVMAQTREVIQLAKEAQVPIIVALNKIDKPEANIEKSKRELAQMGLALEEHGGDVQVIPISALKGTNLELLAEAVSTQATLMGLKADPTGLVEGIVVESKTDPRRGKLSTAIVSRGTLRKGSVLLSGLAHAKVRGLFDHNGQPLSEAPPGTPVEILGWRELPLAGDLILEVETEKKAHAVLKYREHESQQEKIESSSDEIRKKEEEHQAKYRAEREARRLAGRFRMRGGQRVKQVDENEGKPRVSVIIKGDVHGSVEAILDVLETYNSNESCRLDIVHYGVGNVTEGDLELAKAFHAIIYAFAVETPQLKAAKEVNIRSYNIIYRLIDDLKEQLSSKLPPVEVEEVLGEANVLQNFLINEGRKEVPVAGCRCTKGVLKKAQKFRLLRDGEVVYDGPLESMRHLKNEVDTIKKDVECGLRFRDTKVLPQAGDILQCYTTKMEAQQTDWDPGF

SEQ ID NO: 25429 - DNA, 3901 bp, DROSOPHILA
agacttaagatttacttttcagctgatgcaaaatagtgttcggcttcgaaataaatgagttatctatagaaccgattaaagtattcccctttataaatggggagcaggcttcttagtcactagatcggcacaaaaggcgccttttatcagtagatttattgattgcagtagcgtgcgcctggaaacatatgcgttaagttcacaccctgaatgtttaatgagtttcacttatgccaacagtgtaattattgggaagtagtatgtgtattcgaaactaatgggtgtacttgattgtatagatatagatatatataccatctacctgtcaactccattactgcttaattatatatactcgctatttgtgctttgtttgactacttttcattggctttaactattttttttttgcgtcagtcgcttaccaacagcgtaacatttgtttaaacaatgggaatttcatcaggtttgtttgggaactttaatatttgatcaagctaaaagatcgcttcgtggcctgccccacttatgattgttgccagtggtgcccagacgcgccaatcgcccccgaaaactgattgcgtcttatcactgtcatatcgcccagaaagctacgcgataagattctagtcgaatggccactggcttcgctgacttcctcagcgaaaatgtgtaatttggcatgactttatattttaagaaaattaataatagccatagctaaagccatagaaacgcattttttactatttttagtgtttatcgtttgttcttataagaactaatataaactagcgaaaagttaggtagaacaataatatatactaatcgtggaaatatccaagtaatgcgctttaaaaggttattttgtttgaagtaacggttttctgtttaccaactgccctaaattaccgttgccaaaagtgtggcccaaccctggttaacgttatcgatgagccacggactctgcagccctggcacatgttaacgataaagcccgtaaaatagaccgaaaacaagagaagaaatgaaattcattgacattcgcagagatagcaaacagccagcgtgttaatatttgagcagcaaacaactgaaatgtgttccgaccaagaaaccggccatgcataaatgtggagccagcagaggcaacggaacgaaccatgaaatacgaatataagctggtagacccgatgaacttggccaagaaaaacaccatcaaataactgagtagtcggtcacaaaactaatttgtctttcgccttttcagctggccacggatgagaagccaccgcggcggaaaagtagcggatcaccaaatgccagcagtggtggaaaccgcgggcccagcggcctcaagatctccttcctgtgcctgatcatctccgtcatcctcctgctctttgtctttggtgtgtaccatttgtattatgtaaaagacgaagtgcccaaagttgtactaacgaaaacctctgattttcccactgttaccgtgccctacgcccacgtggaaccccattttgcgccacccgttcgccgtgttatcactaaaaaacccatcgccaataaaccaacgactgacaacgatgcaggcttcgtctccgagaacgccagtccgtatctggcccgtttggcctccaagtttggctacagcaaggtgcagtatgcggccatcatcgatgccggatcgacgggcagccgtgtgctggcctacaagttcaatcgcagcttcatcgacaacaaactggtgctgtacgaggagctgttcaaggagcgcaagccgggtctgagctccttcgcggataatcccgccgagggtgcccactccatcaaactgctgctggacgaggcccgcgccttcatacccaaggagcactggtcttccacaccgctggttctgaaagcgaccgccggcctgagactcctgcccgccagcaaggcggaaaacattctaaatgccgtccgagatctcttcgccaagtccgagtttagtgtggatatggatgccgtggagatcatggacggcacggacgagggcatcttcagctggtttaccgtgaacttcctgctgggccgcctgtccaagacgaaccaggcagctgccttggacttgggcggcggtagcacgcaggtaaccttctcgccaacggatccggaccaggtgcccgtgtacgataagtacatgcacgaggtggtcacgtccagcaagaagatcaacgtcttcacgcacagctatctgggactgggtctaatggctgcacgccatgctgtcttcacgcacggctacaagaaggaggatacggtgctggagagcgtctgcgtgaatcccataatcgccaatcgcacgtggacatacggcaatgtgcagtacaaggtcagcggcaaggagaatggcaagtccagtgccgagcagcccattgtggacttcgatgcctgcctggagctggtcaagagcaaggtaatgccgctggtcaagcccaagccgttcacactcaagcagcacgcggtggccgcgttcagctactactttgagcgggccatcgagtcgggtctggtggatccactggctggcggcgagaccacggtggaagcttatcgcaagaaggcccaggagatctgtgccattcccaacgatgagcagcccttcatgtgcttcgaccttaccttcatctcgacgctgctgcgcgaaggatttggcctcaacgatggcaagaagattaaggtgagtcctggcgcacttaacacaaattgaactctctagtaactcgttttaaattgtgcagctttacaagaagatagatggccacgaaatctcctgggccctcggctgtgcatacaacgttctgactagcgacgagaaattcagtaattcctaatgctcctccattagtccgtagttgaagacataaattttaaacggattgttagctgaaattgtttatagagtgccttagacgtgcatcgagtatactacaatcacaacacaccgcacacaccgcacacaccacacacacacagaacacacactcggacattgtccacagcatatgtatgatgtggtcgattaatatttgtttgtgctctgcaagattcgtttcaattgcctctaattgagctaacccatacacggtgactacacttagcgtttagtttgtaattccaattttgtgtgattcgccatatttgtaatgcagttttttgccaacttcttaactaattagtccctacactcgtatcgtatcctcatgtacataaatttacacaatgatatgtatttacctaatatgtataacgacctagactactagccgcaaacatttcacacggtttttcacacatgcaaatgttagtttagttatctttgcaaataaatcaaatgttaactgatctgaattaaagtaaaatatttgtttattgctgattttcgttcgctatacaaaatattctatatttaataataatagaggggtaaatgcataacgaagaaaatgagtaaagaaagggtgttcctgctatggaattttggtctttttacaaataaaactaagaaacgctagcgtgggaatacgtcagaggtctgctgcactacacattggctacgcactggctgcatgtggaatcgatgaatcccctcatggcctcggcaatagttgcggcttgatgcccagccggtcgatgatgtactgcggcatgcagagcgttgggttgatggccttcaggccggaatgtcccagtagcgagagtccgccgatgccgaacagcgtgtggaatatgtccggcatgttgccagttctgtccgagaagccaccggtctccgtgtcctggcacgacagtatgaactgctgcagcttctccgagctgatccagtgcaggcggcccatgatggtgagcgaggcgagca

SEQ ID NO: 25430 - DNA, 1574 bp, DROSOPHILA
taaaatagaccgaaaacaagagaagaaatgaaattcattgacattcgcagagatagcaaacagccagcgtgttaatatttgagcagcaaacaactgaaatgtgttccgaccaagaaaccggccatgcataaatgtggagccagcagaggcaacggaacgaaccatgaaatacgaatataagctgctggccacggatgagaagccaccgcggcggaaaagtagcggatcaccaaatgccagcagtggtggaaaccgcgggcccagcggcctcaagatctccttcctgtgcctgatcatctccgtcatcctcctgctctttgtctttggcttcgtctccgagaacgccagtccgtatctggcccgtttggcctccaagtttggctacagcaaggtgcagtatgcggccatcatcgatgccggatcgacgggcagccgtgtgctggcctacaagttcaatcgcagcttcatcgacaacaaactggtgctgtacgaggagctgttcaaggagcgcaagccgggtctgagctccttcgcggataatcccgccgagggtgcccactccatcaaactgctgctggacgaggcccgcgccttcatacccaaggagcactggtcttccacaccgctggttctgaaagcgaccgccggcctgagactcctgcccgccagcaaggcggaaaacattctaaatgccgtccgagatctcttcgccaagtccgagtttagtgtggatatggatgccgtggagatcatggacggcacggacgagggcatcttcagctggtttaccgtgaacttcctgctgggccgcctgtccaagacgaaccaggcagctgccttggacttgggcggcggtagcacgcaggtaaccttctcgccaacggatccggaccaggtgcccgtgtacgataagtacatgcacgaggtggtcacgtccagcaagaagatcaacgtcttcacgcacagctatctgggactgggtctaatggctgcacgccatgctgtcttcacgcacggctacaagaaggaggatacggtgctggagagcgtctgcgtgaatcccataatcgccaatcgcacgtggacatacggcaatgtgcagtacaaggtcagcggcaaggagaatggcaagtccagtgccgagcagcccattgtggacttcgatgcctgcctggagctggtcaagagcaaggtaatgccgctggtcaagcccaagccgttcacactcaagcagcacgcggtggccgcgttcagctactactttgagcgggccatcgagtcgggtctggtggatccactggctggcggcgagaccacggtggaagcttatcgcaagaaggcccaggagatctgtgccattcccaacgatgagcagcccttcatgtgcttcgaccttaccttcatctcgacgctgctgcgcgaaggatttggcctcaacgatggcaagaagattaagctttacaagaagatagatggccacgaaatctcctgggccctcggctgtgcatacaacgttctgactagcgacgagaaattcagtaattcctaatgctcctccattagtccgtagttga

SEQ ID NO: 25431 - protein, 461 aa, DROSOPHILA
MKYEYKLLATDEKPPRRKSSGSPNASSGGNRGPSGLKISFLCLIISVILLLFVFGFVSENASPYLARLASKFGYSKVQYAAIIDAGSTGSRVLAYKFNRSFIDNKLVLYEELFKERKPGLSSFADNPAEGAHSIKLLLDEARAFIPKEHWSSTPLVLKATAGLRLLPASKAENILNAVRDLFAKSEFSVDMDAVEIMDGTDEGIFSWFTVNFLLGRLSKTNQAAALDLGGGSTQVTFSPTDPDQVPVYDKYMHEVVTSSKKINVFTHSYLGLGLMAARHAVFTHGYKKEDTVLESVCVNPIIANRTWTYGNVQYKVSGKENGKSSAEQPIVDFDACLELVKSKVMPLVKPKPFTLKQHAVAAFSYYFERAIESGLVDPLAGGETTVEAYRKKAQEICAIPNDEQPFMCFDLTFISTLLREGFGLNDGKKIKLYKKIDGHEISWALGCAYNVLTSDEKFSNS

SEQ ID NO: 25432 - DNA, 9456 bp, DROSOPHILA; identical to SEQ ID NO: 5812

SEQ ID NO: 25433 - DNA, 2857 bp, DROSOPHILA
agcaagttgtgttttttgattctcgtcgtattgtcgtcgtttctgaattgttgtatatcggtatcaaaatacacacatcttgcatactcacgcaactacgcccacatacacatatacatgtacgtgtgtccaattgcacgtagtgtggaatccgaatcagtatcgaaatcagttcgaaaacccttagtgtgtgcgtgctcaattcagttttcaaattgaaactacatcatttgcaacgaagaacattttccagtcccagttccagaaccattttctttcgagtcgagttgggaaaatcggtgttgtatgctttgcggcgctggcgaataaattaatccttctgacataccacattactcattcgtagtggatatcgttggtgtggcgcttttaactaggctatagtaggaggagccaagaacgggcagcggactatctttaatccactgccgttgctaggagtgtgcatctgaaagggacttcacagcagtattatatctacagccacttatttgatttacgcgccatctctatttctgtctattgaacaagttttcgaagaagaaagctcagcgttcgcaagatggtcgagggtcagacagccgttcagcagcagcagcagcaaccatccggcgcgggcggtgccagcggcgtgggaagcaccaccggatccgctggaggaccggctacggccaacaatgtgaccaacagtcaggcccaaaccaatgggggcaccactgcgaccacgactgccgcagcgggtgccggatccacgacaaatgcggccgtcggccaggccacagcaaacaatgctgcgagcaacaacaacaataataataataataccaacaacaacaataacaataacgccactgcaaacaacaacaacaataatgagccagaccccaagaccaatttgattgtgaactacttgccacagacgatgtcgcaggacgagatccgttcgttgttcgtcagttttggcgaggtggagagctgcaagttgatacgcgacaaggtgacaggacaaagtctgggctacggattcgtgaactacgtgaagcaggaggatgcggaaaaggcaatcaacgcattgaacggcctcaggctgcagaacaaaaccatcaaggtctccattgcacgccccagctccgagagcatcaagggtgccaatctctatgtatcgggtcttccaaaaaatatgacacagtcggatttggaatcattgttcagtccatacggcaagatcataacctcgcgtattctttgtgataatatcactggtctctccaagggcgttggctttatacgcttcgatcagcgatttgaggccgaccgggccattaaagagctgaacggcaccactccgaagaattccaccgaacccataaccgtcaagttcgccaacaatcctagcagcaataagaacagcatgcagcctttggcagcctatatagcgccccaaaatacgcgtggcggacgagcatttccggccaacgctgctgccggagcggcagccgccgccgctgcagctgccatccaccccaatgcgggccgatacagctctgtaatctcgcgatattcaccgttgaccagtgacctgatcactaatggcatgatccaaggcaacaccattgccagctccggctggtgcattttcgtctacaacctggcgcccgataccgaggagaacgtgctgtggcaactgtttgggcccttcggagcagtgcaatctgttaaggtgattcgtgatctgcagagcaacaagtgcaagggctttggcttcgtcaccatgacgaattacgaagaggctgtcctggccatacagtcgctgaacggctacacacttggcaaccgagtgcttcagttggctgctgttgtcaatgccaatgcggcggcggcagctctggcggccaatggtctagtcctccataatcatcaccaccacagcaacatcggtagcatcaacaataatagtaacaacagcaacggctgcagtgcagcagcctttccacttggcaaatacgttaaccacagcagcaacaacaggcagcacaacatcaacaatagcactagcaacacgagcaaacagaagccagcctccacgagcaacaagcaacaatcaatggcgccacctaagagattagcgagcagcactgctgcaacaacgggggacttggccgcaactgctgccaccaacagcagtagcagcagtcactcggcgtccagcggagatgctggagccaccggcacagccgcatcctcctcgtcatcgtcgtcgtcgacaaacaacaacatcctgaagacatccacgaaatttatttacaacaagccccagaaccaatacgagttgttgcagcagcagctgcagctgcagcaggagttcgcccagtttttgaccaatgtggccaacagcgccgcaacgccatccagcaacggctcggccaactcgacaaaccagcgtaatggaggaggaaccatcggcatgggtctgggaatgtcggccaactcagccggcggaggttcgggcaacaaaaacagtaacggcaacaatggctatatgccaacctggtcgaattggttcttttaaagttcactttggtttgtcatcagtccatttcacggatcctttgtaattttaggcaacgattactcagtttttggtttattgatataagtttgaattgcgcgaaataacagaattgttcacgttttgagttatgaatttgttttttcagtgaaataatgtaaccataatttcttacgttgactaagttctgaaatggtttttttttttttgcttatgctcccattattcttttaagattacattcaatttaatgtagaacttacatct

SEQ ID NO: 25434 - protein, 668 aa, DROSOPHILA
MVEGQTAVQQQQQQPSGAGGASGVGSTTGSAGGPATANNVTNSQAQTNGGTTATTTAAAGAGSTTNAAVGQATANNAASNNNNNNNNTNNNNNNNATANNNNNNEPDPKTNLIVNYLPQTMSQDEIRSLFVSFGEVESCKLIRDKVTGQSLGYGFVNYVKQEDAEKAINALNGLRLQNKTIKVSIARPSSESIKGANLYVSGLPKNMTQSDLESLFSPYGKIITSRILCDNITGLSKGVGFIRFDQRFEADRAIKELNGTTPKNSTEPITVKFANNPSSNKNSMQPLAAYIAPQNTRGGRAFPANAAAGAAAAAAAAAIHPNAGRYSSVISRYSPLTSDLITNGMIQGNTIASSGWCIFVYNLAPDTEENVLWQLFGPFGAVQSVKVIRDLQSNKCKGFGFVTMTNYEEAVLAIQSLNGYTLGNRVLQLAAVVNANAAAAALAANGLVLHNHHHHSNIGSINNNSNNSNGCSAAAFPLGKYVNHSSNNRQHNINNSTSNTSKQKPASTSNKQQSMAPPKRLASSTAATTGDLAATAATNSSSSSHSASSGDAGATGTAASSSSSSSSTNNNILKTSTKFIYNKPQNQYELLQQQLQLQQEFAQFLTNVANSAATPSSNGSANSTNQRNGGGTIGMGLGMSANSAGGGSGNKNSNGNNGYMPTWSNWFF

SEQ ID NO: 25435 - DNA, 4861 bp, DROSOPHILA
tcaccagtgttccagctggcatggaaacccccgagaacattgagcttcgcaagaagaaaattgaagccgagatggaggagtaagtgaactaatatttttaaaataacatcacgattaagcccattattccaacttctcctagcaacgaaactcctgttctgtatcaagtgctgcctgagaagcgcaccgaccgcataggggcttccatgatgggatcaacccatgtctacgacgtcagtggcagtggggctaacaaacagcccccagttcgatcaaccacagatcgcgagggcattgtggaactggctctcgatcctagcgaattggacttggacaatgacgcaatggcccagcgttatgagcaacaaatgcgtgagcagcagaatcacctgcaaaaggaggatctgtcagacatgttggccgaacatgtggcgcggcagaaatcgaagcgcaagcgacagcaaacggatccggccaagaccacaaagaagtacaaggagttcaagttttagtttgacaacaagaaatacaacttttccatttgtgcgattgtcaaggatgtcattaaacatagtaaaaactacaataagttcgcgtcattcaatttaaatgcgaggatttaaaataggttctgcaaaaagtgaagttaacacaaaagatcttatcttgtaatttctatcgtaatttgtttattttgatgcagaatcaaaatcatttgcgtataacttaaaatttgactcgttaggtttaattctcatttatacattgaaacttattgagactaagaaattacaattgtggttcgctgtgtggtttgtgctgggaccaggacagtatctaaaccaaacgaagcagagtgcagtggaaggcaaggactgaaaagagaacttgtccagcaactgagtccagggctagctacctctcccgatcctccttaagctagagctagagagtgccacacgatgtcgatgtcggctttgactcaacgcctgtcagctggtcactcgtcgagctgctcgctgagttgggctagaagagccgctcgcttcgattccagctcgccgtcacttaacgtcagctcctcgtttcgcgatccagacgactcgacggactgggcaggactaaggggcgtgccggatcgattgtgcctgttgtgtcgcttgtccttcttagctcgcttctccttcttctttttctttgcgggtgagtgcgagtttgagtcgttctgaagtagagcttgagttcccggcgattgaatgcctggaacatccgattcgcaggaggactgaaatgtaagccatgttagatagtatagttgtccaaggactgggccgacttgctacgtacacctcgcagtttgttcttgcgcttctttttcttcttcagcaatttttcgctctcgatgctgccaattgaggtcagggaatgctgtatgtgcgtgacgttattatttaacttacaagttgcatttaatgttatgtttagcatactaaccgatcgtgtcttggagcgccttcgcttggacttctccacttctatatgctcattctcgatgtctgatctcgagacggaccgtactcgttttttgtgcttcttgtttttcttagattttcgtgatcgcgagtgatgatggctgcacgcatcttcgctttccttaacaaagtcctcccagatcttctccacaccgatttctttttcataaagggcaaatgcttcaaggtgttctaccagcttcttggcgctctcatagggttcggccactgagacgttcgcctccagccattcgtttttaatttcattttctagtttccgcaaccttcgcacctcctctttcatccgttccttttcaatggcctcggcctgtagattataaatacacaaatgagttttattgatataaggtttttttcccactccatagttaccttttccagcagggagttgtatgtgagcttcacatttcccgcgtccaggctggctgaccgcttatcttcacacacgaccgtggcaaagtcctcgaaggatgtcttcgcttggacaacaaatgccttttccttgaggatctcccttattatttttttctcatcatggaagcgggctttcaggttttccacatagaacttgaaaagatccaggggtgtagacccgctctggccgagcatagcggagaatcgcaaatcggctgatatgatgggatacagctccacccacagcgacatggaagtgagctttccctcttcatgcagggagtcgagcagcgcaagaaaggagtccctgtttttgcgctgctgtcgcttcatgcgcttcttttcccgctcacgttcctcgtcctcctccttttccaaggtgcgaatgtgctcctcgaagacaattagggcgtcctccttgtccattccgagcagagtcacatcattcttaaatgctacgttgtccaatagcataacctgagcctctgaccaggtggtggcatgattgattgaagtcatcgactctagcagctcgcccagaaccttcatgtttcgttttttcagcaaccgcgcttcttccttctctcgcttcgctaaattaaatatacagtcctcgtatatatctcgccgatccggttccggcaccgcggtccatgttcgcgttccggcaaatacttcttcacaacgaaaatatttcatctgcgagttcatcttatcgctggacataaggaactgctccaagtcctcttttgccttcttggcttttaagcgagactcctcgcgctcgtccttaatcttctgcgtcttgtaggcattgaatgtttgcttgcgctcgttcagatttttgaaggctgcgtatcgcggatcctttgatatgattttcacacactggtcccagttcgcatttgatggcacattgcggtcccgcagcagctctttaaaggactcgatggcctcgcgtttatccttaaacaccacagcgctctctgacttgtcgtccttcttagctgcaaagaaagtcgtgtgacttgggctgtatattttcagagtttataatatttaccattttgttgtggcacctctatagccgctaacgtggcggccatggcctgatccatcgctgatgacgagttctcgttgctgctgggtgtcagcggcgagtggatctcaggagtcggtaatcggggggcaacaggcagggcagcgggaagaatactagccagagcagcaggtggcaccatgccggctaagctggatgatgtcatggctgctacggctttggcggctgcagcagctctgggtaaacaaggaatcatattactaagtggcacgcgatgcacaactaatttacttactcttccgccttcgccttggccttcatatccacgtactccggcggcggctcccagcaggtctccttggtggccacgttgtggtagtacactttgcccgtatccgagcgatactccttccagggacactggttgtgcagcagctcggcgggcgtcatcagagcctccggcttctcccacgagctttgcttcgtgttctgattgtaatagtatggtcgtccgtccggcgccttgtgctccgtccactcggtgctggtggccatcaccccgaaggcggcggccagctccggtgggggtggggccccaaatccgggtggtggaaactgcggcacgattgcaccgggcggcgtgtagcctatgccccttcccggtggcgctcctccattgcccacgctaggaggaacattcatttcactattttgctatatgggtaatgggtgcaccgagagtctaccggtcgttgcgtgctgcgccggccaattcacttttctttcggtaattgaaaaaatccgtaaaattctcaaagcgaatgccgctttccacgccagagatgtcgattgtgcaatgaaactgcccaccccatcgagttatcgagtccacacacgagaactgtccacccggtagattttctgttatcgattagcttccgcggaacgataacagcgctttttgttgtggttcttcgctgtgtgcctttcaattgttagagtttccttgtcgtcgagggcgattaaggaatactgcccagcgacgatgtggcgtacatagagtaagaaatagctgaaatgtacaacatttaagttaaatgatgcttacactattttttgctaccagatctctctgcagtcatgctcctctggttgcccattgcggtggcacgcaggatgttcatcatcctcgtcctaatggtaattggaggcctcttctacatctacacttcggaaaataaataccactcatgctttatggagggccaagtactggcaactcagcaggcgctaactgcagatggcgaaacaaatctattgggcgacgtcctccaggcggatcccaaaccctcgcccggaaacagtatcttctttcacgagaccagctgccgcctatccgagaacagacagctggagacgctgaaggtcactgcccgccaggcatgcgcaatcgagtcggcagcgatgcataatccgaatttccaagtgttcgtcctgttcgctggccccacctatcgaatctccaacaacaaaagccatccccaaccattgttggaggccattctcagttacagcaatgtccatctacgtcgactgaatctcgagagttacgcatctggcacgcccatggaggagtggctcaaagatggtcgtttgtcgcggtcaaagtgagtttaaagactctccctagttattactcattgatgacattacctttccagatatttgttctcgcacatatcagactttctccgctaccttaccctctatcggtatggcggtctttatctggacatggatgtggtggtgcttcgcaacatggagaaggtgccgc

SEQ ID NO: 25436 - DNA, 2492 bp, DROSOPHILA
tggaaagcggcattcgctttgagaattttacggattttttcaattaccgaaagaaaagtgaattggccggcgcagcacgcaacgaccgcgtgggcaatggaggagcgccaccgggaaggggcataggctacacgccgcccggtgcaatcgtgccgcagtttccaccacccggatttggggccccacccccaccggagctggccgccgccttcggggtgatggccaccagcaccgagtggacggagcacaaggcgccggacggacgaccatactattacaatcagaacacgaagcaaagctcgtgggagaagccggaggctctgatgacgcccgccgagctgctgcacaaccagtgtccctggaaggagtatcgctcggatacgggcaaagtgtactaccacaacgtggccaccaaggagacctgctgggagccgccgccggagtacgtggatatgaaggccaaggcgaaggcggaagaagctgctgcagccgccaaagccgtagcagccatgacatcatccagcttagccggcatggtgccacctgctgctctggctagtattcttcccgctgccctgcctgttgccccccgattaccgactcctgagatccactcgccgctgacacccagcagcaacgagaactcgtcatcagcgatggatcaggccatggccgccacgttagcggctatagaggtgccacaacaaaatgctaagaaggacgacaagtcagagagcgctgtggtgtttaaggataaacgcgaggccatcgagtcctttaaagagctgctgcgggaccgcaatgtgccatcaaatgcgaactgggaccagtgtgtgaaaatcatatcaaaggatccgcgatacgcagccttcaaaaatctgaacgagcgcaagcaaacattcaatgcctacaagacgcagaagattaaggacgagcgcgaggagtctcgcttaaaagccaagaaggcaaaagaggacttggagcagttccttatgtccagcgataagatgaactcgcagatgaaatattttcgttgtgaagaagtatttgccggaacgcgaacatggaccgcggtgccggaaccggatcggcgagatatatacgaggactgtatatttaatttagcgaagcgagagaaggaagaagcgcggttgctgaaaaaacgaaacatgaaggttctgggcgagctgctagagtcgatgacttcaatcaatcatgccaccacctggtcagaggctcaggttatgctattggacaacgtagcatttaagaatgatgtgactctgctcggaatggacaaggaggacgccctaattgtcttcgaggagcacattcgcaccttggaaaaggaggaggacgaggaacgtgagcgggaaaagaagcgcatgaagcgacagcagcgcaaaaacagggactcctttcttgcgctgctcgactccctgcatgaagagggaaagctcacttccatgtcgctgtgggtggagctgtatcccatcatatcagccgatttgcgattctccgctatgctcggccagagcgggtctacacccctggatcttttcaagttctatgtggaaaacctgaaagcccgcttccatgatgagaaaaaaataataagggagatcctcaaggaaaaggcatttgttgtccaagcgaagacatccttcgaggactttgccacggtcgtgtgtgaagataagcggtcagccagcctggacgcgggaaatgtgaagctcacatacaactccctgctggaaaaggccgaggccattgaaaaggaacggatgaaagaggaggtgcgaaggttgcggaaactagaaaatgaaattaaaaacgaatggctggaggcgaacgtctcagtggccgaaccctatgagagcgccaagaagctggtagaacaccttgaagcatttgccctttatgaaaaagaaatcggtgtggagaagatctgggaggactttgttaaggaaagcgaagatgcgtgcagccatcatcactcgcgatcacgaaaatctaagaaaaacaagaagcacaaaaaacgagtacggtccgtctcgagatcagacatcgagaatgagcatatagaagtggagaagtccaagcgaaggcgctccaagacacgatcgcattccctgacctcaattggcagcatcgagagcgaaaaattgctgaagaagaaaaagaagcgcaagaacaaactgcgaggttcctcctgcgaatcggatgttccaggcattcaatcgccgggaactcaagctctacttcagaacgactcaaactcgcactcacccgcaaagaaaaagaagaaggagaagcgagctaagaaggacaagcgacacaacaggcacaatcgatccggcacgccccttagtcctgcccagtccgtcgagtcgtctggatcgcgaaacgaggagctgacgttaagtgacggcgagctggaatcgaagcgagcggctcttctagcccaactcagcgagcagctcgacgagtga

SEQ ID NO: 25437 - protein, 757 aa, DROSOPHILA
MATSTEWTEHKAPDGRPYYYNQNTKQSSWEKPEALMTPAELLHNQCPWKEYRSDTGKVYYHNVATKETCWEPPPEYVDMKAKAKAEEAAAAAKAVAAMTSSSLAGMVPPAALASILPAALPVAPRLPTPEIHSPLTPSSNENSSSAMDQAMAATLAAIEVPQQNAKKDDKSESAVVFKDKREAIESFKELLRDRNVPSNANWDQCVKIISKDPRYAAFKNLNERKQTFNAYKTQKIKDEREESRLKAKKAKEDLEQFLMSSDKMNSQMKYFRCEEVFAGTRTWTAVPEPDRRDIYEDCIFNLAKREKEEARLLKKRNMKVLGELLESMTSINHATTWSEAQVMLLDNVAFKNDVTLLGMDKEDALIVFEEHIRTLEKEEDEEREREKKRMKRQQRKNRDSFLALLDSLHEEGKLTSMSLWVELYPIISADLRFSAMLGQSGSTPLDLFKFYVENLKARFHDEKKIIREILKEKAFVVQAKTSFEDFATVVCEDKRSASLDAGNVKLTYNSLLEKAEAIEKERMKEEVRRLRKLENEIKNEWLEANVSVAEPYESAKKLVEHLEAFALYEKEIGVEKIWEDFVKESEDACSHHHSRSRKSKKNKKHKKRVRSVSRSDIENEHIEVEKSKRRRSKTRSHSLTSIGSIESEKLLKKKKKRKNKLRGSSCESDVPGIQSPGTQALLQNDSNSHSPAKKKKKEKRAKKDKRHNRHNRSGTPLSPAQSVESSGSRNEELTLSDGELESKRAALLAQLSEQLDE

SEQ ID NO: 25438 - DNA, 3065 bp, DROSOPHILA
agattcaagggcgacagtgccttggcggaatagaggcagtacaaagcggcacaggagaagaacattaacgcgtagttctcctccggagccagctccagcagaggaacctgaaactcaaatatgatgatcatgtagaacaccgagaagaccagccagctcaaaaagaagtttgtccgcgtggcggtccgcttagccagctccatgccccagatggtgaagcccaccagcgtgagcatcagcactatggcggtctttgagttcagagtggccaatcccagcatgagggggacaatgaaggcgggagcaacggctgcgggcgagattcgcttggctcctccgcgccatggcaagcgcagtctatcctggaaggcgatgagcatgccgtcgatgttccttcgatcaatggctcggcaggtgacaagtctgtggtaaatttaattttaattgtagacggcctttcatttatgtatcctaccttgtgcaaactaagtcgaagtccacgcagttacaacagcatcctaggatgtgggatcgctctcgactgtcctcagccacgtactcgcagcagcagagactcccgttctccttactcttggactcctcagcctctgatctccaggctgcagaaagaaaattggaggtgccggctgtcatcaagaacatcgatttggacaggaaatggcgcggcgaacgttttttaatgagttccgagcagcgtgtacggaaacagtttagattagattagtgcacgccctactggccgagtggagaaatgtttcaaaagtaattatcagatccgggtgggtccattttaattgttttattggagtacaacgaatttgcttacaatttctccggaataacgacaactacaacaacacagctgacgaacgtccctcccttacagggtgccccgtgtaaagtgggctgccaacttgttttatgctaccgctatgttttgaacttagatctcttatcattattacaaagtttaagaattgtgttataaataattccaaaatatattttatttaaatttcaattgcaagattcctctttttaagttttcgtctgcctgccaaacactctcactttggaaaacatttcccagcctaatgttctctgaaaactgttccaggccgccaccaactccaaaataatgagattttgcggcaaccaaaatgactccatcggattttaagcgaccagcaaaggtatccaagagcttttgctgatttgcaatattgtatatagtctcagaggtaagtattagatcgtatttcgccacatcccttgatagttcagcaaaatgagaccaatctccagaatataaggttgtactgttgtctaaaaatttcagcttttcatcttcagataaagagtcgtccaaatttagcaggatatttggatatgttatgtattccagcacatctttgttctgaaaatatatgattgcaaccaaactatttcaagacttattgtttgcttacgtagtcctgaaaatccacccgtgcgccgtgtttcatagcatatatacccagcaatccgcagccacatcccaaatctaggactcttttctccttccagaatgagtcctcgtacttttcggatagatatagtagaagatcttcagtgcattcccatattttagcaccgccctcgtagacaccggaaatcagatctgaatgattttcctcagacttcctgagatccaggtttaccaagtgggattgctcctttaaatcctccagcagaaacccggccacaagatgttttatcgtcatctttcccacctccatttccttggcgttaagctcatagaaatccattgccgaaattaggttatccagtggttgtactttctccgaattgtaccaatctatatcctttgtgatacccgactcacgttcttctgaattttcctgcttgctaaaaatatcatttttaacggcctctggatcttccgaggattccgccttcacatcaaaattaaatttgaacatgcttagaaggtagggtgttgaactgttttgattttagcagatactgcttgttaaatatcgtactgaaatggacaaattagcattgttaaactggtaatctatgaaatattttaatatttacctccttaaatcagctgtcggcaaaaaccacgcttttcgtactaagatcgccctgtcctttgcgttgccagcttgatttagggtctcgcattttcatatcgaatatatcgatatgtctcggtggtacaaaaatatcttgtcgcgcatcactagaattgtggtttataaaaaaatttcggctcggtttgggtttttaaagattaatttaatttatggcggaccagttgaacaacgaggtgagtttgctgcgaaacccaatcggcaagacatctattgaatgccaatccttccagcccggccaacccacgccgctcatgtccattcgcttcgaccagcagcagcacgaaagtgcggcggccaatggaaatgagaacggcaatggtaatgccaatggcgacggcgatgcctccgaagatgctgttgatgccgaaaaaacgcccggagaactggtcctgcccaaggccttggaggacgttctggctttgaaggatcaaagggcagccgagttcacggtggacgccgattcgcagggtggcagtgggggtgctacccaggacggcgacgaagcggatgtgggcgaggacagcgaggaggatgcggataaccaggtgaacgggagtgccagccaaaagaccggcaagcagagcaaggcggagcgtaacaaaaagaagaagaagcgaaagaagcagaacaggaagatacgccaccagattgagttcgcacggcagcagcagttggcccaagcggaggagaacgaaccggaggccaaggactcggagacaaaagcccatggcagcgaggacgaacaggttgccgaaaaggaaaagaaggacaaacgcaaagagagtcgcagcaagcgcaggaaggatcgtagtgatgagaaagatacggacaaaaaggctggcgaggccaatgatgaaaatgtgaccattgagtaagtca

SEQ ID NO: 25439 - DNA, 1013 bp, DROSOPHILA
tacgatatttaacaagcagtatctgctaaaatcaaaacagttcaacaccctaccttctaagcatgttcaaatttaattttgatgtgaaggcggaatcctcggaagatccagaggccgttaaaaatgatatttttagcaagcaggaaaattcagaagaacgtgagtcgggtatcacaaaggatatagattggtacaattcggagaaagtacaaccactggataacctaatttcggcaatggatttctatgagcttaacgccaaggaaatggaggtgggaaagatgacgataaaacatcttgtggccgggtttctgctggaggatttaaaggagcaatcccacttggtaaacctggatctcaggaagtctgaggaaaatcattcagatctgatttccggtgtctacgagggcggtgctaaaatatgggaatgcactgaagatcttctactatatctatccgaaaagtacgaggactcattctggaaggagaaaagagtcctagatttgggatgtggctgcggattgctgggtatatatgctatgaaacacggcgcacgggtggattttcaggactacaacaaagatgtgctggaatacataacatatccaaatatcctgctaaatttggacgactctttatctgaagatgaaaagctgaaatttttagacaacagtacaaccttatattctggagattggtctcattttgctgaactatcaagggatgtggcgaaatacgatctaatacttacctctgagactatatacaatattgcaaatcagcaaaagctcttggatacctttgctggtcgcttaaaatccgatggagtcattttggttgccgcaaaatctcattattttggagttggtggcggcctggaacagttttcagagaacattaggctgggaaatgttttccaaagtgagagtgtttggcaggcagacgaaaacttaaaaagaggaatcttgcaattgaaatttaaataaaatatattttggaattatttataacac

SEQ ID NO: 25440 - protein, 249 aa, DROSOPHILA
MDFYELNAKEMEVGKMTIKHLVAGFLLEDLKEQSHLVNLDLRKSEENHSDLISGVYEGGAKIWECTEDLLLYLSEKYEDSFWKEKRVLDLGCGCGLLGIYAMKHGARVDFQDYNKDVLEYITYPNILLNLDDSLSEDEKLKFLDNSTTLYSGDWSHFAELSRDVAKYDLILTSETIYNIANQQKLLDTFAGRLKSDGVILVAAKSHYFGVGGGLEQFSENIRLGNVFQSESVWQADENLKRGILQLKFK

SEQ ID NO: 25441 - DNA, 3600 bp, DROSOPHILA
gcgcatcgtaaacacgttgacaagttccattatcaaaacagcaacaagcacactcagtggatgatattattatgtttaaatgcttacatatctcaagtactcgggtttgttaccgccttgacaatttttcccaataatagctaatttcattcagacatcagataagcgctgggatttcaaggtcttccgacagctcagactaaaagtttccctcagcaattttgactactctagtttttgggtacaaccaatatctggagagtcttaggcaacgttctattctatattggttgtgactactttaagggtattttctcatcggctagcatcggttcggcaccactccaatcatatcaagagtgacgggcccggtaacaaattgagacctattaataaaaaccaaaacaaaacagagacgcgtgcattcttcgcttttttcgccgcctatgtcggatgatagcggcgatggagaggcttttcgttggcttttagaaagcctcgaccccggcgatagcggcctgttcgtgttccgatgctctggagcgttgcgaacgcatgtgagcgatgtgattagagccggctggccgcgtgctgcggaatcaccccgccgccgtccactcaacctctgataacaaatctgggtatcgggcgctgctgcggcagctagccagccaggcgatggaataaatttagacgcacggaaattttcgcaggccgatggcgtgtgtcgtgcctcgtcaacattagtcccggaatttcacggatttaaaggtgatccctgacggaggccagcgctctaatcacgcagatcgtcgattattttatataggaaatatatttatatgcgtcagtggcttggcctggaactacagtctttgaaccgcgcaagtgatgcaatggaatggcgtcaaagttttaatgtttcactaagtagatttctctagtgtttcaattaaccaacacaagcctttaatgcaacagaaacaacaatatcagtctgttagtcgccagtttcctctcgcagcttcaccacaattttgccccggaggtgcccggatttcatcttctcaaaggcctttggcagctcactgaaaccgtagctgctatcgatcagcggcatcagctaaaatagaagaaagtaattagttgacagagtagctcgggagaacaactcttacctttcgctgctccactagtttctgtagaaattgaattccctggggggcgggactaaagaaaccccatttgacaaggcctccgcgctgcgtgacggatcttacgttggtctggaacagatcgaacacattcttaagcgctcctactcccagtccctgcttgtcgatgttggccagcaacggagatgagaaggtgatgtactggcgaaagtcgtacttcgattccgccgccttctgaccaccttgtccagcgcagtccagcacaatgtcatagggtgcgtatttgcacagctcctccatggcctgcgggttgttatagtcgaccactaaatcggctcccaaattgcgaaccatttcaatggcattttcgctgcaggttgccaaaacttgtactttctgggacttgaggatttgtatggccaatgtgccaacgccaccggagccgccaaggactaggacccgcttgtgggcacctccaccggaagctgttgtggctccacatggaccacccaggcctccagttatgtacagtcccgaccaagccgtcaatccggcatacaacacgctggcggcctcgtaatcatccagttctttgggtgcaggagcaagctatggactacacgttatataaaagaccttgcaagtagtttaactacttacacagtatgaaggaacggctacatactccgcatgcgagccaatggtggcctgtaggggtaccactccccagactcgcgatcccagaggcagcgaaacacccattcccgtctgcaccagctcaccgcagaactcgcggcccaaaataagcggaaactcgatgccgtcgcccggctgacagcgcatcttgttcagcactgtggccccgtaaccacggagcatggccaggtcgatggggttcactgccgtcgccctgatgcgtaccaggcactcgttggaacaacggatctggggtatctttagcatttcagagagctgcagctcgtcaatatcgccgtagttgtgcagctgccatccgcgcattttgtccgcggatttcgatgtcggtggtggcgttgcctggtcatttgtttgtgagccggaaagcacggatttcgcaggggctgaatactggcgcctgtttagacggactaactgcctcaggcagaggatagaattaaagccggctgccgtcatcagcgggttttcgataaaaacgcaataagaattaaaaattagagatatttcttaagaaaatatgttcctaattttgttttgttttggtttgctggccaaacagctgatattatgtcaacaataatcgcgaagaaccgatacgtaatttttgttatcgaccgttcaaattgactaatcaatatttaaactaactaaacgctagtattttatacatacaaagatagttggcaaacggtctatgttagtatgtaaccatggcttgggtaataaaagtgcaatcccaatgcattacaatgaacacaaatttaattttaatgagtgtagtgggatatttaagggatgctacttaaaaaaaacgctttacaacactctttcgcaaaacgcagtatggaatatttagaacaatttcttaattaaaaacaaatcaaacgcgaaatgctgcaaattttgtaaatagcataggaaaacatcgtatttttaagtgaaaagcgaatttatagtgcaataatgtttctgcccgaaacagccaccttctgtatcaccctgttggtctatggagcaattctcctactccttatttactatgtgagtgtggttttccattgaagagaaacattctgaaggtacaaatttttaggtcctcacactggcggatctggagtgcgactatcttaatgcccaggagtgctgccgacgcctcaacttctgggtaatacccaagttcggatcccacgccctgctctgcgtgcttctgttactcggaggccactgggtgatgtttctccttaacctgcctatggtgatttggcttttctacgagctgcatcgccagcggcgcgatagtctgggtgtctacgatccggtggacatacacagtcggggattgctaaaggtccatctgagaaattgtatgatttatctgggctactacttcgttatgttcttcgtggggttgtactggtgagttagacgttgaaaactgcatgttcatctctacgaagttatctgattcttgtctttacagccttatttcgtcactaatcaagggagatcccatcaagcggtatgaggacgacgaaatagtaacggatttctgaagtttagccaaataagcctgcaccaaagggcttccagcaaatttcttcatcctagaccgaactaccaagcctggttatagttgcaatctaaaattctgtaactaaaacttaggcgtacatctaacaaacaagtttcctcgaacactttcgcagaa

SEQ ID NO: 25442 - DNA, 1268 bp, DROSOPHILA
ttacatactaacatagaccgtttgccaactatctttccggctttaattctatcctctgcctgaggcagttagtccgtctaaacaggcgccagtattcagcccctgcgaaatccgtgctttccggctcacaaacaaatgaccaggcaacgccaccaccgacatcgaaatccgcggacaaaatgcgcggatggcagctgcacaactacggcgatattgacgagctgcagctctctgaaatgctaaagataccccagatccgttgttccaacgagtgcctggtacgcatcagggcgacggcagtgaaccccatcgacctggccatgctccgtggttacggggccacagtgctgaacaagatgcgctgtcagccgggcgacggcatcgagtttccgcttattttgggccgcgagttctgcggtgagctggtgcagacgggaatgggtgtttcgctgcctctgggatcgcgagtctggggagtggtacccctacaggccaccattggctcgcatgcggagtatgtagccgttccttcatactgtcttgctcctgcacccaaagaactggatgattacgaggccgccagcgtgttgtatgccggattgacggcttggtcgggactgtacataactggaggcctgggtggtccatgtggagccacaacagcttccggtggaggtgcccacaagcgggtcctagtccttggcggctccggtggcgttggcacattggccatacaaatcctcaagtcccagaaagtacaagttttggcaacctgcagcgaaaatgccattgaaatggttcgcaatttgggagccgatttagtggtcgactataacaacccgcaggccatggaggagctgtgcaaatacgcaccctatgacattgtgctggactgcgctggacaaggtggtcagaaggcggcggaatcgaagtacgactttcgccagtacatcaccttctcatctccgttgctggccaacatcgacaagcagggactgggagtaggagcgcttaagaatgtgttcgatctgttccagaccaacgtaagatccgtcacgcagcgcggaggccttgtcaaatggggtttctttagtcccgccccccagggaattcaatttctacagaaactagtggagcagcgaaagctgatgccgctgatcgatagcagctacggtttcagtgagctgccaaaggcctttgagaagatgaaatccgggcacctccggggcaaaattgtggtgaagctgcgagaggaaactggcgactaa

SEQ ID NO: 25443 - protein, 362 aa, DROSOPHILA
MRGWQLHNYGDIDELQLSEMLKIPQIRCSNECLVRIRATAVNPIDLAMLRGYGATVLNKMRCQPGDGIEFPLILGREFCGELVQTGMGVSLPLGSRVWGVVPLQATIGSHAEYVAVPSYCLAPAPKELDDYEAASVLYAGLTAWSGLYITGGLGGPCGATTASGGGAHKRVLVLGGSGGVGTLAIQILKSQKVQVLATCSENAIEMVRNLGADLVVDYNNPQAMEELCKYAPYDIVLDCAGQGGQKAAESKYDFRQYITFSSPLLANIDKQGLGVGALKNVFDLFQTNVRSVTQRGGLVKWGFFSPAPQGIQFLQKLVEQRKLMPLIDSSYGFSELPKAFEKMKSGHLRGKIVVKLREETGD

SEQ ID NO: 25444 - DNA, 3363 bp, DROSOPHILA
tcttagctgcaaagaaagtcgtgtgacttgggctgtatattttcagagtttataatatttaccattttgttgtggcacctctatagccgctaacgtggcggccatggcctgatccatcgctgatgacgagttctcgttgctgctgggtgtcagcggcgagtggatctcaggagtcggtaatcggggggcaacaggcagggcagcgggaagaatactagccagagcagcaggtggcaccatgccggctaagctggatgatgtcatggctgctacggctttggcggctgcagcagctctgggtaaacaaggaatcatattactaagtggcacgcgatgcacaactaatttacttactcttccgccttcgccttggccttcatatccacgtactccggcggcggctcccagcaggtctccttggtggccacgttgtggtagtacactttgcccgtatccgagcgatactccttccagggacactggttgtgcagcagctcggcgggcgtcatcagagcctccggcttctcccacgagctttgcttcgtgttctgattgtaatagtatggtcgtccgtccggcgccttgtgctccgtccactcggtgctggtggccatcaccccgaaggcggcggccagctccggtgggggtggggccccaaatccgggtggtggaaactgcggcacgattgcaccgggcggcgtgtagcctatgccccttcccggtggcgctcctccattgcccacgctaggaggaacattcatttcactattttgctatatgggtaatgggtgcaccgagagtctaccggtcgttgcgtgctgcgccggccaattcacttttctttcggtaattgaaaaaatccgtaaaattctcaaagcgaatgccgctttccacgccagagatgtcgattgtgcaatgaaactgcccaccccatcgagttatcgagtccacacacgagaactgtccacccggtagattttctgttatcgattagcttccgcggaacgataacagcgctttttgttgtggttcttcgctgtgtgcctttcaattgttagagtttccttgtcgtcgagggcgattaaggaatactgcccagcgacgatgtggcgtacatagagtaagaaatagctgaaatgtacaacatttaagttaaatgatgcttacactattttttgctaccagatctctctgcagtcatgctcctctggttgcccattgcggtggcacgcaggatgttcatcatcctcgtcctaatggtaattggaggcctcttctacatctacacttcggaaaataaataccactcatgctttatggagggccaagtactggcaactcagcaggcgctaactgcagatggcgaaacaaatctattgggcgacgtcctccaggcggatcccaaaccctcgcccggaaacagtatcttctttcacgagaccagctgccgcctatccgagaacagacagctggagacgctgaaggtcactgcccgccaggcatgcgcaatcgagtcggcagcgatgcataatccgaatttccaagtgttcgtcctgttcgctggccccacctatcgaatctccaacaacaaaagccatccccaaccattgttggaggccattctcagttacagcaatgtccatctacgtcgactgaatctcgagagttacgcatctggcacgcccatggaggagtggctcaaagatggtcgtttgtcgcggtcaaagtgagtttaaagactctccctagttattactcattgatgacattacctttccagatatttgttctcgcacatatcagactttctccgctaccttaccctctatcggtatggcggtctttatctggacatggatgtggtggtgcttcgcaacatggagaaggtgccgcccaattacacaggtgctgagtccaacacccatttggcagctggcgtaatgaacctggcagccactggctttggccacgagatcgccgcgtcctgtttgcgcgactttcagcacaactttaacggcggggactggggcaacaatggcccaggggtgataacccgtgtggctcagaagatatgtggcaccaaagacattgctctgatgcgagaggaccccaagcgctgcatgggcttcaaagtattcggacggggcgccttttacgccgtaccgtggaagcagtggcgagacttctttgagccggaaaacttagaagagacaatcgcccggtgcaaggactcgtatgtagtgcatgtgtggaataagcactcgagcaagctgcctatcaaaataggatctaagaacgcctacgccttgtatgccgaacaaaattgcccgagatcgtacaaggctgctggcgaatacttctagtatcagaagggttatcaagctcttatcatttgtatatgaatgtttaccgctgcaagccaaagtcgtcgccctgcaaaggggccattgctaaatgtatccctacctatttgctgtcatcctgttggcattaagtttcattgtcattccaagcgatgtcagcttactcaaacgcacatccgcagcacagttcaagtcaaatggaatggttttttattttgcgataagctttacctctccgattgcacattatatatatgtatttaaatactgattgtgaatataattcgataatataagcaagcgaacaactcacatagacatttattgaaagctgtaaaagtcgcttagaatactattttgaatcattgtagtttgtcttaactaagttcgaataagttgaagaattttgtacatactatttatccagggaatgttactatcaacctacaaataaaatagaagtatttaagtcatcacaaacacagtatcttaactctatttcgataattgaaaaataatttgttaaagcgaaatgaaagttaatatccccgcaagtcattacatgcattgcacttgggaatatcgcagacaggcacccacgttatcctctgcgttcgccttgccggcgccctggccattgccgaagtggacaccaatatagaacggagtcacagtgctttcaatgcgacagggccacacgcccgaggagcagaattgggcgccgcagtggacgggctcgcacccaggaagtgggcccagaccggttcctatgaaatcctctatgatgcaaggcattgtaatccggtcagagcaggtgctgaagaactggcgggcctgtcgccgtcgccacttcagcggcaaatcgatggcattccgaataatacccatgatgtcgaagcctccactgggacgaggacgtctggaaacggtaggtccctccgtggtgggacgactcctgaagaagagaaacccaccgtcgtcatcctcatcatcgcctacc

SEQ ID NO: 25445 - DNA, 1244 bp, DROSOPHILA
cggaacgataacagcgctttttgttgtggttcttcgctgtgtgcctttcaattgttagagtttccttgtcgtcgagggcgattaaggaatactgcccagcgacgatgtggcgtacatagaatctctctgcagtcatgctcctctggttgcccattgcggtggcacgcaggatgttcatcatcctcgtcctaatggtaattggaggcctcttctacatctacacttcggaaaataaataccactcatgctttatggagggccaagtactggcaactcagcaggcgctaactgcagatggcgaaacaaatctattgggcgacgtcctccaggcggatcccaaaccctcgcccggaaacagtatcttctttcacgagaccagctgccgcctatccgagaacagacagctggagacgctgaaggtcactgcccgccaggcatgcgcaatcgagtcggcagcgatgcataatccgaatttccaagtgttcgtcctgttcgctggccccacctatcgaatctccaacaacaaaagccatccccaaccattgttggaggccattctcagttacagcaatgtccatctacgtcgactgaatctcgagagttacgcatctggcacgcccatggaggagtggctcaaagatggtcgtttgtcgcggtcaaaatatttgttctcgcacatatcagactttctccgctaccttaccctctatcggtatggcggtctttatctggacatggatgtggtggtgcttcgcaacatggagaaggtgccgcccaattacacaggtgctgagtccaacacccatttggcagctggcgtaatgaacctggcagccactggctttggccacgagatcgccgcgtcctgtttgcgcgactttcagcacaactttaacggcggggactggggcaacaatggcccaggggtgataacccgtgtggctcagaagatatgtggcaccaaagacattgctctgatgcgagaggaccccaagcgctgcatgggcttcaaagtattcggacggggcgccttttacgccgtaccgtggaagcagtggcgagacttctttgagccggaaaacttagaagagacaatcgcccggtgcaaggactcgtatgtagtgcatgtgtggaataagcactcgagcaagctgcctatcaaaataggatctaagaacgcctacgccttgtatgccgaacaaaattgcccgagatcgtacaaggctgctggcgaatacttctag

SEQ ID NO: 25446 - protein, 369 aa, DROSOPHILA
MLLWLPIAVARRMFIILVLMVIGGLFYIYTSENKYHSCFMEGQVLATQQALTADGETNLLGDVLQADPKPSPGNSIFFHETSCRLSENRQLETLKVTARQACAIESAAMHNPNFQVFVLFAGPTYRISNNKSHPQPLLEAILSYSNVHLRRLNLESYASGTPMEEWLKDGRLSRSKYLFSHISDFLRYLTLYRYGGLYLDMDVVVLRNMEKVPPNYTGAESNTHLAAGVMNLAATGFGHEIAASCLRDFQHNFNGGDWGNNGPGVITRVAQKICGTKDIALMREDPKRCMGFKVFGRGAFYAVPWKQWRDFFEPENLEETIARCKDSYVVHVWNKHSSKLPIKIGSKNAYALYAEQNCPRSYKAAGEYF

SEQ ID NO: 25447 - DNA, 3306 bp, DROSOPHILA
actggcactgcacttctggctgaataaaacttttgctgtgccatcgggtttccagttggagtcgtactggttggcaacgtcttggctcgacgtcagcgattttatggcttccatgtccatgtccactgccatgccatatgttcagctgcaacttcttctctgagcacactccgaatattttatatgcgtgtgcgattcactgcgcagttgaatggtaagtgcgccagtctccatcttccgagatgcgcggatgctgctcgatctgaaccagatgacagctgcccgatgatggtgactctgcgcttgtctgcaactgcttttctccgcttctcggcttttctcctataatacccgcctactaaatattttcggtgatccatgctccatttcgagtgcgcgaagagcgatcttttcacctgaccgactaagcagatcggttggcaaatatatagcttacttatcatatctattatggctgataattgaaaatatattcattttatgacgatacaaattgtgtcatttttcatcagtagtgatctgcgaataaggagggtcgcagctagaattcacatctcttactgttatcgcttactgttatgataacctcgataaccacggctatattaaaggggttttccctttttttgattaccgaaacatccatcccacccgaccgcaatcaataatgcacgggtatcacatgatcgtggtgagatagagcagtggtgaatggtggaactccatggaagtgcacttgaacggatcaagaaatcgccgcagtactttgagtgcagccgggcgtaggtgttgatttgttgtggtgttgatttttatcaaatatacaaatacatgtggttctaaatgacacacccctatctttgtataaaacgtatatttatataaatacatttcttggtaagaaatatatgtatataaatatagaaagctctttgtagggaaactaaagagagtgttcttaaattatatgtgtttgtaggtactatctgaaaatgtgcaaacaaaagcttactgaaaatgtagacaaaattgaaagatttcagacttttatccacgtttaactggaaccaccgacgacgaatcaactcaaaatgtctgataagtaagtaccaaccgctacaataaattgaaagtattgtgcgagatatagttttcagaaccgtcgagttgatgaatccccatttggaaacagcacgatcggattatttataccacctggacatcaatgtggccaatacccgagacaccagtgagttacagaataggttcggcgatgttagggtaagatagtgtcagtcaaatgccttcggattgctaatgcgcgcgaatccgtaggtcatctgcatgggtggaacgggctccagaatgcggcagttagccctttacctaagagatatcctggtagtgtcggagtccggcgatccggtggatttgtgcgagcgtggcaaccgatatgccatgtacaaggtgggtccggtactgtgcgtgagccacggcgttggatcctcctccttcagtgtcgtgctccacgagctgatcaagctcctcaaatatgcgcggtgccaggaccccgtcctgcttcggattggcacctgcggaggacttggcgtccctcccggcacagtggtggccagcaaaaatgccttcaatggtctgctgcgcaacgagcatgagatcgtaagttacagtttgatttttcagtttgccagaagtatttactacaactaataaacattttaggctattctcggacagcgagtggtgcgtccggctcagttttccgaggacgtgatcagggatttacttgcattcggtgtcgacgccaacgacggatttcagaccataagtgccaacacaatgggaacagattgcttttacgaaggtaggtgacacctttacgccgaaccagaggtacttaatgcaaaggactttttcaaccaggtcaaggtcgcaccgatggagccatatgcgagtactcggagaaggataagatggagttcttgcagaagtgccacgatctgggaatccggaacatcgagatggaggccagcatgttcgcctccgtcacccaaaaagtgggggtcaaagcaggcgatgtatgcgtgaccctgatcgatcgcctaaagggagatcaggtaaggggagcccccagaatatatggaatatatgttaatgttaatcacattgctcttcagattactattactattgaccagaagcacgaattcgagcagcgtccctttttcgtcgtgggtcgctacattaagaggttactgcagcagtgaatcctctagaataacacatcttctttgaagttttacaatattggattacaataaaactgcatgctgcactttgctctgtgccattccagctaaccagagacagagtctcaatcttaatcaatattagcaagtttctgctgaatagaagatcattccataaatacaacaattgattgctgtaaaatatccacgaaacatttgcatttaagtctcagtacaactctcctcacccgcgtcccaattgatctttatccgcctaagccaatccccaccagcagcaccagaaaacaaagaaagagccaaataaaaggttgcatatttaatgaccccaaagttaagtctcacatgttcgcacctggaatctgcgaggcgcgaccgagaccaaaccggcggtggattggataaggcatgacatagccgatgagcagcaagagcggaaaaaccagaacggccgaaagtgggttggcttgcatttcgagccgtttacttccgcatcttcctgtcccgcgagcggtgatctttcttaatgaacgtgatacgggcaaattggccaagcagaatcaggccaaacagctcggcggtagtttaagtttgtcccgaaaaccacgtagaaaagcgaggaaagcttaacagtggacctgtagccattggtcataaagcatcgcaattaaagtacttaggaaatcaaaggcccattgatgagtatggaaatatgttatttgttgcattgtatttcgagttagcagatttttcataaagtggttttcctcttggcattcaaaaataacagtcaaagtttacaataagtaaataaagtaattgtgagcatactccatcaactgatcagcagagttagaaactaattaaaaagagtgaccacaagaaagttgctccaaatcgtaaatagacaacaattgcgttgattacttgattctgcgaagtcatcgccctgaacagtttatatcgattcgcatccaaatcgtccagctttaagtccagt

SEQ ID NO: 25448 - DNA, 1015 bp, DROSOPHILA
gtactatctgaaaatgtgcaaacaaaagcttactgaaaatgtagacaaaattgaaagatttcagacttttatccacgtttaactggaaccaccgacgacgaatcaactcaaaatgtctgataaaaccgtcgagttgatgaatccccatttggaaacagcacgatcggattatttataccacctggacatcaatgtggccaatacccgagacaccagtgagttacagaataggttcggcgatgttagggtcatctgcatgggtggaacgggctccagaatgcggcagttagccctttacctaagagatatcctggtagtgtcggagtccggcgatccggtggatttgtgcgagcgtggcaaccgatatgccatgtacaaggtgggtccggtactgtgcgtgagccacggcgttggatcctcctccttcagtgtcgtgctccacgagctgatcaagctcctcaaatatgcgcggtgccaggaccccgtcctgcttcggattggcacctgcggaggacttggcgtccctcccggcacagtggtggccagcaaaaatgccttcaatggtctgctgcgcaacgagcatgagatcgctattctcggacagcgagtggtgcgtccggctcagttttccgaggacgtgatcagggatttacttgcattcggtgtcgacgccaacgacggatttcagaccataagtgccaacacaatgggaacagattgcttttacgaaggtcaaggtcgcaccgatggagccatatgcgagtactcggagaaggataagatggagttcttgcagaagtgccacgatctgggaatccggaacatcgagatggaggccagcatgttcgcctccgtcacccaaaaagtgggggtcaaagcaggcgatgtatgcgtgaccctgatcgatcgcctaaagggagatcagattactattactattgaccagaagcacgaattcgagcagcgtccctttttcgtcgtgggtcgctacattaagaggttactgcagcagtga

SEQ ID NO: 25449 - protein, 292 aa, DROSOPHILA
MNPHLETARSDYLYHLDINVANTRDTSELQNRFGDVRVICMGGTGSRMRQLALYLRDILVVSESGDPVDLCERGNRYAMYKVGPVLCVSHGVGSSSFSVVLHELIKLLKYARCQDPVLLRIGTCGGLGVPPGTVVASKNAFNGLLRNEHEIAILGQRVVRPAQFSEDVIRDLLAFGVDANDGFQTISANTMGTDCFYEGQGRTDGAICEYSEKDKMEFLQKCHDLGIRNIEMEASMFASVTQKVGVKAGDVCVTLIDRLKGDQITITIDQKHEFEQRPFFVVGRYIKRLLQQ

SEQ ID NO: 25450 - DNA, 3508 bp, DROSOPHILA
aggaatcttcctcaagagcgcccggctcgcccaagtggtcgtcccaaatatcgtaatgtcgcattggtggccaggccgtctcgttagccggcgacctggcgctgactgcaggagccagccccacctggaagataagtacgcaaattgcggcggagagggacggcagtaggtggccacaaccggctccagtgactttcttttcactggcactgcacttctggctgaataaaacttttgctgtgccatcgggtttccagttggagtcgtactggttggcaacgtcttggctcgacgtcagcgattttatggcttccatgtccatgtccactgccatgccatatgttcagctgcaacttcttctctgagcacactccgaatattttatatgcgtgtgcgattcactgcgcagttgaatggtaagtgcgccagtctccatcttccgagatgcgcggatgctgctcgatctgaaccagatgacagctgcccgatgatggtgactctgcgcttgtctgcaactgcttttctccgcttctcggcttttctcctataatacccgcctactaaatattttcggtgatccatgctccatttcgagtgcgcgaagagcgatcttttcacctgaccgactaagcagatcggttggcaaatatatagcttacttatcatatctattatggctgataattgaaaatatattcattttatgacgatacaaattgtgtcatttttcatcagtagtgatctgcgaataaggagggtcgcagctagaattcacatctcttactgttatcgcttactgttatgataacctcgataaccacggctatattaaaggggttttccctttttttgattaccgaaacatccatcccacccgaccgcaatcaataatgcacgggtatcacatgatcgtggtgagatagagcagtggtgaatggtggaactccatggaagtgcacttgaacggatcaagaaatcgccgcagtactttgagtgcagccgggcgtaggtgttgatttgttgtggtgttgatttttatcaaatatacaaatacatgtggttctaaatgacacacccctatctttgtataaaacgtatatttatataaatacatttcttggtaagaaatatatgtatataaatatagaaagctctttgtagggaaactaaagagagtgttcttaaattatatgtgtttgtaggtactatctgaaaatgtgcaaacaaaagcttactgaaaatgtagacaaaattgaaagatttcagacttttatccacgtttaactggaaccaccgacgacgaatcaactcaaaatgtctgataagtaagtaccaaccgctacaataaattgaaagtattgtgcgagatatagttttcagaaccgtcgagttgatgaatccccatttggaaacagcacgatcggattatttataccacctggacatcaatgtggccaatacccgagacaccagtgagttacagaataggttcggcgatgttagggtaagatagtgtcagtcaaatgccttcggattgctaatgcgcgcgaatccgtaggtcatctgcatgggtggaacgggctccagaatgcggcagttagccctttacctaagagatatcctggtagtgtcggagtccggcgatccggtggatttgtgcgagcgtggcaaccgatatgccatgtacaaggtgggtccggtactgtgcgtgagccacggcgttggatcctcctccttcagtgtcgtgctccacgagctgatcaagctcctcaaatatgcgcggtgccaggaccccgtcctgcttcggattggcacctgcggaggacttggcgtccctcccggcacagtggtggccagcaaaaatgccttcaatggtctgctgcgcaacgagcatgagatcgtaagttacagtttgatttttcagtttgccagaagtatttactacaactaataaacattttaggctattctcggacagcgagtggtgcgtccggctcagttttccgaggacgtgatcagggatttacttgcattcggtgtcgacgccaacgacggatttcagaccataagtgccaacacaatgggaacagattgcttttacgaaggtaggtgacacctttacgccgaaccagaggtacttaatgcaaaggactttttcaaccaggtcaaggtcgcaccgatggagccatatgcgagtactcggagaaggataagatggagttcttgcagaagtgccacgatctgggaatccggaacatcgagatggaggccagcatgttcgcctccgtcacccaaaaagtgggggtcaaagcaggcgatgtatgcgtgaccctgatcgatcgcctaaagggagatcaggtaaggggagcccccagaatatatggaatatatgttaatgttaatcacattgctcttcagattactattactattgaccagaagcacgaattcgagcagcgtccctttttcgtcgtgggtcgctacattaagaggttactgcagcagtgaatcctctagaataacacatcttctttgaagttttacaatattggattacaataaaactgcatgctgcactttgctctgtgccattccagctaaccagagacagagtctcaatcttaatcaatattagcaagtttctgctgaatagaagatcattccataaatacaacaattgattgctgtaaaatatccacgaaacatttgcatttaagtctcagtacaactctcctcacccgcgtcccaattgatctttatccgcctaagccaatccccaccagcagcaccagaaaacaaagaaagagccaaataaaaggttgcatatttaatgaccccaaagttaagtctcacatgttcgcacctggaatctgcgaggcgcgaccgagaccaaaccggcggtggattggataaggcatgacatagccgatgagcagcaagagcggaaaaaccagaacggccgaaagtgggttggcttgcatttcgagccgtttacttccgcatcttcctgtcccgcgagcggtgatctttcttaatgaacgtgatacgggcaaattggccaagcagaatcaggccaaacagctcggcggtagtttaagtttgtcccgaaaaccacgtagaaaagcgaggaaagcttaacagtggacctgtagccattggtcataaagcatcgcaattaaagtacttaggaaatcaaaggcccattgatgagtatggaaatatgttatttgttgcattgtatttcgagttagcagatttttcataaagtggttttcctcttggcattcaaaaataacagtcaaagtttacaataagtaaataaagtaattgtgagcatactccatcaactgatcagcagagttagaaactaattaaaaagagtgaccacaagaaagttgctccaaatcgtaaatagacaacaattgcgttgattacttgattctgcgaagtcatcgccctgaacagtttatatcgattcgcatccaaatcgtccagctttaagtccagt

SEQ ID NO: 25451 - DNA, 1160 bp, DROSOPHILA
cgggcgtaggtgttgatttgttgtggtgttgatttttatcaaatatacaaatacatgtggttctaaatgacacacccctatctttgtataaaacgtatatttatataaatacatttcttggtaagaaatatatgtatataaatatagaaagctctttgtagggaaactaaagagagtgttcttaaattatatgtgtttgtagatttcagacttttatccacgtttaactggaaccaccgacgacgaatcaactcaaaatgtctgataaaaccgtcgagttgatgaatccccatttggaaacagcacgatcggattatttataccacctggacatcaatgtggccaatacccgagacaccagtgagttacagaataggttcggcgatgttagggtcatctgcatgggtggaacgggctccagaatgcggcagttagccctttacctaagagatatcctggtagtgtcggagtccggcgatccggtggatttgtgcgagcgtggcaaccgatatgccatgtacaaggtgggtccggtactgtgcgtgagccacggcgttggatcctcctccttcagtgtcgtgctccacgagctgatcaagctcctcaaatatgcgcggtgccaggaccccgtcctgcttcggattggcacctgcggaggacttggcgtccctcccggcacagtggtggccagcaaaaatgccttcaatggtctgctgcgcaacgagcatgagatcgctattctcggacagcgagtggtgcgtccggctcagttttccgaggacgtgatcagggatttacttgcattcggtgtcgacgccaacgacggatttcagaccataagtgccaacacaatgggaacagattgcttttacgaaggtcaaggtcgcaccgatggagccatatgcgagtactcggagaaggataagatggagttcttgcagaagtgccacgatctgggaatccggaacatcgagatggaggccagcatgttcgcctccgtcacccaaaaagtgggggtcaaagcaggcgatgtatgcgtgaccctgatcgatcgcctaaagggagatcagattactattactattgaccagaagcacgaattcgagcagcgtccctttttcgtcgtgggtcgctacattaagaggttactgcagcagtga

SEQ ID NO: 25452 - protein, 292 aa, DROSOPHILA; identical to SEQ ID NO: 25449

SEQ ID NO: 25453 - DNA, 3291 bp, DROSOPHILA
ttgtggatcctctcgcgatcgctgtcgttcgccagcctcttgtccagggagtccagaaggatctccgtcttgcgcagtcgccagaggaagaggtaggtgatggtggacttcaccgaggcgccatacacattgatgcacacctgcagcgaggtaaggaactcgcccggcgtgaagttcttgaactcctgcacgtagctgatgatgaagcccacgggcaggtaaaacaccccgaaggcgaagggcacgcaggtccagaagagatacacgtagcgcaggactccctccttcggcggaatccatccgatgagccacatggcacggtacagatatatattcccctggcgggactgcaccttctcggtcaacggagccggtttgattagcttgaacaccgccatgatgcccactgaccggtggtcggtgccagcacctgcactttatacccggataccataacccttcaatcgaacaagtgctccattcccgcgctacagacacgccccatcgttttgtggtctgtaattagacttaaccaacggcagccaggtgttaagtgtttaaggggatttattattgaggtgcaagcagccctgtcaactgccaattaactggcttaatagttaattgtcgggtgccctggttaataaaccaatcaggctattcaattcgacttttaaaggggcaatgttaaactactgtattacggcgaaaattgctgccattcttttaaatgattggtttcaatacaaaaattgaaaaattttaatgggttaactttaatgttgacggcaggtattggggatttggcgcatattcatttggtttttgacccggttttgcttcttattaccacatggcactgaagatgctcggcgtctttgagtgtgtaatcacatctggagtggatgtgcaaacactagggatactacgagtatagagtgaaagtgtcgggcagcaaatatttggttaagcgcttttctttgccgtgcactttaaggatctaaggatttatatcgccattgctcctgtcactgaagaacttctcgcccagattcatttggttcacgattgtgatgattgtgaacgcgaacttggccacggctatgttgctctgcaccgaaatgggaaatatggagccggccgtgaattgaatgggttgctgagcccggtgcaggaaatacagaaccgccgacttgtagctcctgtccgcggttatccagtttgagtggaacagggcgttgctcacatggacggagtcctcgatcagatgctcgcagagcatgcagcatggaaaggactctgtacagatggccacgatgaacgacacgtttgccatgatcgtccaaatggtgttcggaaagaagaggatgctgatggccgccagacccaagtcaatgccaaccagcatgaactgggcaaagatagtgatcgacaggatgggtcgaataatctgggagcacctgaaacggttcgtccttgagtagaacagtcagaccatgaggcgccacatcttactgtatgatggttcgatgatcctgaatgcaggccaccatctgctcatagtgttccatctcactgagtttcggatcctgccgcagattagctatgcgatctctgagaatagccaggtggcagcggaacaaggagatgaacactatggcgtaggtgtcggacatcaactcctgcatggtgccaatggagaccacacagtactccaggatggaggcaatccatagctgccaatggcctttccgccagtccaccagtgggttgtacagctgccaaggagctttgccagcgaaaaccgaagtgaacagagttagaaagcagaagcccaagtacgtggacaagaacagaatcacgatgagattaacccgtgccaccatcttatggaaaattcgacgctgtgtcgtagtcacacatctcttgtccagggacgagataagctcattcatccggcgaaaacgccacatctgggaataagttacgcatgacttgatcacgttcccgatgcagttgatatccacctgcagggaggtcaggaactccgtcggcgtgaatctatcgaagtgcttcacataggtgaggctcagtccgagcggcaggtacacgatacccagccacatcgtggtcagagtccacagggagtagatccatcggagcagagcccccttgggcggggtccagcccaggaaaaatgcgatgcggtagtagtagtcgctggcatcaagggaactcacctcctgatcaagtggagcagtttgcaggcgcttgaagaagaacttggtcatctttgcggggtggattaaatacttctagagcggagattcgcttgaaggggtttttatacggcagtattgccactctgatttgcttttaatgtcgcgtcatttttggtttattcatcacagagtcccgagtcatccaaggctacacgtttgcacttataaagtcattagtcgcaggattgtcttaggcaacgcaaacagccaaggtgaagcacttgcagaaaaaatagtttacctcttacttgaaagttgagttaaatattcccatttcccagactgtcacacaacatacaaagcagtttgcaatgaatatagtcattaagagttgtgaaaatcccttcgatttctcgctgtgtaccccttggggtgcactgaatccgagagctgctgactgccgtgaaaggccgatcgatttctgggtcctctaattacagtttgcataatggataacgctattgaaacccttccgtatccttgcagcctttcatctctactcgaaccgcacggaggagcgcatcgaggatgacacgctggctgtgaaatacgaggacggcagatggtcaaaaccgtactacgattgcggcggtggcaacatttggatgcttacctacacggtgccgttctttggttatgaaaacggcacatatcacttcaagtgagtatggaaatcattgcccactgggggtctgagtatctatatcaccaaagtcatattaaatgtgaatataattctagaatgaagaaaatacttcaggttctcccacttgttgggttataagataagatatatagcaccctacattatttttgaactatctggcataactattgcccccacattcatatacctcatatattaaggattaacgagtcctttttctgcttgcaacgcaatgggtacaatgcacaagtgcggcaagtacatgcacatgacggatgccaccagatgagtattttataaataattcgcagcatgggaaatttcgaaagagaagtgcaatgg

SEQ ID NO: 25454 - DNA, 1236 bp, DROSOPHILA
atgaccaagttcttcttcaagcgcctgcaaactgctccacttgatcaggaggtgagttcccttgatgccagcgactactactaccgcatcgcatttttcctgggctggaccccgcccaagggggctctgctccgatggatctactccctgtggactctgaccacgatgtggctgggtatcgtgtacctgccgctcggactgagcctcacctatgtgaagcacttcgatagattcacgccgacggagttcctgacctccctgcaggtggatatcaactgcatcgggaacgtgatcaagtcatgcgtaacttattcccagatgtggcgttttcgccggatgaatgagcttatctcgtccctggacaagagatgtgtgactacgacacagcgtcgaattttccataagatggtggcacgggttaatctcatcgtgattctgttcttgtccacgtacttgggcttctgctttctaactctgttcacttcggttttcgctggcaaagctccttggcagctgtacaacccactggtggactggcggaaaggccattggcagctatggattgcctccatcctggagtactgtgtggtctccattggcaccatgcaggagttgatgtccgacacctacgccatagtgttcatctccttgttccgctgccacctggctattctcagagatcgcatagctaatctgcggcaggatccgaaactcagtgagatggaacactatgagcagatggtggcctgcattcaggatcatcgaaccatcatacagtgctcccagattattcgacccatcctgtcgatcactatctttgcccagttcatgctggttggcattgacttgggtctggcggccatcagcatcctcttctttccgaacaccatttggacgatcatggcaaacgtgtcgttcatcgtggccatctgtacagagtcctttccatgctgcatgctctgcgagcatctgatcgaggactccgtccatgtgagcaacgccctgttccactcaaactggataaccgcggacaggagctacaagtcggcggttctgtatttcctgcaccgggctcagcaacccattcaattcacggccggctccatatttcccatttcggtgcagagcaacatagccgtggccaagttcgcgttcacaatcatcacaatcgtgaaccaaatgaatctgggcgagaagttcttcagtgacaggagcaatggcgatataaatccttag

SEQ ID NO: 25455 - protein, 411 aa, DROSOPHILA
MTKFFFKRLQTAPLDQEVSSLDASDYYYRIAFFLGWTPPKGALLRWIYSLWTLTTMWLGIVYLPLGLSLTYVKHFDRFTPTEFLTSLQVDINCIGNVIKSCVTYSQMWRFRRMNELISSLDKRCVTTTQRRIFHKMVARVNLIVILFLSTYLGFCFLTLFTSVFAGKAPWQLYNPLVDWRKGHWQLWIASILEYCVVSIGTMQELMSDTYAIVFISLFRCHLAILRDRIANLRQDPKLSEMEHYEQMVACIQDHRTIIQCSQIIRPILSITIFAQFMLVGIDLGLAAISILFFPNTIWTIMANVSFIVAICTESFPCCMLCEHLIEDSVHVSNALFHSNWITADRSYKSAVLYFLHRAQQPIQFTAGSIFPISVQSNIAVAKFAFTIITIVNQMNLGEKFFSDRSNGDINP

SEQ ID NO: 25456 - DNA, 4367 bp, DROSOPHILA
ataagattaaactaatagaaccaaccaaacatttccccaattatcttggcagttacacattgctttatataaaagactttacaaaatataatagagtatttctgaatttctataattgttcattgtttgttattcaaaacgtagtcgaacgcagcagcacccactaaatgtgtgtatggatagatcactgattgcctgaccttgacatacgattttatataggcttgtacgcaatgctggaggccagtagatacacacttcttccaatcgagtttcaagtgcaagtgcaagtaacccggatgcttattaggtaattaacttattaaatccggatcaataaatttaactaacttgccacttccgcctttggtgtagagatcacagactatgtccagcatggctctcttccgtaggaacatgccggccatgttgcccaagtagagcactggcttttcataggcgatgcccctatccttgaagaaatcattgttggcggacgcccagcggtagaacaaggcggtagcgatcgcaaatagggccaagaactcccacagcatgttgaacgagcgcctagtctgacgatccaagcgtccaaaatataactaacaaacaatcggaagcatttcgttgtcgcaacgcagagctttctatcaaagcttcttgctctgcttttagcatttgataaaatacttgttgtcaataatacacacatatgtatgtgtgttcggtttaatcaagcatgtacaaatttctgagtgcaaacgatttagaataccactcatcatttcatcatcacggcgtgtaggggaaaaggttgacgactctgagtatcgagacagctttggagccagcttacattcaagtgccggcagctacgacgatagagcgttctaaaaaaaaggaagccagtgaattaagtttacttttagattaagtgatcatctagacattacctaagcttctctaggtccaatgcctcgttcgtattcgcataaaagaccagatcagctttttgtggttctgttgtacagcatcctccatgctgtgaaaactgctgcatcagtttacttgaatccttctccatggcaaagtgtgccaccaatccttcgaacaactggggtttcgagctagtggattcaatattgccttcatcctcctttggttcctttttcacaactgatttaaactccttgctgggcttaaaaaaatcctttaatcccttttgcgaaggggacaagcttcgaatcgctttggactccttgcgtttgctgagcacaggagctccgtcttcgtcatcagaaccagtattggaccttttcaatttcttactaccatttgattgattgccattcagttttttctccttttcaggagttgttttgttattcattgctgtctcatctttactacaattggccagaagtaaatcaacatttacattcgattttgaggcctcgaaaagatcttctagatgggccagatcattggcctctttggctgatttatcactgcgacgacgagtaatcctgggaaatcgtactgagattccagacgcggtatgggcatcggacttggtgaactctgcgccagtaatctcccatactggcattttcatcggatccttggccagtacatctggtacaagggacttactgcataacagccaactgggaattgcgttggcatcagcacgttcggttagtttgattagtgatttatgtacctctgcgttggtagcatcatccaagccagagtgcactttggtcactgtcttccacaaacgcccaaacgcatcgtagcagcccatgagaaaaatactaagcgtgccacctttcttccctgatccgtaccaagcacccaaaacaaccaagtccgcggtgtcagccatctttccgtcgaataggtaatccttcttgaccttaagccagttccttttgccgggctgatatgtgctggttggactctttaggaccacaccctccagattggcatgtaacaccctggccgtcatcgcggccagttccctcgtggtcttgaggaactccgactccgacagctgcacgtgggatttaatgggttgaatattctgctcaagaatctcgcgacgcttgcgaaatggcctgaaaaatccagataatatattaggaactatttcatttttaaatattatcttacaaattatattcttcccaaccttaccccacttacagctgggtcaaatcctcgccatcatacagtatgcaatcgaagacgaataagcatacagcagcattggcgaaagtctgcttcttatgggcacccaacgaaccaaagggcagcagtgctcctgtgtcagtgtcgaccagaatgatctcagagtccagtatcatttcgccaccgccaggaaaggcttgcggaatatattttttcagagcccgtatcttgtgatccaccacaggctttagattgcgactaaagaacttgaagtcgttgccctgcttgtggatttgaactcgctctccatcgtatttgatctcgctatatagtccagtggggctcttcttgaaggcgtcctccaccgacttgcagggactggccaacatgggcgatatgggtgtcattacctgaattgcactcgagctcgttttcttagtcttcttaacgggactactagcataatttttattttctttggtggcaaactgttcgacaattgccaccaaatcgcgggaagactgatatgcggggtaggcatcaggaccaaaagcatccaggatgtgccgggctcgggcattgattcttaagtcgtgcttcaccaagcgaataaaggtgcgcagatccaggtcagtggccttcgagcacaacttctgtagcagatctgtttgctcatcctctttggtacgctccaccaggtgcaggagcatttcctccacctcctgcagatagagtttgctctgcttttgcggcttgagtttcttagaagcagcaaagtgcttgcgtagagtttccgaaacgtcgccatctacgggaaacgagaagttagaccagactcaacaagagtttgtgtcggaagtttcttgaaaaatgacaacttgccctgctctagatccagatgcatttgctgttgatctgcattaaaaatgcgcgaaaagagtttgatcagcgccttgttctgcagattgtagacgcgctgattggccgccggaatgaggaactgcacccagagcacggtgtcgcccttgaagcccttgccactgctccccttttcgaagaatcgctgcagtctctccgctttcttcaggtaacttgactcgccggcaatttcatcacagatgcgacggaaagtgtccaacttgttgtcctcattgtgcaatcccttgctggccatcttattacacagaagacgagttagaatcctggcctgccacgttagcctggacaatagcatacgcacactaattgcaaattaaaaatgtggttgtctatttcacagaacaatgcaaacagactttcgactcacgagtaaataaatcgggaatatttgactcaaatcagctgttgctcgccaaacacgcgctcggcggcgttgtaattggcggctcgagagtcttgcaatgccgttacgaatttgaagctcaggcgccagaacgggtgcagattcgattccacgacttcaacgtgcctacggagcacgagaattccacgggttgccagccgggcgatgcgctgcacgtggtcaccgagctgcgtggacggtacgagacgcaggaactgctctgcggcgccttcctgcccaagccactgatgtccagtggacagcagctacaccttcagtttgtcggaaaatatccgcccacaatgacgaacaaggtgcaatactacggatttcgcgcggagtaccgtttcttaaccagtaagtgtttccactgagtcttaatcaaataaagactgatatttatttaaaaattggcttattttcaagattttggtatcatgtcggggattcaaaaggaaggatgttcctttgtctacaatagcagcgagcgaataagtggcctatttcactctccgaattttcccggatattacctggaaaatgttgtgtgcaattattatttctacggagcaagtgacgaaagagttgtgcttcacttcacatatttcgatatcgagggcattggaaggtaagatctttatctaaactatcacctaaaaatgtttaatccccttttctgtgcagttgtgaccaccaaaccgccagcgattacatcgagttttccaatttcatgagcacggatcgaaagttcagcagatactgcggaaagcttcccgattttgaaatgcgttctgatggacgtttctttcgagtcaccttgcattccaatgat

SEQ ID NO: 25457 - DNA, 2202 bp, DROSOPHILA
atggccagcaagggattgcacaatgaggacaacaagttggacactttccgtcgcatctgtgatgaaattgccggcgagtcaagttacctgaagaaagcggagagactgcagcgattcttcgaaaaggggagcagtggcaagggcttcaagggcgacaccgtgctctgggtgcagttcctcattccggcggccaatcagcgcgtctacaatctgcagaacaaggcgctgatcaaactcttttcgcgcatttttaatgcagatcaacagcaaatgcatctggatctagagcagggcgacgtttcggaaactctacgcaagcactttgctgcttctaagaaactcaagccgcaaaagcagagcaaactctatctgcaggaggtggaggaaatgctcctgcacctggtggagcgtaccaaagaggatgagcaaacagatctgctacagaagttgtgctcgaaggccactgacctggatctgcgcacctttattcgcttggtgaagcacgacttaagaatcaatgcccgagcccggcacatcctggatgcttttggtcctgatgcctaccccgcatatcagtcttcccgcgatttggtggcaattgtcgaacagtttgccaccaaagaaaataaaaattatgctagtagtcccgttaagaagactaagaaaacgagctcgagtgcaattcaggtaatgacacccatatcgcccatgttggccagtccctgcaagtcggtggaggacgccttcaagaagagccccactggactatatagcgagatcaaatacgatggagagcgagttcaaatccacaagcagggcaacgacttcaagttctttagtcgcaatctaaagcctgtggtggatcacaagatacgggctctgaaaaaatatattccgcaagcctttcctggcggtggcgaaatgatactggactctgagatcattctggtcgacactgacacaggagcactgctgccctttggttcgttgggtgcccataagaagcagactttcgccaatgctgctgtatgcttattcgtcttcgattgcatactgtatgatggcgaggatttgacccagctgccatttcgcaagcgtcgcgagattcttgagcagaatattcaacccattaaatcccacgtgcagctgtcggagtcggagttcctcaagaccacgagggaactggccgcgatgacggccagggtgttacatgccaatctggagggtgtggtcctaaagagtccaaccagcacatatcagcccggcaaaaggaactggcttaaggtcaagaaggattacctattcgacggaaagatggctgacaccgcggacttggttgttttgggtgcttggtacggatcagggaagaaaggtggcacgcttagtatttttctcatgggctgctacgatgcgtttgggcgtttgtggaagacagtgaccaaagtgcactctggcttggatgatgctaccaacgcagaggtacataaatcactaatcaaactaaccgaacgtgctgatgccaacgcaattcccagttggctgttatgcagtaagtcccttgtaccagatgtactggccaaggatccgatgaaaatgccagtatgggagattactggcgcagagttcaccaagtccgatgcccataccgcgtctggaatctcagtacgatttcccaggattactcgtcgtcgcagtgataaatcagccaaagaggccaatgatctggcccatctagaagatcttttcgaggcctcaaaatcgaatgtaaatgttgatttacttctggccaattgtagtaaagatgagacagcaatgaataacaaaacaactcctgaaaaggagaaaaaactgaatggcaatcaatcaaatggtagtaagaaattgaaaaggtccaatactggttctgatgacgaagacggagctcctgtgctcagcaaacgcaaggagtccaaagcgattcgaagcttgtccccttcgcaaaagggattaaaggatttttttaagcccagcaaggagtttaaatcagttgtgaaaaaggaaccaaaggaggatgaaggcaatattgaatccactagctcgaaaccccagttgttcgaaggattggtggcacactttgccatggagaaggattcaagtaaactgatgcagcagttttcacagcatggaggatgctgtacaacagaaccacaaaaagctgatctg

SEQ ID NO: 25458 - protein, 734 aa, DROSOPHILA
MASKGLHNEDNKLDTFRRICDEIAGESSYLKKAERLQRFFEKGSSGKGFKGDTVLWVQFLIPAANQRVYNLQNKALIKLFSRIFNADQQQMHLDLEQGDVSETLRKHFAASKKLKPQKQSKLYLQEVEEMLLHLVERTKEDEQTDLLQKLCSKATDLDLRTFIRLVKHDLRINARARHILDAFGPDAYPAYQSSRDLVAIVEQFATKENKNYASSPVKKTKKTSSSAIQVMTPISPMLASPCKSVEDAFKKSPTGLYSEIKYDGERVQIHKQGNDFKFFSRNLKPVVDHKIRALKKYIPQAFPGGGEMILDSEIILVDTDTGALLPFGSLGAHKKQTFANAAVCLFVFDCILYDGEDLTQLPFRKRREILEQNIQPIKSHVQLSESEFLKTTRELAAMTARVLHANLEGVVLKSPTSTYQPGKRNWLKVKKDYLFDGKMADTADLVVLGAWYGSGKKGGTLSIFLMGCYDAFGRLWKTVTKVHSGLDDATNAEVHKSLIKLTERADANAIPSWLLCSKSLVPDVLAKDPMKMPVWEITGAEFTKSDAHTASGISVRFPRITRRRSDKSAKEANDLAHLEDLFEASKSNVNVDLLLANCSKDETAMNNKTTPEKEKKLNGNQSNGSKKLKRSNTGSDDEDGAPVLSKRKESKAIRSLSPSQKGLKDFFKPSKEFKSVVKKEPKEDEGNIESTSSKPQLFEGLVAHFAMEKDSSKLMQQFSQHGGCCTTEPQKADL

SEQ ID NO: 25459 - DNA, 5922 bp, DROSOPHILA
caccaatcaagtggccacccaaaccagaagcttttggccagccacttttactttccatttaaacactcagacccatttttccacagcagctattccaacttacgccttccattaattttacagaaagattttttgagcgcaagcaaggattattaaaacgaaaaccaagccaaaccaactaaatacccaaaacgacaaaaatcgacacaaaaaacgacgaaaaacgaataaaaatcccaaaattcattcgcaagtttttcgggccaagcatcgaaaacacacttttgagattcaaaaaatcaaagcgaaagaaacaaaaacaaactggaaaggagcaaaaaaggactggagaaggagaacgggtgtaaaacgaagggaaatacaaatcaaatttaaataaaattaaatgcaaaggacattcgcatgtgtgtggtggtggaaagaaaattcaaaacaaaattcacaattagaaaacgcaggaaaaaacgtagaaaacgcagacacaaaatcaagagtgccggcagcaacagcagcaaccaactgtcaacagcgggaagaattttgaactggaacatttcgaccaaaaagttgggcgacagcaaaatttcaacgtttggcgcactacaaacacagcagcaaggacatcgcggccaggcagccaggattgcaggagcgagcggttttgaaagcgcagcacacatcgacaaacccttctcacacggactagtactcagaatcggaccaggataccttttggcttagaaagcggcccacggaaaaaccgcagccagcaatttaagcttgaaatcacgcatacgccgcggcgaactctcgctctctttgccggaacgaaggggtattgccagagaaaaagcagccaatccgaggaagcgggttggccgaggggcaaggcagagaaagcagcgaaagcaggagcgaaatcatcgagagctgagaagcgcgaggcgagagagctgctgctgctggtgggcatcatcttatgatgtcatcagaggagtacgaggcggactgttttggtttgtacagcgatgagaacaacgtgctgctgaaggcaaacgagccggagacaacggccgccaccaagcaacaacatcagccacagtttcagcagcaacagcaacagcaacagcaacagcaacagcaccatcatcaacaccagcaaccaccgccgagcagcaacggtcacacgtcaccaataccctcacaagtcaacggcgacggcagcgcggcgaattgcggcgagagcggcaagactaataccaatacaggcagccacagtcacagcaacagcggcaacaccaacacagacgcagacaaggagcaagagcgagagaaggcaaaggagaaagcgaacgaagaggagtccgaggattccgacgacgacgtcgtggttgtactcgaaggctgcgaaggcaacgccagcagcagcagcagcagcagcaacagcaacagcaacgccagcagcaacaaccataaggcagcggccacgacgacgacgacggcgacgacggcgaaccattgtaatcgcagtggcggcagcagtcgcagtcatcgcagcgcccgcagtagtcggcaaatcagtcagtcaacggccgtcggcaagacaacaacgtgcgcggctaaaaaaccaacagcagcacaggcgaccacgacaacagccaagaactcgaactcgaactcgaacgtgaacgtgaacgtgaacgtgaattcaaacggtagcggaaacggaaacgcgaacagtaaagtgaatcgtcgttcgcgtcaaagatccttgagcaaagacattaacaatcagccagcgagcagtaatagcaatagcaacagtagtaacaacagcagcaacagcaacggcggagcaacggcaaccgctgctggcttcatgagtagcgctgccgcggctgctgcgggtgccgctggtggaggagccctgttccaaccacaatcggtcagcacggccaatagcagtagtagtaacaataacaattcaagcacaccggctgctcttgccacccattcgcccacgagcaactcaccagtttcgggcgccagttcggcatcgtccttgttgacggccgcctttggcaacctgtttggtggctcctcggccaagatgctgaacgagctgtttggccgccagatgaagcaggcccaggacgcaacgagtggcctgccccagagtttggacaacgccatgctggccgccgccatggagacggccaccagtgccgagctgttgatcggcagcctcaattccacgtccaagttgctgcagcagcagcacaataacaacagcattgctcccgccaatagcacgcccatgagcaatggcacaaatgcatcgatctcgccgggatcggcccacagttccagtcactcgcatcagggagtctcgcccaaaggaagtcgcagggtgtcggcctgcagtgatcgctccttggaggcggcagctgctgatgttgctggtggctcgccgccacgagcggcatcggtgagctcgctgaacggaggagccagcagtggggagcagcaccagtctcagttgcaacacgacctggtggcacatcacatgctgcgcaatatactgcagggcaagaaggagctgatgcaactggatcaggagctgcgcaccgccatgcagcagcagcaacagcagctgcaggagaaggagcaactgcactccaagcttaacaataataataacaacaatattgctgccaccgccaacaacaataacaacaccacaatggagagtatcaatctgatcgacgattcggaaatggctgacatcaagatcaagagtgagccccagacggctccgcagccacagcaatcgccgcacggaagcagccacagcagccgaagtgggagcggcagtgggagccacagcagcatggccagcgatggcagcctgcgacgcaagtcctccgactccctggacagccacggggcgcaggacgatgcgcaggacgaggaagatgctgcgcccactggccagagatccgagagcagggctccggaggagccacagctgcccaccaaaaaagaatccgtggacgatatgcttgacgaggtggagctcctgggtctgcactcccgcggatccgatatggatagcctggcctcgcccagtcactcggacatgatgctgctggacaaggacgatgtcctggacgaggacgacgacgatgattgcgtggagcagaaaacatccggcagcggatgtctcaagaaacccggcatggacttgaagcgcgctcgcgtcgagaacatcgtgtcgggaatgcgatgcagtccatcctccggattagcgcaggcaggacaactgcaggtaaatggttgtaagaagcgcaagctctaccagccccagcaacacgccatggagcgttatgtggccgccgcagctggtctgaatttcggcctcaatctgcagagcatgatgctcgaccaggaggacagtgagtccaatgagctggagtccccgcaaatccaacagaagcgtgtggagaaaaatgcgctcaagtcccagctgcgatccatgcaggagcagctcgcggagatgcagcagaaatatgtgcagctgtgctcgcgcatggagcaggaatccgagtgccaggaacttgaccaggaccaggatgtggaacaagaacaagagccggacaatggcagcagtgatcatatcgagctgtcgccctcgcccactttgaccggagatggtgacgttagtcccaaccacaaggaggaaactgggcaggaacgacctggttccagctcaccctcaccatcgcccctaaaacccaagacatcgctgggcgagagcagcgactcaggcgctaacatgctatcccagatgatgagcaagatgatgtccggcaagctgcacaatccactggtgggtgtgggtcatcccgccctgcctcaaggatttcctccactgctccagcacatgggcgacatgtcgcacgcagccgccatgtaccagcagttcttcttcgagcaggaggcgcgcatggccaaggaagccgccgagcagcagcagcaacagcagcaacagcaacaacagcagcagcagcaacagcagcaggagcaacagcgccgcttcgagcaggagcaacaagagcagcagcgacgcaaggaggagcagcaacagcagatccagcgccagcagcagcatctgcaacagctgcagcaacagcaaatggagcagcaacatgtggccactgccgcccccaggccgcagatgcaccacccagcgcccgcccgcctgcccacacgaatgggcggtgctgctggccacacggccctcaagtccgaactgtcggaaaagttccaaatgctgcgcgccaacaacaatagctcaatgatgcgcatgtcgggcacggacctggagggactggccgatgtgctcaagtccgagatcaccacctcgctgtccgctctggtggacaccattgtgacccgcttcgtccaccaacggcggctgttcagcaagcaagcggactccgtgaccgcggctgccgagcagctgaacaaggacctgctgctggcttcgcagatcctcgaccggaagtcaccgcgcaccaaggtggcggacaggccccagaacggacccacgcccgcaacacaatcagattgagcaaaaccaaaacttaacatagagcagcaagtcttaatctaataatgtgaaatagtgcaaattgaaagaaaacctgagccacacacctgagaacacccacacaccgagcgtaatttacaggcagtgtaaactgtactcgccgttggtttgttagttgaaatttttttgaaaatatttacagcagattacgtatacgtatgaatatttaacaaatagttgagccgtctaatgatctaccgaaagttgacacacattccacaaggaaatacctacacaataaccacacgcattccacgcacacgcacacacacacacgctcgcatcggtacaaagtgtgtgttcatttgagagagagagagagagagagagaaaatcgctcggccaaacaggaagtggtttttatcgcactgcttggccgaccgactttccggtaagcagtttccaccgcccggttgcacactgctttacaaaagcaggcgcagctctgacggacggaaatcgggaattaatcttaaatgtttaaaagtcacccgatcactaaggttgctacttccctttatcccacatttaagcgctaagcatatattcgatgtctattaagcgaaactaaaagcaaaaacaaaaaaaaaaaagttaagaaatttgcaaaaactatttaggtttttaatgagagagccagagttatttgtacgaacagcgggcgttagggtagttaaatttaccatcttatctcttacattacgttatgcgaaccttcgaccaaagttaattgttaacatgaatcccttaaatacggtttatttttaatcaattcttttcctttagtgccccactttgagcacgcatcttaattttatagaataatcgacatacacaataaaacacaccacaaacacacacacactagtctgttatttatgtaaataatttatacgtttagttaagttaacgtttagtttaattaatttactttacttggccttgagttgcaacaaaacaaaatatatacacaaaacaccaaaaataccaattaaaaaatatgtttttttctttctcctgattttatgaacatataaaagtttaaatcataggtcccgatctctggttggctgagatagatcatgcacttctcactcattagcacagcagacacagcatggaaagtgggcgggtttagagggatatgtttgcctgctctccgtccggcgaattttggggctggggcgggcaaaccctgttgttcctgcagctgcaatatctcatcttcg

SEQ ID NO: 25460 - DNA, 5710 bp, DROSOPHILA
atgatgtcatcagaggagtacgaggcggactgttttggtttgtacagcgatgagaacaacgtgctgctgaaggcaaacgagccggagacaacggccgccaccaagcaacaacatcagccacagtttcagcagcaacagcaacagcaacagcaacagcaacagcaccatcatcaacaccagcaaccaccgccgagcagcaacggtcacacgtcaccaataccctcacaagtcaacggcgacggcagcgcggcgaattgcggcgagagcggcaagactaataccaatacaggcagccacagtcacagcaacagcggcaacaccaacacagacgcagacaaggagcaagagcgagagaaggcaaaggagaaagcgaacgaagaggagtccgaggattccgacgacgacgtcgtggttgtactcgaaggctgcgaaggcaacgccagcagcagcagcagcagcagcaacagcaacagcaacgccagcagcaacaaccataaggcagcggccacgacgacgacgacggcgacgacggcgaaccattgtaatcgcagtggcggcagcagtcgcagtcatcgcagcgcccgcagtagtcggcaaatcagtcagtcaacggccgtcggcaagacaacaacgtgcgcggctaaaaaaccaacagcagcacaggcgaccacgacaacagccaagaactcgaactcgaactcgaacgtgaacgtgaacgtgaacgtgaattcaaacggtagcggaaacggaaacgcgaacagtaaagtgaatcgtcgttcgcgtcaaagatccttgagcaaagacattaacaatcagccagcgagcagtaatagcaatagcaacagtagtaacaacagcagcaacagcaacggcggagcaacggcaaccgctgctggcttcatgagtagcgctgccgcggctgctgcgggtgccgctggtggaggagccctgttccaaccacaatcggtcagcacggccaatagcagtagtagtaacaataacaattcaagcacaccggctgctcttgccacccattcgcccacgagcaactcaccagtttcgggcgccagttcggcatcgtccttgttgacggccgcctttggcaacctgtttggtggctcctcggccaagatgctgaacgagctgtttggccgccagatgaagcaggcccaggacgcaacgagtggcctgccccagagtttggacaacgccatgctggccgccgccatggagacggccaccagtgccgagctgttgatcggcagcctcaattccacgtccaagttgctgcagcagcagcacaataacaacagcattgctcccgccaatagcacgcccatgagcaatggcacaaatgcatcgatctcgccgggatcggcccacagttccagtcactcgcatcagggagtctcgcccaaaggaagtcgcagggtgtcggcctgcagtgatcgctccttggaggcggcagctgctgatgttgctggtggctcgccgccacgagcggcatcggtgagctcgctgaacggaggagccagcagtggggagcagcaccagtctcagttgcaacacgacctggtggcacatcacatgctgcgcaatatactgcagggcaagaaggagctgatgcaactggatcaggagctgcgcaccgccatgcagcagcagcaacagcagctgcaggagaaggagcaactgcactccaagcttaacaataataataacaacaatattgctgccaccgccaacaacaataacaacaccacaatggagagtatcaatctgatcgacgattcggaaatggctgacatcaagatcaagagtgagccccagacggctccgcagccacagcaatcgccgcacggaagcagccacagcagccgaagtgggagcggcagtgggagccacagcagcatggccagcgatggcagcctgcgacgcaagtcctccgactccctggacagccacggggcgcaggacgatgcgcaggacgaggaagatgctgcgcccactggccagagatccgagagcagggctccggaggagccacagctgcccaccaaaaaagaatccgtggacgatatgcttgacgaggtggagctcctgggtctgcactcccgcggatccgatatggatagcctggcctcgcccagtcactcggacatgatgctgctggacaaggacgatgtcctggacgaggacgacgacgatgattgcgtggagcagaaaacatccggcagcggatgtctcaagaaacccggcatggacttgaagcgcgctcgcgtcgagaacatcgtgtcgggaatgcgatgcagtccatcctccggattagcgcaggcaggacaactgcaggtaaatggttgtaagaagcgcaagctctaccagccccagcaacacgccatggagcgttatgtggccgccgcagctggtctgaatttcggcctcaatctgcagagcatgatgctcgaccaggaggacagtgagtccaatgagctggagtccccgcaaatccaacagaagcgtgtggagaaaaatgcgctcaagtcccagctgcgatccatgcaggagcagctcgcggagatgcagcagaaatatgtgcagctgtgctcgcgcatggagcaggaatccgagtgccaggaacttgaccaggaccaggatgtggaacaagaacaagagccggacaatggcagcagtgatcatatcgagctgtcgccctcgcccactttgaccggagatggtgacgttagtcccaaccacaaggaggaaactgggcaggaacgacctggttccagctcaccctcaccatcgcccctaaaacccaagacatcgctgggcgagagcagcgactcaggcgctaacatgctatcccagatgatgagcaagatgatgtccggcaagctgcacaatccactggtgggtgtgggtcatcccgccctgcctcaaggatttcctccactgctccagcacatgggcgacatgtcgcacgcagccgccatgtaccagcagttcttcttcgagcaggaggcgcgcatggccaaggaagccgccgagcagcagcagcaacagcagcaacagcaacaacagcagcagcagcaacagcagcaggagcaacagcgccgcttcgagcaggagcaacaagagcagcagcgacgcaaggaggagcagcaacagcagatccagcgccagcagcagcatctgcaacagctgcagcaacagcaaatggagcagcaacatgtggccactgccgcccccaggccgcagatgcaccacccagcgcccgcccgcctgcccacacgaatgggcggtgctgctggccacacggccctcaagtccgaactgtcggaaaagttccaaatgctgcgcgccaacaacaatagctcaatgatgcgcatgtcgggcacggacctggagggactggccgatgtgctcaagtccgagatcaccacctcgctgtccgctctggtggacaccattgtgacccgcttcgtccaccaacggcggctgttcagcaagcaagcggactccgtgaccgcggctgccgagcagctgaacaaggacctgctgctggcttcgcagatcctcgaccggaagtcaccgcgcaccaaggtggcggacaggccccagaacggacccacgcccgcaacacaatcagcggctgccatgttccaggcgcccaaaacgccacagggcatgaatccggtggccgccgccgcgctctacaactcgatgaccggacccttctgcctgccgcccgatcagcagcagcagcaacagaccgcccagcagcaacagtccgcccagcagcagcagcagagctcgcagcagacacaacagcagctggagcagaacgaggccctcagcctggtggtgacaccaaagaagaagcgccataaggtgaccgatacgcgcatcacgccgcgcaccgtcagccgcattcttgcccaggatggcgttgtgccgcccaccggaggcccaccgtcaaccccccagcagcagcaacagcagcagcaacagcaacagcagcagcaacaacagcagcagcaacaggcgtcgaacggcggcaacagcaatgccacgcccgcccagagtccgacgaggagcagtggaggagccgcataccatccgcaaccaccgccaccaccaccacccatgatgcccgtgtccttgcccacctccgtggccatacctaatccctcgctgcacgagtccaaggtcttttcaccgtactcgccgttcttcaatccgcacgcagccgctggccaggcaacggcggcccagctccatcagcaccaccagcagcaccacccgcaccaccagtccatgcagctgtcctccagtccgccgggcagcttgggcgctctgatggactcgcgcgactcgccgccgctgccccacccgccgtcgatgctccatcccgccttgctggccgccgcccatcacggcggatcgccggactacaagacctgcctgcgggccgtcatggacgcccaggatcgccagtccgagtgcaactcggccgacatgcagtttgacggcatggctcctactatatccttttacaaacaaatgcaacttaaaacagaacaccaggagtcgctgatggccaaacattgcgaatccttgactcctttgcactcttctacattgacaccgatgcacctgcgcaaggccaagctgatgttcttctgggtgcgctatcccagctccgcggtgctcaagatgtacttcccggacatcaagttcaacaagaacaacacagcacaattggtgaaatggttctcgaacttccgagaattctactacatacaaatggagaaatatgcacgacaagctgtcaccgaaggcatcaagacacccgatgatctgttgattgctggagatagtgaattgtatcgcgtgctcaatttgcactacaatcgcaataaccacattgaggtaccccagaatttccgcttcgtggtcgaatcgactctgcgggagttcttccgtgcaatacagggtggcaaagacaccgagcagtcgtggaagaagtccatatacaagatcatctcgcgcatggacgatcccgtgcccgagtacttcaagtcgcccaattttttagagcagctggaataagtggaggagttggcgctgccgacgctgccattgccgcatccactgggaatgccaccgcccatcagtccggccagcacctccaccacctgcagcaccgctaccaccaccaactccaggcccggcagcagccatccgaaggcgaagcgcaggccaaagctaaaaggctaaacctgcgcaggaaacacgactggatatgaccaactacccagcaaataaaatcgaggataaccaattcgacaaacagtatccacacacagggcagaaacttagacatagctgagagatttgcaatagcacacgagtcgaaaacgcgtttagaaaacacattgagcaaaaccaaaacttaacatagagcagcaagtcttaatctaataatgtgaaatagtgcaaattgaaagaaaacctgagccacacacctgagaacacccacacaccgagcgtaatttacaggcagtgtaaactgtactcgccgttggtttgttagttgaaatttttttgaaaatatttacagcagattacgtatacgtatgaatatttaacaaatagttgagccgtctaatgatctaccgaaagttgacacacattccacaaggaaata

SEQ ID NO: 25461 - protein, 1703 aa, DROSOPHILA
MMSSEEYEADCFGLYSDENNVLLKANEPETTAATKQQHQPQFQQQQQQQQQQQQHHHQHQQPPPSSNGHTSPIPSQVNGDGSAANCGESGKTNTNTGSHSHSNSGNTNTDADKEQEREKAKEKANEEESEDSDDDVVVVLEGCEGNASSSSSSSNSNSNASSNNHKAAATTTTTATTANHCNRSGGSSRSHRSARSSRQISQSTAVGKTTTCAAKKPTAAQATTTTAKNSNSNSNVNVNVNVNSNGSGNGNANSKVNRRSRQRSLSKDINNQPASSNSNSNSSNNSSNSNGGATATAAGFMSSAAAAAAGAAGGGALFQPQSVSTANSSSSNNNNSSTPAALATHSPTSNSPVSGASSASSLLTAAFGNLFGGSSAKMLNELFGRQMKQAQDATSGLPQSLDNAMLAAAMETATSAELLIGSLNSTSKLLQQQHNNNSIAPANSTPMSNGTNASISPGSAHSSSHSHQGVSPKGSRRVSACSDRSLEAAAADVAGGSPPRAASVSSLNGGASSGEQHQSQLQHDLVAHHMLRNILQGKKELMQLDQELRTAMQQQQQQLQEKEQLHSKLNNNNNNNIAATANNNNNTTMESINLIDDSEMADIKIKSEPQTAPQPQQSPHGSSHSSRSGSGSGSHSSMASDGSLRRKSSDSLDSHGAQDDAQDEEDAAPTGQRSESRAPEEPQLPTKKESVDDMLDEVELLGLHSRGSDMDSLASPSHSDMMLLDKDDVLDEDDDDDCVEQKTSGSGCLKKPGMDLKRARVENIVSGMRCSPSSGLAQAGQLQVNGCKKRKLYQPQQHAMERYVAAAAGLNFGLNLQSMMLDQEDSESNELESPQIQQKRVEKNALKSQLRSMQEQLAEMQQKYVQLCSRMEQESECQELDQDQDVEQEQEPDNGSSDHIELSPSPTLTGDGDVSPNHKEETGQERPGSSSPSPSPLKPKTSLGESSDSGANMLSQMMSKMMSGKLHNPLVGVGHPALPQGFPPLLQHMGDMSHAAAMYQQFFFEQEARMAKEAAEQQQQQQQQQQQQQQQQQQEQQRRFEQEQQEQQRRKEEQQQQIQRQQQHLQQLQQQQMEQQHVATAAPRPQMHHPAPARLPTRMGGAAGHTALKSELSEKFQMLRANNNSSMMRMSGTDLEGLADVLKSEITTSLSALVDTIVTRFVHQRRLFSKQADSVTAAAEQLNKDLLLASQILDRKSPRTKVADRPQNGPTPATQSAAAMFQAPKTPQGMNPVAAAALYNSMTGPFCLPPDQQQQQQTAQQQQSAQQQQQSSQQTQQQLEQNEALSLVVTPKKKRHKVTDTRITPRTVSRILAQDGVVPPTGGPPSTPQQQQQQQQQQQQQQQQQQQQASNGGNSNATPAQSPTRSSGGAAYHPQPPPPPPPMMPVSLPTSVAIPNPSLHESKVFSPYSPFFNPHAAAGQATAAQLHQHHQQHHPHHQSMQLSSSPPGSLGALMDSRDSPPLPHPPSMLHPALLAAAHHGGSPDYKTCLRAVMDAQDRQSECNSADMQFDGMAPTISFYKQMQLKTEHQESLMAKHCESLTPLHSSTLTPMHLRKAKLMFFWVRYPSSAVLKMYFPDIKFNKNNTAQLVKWFSNFREFYYIQMEKYARQAVTEGIKTPDDLLIAGDSELYRVLNLHYNRNNHIEVPQNFRFVVESTLREFFRAIQGGKDTEQSWKKSIYKIISRMDDPVPEYFKSPNFLEQLE

SEQ ID NO: 25462 - DNA, 4640 bp, DROSOPHILA
ttgttgtttgcctgtgcaaaacaattgcacttgcaatttttttgtttgtgtttttgttcttgctttatcgtaatgacaatttatttatatttatttcagtcacaactgctgacgaagctccttgaactggcgttgaactttttatggagcaactttttcacagacggttatattatttatattttcattttaatatgcccacatcgtgtactatgtatttagtataaaacaaatacacgagggaacagcaactgcacagcgagacgaaagtgaaaccgccgcaaacggacgaccgaatcgcacaaaaatcgtacaaaaaaatcgcgtgttgtcaaatcgaaaatcaaactaaattacgagtacccgatgtgaattctgtggaggattgggatgtgggggccgatcggaggagcgaaaaggtcagtcgacatcgacgccattaattgctttagattgaattaagctcgaggcagaggaatcgacggcggaggcagccgctcgtgatggagctccactggtgatcggcttcagtcgtgacctacgcccatgacgtcattcggctcggagcactttatttttagccagcgacttccgcccttatcaaccatgacgcgttcgaatccccaaaccgtgataataccgatcggagctgcagtgtaacggcctggacgtaaatagtaactaaaatccggcgatgtccgtacccgaatcgtagataacggaaccgtggccacctattgccaaagcccaactgtgactaccaaaactccgggtaagcggacaaaggaatgccgatatatggcccaccagaccactagagagagagaaagagccccttatctgtgggcccagagagcaggaggagcagtgtggggcgataagctccgagaacgcaggtaacttggagcggcgtccaggtaaacagatttctgcccgcgcacaggagcggttcacataagccgagggttgtatgggttagatttgatataaaatgcacttatgattatattataggtattcccaatcatttcaaaaacttatgatacatgtaggataaacaaaaggatatgctccacttacccccaaatcaggttcactgttcgtagcttctaaaaggcagtgggaggacgaggaagcggacatgctggtccgatccttgtgcgatttgtgcagattctgcaggctggcccacgtgtccatggtctgatccatacatgcaccactgaccgacgactgcacactgtcgatggcttcgaagcccagcgaatgacgcgagccaggttgaccaaatacctgggcactcagcttgtgtggcgttgttggcgtctccagagccaacgatctgcgcatcttgcggggcacacacgctggatgggcaaacgtgtggccctcatcgagcgatggagcagccgagtgcagcgaaatgtcatccatagaggccacggcagccaaagtgcgcggtgaatcgtcgacaaaaagattaaggacatcatcacaggagcgggtggatgtgagattcgtggcgggactttggatcagattgaagctggccaggagattgggtcgacgaagcgaagagctcgctggcggcgatcttagcagggcggaatgatcgggcatggcccgcacagtcagtcgattatccggtattcccactatgcccagtggacgagcaggagctggataagttggtggtcctgcatgtgccgccgccgctgctcccgctcctgcagctaggaagtccacaaccagaatgcgatccgaaatattcgtacaatcgttgttgaagccaatgcccgaatccgaattggacgtggtggtggagatctcgctgtggttcgatggctgcggcgagtgggcagctgctactgctcctccagctgcggcggctcctgcacccgcctcatagtctgcctgatgactccgacttgccggtgggagaatccgcatggtatacatgctgcgcacgagattcaccacatattccgagttgttagggaactcgagacacaaattcgagatcggatcccgggtgcactgcaggcggaactcgtgggcccgctgcaaatgctgtgcatgttcgatcagcttggtgtcgatgacgaagacatggcagctgtgcgagatactgatgtgaccagcagctgctgcgctgccagcgctcggctcgtactcctcctcgatctgtgtgttgtgcacggcgctagtgaccagaccaaagaatcgattctcgctctccgacgaagagctcacgaagttcagcctggccgaggagtaggtggccagcactccgccgctggaactctgcaggctcaagctgtccggcgtgatgcacatcagcacaatggtgggctgtcgcttctcctgtctcagttttcgaatgcaagatcgaactgtctgcagcttggaactatgcgagatctgcttgggcatctcgatggttcccagatagccaacaataacacggcactccagtgcagcactgcccacagctcgcaccatggcacttacattggccacatccgctgctttggatagattggctgtcagaggcggatcctccagaacgggttttaatgtagggtgatcgggtgatgactttgatttgtgcggttccactgcctctggtgggtttagcttcttttgtggcgagttgcgcaatctgtgcagtttggctttgtggtgtagaaacctgggcttgtgcctcaaactggctgccaacaattgacccctcagcgtggcatgggcgttctcctcatccgagctgtcggaataataattctcggcgatctgcatgcgaatactgccaaaggagttgccaatgagctgcaccactgtttcgtgtggcaacttggagacatttagaccgttgaccgatatgaggaagtcaccggaacgcaggccagcttgctcggcaggtgagctgctgatgatgcaagacagccgacatggttgctgcccggaaatggtgaaaccgaagccattgtaaccacgtcgcacttccacggtgcggatgccattgtagttgtagttggctcgcttcttgcgacgtcgctgatgctgctggctgttggatcccgaaggcgtggttgaggtgcttatgggggcgggcccactattcgcagcaggtgatgcatcctccgctgcagctgctcccgttcccacggctgtggagccacttgctccggttatgggcaaaggcggatgatggtggtgcatggcgcttactgtgtggagaaaacgaatgatgaggagtactggccaatcttaacccacatctggacatttgtacgcacctttctcatggatggaagctgcaacctggatttctggaaatggaatgcggtttctgttgcgcccctttttggatgatgccccctctcgctcgcacccgtgcgtcgcctatgccaactatgtaatcaatggcacacacacatgcgcaccaatggccaggcgtattttgttacacttttctaggcctctaattaattgataactaactcttctttgggtgctacctcatattcacgcggttaataacatcgttgtaactttatcaggcatatttgtagcaattaattgtgtgtaaatcggtaattaaaattatgtctacaatgcgcaagcgtaactatgattagagatggaacacactaaaatgtttactcgatactatcgatattacataccttttgtgaaacatcgatcactttgacacaccatatttttagtaattactgttaaagttttgcagaatgtcaacaatttttaacaagcagttctagagaaaatttgatttgttcaaatattgaaggcattgaccattgatagaaaaacgatatttacaaatttgaattagataaaaacagggctgccagactcattgaaatttatgaagcaatcgttgccacactgggctgaccttcgttgcatagcaacgaacttttgtcacatcccactgccgtcagttacttttcgatttaaataaaagctccgaacgctcgtcctttaaagtccttccggtgagcttacatctgcgtagcgtgttatttgtgtttggcccacgccgtttcagttacattgggactttcaaacgcattggttgaacgcgcgcacccagaaccgctgttgaattagtttttgaacccgaaaacagcagttaaattgctcgagtgaaatgtaaaatgttattggtaaacggatcgaagtgttcgaagttctaacgctgaaatgtttaaggattatccgtagcaagacctgcagaagtgaccccagtcagccagtgttgaaccaattgaaatgttggcaaggacattacggacaaagaatagaaagccaatagaaagcaatgggggtgggatgttgcggaaacggaagtgccaaattgaaatgccatttaagccaggcgagcgatttgcccgtcttcgtttacggctcatccggattcgtctgcgtctggtcagggcactcagatttcttgcggggaatggattcgagagcgcggcaagtgcgatccccagacgacacttggcgtcgctcttgacattgattatattcatgagaccaagtcataaattccagcccgactgtttacgaggattctaacaccaatccgctgtccccgattcccggtctctgcccaa

SEQ ID NO: 25463 - DNA, 2571 bp, DROSOPHILA
ctctaatcatagttacgcttgcgcattgtagacataattttaattaccgatttacacacaattaattgctacaaatatgcctgataaagttacaacgatgttattaaccgcgtgaatatgaggtagcacccaaagaagagttagttatcaattaattagaggcctagaaaagtgtaacaaaatacgcctggccattggtgcgcatgtgtgtgtgccattgattacatagttggcataggcgacgcacgggtgcgagcgagagggggcatcatccaaaaaggggcgcaacagaaaccgcattccatttccagaaatccaggttgcagcttccatccatgagaaagtaagcgccatgcaccaccatcatccgcctttgcccataaccggagcaagtggctccacagccgtgggaacgggagcagctgcagcggaggatgcatcacctgctgcgaatagtgggcccgcccccataagcacctcaaccacgccttcgggatccaacagccagcagcatcagcgacgtcgcaagaagcgagccaactacaactacaatggcatccgcaccgtggaagtgcgacgtggttacaatggcttcggtttcaccatttccgggcagcaaccatgtcggctgtcttgcatcatcagcagctcacctgccgagcaagctggcctgcgttccggtgacttcctcatatcggtcaacggtctaaatgtctccaagttgccacacgaaacagtggtgcagctcattggcaactcctttggcagtattcgcatgcagatcgccgagaattattattccgacagctcggatgaggagaacgcccatgccacgctgaggggtcaattgttggcagccagtttgaggcacaagcccaggtttctacaccacaaagccaaactgcacagattgcgcaactcgccacaaaagaagctaaacccaccagaggcagtggaaccgcacaaatcaaagtcatcacccgatcaccctacattaaaacccgttctggaggatccgcctctgacagccaatctatccaaagcagcggatgtggccaatgtaagtgccatggtgcgagctgtgggcagtgctgcactggagtgccgtgttattgttggctatctgggaaccatcgagatgcccaagcagatctcgcatagttccaagctgcagacagttcgatcttgcattcgaaaactgagacaggagaagcgacagcccaccattgtgctgatgtgcatcacgccggacagcttgagcctgcagagttccagcggcggagtgctggccacctactcctcggccaggctgaacttcgtgagctcttcgtcggagagcgagaatcgattctttggtctggtcactagcgccgtgcacaacacacagatcgaggaggagtacgagccgagcgctggcagcgcagcagctgctggtcacatcagtatctcgcacagctgccatgtcttcgtcatcgacaccaagctgatcgaacatgcacagcatttgcagcgggcccacgagttccgcctgcagtgcacccgggatccgatctcgaatttgtgtctcgagttccctaacaactcggaatatgtggtgaatctcgtgcgcagcatgtataccatgcggattctcccaccggcaagtcggagtcatcaggcagactatgaggcgggtgcaggagccgccgcagctggaggagcagtagcagctgcccactcgccgcagccatcgaaccacagcgagatctccaccaccacgtccaattcggattcgggcattggcttcaacaacgattgtacgaatatttcggatcgcattctggttgtggacttcctagctgcaggagcgggagcagcggcggcggcacatgcaggaccaccaacttatccagctcctgctcgtccactgggcatagtgggaataccggataatcgactgactgtgcgggccatgcccgatcattccgccctgctaagatcgccgccagcgagctcttcgcttcgtcgacccaatctcctggccagcttcaatctgatccaaagtcccgccacgaatctcacatccacccgctcctgtgatgatgtccttaatctttttgtcgacgattcaccgcgcactttggctgccgtggcctctatggatgacatttcgctgcactcggctgctccatcgctcgatgagggccacacgtttgcccatccagcgtgtgtgccccgcaagatgcgcagatcgttggctctggagacgccaacaacgccacacaagctgagtgcccaggtatttggtcaacctggctcgcgtcattcgctgggcttcgaagccatcgacagtgtgcagtcgtcggtcagtggtgcatgtatggatcagaccatggacacgtgggccagcctgcagaatctgcacaaatcgcacaaggatcggaccagcatgtccgcttcctcgtcctcccactgccttttagaagctacgaacagtgaacctgatttgggggtaagtggagcatatccttttgtttatcctacatgtatcataagtttttgaaatgattgggaatacctataatataatca

SEQ ID NO: 25464 - protein, 729 aa, DROSOPHILA
MHHHHPPLPITGASGSTAVGTGAAAAEDASPAANSGPAPISTSTTPSGSNSQQHQRRRKKRANYNYNGIRTVEVRRGYNGFGFTISGQQPCRLSCIISSSPAEQAGLRSGDFLISVNGLNVSKLPHETVVQLIGNSFGSIRMQIAENYYSDSSDEENAHATLRGQLLAASLRHKPRFLHHKAKLHRLRNSPQKKLNPPEAVEPHKSKSSPDHPTLKPVLEDPPLTANLSKAADVANVSAMVRAVGSAALECRVIVGYLGTIEMPKQISHSSKLQTVRSCIRKLRQEKRQPTIVLMCITPDSLSLQSSSGGVLATYSSARLNFVSSSSESENRFFGLVTSAVHNTQIEEEYEPSAGSAAAAGHISISHSCHVFVIDTKLIEHAQHLQRAHEFRLQCTRDPISNLCLEFPNNSEYVVNLVRSMYTMRILPPASRSHQADYEAGAGAAAAGGAVAAAHSPQPSNHSEISTTTSNSDSGIGFNNDCTNISDRILVVDFLAAGAGAAAAAHAGPPTYPAPARPLGIVGIPDNRLTVRAMPDHSALLRSPPASSSLRRPNLLASFNLIQSPATNLTSTRSCDDVLNLFVDDSPRTLAAVASMDDISLHSAAPSLDEGHTFAHPACVPRKMRRSLALETPTTPHKLSAQVFGQPGSRHSLGFEAIDSVQSSVSGACMDQTMDTWASLQNLHKSHKDRTSMSASSSSHCLLEATNSEPDLGVSGAYPFVYPTCIISF

SEQ ID NO: 25465 - DNA, 29783 bp, DROSOPHILA
cggagccaatgtgtacatcctgctgcgggcgctcaaaaacctgcacttctccgtcatcatgacgaatttcggtaccatcgctctggtctacacactgatcgtttgcgcatctattggagctgtgtgctggccaagctgcggacgggatcgttggctggtcgttgtactgggcgtattcagcttcctgggccagatcctgctcacgctatcgctgcagatcgaacaggccggaccagtggccattgctcgctgcgccgacatcgtcttcgccttcgtctggcagatgctcttcttcggagagacgcccaccgcttactcgctggtgggtgcggtgatggtgatgggatctgtggttctgacggccctgaagaaatgggcaggcaccctgccacgcgagtcgtcgctgcggaagcgattcaggctcatcctgctggaatagtgtggttccagagcaactaaaagagttcgcggtttctccctcgtcttgtcacatcgttctcacccaatcccggcaagcatcagtggccggcagcaaacccggttcattcatcgtagactctacttatatcaaggctcagatcgtagattaatcaaaatatataagaagggacgcgtgatatccactccactcataagtaaatactcgtagtgcgtgtttagtttagccaatttcgccgatttgttgttttgtacattgttatacatgcttaaaatacggtaataaatacaacttatgaataaaataaaaacaagttataatttgcatttgaatttcacgctcttctacatgcaaatttgcactacatttttatataattcatttaaatagttataaataaacaataaaatttcaaatctacagcgacacaacattttacattactttgtaaaaattccgttacatgtagaatacagacggcgcgacatcgatacatacatcgacatcatacatcgattgcagaattaattttacatccacctctagtttttcgtttgtttgtttgtttattattgtttatgtttatattctcgaagcacacacactcgaaaaaacagagcaaggaacggaaacagaaacggaagacaagctgagggactagaagcccaaatcggcaataaccgcgtccagttcgtcctgcagattggtggcccgcgatcgcacctgcacaatttgatcctgcaaattgtcgacgttcgcctggagcagcacattgcacttcttcatcgccgcgaaccggctctcgtgcttcttcacgcgcggctccacattcgccttcttcgcggagttgggcgagtcctgcggaatacggtacaggtgagctggctaaatagtttacgattctctggggctaactcacctctggctcggactcgctgcccgtctccgcctcactttcctccgattcggactcctcggactcgtcgtcggattcctcctcttcttcgctggcgtgctcctcctcggcctcctcttcgtcctcgtccttctcctcgccgtccacatcgtcttcgtctagcttcatggaggcagccatcttctgcacctccttctccagcttcttaaacttcttgttctcctccctgtcatccagagttgtttccagtttaagaacaatactacattacaatttgtactcacttgaggatactctggttcttcttcatggcttgcttgagggcgtccttctccttcttggccgcctcctctttgaccttcagtttggtaagcttgctacgcaggatcttgagctccttgccagagcgacgctccctgcgctccaccttcttctcctccggctcgtcaggatcgctttcgctgacctcaggctccagttccggcgagctatcccttccaaagtttgcatcgcttggtcgacgcgatccgtccaaggatccaccgccctgcagccgcagttaatgcaaaacggaaaacgggaaagaagggatacacacattggattagtgagggcatccttgagcggggcctgattttacctgatgccgtgctgcatggtagtggtcgtagtggaagcaatcgtcgtagtcgtcgtcgtcgtaagcaaagcaattactaatgtgcggtctgttagtgcttggtgtcgcctttgcaagagagcgtgaacgggttaatcggttagttgccgcggagtgcaatagcaaagctttcagggggataggaatcgggaccggacgtgtcctagacgggtcataacaccgctttggtctgggcggaagcagaatgcgggtggcgggagtctttcatgcagcatgcgtccggcagttggagtttaaggtcgtctacacacgagatcttcggacattgtttatacctctcgtttcgttttgataaagattacattttttaatgtctaccatggcatggccaggtccattatttgcttaaagaaaaattctggaaccttttgagcatttccccagaaacttgattttgttttgtctggaattgtgtgcaagcaaacagatagcacaggtaagggatgaaggcaccttacttgaaaagtatggcttccgaaatttaatacaaattgagctttgataaaatatggtcagttttgaatttcatttttcgctttctcttgataataattttactattcaacttgtctgattccttctcaacagcaagctgtctgctggcttcaatcagatttctggtattttaagtctcgtgtgcaaaccgtttttaagaaggaagaaaacaaggtgtatccacgggtaatcctttcccagacccattccacatttgtgtcaagtgttgtcagctgatctgtttctctggctacagtggctactagggacaactaacgagggatctaaggcggagtctacgaattgcggtggcttcgttagctgctcccgtctacttgccgccctcagcggacgcagcgaggcgacgccggcgacactaaaaacaagaaagaaggactagcttcggagtccgatgctttgcatacccttggagatagttatgttgtaaatggttgtaatccaaaatcctaatctcaactgacaacactttgagcagcatcccattacctacatatacatattaccgaacccgttctgcaaaaggaattacctgaagagctgctgccaacttgcgttcgagcaactgaatctggcggcgctgctcctcgatctccgtcttggcctccaccagctgctcggcggtgctctgatagttttgctccacctccttggacaccttccgtgcgtcctctacctcgcgcttcagggagttgacgtaggtctgttcggcggtgggcgtaggatccatggtggccacaatcacattggatccgtactcgagattcttttcgcgtgacttctcgcgttccagttcggtctctagggtgcggattttggccagcagcttcttgttctcgcgatcctgcgcctcacggtttcgcaactccagtgccagcatttgtttggtgctctgcagatcgtcgcggatcttgtcgatgtcgtccagctcgtcggggctttcctcgtcgatggacatagccgatacgatgctgggccgggatcctccggctcccaaggccgtggcactgcccggtccgagtgcatggctgctaggcgcctcgctgagcatgttgatcttcgactgcgacttctgcaactgctcctcgatggtcatctgtcggcggaacttgcgcagaccgtccagcaccggcttgctgcgatcgttggtcttcgttggcttcaacttgatgccgccctggatctgcttgagcagcttgttgtgcgagttgcccttctccgtctcgtagatgaacttgtcgtccaatttggttatcgacttgcacgtcaggatgggctgagatctattaggatttgaattgttataaaagagatttttgaacattttcgtgcagagttatctattatttggctgctggtacttctgcacacttaaaatttaagtaaaagtcattaacatttgccggataaagtggcgtaaacgcagtaagatgctctaggtactctttcctgtggccttaaataacttcagttttcattccctttttaattatcgggagtattgcagtcggtaattactgcacagcatgcggacaccactcacctatcgttgcaggccacatggcgcagcttcttgccgctctccacctccttcatcatctcggaccagtcggggcgccttcggggtcgagtcctgcgaatcgaagcgaatcggaattatggccattctgcgccttcaaggtaaaaactatcccgatgccaggatattcgggtatgcaagcactggcggtggtcagggttcatgggtcagtcgtcgaggtttccactcacctgagcttctcgagggtctccttctgtgtgctgctgagcactctcttctcaccgggagctaggggcgggggcggcggtggcggggccttgggcaccagcgagggcagcggcggcggggcgggaactgcaacaataaaacacggaatgcacccaagtgggcggcggttattctctgccaaatggtgggtggggcactcgctgcaagtggtgcaagtgggcgcgaggtttggtcgttgggcattagagcaaatcgccgggcgctgcgtgcactcgcggttattaaatataattttaatttaatgagtttgcaatttgtttcagttgtttgttgttctttcggctcccggggggttccttagtcaacccgccagaggattcgccaccccagtatttagctgtgctttgcgagcaaagttgcaccatacatatcaatacagggcaaagagaatggaatggatggctttacactccgaacattaagggttatttattccttttcggtttttgttttaaaaggttctgactctatcaattccccaattgtattagtttaaatctattttcatcttttcagctagtacattttaaatcacttaaatgccaatcttaagcatatctaacattttccttacaaaacagaggacccaaactattatgtcagctggattatacattttagagaatacattttgggaattgtctagtgttttgaaaaatgtcagttcatcatttcgccttttagccaaacacaatatgaatagaaaaggcttatagtctgtttatctgaagtttcgcctggtgtatggggggctcctaatagaatgagagcctagacacatggctgtctctgtcggaagttgcagcagagattgaaaagttagtgcctgcctccgttgcggcctccgcctacgtttcgtcctcgtcctcgtcctgctcccccgacaccgtcttgtcgtggaacgtggacctggctttgatggtgttttattgccttaacaccattcattcgatttctttgggactcatacacaggcatgcatcaagatgggtttctttcataattttttatcgaatactttgcattccttcatgctttttcctttcggcttgttgttcaaaagtgtaaaagtcaaacaacaaaaagaagagaaaaacaatgaaggcaccaccaccagcaccatcaccatcaccatcaccaagtgatgaaaagctgacaaatctgttaattagctttgtttgagtgagtcctggcaggaagcaggggcaggagatttgatgccttttgggtgggactgtgttaccaaggccacaaccgccagggccttatcctttgtctgagctccggctccggctccggctccttctccgtctccggtttagtctgccttctcctttttcggttttccagtttttcggtttctcggttgcgcctggctggatctgcacttaatctttaagtggttggctgccttttgcggtgcattagtatccgaaataccttccgaaaccccctcgacctgagtgaaaaagaggtggataacttggccaaactggagaggtaatgaaactaatccgaactcgtgttactttgccgaataaaatcagagcaaacgaccaacttgattattgtctagagctgcttcacctcaagctaccgatcctgcagctcctcatgaattttcccccaatgtctgcatgttaatgaactgcttccatgggggcagagaagctctgattaaaatacgtggtcaacttttcggacagccaattgaggacgcgtttagtgagttgcgctcaattcggtttagtaatttatggacaaaagctctccccctaaccactaaacccgccctcgaatccctggcagttatcctaaatcagtggcaaacaaaagtggaagcgggcaagaaacaaaagaaagcacaacaacatcacgcgaagagaaacgaggcaagggtgccgggcagataaaagtcttcattcattcatgtcgacaaaattatttcttatttaaataaaaagcaagcactgccactgccacgactgaagatgaagagcaggagcaggtcctggttctcggagctccgagttgagatgaggctacccacttaatataccgcaaagcccgcacttacgacgtcgcagaatgaatagcggtgtatgtaaacataaattttgcgagctcactctcggtgaggcatggcaccctcctcataaagccccctcctggctcattgtgttatcatcagcggaatattctatgcatgcacaaatgttgccgttgtcattgaatcaacccggagtgtggagtgtggagtgtcggatcgggtcttcaaaaactggcgaaccccaggcaactggagtgggtgagggaaatctgctgctgctacagggtactggttactgcttactactggctggttactggttactgggaagtggagttctggtcatggactgctgccagcccagccgcccgatgagtgacttcccagcttccaggctgtgctcattcattgtctgccggggcatgatgaagcaccgctcagccagctcatatatttcatgacacagaatggtagggagtcgttcccccaaagctcctttgtatgattagcgtttctgccttggccggaacgctgtgcgaaagggctaaccagggattacatggggctttttgtaaactatttggaacccgattagctcggaaatgatgctgttggtttaccgcaaaattctaagtatttctctaggatttcacctcgaaaccaagttcattttcctctctatgaagtgcagcttaaatttatatatctttggaagccgctttggtataaacgaattcggtaatgttttcctttcacaatcattattaaccctaaaataaatacagctcaaatttcgaatttaaagcaaagttttacatctgaggttgtccaatccaacgataattctgctttatattgcagcatttgtgtaatataagctgtaacgtttttataaaataaattagatatcatattattttatttgtttatttatttttgtttaccgaatacttttgctgtttccgctggacggtaatctttatttaatttcctttgtgcctccggagacgagccttaagtccaattagaaaattcaatttcaatttggatttgttgtggcgtcgtttgggggacactaatccaattatgcagtcaaccatttcattgtcgcccagtataattatggccaacagcaattggccaatattagcaagtgtgtatatatatatatgtgtgtgtgtgccacagaactttgaaccattttcctttacgtcattttgaccacgctacatctaaatttgaaagagcctaatcatcttttatgcttcaccgggtaggtcacacacagaaaacccaaaatgaaaatcaccctcacctattgaaagtcgacgtttctaatgacgggcagaccctagccttcaccaccaccaacaccacccaccgcttgaccctggaaacaaaaaagagccaagagtttcccaaaaaaaggaaggaaatatggggcgcagccgttacatgtctcgcatctacagagggatacatagagatgaggctcatttaaataaaagaaaatatttttcgtcctgccgctgtttgtcctttgaagacattcgagcctcttaagaggggaacttgcggccagcgccgtcttttatttcgttttgttttttagtggcggatatttgaatataaatggcgcatttagttagactctatcaagctcattcccatatatctttggctgctttcggctcggccacattctcccccccacgaggattcacttccaattggagtccgagttgccttttatcattcgatagttgccagttttttctttttttttttttttgggaatgaaacttaagagaccaggacgctggccggccatgtccttgtgtctcctcaccattgctcatctggctttaaaacattctattttatgttgtagttttgacagaatgagcaataatcatgaattttgtcttagaccataaaaaaagcccactccactgcggacccttcctcacaagatttcacccgaacacattaaataaatgtttcgctctcttttttcctagtgtccttctatgctgctccctttttttgttcgcttctgtttgatagggtgacagctttaaaacggacgaacgatgctctgttttatttttggcggacatcgttttttggtcattttatttagtgacctctttggccagtctccgcctcttcgatccttttgtttgtcggtcaagattaggaggcatttgcggtcacgttattgcccactgattaggtcgggcacaaaaggcaagttaactgcctcacacgtaggcgtagcggtagcggtagccgttgccttagccctttcacccaaaccatttggccagatcctaacgagcttttcacttcattttagttgactgccccaggggaaaactggaggcctggcccacggacacgggctttctgcaattcaattttgaggccaggtgacagcatgcttatgcaacatttggttgctttgttttttgaaagtcttgcccctgccgacttgccgccaatcgagcccagcctcgcggcaggaaagtccattgcagaattacaaccttctttagttgagagtgtgtgtctgtgtgtgtggcaataaatacggaattagagaggaacatttgctccggcatacctttgtgctgttatgtcgaacgcccttaccgacgagcggatggatcctcgccggaaaacgagatggttgcccaaataaaacccactcgcaactgcagtcaggcagtgaaacactttgcgcctctttcggctcaatgcacaacacccactaaaatttaataaataaaaaatgatatttatattgctttatagccttgtttttcccactgttcgttccttcgttgtgctcgtcccttgtctgtgtgcgctttgtggtttttgtttgggcgaaacattttgatgaaatattttttacacattcatttcaagtatataaattcccatattcctcccatacgagtgtgtgccttctgcatacagacactagaatatcgtatattttcctgcgtttttataaatgagcagacagcgatggttgtgagcgacaggttacagacattgatggcagcgtgaagctgtattggccgttggaaattaaatcttacaatggaaatggatatcttgaccaaactagtttcatattttttgcttaaatgcccactggttttaattgttgtgttttttatggcggaagcattagcacgatagctatcctttttaaaaggcatctcacattcaggaaataactgaatattgcagtgcgtcggctttcatggcgtatgagtaatttttgttaaaatgcattaaacggaatatatattgaaagcaatcacaatcttttgtgtaattacaaaagcacgttttttaaaacaaataaatatatataaaataaatattatataataaaatattactcatacgccccgtacaacccctaaatgtttgttcaatcgttaagcttataaaaaatatttaccaaaaatatcttaactgtgacacatctaatcttttaaaaatattctcacgttcccatcccaaatgcgaatttttttttgcacatatcgctcatccgccatggtgacgcattatttgttttgtttgctgctcccctagtggtggccttgccttttggccagggccgacgaaaatcggagaggcagaaagcgtaaaaatataaaatacatatccccacagccgcccgcaacgtaaattaaacatttctggttagaaattagacattaaagaagcaggggcaaaaatttacagcgcttgttgagtcgatccattcgcagaggttaatcgggttaatccagtcgggcatcgggttaggttccatcactggagctggctccggatcggatcgatttggatcggacaacttaccgctcttgatgctcggctcgcgctttatggacgctttgcgtagggtcttggtcgtgaactcgggctttggctcctctttcggctccttgaggagctcatcgatcttgggtaccttcttgagcacgggccggattttggccaggtcgtcggtgctcttgctgggcaaaggcttctcctcgcgcttgacatgccgcagcttgggcttctctaatttgaaacgtcgccgccggtcgcgctcctcctccgtttcgccctcctcggcctcgtcgtcgtcttcggtggccatctttttcaaggacttatcccgcttgaccaccacgctgcgtaatttgggtttctccatggtaaaacgttgggtcaactcactttccggttccggcttcttgttcacggtggtgggtcgcaattgggccgccttcttcacgtgctcgggcaccttctcgtccacggtggtgtcctcttcctcgctctcctcctcttcggactcgctttcctcttcgctttcctcctcctcagactcggtttcctcttcggtctcttcctcctcctcgctttcttcttcctcggaggaggattcgggtggtggtgtcggctccttcttctttttgagcgctgaagtggtggctactggcttcttgggccccacggtgggcgccactttcttgattggctccggtgctttcttggtatttacgggttctggtgtcttcttggccgccgttgtgcttgtggccagtgaagatttctttacaggctctatcgtcttcttagccggttcaggggtcgaagtcttcctcgcggctgcagtcgtggtagcagttgcttttggtttggccacagtcggcttttctccattttcctttgttgccggagaggcggtcgtcgtcgtcgctgttttctttgcccacggagtggcagtgggctttgtggtactgctggtgccactggtgccgccgtcgtccttcacccatggcggacggaacgtggtgcgtccgccgggcgcactgcttgcactgcttgtccccgcacggggcgtcacaaacggcatttcgtagtcgctcgaactgcttgcggtcctccggactattctagactattccctctggtggtttatatttttttccagtcttattggtgttaaattctccagggcccgatgtcgtcgcccgtctgttcgcacactctttttaaataatttgccgtgaattctttgcttgtttttcccgcttctcttggcgttgctgctgatgaaaacacaaaactttgcacattagcaccgtcgggggaagttgtccgaaaaagttctttcattcagattttccgtaatttttttcgtttatttttctatttgttttttgattttttttgtgtatgtgcctcgccttgataattctattttacgcgtatttcttttctaatagatttttatgtatttttttcgtcgcgaatttgttgctgggaattttattcgtggtccgttgccgacgatgagcaacagctgtttgagatactttcaatccgattcaattcatttcatttcgtgtatatttgggtatgtttcattttgaattttatttttaactgaatgcgctcattagctttgctggctgtttttcttgtttctgtcgctgtttctactaagagacagaatgtaggcctttgtgtcatagtcatggacagggacattcacagatgccgaatgtgatggaaataggaatgtagagaggatatggggatgatggcggtcggcaatggggaccgggacaaatgcatcaacaaatcccaactgagtggaatgcttttgcaggctctcacaaaaacgcctacagttgcagccaaatgtttaaattccaggatatttatagcaatcgataaaatcgagatcatcctatccgtcaagataacaaggttttcttataaactttcaacttgtcaaataatttaaataatttgaacgaaaacgatgaaatgaaaatgctttgggaatgtttacttttcagaaaagtattatatgccgaactattcaacaaacatattgtgccatttgctggtgatttccaatatttctttcatacgaaaaccaattacgatagaacgaaaaatgtttacatataaaatgaattttaaatcaattactcatggtcgagaaaagttatagcttgacttaatgctgataaagtaaagtgcagaagatggaaactattcgctcttgctgagttttctttggctcgcgattttcctctgccgtttttctatgtatttttaatgacctcattcctgggcagattgtaaacaacaatttgcaacttttcctgctctaattgggcaaaaggatagcgaaacattcctctcgcttgcaactgcaactttctgtgaccactattatgttggccgccactgtgctgtgaatgtgaatgtccagctaaacgcctgcgtatgtgtgtgtgtccgtccgtccgtccgtacatatgcactccaataaacagcacaaacaaaaagaacaacagcaacaacagcgtcggtgtatgggaatagagcaacaaaaacaataacagaaacgatttgctctgccactggctgcgatatgtaaaaggcgaaaatatttaattttaggttctttgtgcccgccgctgagagtggaaaaagtggaaaaaagtgaaagacactggcggtgaagagaagcacccaattgggagagacaaaacggaaccaaatcgaaagaataaaaggaaacatacatatctctggcgctttcgtctttcgcctttttttccattcactttgttttgtttttattcaactggctcgtttcacaaagtagacagaaaaacgtacacaaaactggttgtacggacggaaaaaaaaggccaaaaatttgtgatagaaggggcgctctcgggggtcagaatgaaatccgaattcgtttcattccattgccattccatggcctggtccaaaaccatccaacccccttcgtcgaagcccatccctcccccacattcaccatattcatttccattccactcgttttggggcgattgcaaatttttttttggccggagcgacgaacactttctcggtctttcctgcatggaggcgttaattaaacatgacatgcaaataaaaattatacttagaaatacagtcaaacttccattgcaagaataaccgacgaaagtatcttttccgacgtctatttggttgcctatctgtcagttccaatttgctttgaatgcattctaagctgtttccactcccagcttaagcgatgcttatcgattactaattaatggttggcaattgaatcagattcgtaaattagatccattgaccatttgacagcacacgaagcaagggaagttatatcgaagtacgactgtatttcgaacattgcagaggattccagaagatagttaaggcgaggacgaaacaaaaatgcaatttcaattaaaattgttaatgagactggctaatttgacgcaaaagtttcgcggatctgtgctcagaatggcaactaacagctaattcccggccatatttcatcctaagattgcctgtcaacaaaagtgcttaaaaaaaaaacaaatatatcggacgggatattttgggaactggccattcataacgcccctccagagagatttattagatcgattggccagtgacaagagctgcgcatattgccgcccaaatgtacacgaatctgtgtctgtggctatatgctatatttttggatatttcacggatttttcagatttttattatgtgtattaattggttcattcgcgctcgctgcagttttcgtagcacgttcgcgtcgttgtactatatattgcacagatatatattcatatatatatatatatgttgtatatctctttgaattgtacgtgtgtgctggttgggtcagacacccgcacatcaccacaaccgcaggcacacacacacccgcacacacacagccacgaactctggtagtgaattttcagcagcgaaggcaacagcagcgcctatgacggcgtttcaaaaactaaattcatacattttccaacgccacggcgatgggtgaaaaatttgaaaattttcccgctcgctctacgaattcctctctcgtgggatttcgctcattatctcttcgtcgtatttcggtgagcacaaaatgaagtgaaatgaaaattttgttgaccgacagaggcatatttttagcatcttttttgatatgtgggcacggtctgtgggggtttggggggatatggggcggatccgcggcggatccaattgaccttatggcaggtgcagttcaatggaattattaatagccggctattggctatgtggcccgtgtgccccaaggatacaaccccctcgatatccgctcatcattaggggcctcttatcaggcgcctcgcattcaatggaccacaattacgcaagtttctcgggcggcgtgggcgtcgcagctaatttcagggggagtgggtggtttggtggatgggtggttggtgcgtcttaccctgtgatagaaaccactcgtctagaaagtccaaacccattagtgcttctgttcgatggtcagttctgtcccaatgcgttcgttctctccgaatcgctttcaatatttacattgtctaccaagtggttgcttccccgtttcactcgcgtgtgctccacatttcggtggagcggtgcaatcgatcgatcgatcgtttgatcagtgcgtatctgtatgctggggacccctttatcgattgaactattgctagactaattgattggtgatgatactaatgaactggtaatataagctgaatcagtgagtaagcctcttatcaccttatcaacgtaacataatgtatgccatttgcatatcgagtttccacaggagtgttcgattgaactaatttaattttgatagcattttcgaatcgttttcgataaaaagagttactgagttacttgctgccgccgaaatcaatccaatagctgcaacagagcgaaaacaaatgattaaagtctatgccactgccgcaaatatttatttaacgtgcaatgtaggttatcaatggcatgttttcaaatatttcgtttttttatacacatctgcgcgaaagcacgccactaattgttttgccttgtcagcatcagccgaaaagtatgccaaattgaacggcaaacattcccgcgcacacaaaatagccgagaaatttccgcttaaacgggccattgctattcttttttttttttttgctgtccgtccgtccgtctatctaacagcatttcggcaatattaattatatatttattcatttggcaaaatacagcgcatatgtattggggggctttaaaaataggcttaaaggcaattgcgctgtgggttggaatgccaatatgatgcgacttcccccggggtcttattaattcatcagtcccaaaatgctcccagaatggtttcgtccgcatgtgaggattggcgggtacttttggaccccaaaaccactacgcatcacctcgcatggcgagccaatgtcaaatggctggaaaaacctttcgatgcgccggggtcgccgacattttcagcgccgcgtgtcgtccaaaaacttctgccatcgaaatcgaatttgacacaaattaattgctatttgatttgacaagtgcgaacgcgggcggggggcgatggggcggtgggtcgattgtgcggacacaaagagcaacagcgggggttatgtttaagtgttatcatctagaaattgctttatttgtgaaatgttagaagagacatctaatgaatactgaatgaactccttggcgttgtgcgtggagccgagctcgttgtggcttctcttaaactcgtaagctttgcgaggacgatgagggccctccaatccagcctagaccttgggcgcagctggcggggattggtgcggcttttgtggtgctgccgcctgtggatggacgtggggcacgacgggcgccgtggtgctgctgacgccttcggtgtcgtttatgtgggtaaagtgcggccagctggagatctcggcgaacaggcggccgccaggacactcggtatcccgcacctgtcggtggcccagcagcttgtaggcagggtcaatgtagcccttgaaaacgccaaaggcgatcaggttcttggccgcatccagcatctgcttgggcggcagttcggctaaagggaaaataaggaaaagtaattagtacggagtttaagaagaaaatgaagagaaggaagaaggctcattaacaacctaatgagtttccatgactctttaaacggtattaaaaagaaatctatcctcttaaagttaggagttaacttacttctccaatctccgatcagcacaatgcccacgctcttgtcattgtacttgggtgcatgagctccgatgacattgaatcccctgccggtgtaaatcatgccatcgccgccgatgccaaagctataaccaatatcgttccatccgcgctccagctgatggaagtcctgcatgtcccgcatgctcttcatgcagtccggagtggagtagcacacggccggcatgtacgagtgatggatgatgacgtagggcgcgggaccctggaagtgctccacggacttgggcagccgggcaccccagtcggatcgggacagcaggcgggcggtggccacaccgtcgcccagattcgcctgctgcatgtgctgactatagcctgaaaacaaagatgcagtcatcttggattagttgggttctcactccatggttgtttgttacacaaaaactataatttatttggcaaaaacacacagtcactcggtcgattcactgtaattttgaggagtgtgctcgggtacatcccacatggaaaatttggtttttaaattgtattttgcgtgcgagctgtttgtttacatttattttcgtgaattccttagcgtggcgcaaacaagttcaattttaacttttgccatactttatatctggcccccaaaaactcttgccacttccaagacagtcagcatttgttggccctaattgcaaaagggggggcgtgtgtactgcggaggggcgggaagtcgtgtggtctgcggctctgctaccgtgtacatcgctcacattccattgataaatgatagtcgaactgggatgcggattcggtttccccacggagcgcagctgtctgcggatttcagcggcggcggtggctgcggttccgacgacccacgattttcaactgacgctcggccggctccacaaactccccaacgccgctgaaaacccccgttatgggctgaaaaacaagtcgccgatcggatcggctccgattgccaatagcgatcgtcatcagatgacgctgagcgcgaaccaaatatgctaaattgctgttgtgataggtgatttttatttgatatgtatatttgcttgacattccctggtaaaagttgggcatatccgttttaagtggaacaaaaaccaataaatatatacattggctgtcaaaatagttgatattttacctgtttaaaaataaatactgtcggaaaagcgtacatattattaaaaaaaaaaaattgtggtaaatatattccaacgctttggtagcaaaagtaaatatttacattgactgtacgctgctgtgtttgcttacaaacgcgctgatgatatgcagatatatgaatgtgtccatttgaccgtagggcaaactcgattcgttctggccggtggccgcatcaccgtgactcagcttaaagcgctcaatgcgaaatgtttaaaagccaaatggcagaggaagtggccaagtcgccgaatcgcaacaggtgctacaggtctacgggtatcatctatcaatggcgtgagcttttggccgttgacactgcggaatggagctggggttccgtttggccctggttcccctcccgatttgtcgtgagtcataaatgcaaattcagactccaatccgaaaactattttcattcaagtttaaactgcttgcatgtatgtctgtgtgctgactgagctggcaaacatggggattgcaaaggggagcaaggttcgagtgctgccatgtttgcggcgtctgccgaaacttctccggccacgcccacagcggccatacgcccacggcatttatatgcatacggaaaacttggcgaagaaagtgggcgagtgggtgtgggctacccgttggaaaacggcggaaaagcgaaggcgacggaaacaggagacgcagcacttgactaagttaatagcggcagtttctaattaaaatttacggagagcgaaagttgcgtgggcacacagttgtcgtcaacataatagcatccggttgaattacacaaatgggtgtgtgactaaaggatgtgtttaaggatgtgtttcaggtttcattttgcaactaagtcagccgtttgtaggtggtttgttttgaagacttaatcacaacaaaacaaagtgtgttgtattagcttggcattttagaaacataaaatgggttaatcaaattcgcaaagtgctaatatatataaaaatatgtgtaagcatcccaaaatagccattgttttcccaggtggcgcagtgaatattaattaaaatagctagccaaaaattttcctagaaatgagtttatggtttggaaagactatcaattggaatttacatttttatagcaacgattgtaaagatatcgagtgctgttctcagaatgagtgtgagtgtcgcgcccgcagtttggcacctatccgagttcctggatccaggatgctgagtcctgggtcctgagtcctggacttcattggcggcacgtgcttgaataataaacagagcagcagtactgaaagggggacgtgggggggggggggtactttcaaatcgtcggctgtttaatttatgccgcttagtttttagtgcgtgtatgtgtgtggttgcaacatgttaattacatttatatttacaggcgagcacggagagctcaaaatcagcccgctcccctaattgttgtcctaattacgcggcctaataaagtaaacacactaaacccgttggcctaatcaatgttgcaaactttgtggcactattttgggccacattcacacattcacaccaccaccccccgcgaaaaaggccaaactatccgcctcgaaaagtaatttcgctggcagaggcgcaaagttctttgataatattcgattaatcccagggctcgttgcgctgcgctgctgattaaattctcgcataattgaagtatttaaattaccagcgaataattagagtgtcaggaattactcacacactcacgctggcactcacactggcactcaaactcgtactcacactcacactcacaccgagtgctggaatgcagtggtcccttgggtaattgtttgtttttaatcaggcaaagcacataatagagacatttcaatattattatgttgacgatgccgaagaggccgtcagtctgccattaaacaaatatccgtgcattgtacattgtttcggggaatgtgcgaaattaagtcacgctcgattacaacaaaattgaaaaatgaagaggcaaaaagcgaccgtacaacttgaaaacaaaaagtacccgccggagcaacaacaaaaaaataaaaacagaaaaaattgcacaataaaaacagaaaagagcgaaaaagcaacaaaaccagaaaagaaagcgcatgttctggctccaaaagccgaagatttaattcccttttaattaatgtactaaacatatgttctctacattttttgcaaccattttcatctgatgaactaagttcgaaatttattctactattttaaagattgaaatacgcaaggaacacacggatctaaaggatgcatttagagtggaattgttattatattattatttgattaatcatgattattctattattttattcaccaaaacatagtgacgtattttcattcaccttcgtgaaattagaacattacgtgcttacatttcgttttggacttgaaaactcagggaacattttggaatttgtttatttcattttttgaaattgtttattattatgtgcatgaaagctgactttttggctaaatgagcaactctcgttcgcggttagggtgcgattataattatgaatattaaaatcaaaaaccatttcactcgctcgctgcctgcctgtcaggccgtaaatgacaattttgttaaatgtcagtaattaattgaaacaaaaaatcacatttctgacagcatacggcacatatacatatatacatacatatatggaaacacctatcacagttcgatgcatatattatctctgggctatcagtgcgctcagctgacgcagattgcacttgctgggcgctcaggaattcaaaaaaaaaacccgatcttatagccccacattcccataccgggtgctatctgcacaattggtaagttctcaggggcatggcgataaggaaaagcaccctaacacccggcacttacccatcatcgatagcagaactaatcccagtgctgtcatgttgctgcttttagctgctgttgctgcgaagttgctgctgctgttgcgatgttgctgctgttgccaagttgctgctgctgttgcgaagttagtgctgctgcaatccaactgcttaggaactgtgacttggatttaggaacttttgtatcgactgctagtcgctgtttgtttcttgtcttgtttgtttgtttatttttgtgtttgtttgtttctttgtttgtttgttggtttgcttgcagcgttgtttgtttgctggctgactgctaccgtttattttttttttgctttgtggcaagagttgtgcaaaatttcgacagtgtgtgaaggtcagactttggtgcggcagcgctcacatagcggcgttatgcttcgtatcaagcgtataaagcgcgaatgttggccagcataagggcggaccggagtttatagaaaaattcacacaccgaattcgcactgctgctgctgcctctgctgctgcttctgcctctgctggcgtcgctgcttccgattgctgttgctgtgaccgccgccgctgccgtgggagcaatgccaaacaaatggctaatcgcatcgaacttatggccccccaacgctctcgccgctcgctctttgatttcgatttcgctcggagtgagcttttggccgccgctgccgcgcctcgacggttaccgccgctgtcgcggctaccgccgctgcttctgctgctgccgctgccgccgttgacgtcgcagccgagtttgataaagctgttatcaggcggcgagttgcgctaaggtcacgatgtcgcccttagggaaatttaatacgatgatcgaactagcgcctcgtttgcggtgaattacccatgccgccgcgaatttattggccccattcaaccgcattttacctcctccgatcgccggtacttttttttttttgccaatccgaagggttctttttcaagcgctgcggctacgagggctatcacacgtgtcactctgaatcgacattccaaatgacagatacgcgtgcagagaaagaaaatattggcaccagacaatatttgctttattcagccaaacgttttcacttaaaccaacttgtttgaaattagctttgattattttgcattgagtgattactgttccactgttcatgtgtgaacctatttcaaaatcgttacttttcttcgcgtgcacgaaatgactacactttggcccaacacttagataaccaattagggttaatcactgaaaacgttgcatagactatagggcacgactcacgccccgcaataacaacttccgacaagcgtgagtgattaacaatcccaactgttttggcaagtgacgattagattaccgtgatacggatcgctgatcatacggatcagaatgacactcattcaactagttcaatatcggtcattctcgaaggtcgctgctgataagaaccctctatcgagggcataaatcagctatggggaacttttttttttttaaccaattctcaagactttggttgtgcaaataatcagacagctgcgaactgaacttagcatttgccaatggctaagtttacgttatttttgaatctccctgtggcgatttattaatgtcactgttattcgcccaaaatgaaatctatgagtcatccgttgctttaaccatctcttttttaaatggtaatattgcgtttttgagctcacatctgcggttttacttcttgtgttttgataaatgaacgaacaatttccatagctggaggtgacagttgaattgttgaatattttttgcagtcaggaaattcggctgatgccatctaaatacatagtcacagactagagttaaaacaaaggttgacagctcgcagatgtgacatttcttcgtacgaaattccttatttaaaaatgtaaattaaccatttcaatgaaatctttatattaacttagatacagatttttaattgaattcatttttgaaatgtattctcattttttatgttcatagtggaaagattattcttttagtctgaatcctttataagaaccaacttgaatcgtttcaatagtttgggtttactttgttttacacgtaaggatacatgatatcttatttaaattatattcctataaaagctgatattcttttcgcacgatttcagttgtttacgattccaaaactcaaaaccgtgattttttatggctggttgctgtgacagcatcactgcccccgtcgttctctgtgtcatttgctttctttgaccaccggcaccggacatactcttttataatatgtattcgtgtgatttaatttttgtttttgttgtattttcgaatcggggatgccccttggtgggatcgctttgatttttttgggggaatcccgctgcaaatgcggctggtattaaattgctttagtcggagtgccgagatcggatggctagacaaattaacagcgttttattttccgtcgtcgatttatggcgaacaagcacattccatcttcatcttcatctcgctcttaatctgaattagtttttttttctttgtgtgcacacaggtttttcgagtcgaaaatttcgggggataaccgccagatgcgttctggcgcctcgtccaaaggaagtccaaatcaccggactcattttctcctccaacctctacttgtcttattttatttgctgtttatacttgtggcaaggtaaacacgcagaccacaccgccccccccccttcgcccagcattggaatatttattacacttcaaaaaggggaaatttctctcaaacgctcttggaaattgttgaattgttttcagcagcaaaatagttgcggcgctacttaccacaacttgtggccagctgttgctgctccaattgctccgagtccatgaggattgccaaggaagttgggccagaagtggagacggatccagacaccttgtcgcccatgttgtttgccaatgtctttgacgctaactgaaatgaagtccgaagtcttagaggcagttttctatgttcgttggcaacaaggggaccgttgattaggtcttgtaatcttgagttgctcttctttcttcgagaggtccaccacttggaagttcttaaatccgcaggttaaatgaaaaataaatacgtttaacaattattttcgtgtgcatggggtcgtcaatttgatgggcccaagcaggtggatatacaatgctaataaatatattttaacgacccaggtgtgcaaatcagataaacacacagcgaaaaatgtttcgtatatatctgtactcattaatacgagatgtttgtttagaaaatgcattaagtcctacaaaaatcccccaaataaatcgggtatacaattaatatgcgataaaaatcaattgaattatcaccgatcgaaaatccccggttagagcattgcgcattcgacttttggcagctggaagcgctgaccattgtgctcataacttaccattcgactggctgcccgctaatcgcacatcttatcagggtattaagtgccgctcactaactacgccttggcacgctctcccagtaaaaaatttcgagggggggcaaaaatcacacgcaaaatcacaggccttcttttataacccccccccccccagcaccagctccagctccaggtggtggtggggtattcacccaggtaaacattatcgagccagaagctttacactctcgcacattagacaaataaacgggtgtctctgcgttggttggttggttggggttgtgtgtattacaattaacaaaagtaattgcactcgtctgggaatccccggggccacaatgaaaactctttgatggcgttggccatgcaagtgggagagtctatctatatctatctatagcgcaaagtgaaacacactataatttccacgcggatactgactggccgtcctatctgttttcaatatttcattttccctatcggaataatcgcaatcgttataaatggctcccgagagccaactgtgaatatcaggcaataatgagaagtagtaatttaatgatacgaattcaagggccgggtttttttttttctcttccccgtcggctgaaagataacgttgggggtttttttttcattttaaagtaactgaccttatttaattttggcatcagatttggacttaatggagtgcttttcgatcgtgatagtaagtgatacattaattttctctgcgtgcacattcatttagatatatatacatatgtatatgccaacacccccaattgaaatcttcggctgtgcgaacaattcatcagatgtcgccatatcattgcctgtgctgattagttacgccttgctggttggtatcccctcaaaattgagcatggggggataccaggcggtggcgaaggatactgctgctggtatccttgtagcggcacgcacatgccatatattaggacgcataaaatgacaaacgactcgcgaggcgcgtaaattgaaaactcgctgagcctgtgcgagattgccagcgcaaaggatccgcggggcgaaattgtgtaaggggctgggtggggggtattggtcctgaaatgggtggcggggaatttggatttcggcgactttttggctgtttgttattgctgcctgagctgtctcactcgctagctggctgtcggccaaaactttgccaaagtattcaaattaaaatttcaattaaggaagtgaatttgtgtgtgccgaaagtgtattaagtctatacagcggtggcatcttggcatttcactgcttctgtattccacgtgtgcctctcttgccacgccccaccccctcctcaaccgcccacttttgtatgcccgcacagaaggctaaaaccgaagtgaactgaactgagctgagctgaaccgcattcagctgaagctgtaccgcctacaaacagcgctcgtcgcctgttgtttgatttattgccaaagtttgtcgtctgtcatatgacataaggagtactttgttggaatattttacattttacgcgccccaaaatccacagcttcccccagctgccccacgcaccttgtccgctgacattttcgattgaattcggaatgagaacgaaagaggctttgatcggccctcggtgggcattattaataatgcaatcaatttgtaaacaatttggcatatatcaatgcgcttcgtgctggccataaatctttgggaaattagctcagtcactctgcccctgctgccgcaaacttttgcacttaaaaatattgcaagctagtagagtgtttcgcgcaaataaagtttagtggctttcgaggttgagacatttcgaaagtggctataaactaatatatagatggtatagatggcaggtaattgcaatttatacactatacatatagtattaactagaccttttgagcttaagtttaattccttgcctatcgattgtggcaacataacaagtccaagtagatttcaagatttataaaactaagctttattgtggcacattcaatacaacttgggatctatgtgggcataaagtcaaccagttttaaattgttatttcattcgctatattttgaaccacatgaaccatatatttcgcttggatttcgcaagtacattttgcgagtgtggtcatttgcaatcccgccccactgacagattgctgggccgccctcttgatggattggcggctggttctggcctggaaatattccggtagcggggtcatggctagttggtagtgtggacagggggcggttccaacagattttgccatatttctgcgttttggctgctccagtggctgctgttgctgctgctgctttggcagttagtgacagctgcggtgatggctgcagtttgcggggtggtgtgggggaaaaaaacccagaaatggagagccgggaaaaccataacgcttgtccggttggcagccatgcatttcccagcaacgggatgagaatggagcagcaggcctttgaccaaccaaagaatggtatttctttggcgctgtttgccggaatatctgatatccccaatggtccgagtaggcagcgcacaaaaaatagaagtcaacaaaaaagagaaaatgccactcgtacagtaaacttccagcgttcagatcccagtatctgcggcgtggtggcaatacatatatctgctttacaaaggtaagttcagagttgaacatccttcggctaattgaatgaagttgtgtgccccctgaagtgtgtgtccagctgagattcttcccttgcggaagagtaatcgcaaatggatgccaatcccgtcccttcttccctgttccctgttccattctcattgcccggcttgccttggccccaatttaaaagtttatgaacttgtcagccaactggcgcctccactcagtcgctcatccctctcttttttccgttctctcttttgtgcttcgacaggaggaaggagcaggaccaagggccaaggaccaaggatgtcggggcgccttaaccaccagcacgcggcgtatgcgcatcgcatggaacaggaacacaaccgggtgcaggccacacaggcagtgaacagctactacagccattggggtaaggtcacatcacgcttcgaaaactggaccaacaaagagtactatgagaaggcggatcaacagctgcaatcccgtcgcgatcagcaggagaaggaggcagctcttaatgaacgtcggtccagacttcgccagcttctggcctcggagagcgaagagtacaacaacgagatggagcgacgtcgccggcctcgggaacccggtggtggagacctccagatgcttgatcgggttaaccagtcgcttaaggagcaagagcaactgcgtcgcaagctcgagatggaagccaagttgtacggccgctggcgtcatggcgtcgacgatgaaaagctgctctaccagtccaagtcggacaacgaagtgctggccaagctcaactggctggaccgccagatcgagagtcagcagcagcgcgaggagcagcaggccctggccgcggagaggcagctcctgctgcagcaggaaatcagtcgcacggaacaagctcaaaaggagcgccagcagatccgggagcaacaattgcgcgaactgcgtgctctgcaagaatcccacatgtccgagcttcgtctgcgacagcaggaggcggacaagttgaaggaggaggagcagcacttccagctcttcctgggcgaactggacaaagagcgggaattgctggaggagagcagtgctctggtgctcaaacaagtcgattccggacacgccttcaacctcaagaagattaaggtcttcatccggcagcgtagtgaggccagtcggaagcagatctccctgtgcatcaacatgctgcatcgcatggccaagtatgtggtcaagacggaggagctaaagaccctgctggacaagtaccgctcccagttggagaacgaggaactggcctgcgcccagatcgaaagcatgtacgagtcagaggccaagtacaacctacagcgcagtgaggaaaactggcgggaacagcacttgcagcgctacggagagctaagcaagttcattgaccaggagaaggattgcctgggcgccatgcttcaggagaatgtgagccagcagcagacattggtggagctgaggagccaacacctgactggcatcgagcaggccaacaagcagctggagcaacttagccaggtgcaggcggacgaggtgccggcaccatcgcaaagtaatctcaaggaggtcgaatcacaatcttcagtttccgagacttccgtggaggagaatctgctgcccaaggtgagcgattcgttctccaatctgaacctggatgtgtggaaggatctgcccccagctcgcagtgaagtcgacatgcagcgcctaaaccaatcccgatccctcagtgtggtcacctcgcagacagccgctccgccgaagttcgcacgcaagcgtgtggcctggacctaacatttcaattccatattatcgtctttgttccagttaaaatttcaatggtattaatagacatattgctagttaagtcccagtttagcaatagtttaacttcttgtgcaaccccttcacacactttacctacactccactacatttcaatgcactccagccccatgaataccactccacccaagcgaacaccactatgtgcacttgtagttgataaggctgatagataggcgcacccccctaccccccgaaatgggcgcaataaattactcaatttgtgggccagcaggatgtaaggctttaattattgtcaagcggctcagtcagcgggttactgccacatatctggttttgcatatactttgttgactcgaataacaaatttatctggtaagtacaaatattgtggttgaaaagaactagctgggcatacaacaagtcagaatagcaagccgcttagtgcaattcgtctggggaagtgcatgtgatgggcgtgtcaagtgcagagtgtttggatttcaaattgtccaattatggcatacacacaactccctcgttgcagatgcgattagcattcaatcgaaattaatatttgtagactcgaggcaagtctctggacggttgctgaagtaataaggttacacacacacacacacacattatttaatgcaggttattcatcatctatttgaatagattgccgacactcgcccaatcttcattccatcaaccgtaagctgctcctaatggccaaaatgctcgcaaatgatgatgaatacgtttcaattactccactcgaactctccatcatcagaaccagaatcggaatcgaaaacagtatcaaaatcgaaatccggatctgcaactaaatgggaatccgggagtgagcataatattctggcgtataactaaagtacgatatttcgatatcatttgattggtgcctgggccagttctcaaggggatccgtccgttcgttcatgaaatgttgtttattgatatc

SEQ ID NO: 25466 - DNA, 1856 bp, DROSOPHILA
tttgtttattattgtttatgtttatattctcgaagcacacacactcgaaaaaacagagcaaggaacggaaacagaaacggaagacaagctgagggactagaagcccaaatcggcaataaccgcgtccagttcgtcctgcagattggtggcccgcgatcgcacctgcacaatttgatcctgcaaattgtcgacgttcgcctggagcagcacattgcacttcttcatcgccgcgaaccggctctcgtgcttcttcacgcgcggctccacattcgccttcttcgcggagttgggcgagtcctgcggaatacggtacaggaggaaggagcaggaccaagggccaaggaccaaggatgtcggggcgccttaaccaccagcacgcggcgtatgcgcatcgcatggaacaggaacacaaccgggtgcaggccacacaggcagtgaacagctactacagccattggggtaaggtcacatcacgcttcgaaaactggaccaacaaagagtactatgagaaggcggatcaacagctgcaatcccgtcgcgatcagcaggagaaggaggcagctcttaatgaacgtcggtccagacttcgccagcttctggcctcggagagcgaagagtacaacaacgagatggagcgacgtcgccggcctcgggaacccggtggtggagacctccagatgcttgatcgggttaaccagtcgcttaaggagcaagagcaactgcgtcgcaagctcgagatggaagccaagttgtacggccgctggcgtcatggcgtcgacgatgaaaagctgctctaccagtccaagtcggacaacgaagtgctggccaagctcaactggctggaccgccagatcgagagtcagcagcagcgcgaggagcagcaggccctggccgcggagaggcagctcctgctgcagcaggaaatcagtcgcacggaacaagctcaaaaggagcgccagcagatccgggagcaacaattgcgcgaactgcgtgctctgcaagaatcccacatgtccgagcttcgtctgcgacagcaggaggcggacaagttgaaggaggaggagcagcacttccagctcttcctgggcgaactggacaaagagcgggaattgctggaggagagcagtgctctggtgctcaaacaagtcgattccggacacgccttcaacctcaagaagattaaggtcttcatccggcagcgtagtgaggccagtcggaagcagatctccctgtgcatcaacatgctgcatcgcatggccaagtatgtggtcaagacggaggagctaaagaccctgctggacaagtaccgctcccagttggagaacgaggaactggcctgcgcccagatcgaaagcatgtacgagtcagaggccaagtacaacctacagcgcagtgaggaaaactggcgggaacagcacttgcagcgctacggagagctaagcaagttcattgaccaggagaaggattgcctgggcgccatgcttcaggagaatgtgagccagcagcagacattggtggagctgaggagccaacacctgactggcatcgagcaggccaacaagcagctggagcaacttagccaggtgcaggcggacgaggtgccggcaccatcgcaaagtaatctcaaggaggtcgaatcacaatcttcagtttccgagacttccgtggaggagaatctgctgcccaaggtgagcgattcgttctccaatctgaacctggatgtgtggaaggatctgcccccagctcgcagtgaagtcgacatgcagcgcctaaaccaatcccgatccctcagtgtggtcacctcgcagacagccgctccgccgaagttcgcacgcaagcgtgtggcctggacctaa

SEQ ID NO: 25467 - protein, 501 aa, DROSOPHILA; identical to SEQ ID NO: 11016

SEQ ID NO: 25468 - DNA, 9652 bp, DROSOPHILA
gggctatcgaactggttccagccgaacagtgctggataatgcaacatatatcgcaacgcgatggttttaaatttaatgttatgatttttatattaaaaaataaatatttttttacaccagttattatgccaaatcttttaaatgtatacaaattagtaatatttaaggaacagaaaccattgttaactattttacttgtcaaagccgaattcaacattccttaacatcacggataacgagttaaagatttagctacattttgtattattaagctacaagtttatgataatgtatgttgaaaaaaccaaagtaagaacatttaatttttccttaactaaacttttaaattatatcagcagcgtcaattttccactgggtttctggtcaattagtgttgcaaaatgtgtaatggtggtggcttgattcgttcatatataatttagaaccgtacatatagttaataaaacctagatttaatataatatttaagtttggaattattttatttttttttttgttttcagattttgtaaagttctcatggtttttgaaatcaactagttccaattgatcagtgttaggaaacgcgcgagttcagtaaacacaaccttcagaggagttacgattaatttgtttatatcttatcaaatgtgccttaataaatgctcgtaaaatgtaaatacacaacaaagttaactagtaatgactgtagacccgataaaaagcgtattatacaacacttgttgctattgcatagcacatgggaatataattgctggtcaaatttcacggtgaattgttcacacaacatgacttaattatgtttttgactaacctatgccacgaagaacacaagacgcagtatactttttgaggaaattaacaaagacgaaatgcgaggacgacggcaaaacaaacaataaacactcggcgcgcgaactagtgaaccgatgaacaagttcaccgtggcatcattcacctgagccagtggttcgtttttcactggcagcagagcggccattttggagattgtttcatccacaaaaaagttatgcaccgaatctaaaaaaaagaacgttcgctgttagttaaacataaaatccgctcgtgcatattgaagcgttgttgtgctggccgatccgatgtgaagataatgctgggcccgagcagaccgacagttccgattctataacgactaaaagttagtgactatcttccaacacgcacgcatgtacgcccgtgtgtgtgagtatgtgtgtgtgtgtgtgtgattgtgtgcatggatacatatatgtacaagcggaaaatacgggaaaaaatcctattcccaggcagaaaaacattgccaaaaacagcataaatcccagccaatgtgatggccccgtcattgtaatgtcataagtgagcacccacattaacccattgacgctgaaacttcaaaaatgcggtctccttgccgccgagcgccaaggcaaaaaatacagacgccaatttttttgaagggggaaccaagcgcatcgtggccaaaagggatacaaaaaaaatgaagatacgaaaaaaatagggggatcccttcagtgcagaaaagttggggaacaaacaccccaaaactggagtgtttcattctaaagtgtacttctactatgtgtttattgatttacaataaaagataaacaaaatatgtttgaccacatataaatatcaataattttatagtaattattattgatccataaataacattaattgaattcgcgcctttttcccctctatattatgaatgccatggcaagcaacttgtgataacaatataaatatgttataatctaagctaccgctaaattgataaatatgggcgggatttttagacttaacacatgaccattggaaatgtatccgagcaataataaactccaattagttaatcctttacatataagccgctaattatattcaaaaaccactaaagttttgctatttgtttcagttaccagccatcagcagtagaagagcccaagccaaacatggatcccaattccagtccctggtcatacgcctacaaccgcatcgtgcccgccagtgccggaagctccggcggaacagcagaggacttccagcatccacacctggccaccattacggcagcaagcatcgccagctttaatgcggcggccgccagtggtggcagctttgtgcctccgtcaccgattggcagctacaacccagtattccagcagatctaccaccatgcggcggcggccagtgtccagcctaagcccgcccactatgcctcgtcagcggtgagcacgccgcaccgccagctgcagctgcccagttcgctggacaagcagctcagttcgttccagaaccaggcggccgtgtcggcggcagcggctgctgtagtcaacaatgttgcctcgaactattacggggagaactcctcgtcgagtggagcctcaccatcgcccacaacggtggccctgacgtcgacgtcgctgacctggaacacgccgaacatgatatcgaacaccttcctggccatgcaacagcagcaggcacagcagcaacagcagcaggcacaacagcagcaacaacaggcccaacagcaacagcagcaggcgcaacagcaacagctaaacctggtggccgacaaagtggtgagtagaattcgtttgttttacgttcggctttcagatcactcttctattatggtttacgccagcttctggggaagcacacacacttattaaaaccccgcaggctctatcgcatttatcgcatactaacataacatcccttccaataaacccatcaaagcatagactaagtctagcctctctatgtcgaatcaatcccaaaccaaacactttccgattccgattcaatctatgtacggtgcgctgtagcagattaagcaggaaaagcaattaaaagcctacaacgactcgatttacctgatccaactgcaacagcagcagcagcaacaacagacagcggcgcagcagcaacagcagcagctccaccagcaactgcaacaggagatcgccgaggcagacacagaaccggacacctattacaccattgatggccggaaggtcaaggtgacgcggaaggatggccagccgtatcgggcaacgatagtagaccaacaggatgccagtccggtgccgctggcagtgccagttccggcgggatcctatccggtgcaatatgccagtccggcgctaagctccgcagatggatcgcccatcacgaatttacatgcggtggacgtggtcagcacaccgcaggcccaggtgatcgtctacaagacggcatcccctgtgcaaaggcggcaagaagcgggcgctggatcgtctgctgctgccacacccaccacggtggcctactcatctgtgatacaaagcaccctgcagcaacagcagcagcagcagaacctctgctggacgaagctggaggacaatggagcggggcaggaggacattaagaacgtgctgcagctgcaggtgaaacaggaacatcggcagctcgattttgccagtgaggcatcctcagtggacgccggtggtggtggcgaaaatctagttttcaacctaccgcccgggctggagatcaagcaaaccttctatcccgcgagcgtggtcgatggggagcaactgcagctgcaggagcacaatcaaaaccaatcccagtcctccggtcggcgccagcacgtggtggccaacatgatcatgtcgccgtcggcgggcaacttagcgtcacagattcaagtagtgccaaaggtttgtatttaattttttttatttccgtttctatttgtttattaatttgtttgtgttctgcctttatttcgttttatttgcttttcacactatttcttccaagattttgccaacttaaatggactagtttggaagatctcttatttagttccactgtgcgctttttctttctgattggctaaaaataaatttgaattaacaaaacgtaccttaacagactattggtagcttacataaaaaatctcatttggacgcaaaatttccaatatttattttaattaagaatttgaaacctacatttatagaagtactaattagattttcttgctttcaaatactagaagtatccagtttcccgaatataaggttatttcgttaaagccctgttctgtagctttatattttaaaaaaaatttgcatgccctttcgattatttcttgtattatggtggaagctatttctttggccttctgttattaatcgcttaatttgaaattcttcggttcaatctaacaaaaactgctaactgatattctctagtttaaagtcatgtggccactttgaaactgtgacgttatgttgtaatggtatgatccaatcctaatgggggtaaacccaagcaccaaacgcgtatgccgctcgcagcccagttgttaataccccataaaatgttctgggagcagactgttctttttaccagccagtgtactcgtttaccaaccgtttctaatgtcccaatgtccaagctattgatagtgtgctgtttgcatataacctttggtgatcccgagtgttctaatccgcattcttttcacacttgcttgcaggaggaggtgaagccgccgccgaaaccagcgaagactccgcgcaagcgccaaccgaagaaaacgcttatccccagtagcagcgactacggcaatgtgcgcagtccccaggagccgcagcatcatcagttgcagcagcaacagcaacaacaacagcagcacaatcagcaacagcagcaacagaacacgtactacgacttcaacagcaagtggaatgctccgctcaagacggaaaacaatgcggcgtccgtttcgccggcggccacaataaacatacccacatatcctcagcagagccaacagcagcagcaccagcagcagcaagcgcagcagcagcagcagcagcacttgccacagccggcacacctgcagtcctcgcaggcccagtcacacttgacccagttggcgcaatactatccagccttccctcagcccattgcctctcagtacactgcctgtatgcagcaacagcaacaacagcagcagcaacaacaacaacagcagcaacagcaggcagcctatacgcagcagcaacaccagcaggcctacacacagcaacagcagcagcaggcgcagcagcagcgtcaggagaagagtgaagccactcaacagcaagaggaggaggcgaacgcggctgcagcggcggcagcagcagcagcggccagcaacaaggtcatcgtgcctaacatcgaagaggaactggattttttggcggatgccacagcaacaccgaagcagggctatgccaactcactgtccagcaacgggcgcgggaccaactcctccacaaataacacgaactttggcatacgtaatccgaacaagactccttccccggagccaacgaactgtccacccaactcgcatgcctccaacaatgggcatggtcattcggcggtgacgcccgtggcgccttcaagcaccggagccagtgcatccacggcgtacagtcctgttgctcccaagcctgtgagcgtgggcacgctaattggggagaagaagactcagtttatggacagctatctgaagtttctgcagggcgagcgggacgatgatccgccgccggtagtgaagccatcgcggaagttaaattacccacgagctccgtacaagcggaaaggcaagggttctgggagcggagatgaacccacaacctcacaggccacacagtcagcgggggacgccgtccaggcagttgatggactggcaggactcgtcggtgatgatgggcatcgtatcaaaatactctcgcagacgcaaatactccccaagaagcgtccgcacgcccaaatggtggctgctgcagccgcggcggagtcggcaccttcgtcgtcggtgatccagcagcccggggatcaaacctccttccggccatacgcccagcagcagcaacaggcgcaacagcagcagcagcaatcgatgagcggacagcactttgtgcagcagcattgcgcccaactgacagctggagcgggtcaaggtatgttacttgaccaacagcatagtaccaataagcactccactatcgctacttccacgccatgcaacaactacaacaacaacaacaatcaccaccacacgccagccagcgcgaatgcaacagcgaattcgaattcaacaacgccgacgccagcaccagcgccgaatcctcatcactttataaacctgctgtggccttggcagcactagcggctgccactagcagccgcaccacccacccacgcagcaccaccacccacaccacacggacagacagacagccagacagacaaccgaccgctagacccttggacggtgtgtatatgtaaaaaacaaccataatgacatcaaaacaaaaacaaaaaacaaggaaaatgctatcttttaaatttgttaaaagagcaaacaaaaaaaagaaaaaacaaacaaacaaacaaacaaaaggagaatcccatgaacaaaagtataaagtatttttgagatgaaatcgagaagaacaaatattattaattttcaaaaacccaaataaaccgtgtatttttattatttgtacttgtaagacggatcagaatccggttgcgattccgatccaggtgctggtgctggtgttccatggccgtgggagatggtgttgctggtgtgctagtttgttgttgtcgatgtcgttgttgtggatcctgtcccgttccgttcgtgtcatccgggcactcgccacgtccagttcaatgttgctaacccacttttgtgctctccacagaccccttgagtgtgccgccgcgacgggagcaatgctcccgcaaggccaagcagagcagcatgcatgccatgctcatgaattccagttctgttgtcggcgatggtggagtagttggcgagccggatgagttcaccgactctgacacggatcctgtatggactccgcaggaggaagacgtaagtttttcgcctccggtctcgaaaaccattgtctcacaacctgcttatcactcctcacacgcagagcgatgatggaaagggctatgggaaacgaaagttggctcgccggtcgaagggcactcctcgcaagaacacctatgaccattcctcaggcctgcaacaacagccacaacagcagcagcaacaccaccagcaactgcagcagatgcaggtcaaccagcaacatcaccagcagcagcaacaggtgcagcaaatggcgggtggcgaatcaacctacaattcgcaacagaatatgtccggagtggcggatgtgggatatgccagcgcatcatcgggcccagctgccaactcggagaactttaaagtaggttgatatatatgtacatactttttacgatgaagcctcacgcttttttgatggcaacattttagacgggcgacttcatagttttgcgatcggatctcgtgaacgattggcccaccatttggcaggtggactcaaagtgcattttgcaaaagtacgagccattccgccaaaacggaaagaccttctatcgcaacatgtcgaaggtgggtctgctgcatctctaccaagagtacatgctgtaatcacactttcttggatttcagtacgcctcttggaatctcgaaactaagaaactctacctcaaagcaccggtgcgcattcaactgcattcacacaccgaaacgattgttgagttcatgcgatcagagttgctggccgacgatacggagcagtttattgaaaagatcatggaggactacctgtcctacagggataattttgagatctatattcagactatgatctcccaggccctcgatccaagcttcttctcggaaataacgcgggaaaagggtaaactatccgaaaagcgaactaatttttatttttattactcacttattatcaattcatttcatccatagacgactactttttgggcagtgttcgcgtggtagacaatatcatggaaaactgcaagcgtaagctgctggccatcactccttggacacggagtacgatctcctccatcgagacgtggcccaagtgccatgtgttctccgaatgggaacaaaacaatcttacccagaaaaattgcgccggttgccaccagccaggcatcgctgtgcgcttcctcctcttcggggagccgtacaatccgaacaccatgcagactattcccgttgatccgcgaatcgtctatgaaaaggtgagtgttgcttagaagctaggataggatatattaagcatatattgactttaatgttactttgtttctgcaggatattgttctatgccgcatctgtgccgctcgtgcagatctcttccacaagattgcacacgaaaagttcaatctgttcataaactgctcgcagcgagtaaccgagcagcagcaacagttcccaggaaagacgtcaacagaaatattgaatgatctgctggccgaacacaactggatcgacgaggtacaactcgagattacctacaagtgctactgatatcaacctatatcaattgttttcagctcttccgcaacatgcgcaactgctgggccgaggtggagagtctggagaggcagaagcgcttccgggaggtcatgcagtaaaagccattgttaccaggacccattatcagtatcaggaggtctcctgattgcgtatccaagtgctggacattaggacattaaacgccaagccccacgtaatgctgcaataaactcaatgagttgttattttattatataccagaagacacgcaacagcttagttttagtgcaagacacatattgtactgtgtaggcctttagtttaagatagagtctatagtcttggacaatgcaagtgcatgccatgtaaatagctatacagatagctatagccgcgcattatatcgtacatatatatatatatatatatatcgaacttaaagtactaaataatagagtagtactaacctcatcaagacgaaggaataatatttctgttgcgttgaaattggttaagcattctgttttgctaaatttcaaattaagatttatttggtagcatttcttaagaagataatttaccttaaacacccgcaaacaatcaaattgtgtttttctaccgacgtggtaaggaaaacattatcagcatcaacactatacatacttactaattgtacatacttagtttaaactctagttacacaatccagttgcagacatttagttaactttatttgttatgcggattttaatttaagttgtgaatttttagaatcttagagttccctgaataaatatgaaagaatcacatatgtatactggcagaagctttagttttgcctcgcttacacgcaacatatttacacctttaacttctatgggaaatgttctattaatgttattatctataatactttagcactgctcggagtccattttgaacagcggctccgtcatgttgtattttataagatcctcgacgataccagtgattcgccgcttgaaaattggtaaagtccgggcgttgagcatttcgtattcttcaatgagctccttgtacttgggttcatcagaggatgtcgaaatactttggatggcctcggaaacagtatcgatatca

SEQ ID NO: 25469 - DNA, 5070 bp, DROSOPHILA
cactggcagcagagcggccattttggagattgtttcatccacaaaaaagttatgcaccgaatctaaaaaaaagaacgttcgctgttagttaaacataaaatccgctcgtgcatattgaagcgttgttgtgctggccgatccgatgtgaagataatgctgggcccgagcagaccgacagttccgattctataacgactaaaagttagtgactatcttccaacacgcacgcatgtacgcccgtgtgtgtgagtatgtgtgtgtgtgtgtgtgattgtgtgcatggatacatatatgtacaagcggaaaatacgggaaaaaatcctattcccaggcagaaaaacattgccaaaaacagcataaatcccagccaatgtgatggccccgtcattgtaatgtcataattaccagccatcagcagtagaagagcccaagccaaacatggatcccaattccagtccctggtcatacgcctacaaccgcatcgtgcccgccagtgccggaagctccggcggaacagcagaggacttccagcatccacacctggccaccattacggcagcaagcatcgccagctttaatgcggcggccgccagtggtggcagctttgtgcctccgtcaccgattggcagctacaacccagtattccagcagatctaccaccatgcggcggcggccagtgtccagcctaagcccgcccactatgcctcgtcagcggtgagcacgccgcaccgccagctgcagctgcccagttcgctggacaagcagctcagttcgttccagaaccaggcggccgtgtcggcggcagcggctgctgtagtcaacaatgttgcctcgaactattacggggagaactcctcgtcgagtggagcctcaccatcgcccacaacggtggccctgacgtcgacgtcgctgacctggaacacgccgaacatgatatcgaacaccttcctggccatgcaacagcagcaggcacagcagcaacagcagcaggcacaacagcagcaacaacaggcccaacagcaacagcagcaggcgcaacagcaacagctaaacctggtggccgacaaagtgcagattaagcaggaaaagcaattaaaagcctacaacgactcgatttacctgatccaactgcaacagcagcagcagcaacaacagacagcggcgcagcagcaacagcagcagctccaccagcaactgcaacaggagatcgccgaggcagacacagaaccggacacctattacaccattgatggccggaaggtcaaggtgacgcggaaggatggccagccgtatcgggcaacgatagtagaccaacaggatgccagtccggtgccgctggcagtgccagttccggcgggatcctatccggtgcaatatgccagtccggcgctaagctccgcagatggatcgcccatcacgaatttacatgcggtggacgtggtcagcacaccgcaggcccaggtgatcgtctacaagacggcatcccctgtgcaaaggcggcaagaagcgggcgctggatcgtctgctgctgccacacccaccacggtggcctactcatctgtgatacaaagcaccctgcagcaacagcagcagcagcagaacctctgctggacgaagctggaggacaatggagcggggcaggaggacattaagaacgtgctgcagctgcaggtgaaacaggaacatcggcagctcgattttgccagtgaggcatcctcagtggacgccggtggtggtggcgaaaatctagttttcaacctaccgcccgggctggagatcaagcaaaccttctatcccgcgagcgtggtcgatggggagcaactgcagctgcaggagcacaatcaaaaccaatcccagtcctccggtcggcgccagcacgtggtggccaacatgatcatgtcgccgtcggcgggcaacttagcgtcacagattcaagtagtgccaaaggaggaggtgaagccgccgccgaaaccagcgaagactccgcgcaagcgccaaccgaagaaaacgcttatccccagtagcagcgactacggcaatgtgcgcagtccccaggagccgcagcatcatcagttgcagcagcaacagcaacaacaacagcagcacaatcagcaacagcagcaacagaacacgtactacgacttcaacagcaagtggaatgctccgctcaagacggaaaacaatgcggcgtccgtttcgccggcggccacaataaacatacccacatatcctcagcagagccaacagcagcagcaccagcagcagcaagcgcagcagcagcagcagcagcacttgccacagccggcacacctgcagtcctcgcaggcccagtcacacttgacccagttggcgcaatactatccagccttccctcagcccattgcctctcagtacactgcctgtatgcagcaacagcaacaacagcagcagcaacaacaacaacagcagcaacagcaggcagcctatacgcagcagcaacaccagcaggcctacacacagcaacagcagcagcaggcgcagcagcagcgtcaggagaagagtgaagccactcaacagcaagaggaggaggcgaacgcggctgcagcggcggcagcagcagcagcggccagcaacaaggtcatcgtgcctaacatcgaagaggaactggattttttggcggatgccacagcaacaccgaagcagggctatgccaactcactgtccagcaacgggcgcgggaccaactcctccacaaataacacgaactttggcatacgtaatccgaacaagactccttccccggagccaacgaactgtccacccaactcgcatgcctccaacaatgggcatggtcattcggcggtgacgcccgtggcgccttcaagcaccggagccagtgcatccacggcgtacagtcctgttgctcccaagcctgtgagcgtgggcacgctaattggggagaagaagactcagtttatggacagctatctgaagtttctgcagggcgagcgggacgatgatccgccgccggtagtgaagccatcgcggaagttaaattacccacgagctccgtacaagcggaaaggcaagggttctgggagcggagatgaacccacaacctcacaggccacacagtcagcgggggacgccgtccaggcagttgatggactggcaggactcgtcggtgatgatgggcatcgtatcaaaatactctcgcagacgcaaatactccccaagaagcgtccgcacgcccaaatggtggctgctgcagccgcggcggagtcggcaccttcgtcgtcggtgatccagcagcccggggatcaaacctccttccggccatacgcccagcagcagcaacaggcgcaacagcagcagcagcaatcgatgagcggacagcactttgtgcagcagcattgcgcccaactgacagctggagcgggtcaaggtatgttacttgaccaacagcatagtaccaataagcactccactatcgctacttccacgccatgcaacaactacaacaacaacaacaatcaccaccacacgccagccagcgcgaatgcaacagcgaattcgaattcaacaacgccgacgccagcaccagcgccgaatcctcatcactttataaacctgctgtgctggtgctggtgttccatggccgtgggagatggtgttgctgaccccttgagtgtgccgccgcgacgggagcaatgctcccgcaaggccaagcagagcagcatgcatgccatgctcatgaattccagttctgttgtcggcgatggtggagtagttggcgagccggatgagttcaccgactctgacacggatcctgtatggactccgcaggaggaagacagcgatgatggaaagggctatgggaaacgaaagttggctcgccggtcgaagggcactcctcgcaagaacacctatgaccattcctcaggcctgcaacaacagccacaacagcagcagcaacaccaccagcaactgcagcagatgcaggtcaaccagcaacatcaccagcagcagcaacaggtgcagcaaatggcgggtggcgaatcaacctacaattcgcaacagaatatgtccggagtggcggatgtgggatatgccagcgcatcatcgggcccagctgccaactcggagaactttaaaacgggcgacttcatagttttgcgatcggatctcgtgaacgattggcccaccatttggcaggtggactcaaagtgcattttgcaaaagtacgagccattccgccaaaacggaaagaccttctatcgcaacatgtcgaagtacgcctcttggaatctcgaaactaagaaactctacctcaaagcaccggtgcgcattcaactgcattcacacaccgaaacgattgttgagttcatgcgatcagagttgctggccgacgatacggagcagtttattgaaaagatcatggaggactacctgtcctacagggataattttgagatctatattcagactatgatctcccaggccctcgatccaagcttcttctcggaaataacgcgggaaaaggacgactactttttgggcagtgttcgcgtggtagacaatatcatggaaaactgcaagcgtaagctgctggccatcactccttggacacggagtacgatctcctccatcgagacgtggcccaagtgccatgtgttctccgaatgggaacaaaacaatcttacccagaaaaattgcgccggttgccaccagccaggcatcgctgtgcgcttcctcctcttcggggagccgtacaatccgaacaccatgcagactattcccgttgatccgcgaatcgtctatgaaaaggatattgttctatgccgcatctgtgccgctcgtgcagatctcttccacaagattgcacacgaaaagttcaatctgttcataaactgctcgcagcgagtaaccgagcagcagcaacagttcccaggaaagacgtcaacagaaatattgaatgatctgctggccgaacacaactggatcgacgagctcttccgcaacatgcgcaactgctgggccgaggtggagagtctggagaggcagaagcgcttccgggaggtcatgcagtaa

SEQ ID NO: 25470 - protein, 1543 aa, DROSOPHILA
MDPNSSPWSYAYNRIVPASAGSSGGTAEDFQHPHLATITAASIASFNAAAASGGSFVPPSPIGSYNPVFQQIYHHAAAASVQPKPAHYASSAVSTPHRQLQLPSSLDKQLSSFQNQAAVSAAAAAVVNNVASNYYGENSSSSGASPSPTTVALTSTSLTWNTPNMISNTFLAMQQQQAQQQQQQAQQQQQQAQQQQQQAQQQQLNLVADKVQIKQEKQLKAYNDSIYLIQLQQQQQQQQTAAQQQQQQLHQQLQQEIAEADTEPDTYYTIDGRKVKVTRKDGQPYRATIVDQQDASPVPLAVPVPAGSYPVQYASPALSSADGSPITNLHAVDVVSTPQAQVIVYKTASPVQRRQEAGAGSSAAATPTTVAYSSVIQSTLQQQQQQQNLCWTKLEDNGAGQEDIKNVLQLQVKQEHRQLDFASEASSVDAGGGGENLVFNLPPGLEIKQTFYPASVVDGEQLQLQEHNQNQSQSSGRRQHVVANMIMSPSAGNLASQIQVVPKEEVKPPPKPAKTPRKRQPKKTLIPSSSDYGNVRSPQEPQHHQLQQQQQQQQQHNQQQQQQNTYYDFNSKWNAPLKTENNAASVSPAATINIPTYPQQSQQQQHQQQQAQQQQQQHLPQPAHLQSSQAQSHLTQLAQYYPAFPQPIASQYTACMQQQQQQQQQQQQQQQQQAAYTQQQHQQAYTQQQQQQAQQQRQEKSEATQQQEEEANAAAAAAAAAAASNKVIVPNIEEELDFLADATATPKQGYANSLSSNGRGTNSSTNNTNFGIRNPNKTPSPEPTNCPPNSHASNNGHGHSAVTPVAPSSTGASASTAYSPVAPKPVSVGTLIGEKKTQFMDSYLKFLQGERDDDPPPVVKPSRKLNYPRAPYKRKGKGSGSGDEPTTSQATQSAGDAVQAVDGLAGLVGDDGHRIKILSQTQILPKKRPHAQMVAAAAAAESAPSSSVIQQPGDQTSFRPYAQQQQQAQQQQQQSMSGQHFVQQHCAQLTAGAGQGMLLDQQHSTNKHSTIATSTPCNNYNNNNNHHHTPASANATANSNSTTPTPAPAPNPHHFINLLCWCWCSMAVGDGVADPLSVPPRREQCSRKAKQSSMHAMLMNSSSVVGDGGVVGEPDEFTDSDTDPVWTPQEEDSDDGKGYGKRKLARRSKGTPRKNTYDHSSGLQQQPQQQQQHHQQLQQMQVNQQHHQQQQQVQQMAGGESTYNSQQNMSGVADVGYASASSGPAANSENFKTGDFIVLRSDLVNDWPTIWQVDSKCILQKYEPFRQNGKTFYRNMSKYASWNLETKKLYLKAPVRIQLHSHTETIVEFMRSELLADDTEQFIEKIMEDYLSYRDNFEIYIQTMISQALDPSFFSEITREKDDYFLGSVRVVDNIMENCKRKLLAITPWTRSTISSIETWPKCHVFSEWEQNNLTQKNCAGCHQPGIAVRFLLFGEPYNPNTMQTIPVDPRIVYEKDIVLCRICAARADLFHKIAHEKFNLFINCSQRVTEQQQQFPGKTSTEILNDLLAEHNWIDELFRNMRNCWAEVESLERQKRFREVMQ

SEQ ID NO: 25471 - DNA, 4630 bp, DROSOPHILA
acgggccgcaaataaactggaacggcgttgcacggtgttgccagaccaagaaagtgaacatcgataacccacagcatgtcaatcgatagcttatcgacgatttaagcttatgggcgcgaaaaattaaatgtttcttgaaaactagtttttaacttcagcttaggacctcggtcaaaaggttattaactccaaacaatttccgtccagcccgaccacttttctaaataaggacaaaaaggcatgttatgtacgaaaggtttttattgaacaaatattcgcgcttgaattttgtatttttacacttaattagcacgtgcacattagaaagtgctgtcgtaccgtttaaattacatatttaatgtaatgtaatacaatgtttataatgtatgtatgtatgtgttttcgtgagtgttcgtgtgaatgcagttggtataaatataaatatatgtggcgtgtagtagcaactaaaataaaatccatgtgtgatcaaaggactccaacaggccgccaccgctcgcatccttgcttctcgcttgcttcacacgtaagcacacaccgggttgatgaatatcatatatataatatatctgcagttgcagagggcaggcgatcgggcgtcgttttgtggggctacacgcgttacatggatttacaccaactaaggaatttaaattacagatttgcaatggggtggtggtggtgttggtagtgataggtttgggtgcaacgccgccttctaaaattggttgattaattctcatctgggaagcgtatcgtactattgcatctgcagatcgttgagcaattgctattctctcgcttaattattcgttggccatcatgtcctactttcgtgcctttcgattttctgacctggatacgggagtgtagggttttatgcgtatattagatgggtagtatgattttttttgcttgttttgttggttttttttttttcttatagtgtctcgtcccgccatcggctcctcaattgcttgtgctgggatctgagcaattccggctgtcattaccacaggcccgacgagtagccgcctgggggaatgcggttcttgttgatcaccggagtgccgccattggacgactcctggcgctgggaatactcgttggctacgaccttgtagccctcgcctgtgacggggttgccctctgtgaaaacaaaggaatatcattagaaaatttgactacttagaatgcaaactaggtgtataaaatcaaattggtttctaagaatccgaaattaaagcgcaactaataaaagtacttggggattggctatgttcgtttggagtttggagtatggaatttcagacggaagcgacaaccagaaccaaacgcccacctcggatctttagcttcttgggcttgaggccgccaacaccatctccgttgaggccgaggcccgtgatcggattgcgtgaatcgagtttggagcacgcctgctgctcctccttaatctcgtttggacagagcccaaggggctcctttacattgctcacgcctgccatcttgttcagcgagtatggctgttcgggattatttccagagtctcgccgagtttgacagccctcgttcacctgatcggactttgtgactgtgctgttatctgccggcacgtctccaacttcgctatctcggcacgagttatcaatggatagggcgtcgtcagccggtggaattggcgtttcggttcgagccggttctgggggacacaaggatacgcgtggggatgtttctttggtgtctggtcttgctgttggaagaaggagcggggaggcaggcgaatcggggatgaggatgagtccttaaaggacactggacactacaagtactcactgctcatattgcggaagactgacgcgatacgattcaacagacacaattggttattgttcgtggattggtcggttggttggttggttggtttgacacgattttgagatttaacgtttatagtgcgtgcgtgtgcagtaaaaaatatatatatatatagatatttataaatgcacaacttatttcgttgaatacaattttgttttcaagcgctttggttttgatcggtgtagcaactgcgtgatctaagttcgtactgaatggaaacccagtcgttggatggctccccaatctgacagctgagttcttcgatcgagttcaaatccagcgactactactacttgccagcccaagttagggctaagcgcttctcacctgatctcgagccactgttcatcttgaggttctcggtggaggacgacaccgaagacgaggccgaggacaccgatccgctcttgccgttgtagtggccattggtggtcagcagcttctgggcggcaacggcctctgtgttctgaccaaagggaatgctgctcttcatgtggttcttgccgggggtgatcgggcgggtgggctccccaaacagccgagagtgggagtcgacggtcttctggccgcgacgtggtgcatcacctggtcatcacggttgcggggagttgtaacaaatccaaagaaatcaaataaattgagggaaaaccaaagaaaataaaacattcaaattagtggaattgtgttggagtagaattttaaaattagtttctcaacggtgttttaaaaacttgtacgtaatttcgacagtggttgggtgagtacactgagaaaaatcataaaatgcgtagttcattaaaaggaataatgtattcccctttacttttcttttagtcaaatttgctttaataattaaaatttttaaagcaaacttgatttcgtattttctttcgttgtgtgtgtattgtatggcaaaggttaggcaaaaattgaatgagaggagcagccttgagttcttttcggcttttatctgctcgagctcgaaatgtcatcggcggcaggtggaaaaaggaagcaggccaaccggttgggaataatgcaacttctcgagttggagtgggtcagtatttctgtgggaagtgggtgagctgtgttctgggtttagtcgagacgagtgtgagtgtcagtgcaactgcgttgaatttgcgttgaaacataaattagcacaaaactgacgacaacacaaagcaaagtgaacacaattttgggttaacttcggggtgaggggacaactgtgcaattgttgacatgaattaggaaagggcagacatagttcaagtaccaatgaaatagaatctgtgagctccttgtcgtactgcaaagatacgtagaaaagaaaagatatagagcgggggtaggaaaaaaaagaagaacgagaacgggaagaaaacgatacacatttaataagcatttaatagaccagaatccacggcaatatctaaaaacatatcacatcatgggcacaatttccaattaaatgatagaacaagcaactaagattgatttaattttcattttttttcgattgctagggatcacacatcatcacatatacatatggggggttcgataatggatggtactcaagcttaccgttgtttttcactccattatctttctcggcagcgaatatgttggacgccatgcgattcttcacgttcctgggggtctgcggcatctccgatccaaagatgtcgctcgatccgccgcccgggggcctcagcaccctgcaaaaaacaaaaacagaaagggggagactcgttaattacaagctcattcttttacggtcggtaattgatatggcacagtgcataattcacaaatttccacacgctcaacgatgaggaaagcacatcgagcctaagcgcggggaaatgcatttaatgtctgtgtctaatcatcatcactgcggctgaaaatggcaaaaggagctggggatggagttgcaattggaattgccggaggaggcggaggagctggctgcactcatcgagtttaagacggagctggctgggtgagcactcaatgggcattagaagtcacgccaagatgcatctcccatcctccggccgcatcgcaattaagtggaaaccctggcataaagaattgcaaccgagacaaaaggctggccaaaaatgttatgctttgtggcattcaccagccactcagtgcccgctgctcactgctcactactcagtcaagtcaagtcagtcagtccgtcgccgtccacgcaacgctgcccaaaaccaaaaccaccagctacagtgccggacggtggtgtaaggcacaaatggtgccacaactctgcgggcaatcgttgtttattaaaattggcccaggcaacgcagcaggactaaatgaaaataattgttataataacagtattaaagtatcagggggtggggaatataataatatcacactttcccacgaggtttaagattgcgtttaagtagtttacaagaatttcaattataattatagaagccagaattgttgacaagtgcagttctattttccttcctttttttttttataaaccatacttgtttcattacaaactgcatagttcctcaatttcttcgccatcaagtgtaatatttccgcagtttttcttccccgccataacagagacatttgatcttttaatttggccaaaatcatggctgtcttgcacacgtgaaccgcactgtcagccatcgaaggctaggctatccgagtgtatctgagg

SEQ ID NO: 25472 - DNA, 581 bp, DROSOPHILA
gcagggtgctgaggcccccgggcggcggatcgagcgacatctttggatcggagatgccgcagacccccaggaacgtgaagaatcgcatggcgtccaacatattcgctgccgagaaagataatggagtgaaaaacaacggtgatgcaccacgtcgcggccagaagaccgtcgactcccactctcggctgtttggggagcccacccgcccgatcacccccggcaagaaccacatgaagagcagcattccctttggtcagaacacagaggccgttgccgcccagaagctgctgaccaccaatggccactacaacggcaagagcggatcggtgtcctcggcctcgtcttcggtgtcgtcctccaccgagaacctcaagatgaacagtggctcgagatcagtcttccgcaatatgagcaagggcaaccccgtcacaggcgagggctacaaggtcgtagccaacgagtattcccagcgccaggagtcgtccaatggcggcactccggtgatcaacaagaaccgcattcccccaggcggctactcgtcgggcctgtggtaatgacagccggaattgctcagatcccag

SEQ ID NO: 25473 - protein, 166 aa, DROSOPHILA
MPQTPRNVKNRMASNIFAAEKDNGVKNNGDAPRRGQKTVDSHSRLFGEPTRPITPGKNHMKSSIPFGQNTEAVAAQKLLTTNGHYNGKSGSVSSASSSVSSSTENLKMNSGSRSVFRNMSKGNPVTGEGYKVVANEYSQRQESSNGGTPVINKNRIPPGGYSSGLW

SEQ ID NO: 25474 - DNA, 3223 bp, DROSOPHILA
gattcccggtcacgacgggtggcacgcactcgttgagaatattacgctgattatcacgccaaacatgaagatggctaccacatcgttgcatgtggtcatggcatagatgagcgtatgaatgccgctgttcaggccgagtcgatcctccttcaacttcagcatcacggtgacgaccacattcggtgaaacggcggtgatgacaaggctgtaagataaccccaagttctcagtacccattatggcattcgataatccacgtattccattagctcattaacttaccccaaagcaatgccccacagccagggcatggagagtgtaagattggccagtccggcgatggctgccacctccacaattgtgggcagcagggttaaccggagtatcatgaaccacagccgcttgaaggcatctccatccagcccgaggccagccagcaacatgatgttgatcagggccatttcccttcgcaggtggaaacaagctcacattaaatgtaacacggatttaaatgaaatcttacctgaggaacagctcaaacttctgatagccctcgaaattggccaggcccaggttggcataaagtacgccaaagaaaagcatgcccagcatgtcgggcagatggacaaaggtgaccaggatgccggagatctgggcgcccacaaagaggaatgcaatgcgcatgatgacggtcggtggttgggagtactccggcagcagaacccagcccatggcccaaaggcccaggaaaatggccagtagggccaccagctcggaagtgttcacccaatgcgaacggatatatagccacctgcaggaagttcaagaaaagagttaaaccaacggccacaaaggtttcgagtgtactgaggtagttcttcccttaaaaaacgtatcatgtattcctttcttcaactatgtacacataattgccgctaattatcgagcccacttagagctataaaagcggacggcccagggaaaatagagtcaggacaaaatggataaacacaaggatcgcattgaatccatgcgcctaattcttcaggtcatgcaactatttggcctctggccgtggtccttgaaatcggaagaggagtggactttcaccggttttgtaaagcgcaactatcgcttcctgctccatctgcccattaccttcacctttattggactcatgtggctggaggccttcatctcgagcaatctggagcaggctggccaggttctgtacatgtccatcaccgagatggctttggtggtgaaaatcctgagcatttggcactatcgcaccgaagcttggcggctgatgtacgaactccaacatgctccggactaccaactccacaaccaggaggaggtagacttttggcgccgggagcaacgattcttcaagtggttcttctacatctacattctgattagcttgggcgtggtatatagtggctgcactggagtactttttctggagggctacgaactgccctttgcctactacgtgcccttcgaatggcagaacgagagaaggtactggttcgcctatggttacgatatggcgggcatgacgctgacctgcatctcaaacattaccctggacaccctgggttgctatttcctgttccatatctctcttttgtaccgactgcttggtctgcgattgagggaaacgaagaatatgaagaatgataccatttttggccagcagttgcgtgccatcttcattatgcatcagaggattagaaggtatagtatctctcgcaaatacattccttctcttgcttatatattgttctattttacagcctaaccctgacctgccagagaatcgtatctccctatatcctatctcagatcattttgagtgccctgatcatctgctttagtggataccgcttgcagcatgtgggaattcgcgataatcccggccagtttatatccatgttgcagtttgtcagtgtgatgatcctgcagatttacttgccctgctactatggaaacgagataaccgtgtatgccaatcagctgaccaacgaggtttaccataccaattggctggaatgtcggccaccgattcgaaagttactcaatgcctacatggagcacctgaagaaaccggtgaccatccgggctggcaacttcttcgccgtgggactaccaatttttgttaagaccatcaacaacgcctacagtttcttggctttattactaaatgtatcgaattaacatgtcaagcttttaataaatattactgaatgcatctgaaataataaaacctgttttctgaattttaagaatgggacaccattattaaaagcatatgttataaagagatattaagtcacaagtaccataaaagttttatagattacataatggaagtcatatagaaagccttaccatcaaatgtattcaaattcaagagtcttgaaaaatatggaacgtattcaaaattatttcaagaaaaattcatatgtaaacatgtttaccggtgaacaggcttcattgcactgatgataaatcgtcgaatttggtaataaaaaggggttttgaatgatgagttcttcccctaagaatcctgcttccaattgcgtgtcttagccatttagtatcggtcaacaattaacgtatggtaatgtcgacaagctaattattgtaattgccctgctcattagttgtataaatattttggctggttacctaagtaaatcagggacggaacgcactgagaactaagctcacaaaatgaaccggttccttaaaatgtaatataatcacaaatgaatatatatattgttataaaggatgtcagcagtaattttaaggaactagaagtgaactaggatgtagaaagtaagttcaagctggacaaagtaaaatgataccaccctagttcaccttgaatcaacaaaaaattccacaaggctacccattgaggctattaaaactcaaaggttataaaagccttaaaatctttcgagcatttcattaagttaattaaaactaagctgctggaaatggagtctacaaatcgcctaagtgccatccaaacacttttagtaatccaacgttggataggacttcttaaatgggaaaacgagggcgaggatggagtattaacctggctaaaacgaatatatccttttgtactgcaccttccactgaccttcacgtatattgccttaatgtggtatgaagctattacatcgtcagattttgaggaagc

SEQ ID NO: 25475 - DNA, 1164 bp, DROSOPHILA
atggataaacacaaggatcgcattgaatccatgcgcctaattcttcaggtcatgcaactatttggcctctggccgtggtccttgaaatcggaagaggagtggactttcaccggttttgtaaagcgcaactatcgcttcctgctccatctgcccattaccttcacctttattggactcatgtggctggaggccttcatctcgagcaatctggagcaggctggccaggttctgtacatgtccatcaccgagatggctttggtggtgaaaatcctgagcatttggcactatcgcaccgaagcttggcggctgatgtacgaactccaacatgctccggactaccaactccacaaccaggaggaggtagacttttggcgccgggagcaacgattcttcaagtggttcttctacatctacattctgattagcttgggcgtggtatatagtggctgcactggagtactttttctggagggctacgaactgccctttgcctactacgtgcccttcgaatggcagaacgagagaaggtactggttcgcctatggttacgatatggcgggcatgacgctgacctgcatctcaaacattaccctggacaccctgggttgctatttcctgttccatatctctcttttgtaccgactgcttggtctgcgattgagggaaacgaagaatatgaagaatgataccatttttggccagcagttgcgtgccatcttcattatgcatcagaggattagaagcctaaccctgacctgccagagaatcgtatctccctatatcctatctcagatcattttgagtgccctgatcatctgctttagtggataccgcttgcagcatgtgggaattcgcgataatcccggccagtttatatccatgttgcagtttgtcagtgtgatgatcctgcagatttacttgccctgctactatggaaacgagataaccgtgtatgccaatcagctgaccaacgaggtttaccataccaattggctggaatgtcggccaccgattcgaaagttactcaatgcctacatggagcacctgaagaaaccggtgaccatccgggctggcaacttcttcgccgtgggactaccaatttttgttaagaccatcaacaacgcctacagtttcttggctttattactaaatgtatcgaattaa

SEQ ID NO: 25476 - protein, 387 aa, DROSOPHILA
MDKHKDRIESMRLILQVMQLFGLWPWSLKSEEEWTFTGFVKRNYRFLLHLPITFTFIGLMWLEAFISSNLEQAGQVLYMSITEMALVVKILSIWHYRTEAWRLMYELQHAPDYQLHNQEEVDFWRREQRFFKWFFYIYILISLGVVYSGCTGVLFLEGYELPFAYYVPFEWQNERRYWFAYGYDMAGMTLTCISNITLDTLGCYFLFHISLLYRLLGLRLRETKNMKNDTIFGQQLRAIFIMHQRIRSLTLTCQRIVSPYILSQIILSALIICFSGYRLQHVGIRDNPGQFISMLQFVSVMILQIYLPCYYGNEITVYANQLTNEVYHTNWLECRPPIRKLLNAYMEHLKKPVTIRAGNFFAVGLPIFVKTINNAYSFLALLLNVSN

SEQ ID NO: 25477 - DNA, 6051 bp, DROSOPHILA
ttttgcattaaatgtttataatgtttgagaatttagcatatgatttaaatcgaatttgaatagtatccggttttcataaacgagggcccactgttatttatgtttgtttttcaccgaagtggcatctctgatcagctgcatatattatcgtttctttgttgtgtttatatgttgtgactcagtgcgaaaccgtgataaaacctgagaattgaaacgaaatttagtcggtcaccaaaattacaagtgtcaagatgtccctggtttcagatgaggagtgggtggagtacaaggtaggcccaatatgtcctagcaagcgacgcaatatttagaaatcacttgattccaccatagtccaagttcgacaagaactacgaggcagaggaggatctgatgcgtcgtagaatctacgccgagtccaaagcccggattgaggaacacaatcggaagttcgagaagggcgaagtgacttggaaaatgggaattaatcatttggctgatctcacgcctgaggaatttgcccagcgttgtggcaaaaaggtgccgccaaattaacagaatctcaagtgaatctcattttaaatagacattttgtaaagacactaatctctctgtaattctataaatatgcatttgaatttttaaatctttatcgttcaaccacccccaaataaacaataaatcagctgttttgtacattttaaagattttgggatttttgtgttctggccactttggctgggagaaaaacagttcattaggttttggttcaatgaacgaaggtttatttatctctacgatatatgcaaataaatacgtacggctgagatggtaaaattccattccaaaaatatgtatgcttgtacgcggtatctatatacattttgaacttaaagcggattaacgcctttctgcgatgaactagttccggttcagcgttcattgagcgagtcagtgaaccgaactgcagtgccgacgagcggcagttcacacacaacatttgaaagtttgtaaacttttcctttttcgatcacatagacacatcgatacacgtagttatttgtttttattttgtaccaacaccaaacaccccatcttacaagcgcgtaaaacctcgttttcggtccaatctcttgcagaatcttgcagtagaacctcacagcccagccaaacatgtccggaatcatgcgtgtgccatcgattttggccaaaaatgcagtcgcctccatggtaagtagtccccattttggaagtgaaaacccaggctcctctgtggcaaacgaaatgatttaagagtggttatacaaccgggtctacacagaacccagccagccagctcgtgatgtgacaacagaaaaagaccaacgaattggccaaaaacgcgccacccgtacttgtgttatgtaatttgtgagcaaattgtgggacacaggtgcattaaattattccctttgctagattatattaattttcatatagcgaatatcattccaagcaagtgttcagcaattttgcggattttatagtggaaagctaggtgtgcaccagcgaggttatgttatgctgccgccccgcccccttcatccatgctctcctgcatcgacgatatcgtgcatttgggcatttcgtgcaacaaaatgcagttgaaacacttggttttggatgcacgacacgccttgaaaagctttataagtaccgcttaatcggaagattcacaaaagagaggatagtagtatatagtaaatcaaatgattggcaagcggagagagcaagcgagagagagagagagatggaggcacgtcacagaactaacagctgattatacaatggagctaattgatcgccgtgctgatctaccccgcccccttccaccaaaaaaccccggccgaaaaatgccagttcaattatttcatttgtttattacataagcagttatcactgcaagtcgctctttctgtttttatcaacttatcttgccgacgtcaccaaaagatactatctcaacttgtatctacaccttttttttgcatttaaatttaactaacggccgaaagtttagttgcaacaacgttttgtgcactttccggtcttaattttttggaattttctgataagataacactaagctatttcagatacgtaaataatgtgggtattcgtgaaactgaaaatttctatttaattaatagatattgagaaaacattccctttaagaaatgacaacacaggcagtaatctttaagtctgagtttacgtaatttttttcgcaaacgattgtgaattatcgttgaatgactaaagcaaacaataagttgatagctttattgacaaccccggctttcaactctgaaaatattttaatctatagatccattttctatatttattgctttggggatatatttgacttatttttcatggaatatgatccaatccaatatgatatttatttatcccaatttatatcttgcagcaacgtgccgcagccgttggagtgcagcgcagttaccacatcacacacggccgccagcaggcctcggcggcgaatccggacaagatatcgaagcagtacccggtggtggatcacgcctacgatgcgatcgtcgtgggagcaggaggagccggcttgcgggcggcttttggcctggtggctgagggatttcgcacggcggtgatcaccaagcttttccccacccgctcgcacacgatcgccgcccagggcggtatcaatgccgctctcggcaacatggaggaggacgactggaagtggcacatgtacgacacggtcaagggctccgattggctgggcgaccaggatgccatccactacatgacccgcgaggcgcccaaggctgtcattgagctggagaactacggcatgcccttctcgcgtacccaggacggtaagatctaccagcgcgccttcggtggacagagtctgaagttcggcaagggcggacaggcccatcgctgctgtgctgtggctgatcgtactggtcactcgctgctgcacacgctatacggtcaatcgctgagctacgactgcaactactttgtggagtactttgccctggatctgatcttcgaggacggcgagtgccgtggtgtgctggccctgaacctggaggatggcacactgcaccgattccgcgctaagaacacggtcattgccaccggtggatatggacgagcattcttctcctgcacctcggcgcacacatgtaccggtgacggtactgctatggttgcacgccagggactgccctctcaggatctggagttcgtgcagttccatcctactggcatctacggcgccggatgtctcatcaccgagggctgccgcggtgagggtggttacctgatcaacggtaatggtgagcgcttcatggagcgctatgctcctgtggccaaggatctggcctctcgcgacgtcgtctcgcggtcgatgaccatcgagatcatggagggtcgtggcgctggacccgagaaggatcacgtgtacctgcaactgcaccacttgccgcccaagcagctcgcggagcgtctgcctggcatctccgagaccgccatgatcttcgccggtgttgatgtgacccgtgagcccatccccgtgttgcccaccgtgcattacaacatgggcggtgtgccgactaactatcgcggccaggtaatcaccattgacaaggatggcaaggatgtgattgtgccgggactgtatgccgctggtgaggctgcttccagctcggtgcatggtgccaaccgtctgggtgccaactctctgctggatctggtggtcttcggacgtgcatgcgccaagaccatcgccgagctgaataagcctggtgcaccggctcccaccctcaaggaaaacgctggcgaggcctctgttgctaacctcgataagctgcgccatgccaacggccagatcaccaccgccgatctgcgtctgaagatgcagaagaccatgcagcatcatgctgctgtgttccgcgatggccccatcctgcaggacggtgtgaacaagatgaaggagatctacaagcagttcaaggacatcaaggttgtcgataggtgaatataaaaacaagtatttttttgattccctctaacattccttgactttaaaggtcgcttatctggaactccgatctggtggagacgctggagctgcagaatctgttggccaatgcccagatgactattgtgagcgctgaggcgcgcaaggaatcgcgaggtgcccacgcccgcgaggacttcaaggttcgcgaggatgaatacgtaagttactgtcggcactcagcccctgaacttcttatcatggaacaacatgtattgcaggatttcagcaagcccctggatggtcagcagaagaagcccatggatcagcactggcgcaagcacacgctctcgtgggtgtgcaatgacaacggagacattacgctggactacagaaacgtgatcgataccacgctggacaacgaagtctctactgttccaccagcgattcgctcctattaaatcaagacttggagttgcagaacacccgcatatacaccccataccatcactcgtacggatgtctacttaaacgtctttgtgggcgccagtaaataaattttgtcaaatcgccaaatgagccgcaatatgctaccaattggtaactgggaactcggcagcggttccgggcattttgtgatgaaacgtaaatccagattttctatacacctataaatctttcaaatccttattactactccgctgattctacttagtttcactgtaagctgccctccatttggttactgtttggttgtcggttatttacattattacataagcgaaaaatgtgtgtgagtagacaacgagttaggtctgaggcgatattgactacgcagcctgtttagaagcaaatgaaaacaaatccaactacacttttctagtatttgttaaacttattaaattattaaaacgaaaacgtgtaaaaacaataaaaaaagaacaaaagtcgaaacgtttgctatacattaaataaatgtaatgaagattaagtgcgcaactaaatgacttcttcacttagccgcggaatacgtgaatttgattggccttaacatccagttgactcaaaatatctaaggcagcggtattgaatccacttggtccgcaaatgagcacataagtacatctttccggttgatttttctggaacaaaggggctagcagctccagcgctattctttgtggattatcctccgattgggagacataatttgtgcagctgaatctttcgtcgtcggtgtgtagttcatggagtttctcctttaaccagatatcctcattggttttgttaaagtacaataattgtaagctttcactgtaaatgtgggaaataagtaagtttttttcgggactgatttttaagaacttacattcggtttgtatttctcttcaagatgggctgaattaggctcagaattggcgttaatccgcttcccgccgctaggagtagaatatttctatgtgcagtgagatcagagagctggaaggatccacgtggcgcactccaatggacgcgagatccagtttcaagcttttgcaggtgactggagacgggtccgttcggataccttttgatcagaaagtgtaagcattctgatctggatgatctgatgttctccaaacgtagataggtgtgatccactggtgtgtagctgcgctgaattacccgtccctctagtgggacttctatatccacatggtaaccagccggcaggaccatcagaaccttctgcccaacactttgcagacatagttcaaaggagtcgtgattgaaatctttgctgtgaactacttcatactcgaaagtttcatcatgtaatcggctagagtctaatctgttggacacatgtgttccatacgttggccatggttccgcttcctccttgacaaaaactaactcaattttccccgtctccgaaccgattttcgctaactttggaggccattctacattgttggtcagttgaaaatcaaagctgtgccaattgtgctggacta

SEQ ID NO: 25478 - DNA, 2692 bp, DROSOPHILA
aaagtttgtaaacttttcctttttcgatcacatagacacatcgatacacgtagttatttgtttttattttgtaccaacaccaaacaccccatcttacaagcgcgtaaaacctcgttttcggtccaatctcttgcagaatcttgcagtagaacctcacagcccagccaaacatgtccggaatcatgcgtgtgccatcgattttggccaaaaatgcagtcgcctccatgcaacgtgccgcagccgttggagtgcagcgcagttaccacatcacacacggccgccagcaggcctcggcggcgaatccggacaagatatcgaagcagtacccggtggtggatcacgcctacgatgcgatcgtcgtgggagcaggaggagccggcttgcgggcggcttttggcctggtggctgagggatttcgcacggcggtgatcaccaagcttttccccacccgctcgcacacgatcgccgcccagggcggtatcaatgccgctctcggcaacatggaggaggacgactggaagtggcacatgtacgacacggtcaagggctccgattggctgggcgaccaggatgccatccactacatgacccgcgaggcgcccaaggctgtcattgagctggagaactacggcatgcccttctcgcgtacccaggacggtaagatctaccagcgcgccttcggtggacagagtctgaagttcggcaagggcggacaggcccatcgctgctgtgctgtggctgatcgtactggtcactcgctgctgcacacgctatacggtcaatcgctgagctacgactgcaactactttgtggagtactttgccctggatctgatcttcgaggacggcgagtgccgtggtgtgctggccctgaacctggaggatggcacactgcaccgattccgcgctaagaacacggtcattgccaccggtggatatggacgagcattcttctcctgcacctcggcgcacacatgtaccggtgacggtactgctatggttgcacgccagggactgccctctcaggatctggagttcgtgcagttccatcctactggcatctacggcgccggatgtctcatcaccgagggctgccgcggtgagggtggttacctgatcaacggtaatggtgagcgcttcatggagcgctatgctcctgtggccaaggatctggcctctcgcgacgtcgtctcgcggtcgatgaccatcgagatcatggagggtcgtggcgctggacccgagaaggatcacgtgtacctgcaactgcaccacttgccgcccaagcagctcgcggagcgtctgcctggcatctccgagaccgccatgatcttcgccggtgttgatgtgacccgtgagcccatccccgtgttgcccaccgtgcattacaacatgggcggtgtgccgactaactatcgcggccaggtaatcaccattgacaaggatggcaaggatgtgattgtgccgggactgtatgccgctggtgaggctgcttccagctcggtgcatggtgccaaccgtctgggtgccaactctctgctggatctggtggtcttcggacgtgcatgcgccaagaccatcgccgagctgaataagcctggtgcaccggctcccaccctcaaggaaaacgctggcgaggcctctgttgctaacctcgataagctgcgccatgccaacggccagatcaccaccgccgatctgcgtctgaagatgcagaagaccatgcagcatcatgctgctgtgttccgcgatggccccatcctgcaggacggtgtgaacaagatgaaggagatctacaagcagttcaaggacatcaaggttgtcgataggtcgcttatctggaactccgatctggtggagacgctggagctgcagaatctgttggccaatgcccagatgactattgtgagcgctgaggcgcgcaaggaatcgcgaggtgcccacgcccgcgaggacttcaaggttcgcgaggatgaatacgatttcagcaagcccctggatggtcagcagaagaagcccatggatcagcactggcgcaagcacacgctctcgtgggtgtgcaatgacaacggagacattacgctggactacagaaacgtgatcgataccacgctggacaacgaagtctctactgttccaccagcgattcgctcctattaaatcaagacttggagttgcagaacacccgcatatacaccccataccatcactcgtacggatgtctacttaaacgtctttgtgggcgccagtaaataaattttgtcaaatcgccaaatgagccgcaatatgctaccaattggtaactgggaactcggcagcggttccgggcattttgtgatgaaacgtaaatccagattttctatacacctataaatctttcaaatccttattactactccgctgattctacttagtttcactgtaagctgccctccatttggttactgtttggttgtcggttatttacattattacataagcgaaaaatgtgtgtgagtagacaacgagttaggtctgaggcgatattgactacgcagcctgtttagaagcaaatgaaaacaaatccaactacacttttctagtatttgttaaacttattaaattattaaaacgaaaacgtgtaaaaacaataaaaaaagaacaaaagtcgaaacgtttgctatacattaaataaatgtaatgaagattaagtgcgc

SEQ ID NO: 25479 - protein, 661 aa, DROSOPHILA
MSGIMRVPSILAKNAVASMQRAAAVGVQRSYHITHGRQQASAANPDKISKQYPVVDHAYDAIVVGAGGAGLRAAFGLVAEGFRTAVITKLFPTRSHTIAAQGGINAALGNMEEDDWKWHMYDTVKGSDWLGDQDAIHYMTREAPKAVIELENYGMPFSRTQDGKIYQRAFGGQSLKFGKGGQAHRCCAVADRTGHSLLHTLYGQSLSYDCNYFVEYFALDLIFEDGECRGVLALNLEDGTLHRFRAKNTVIATGGYGRAFFSCTSAHTCTGDGTAMVARQGLPSQDLEFVQFHPTGIYGAGCLITEGCRGEGGYLINGNGERFMERYAPVAKDLASRDVVSRSMTIEIMEGRGAGPEKDHVYLQLHHLPPKQLAERLPGISETAMIFAGVDVTREPIPVLPTVHYNMGGVPTNYRGQVITIDKDGKDVIVPGLYAAGEAASSSVHGANRLGANSLLDLVVFGRACAKTIAELNKPGAPAPTLKENAGEASVANLDKLRHANGQITTADLRLKMQKTMQHHAAVFRDGPILQDGVNKMKEIYKQFKDIKVVDRSLIWNSDLVETLELQNLLANAQMTIVSAEARKESRGAHAREDFKVREDEYDFSKPLDGQQKKPMDQHWRKHTLSWVCNDNGDITLDYRNVIDTTLDNEVSTVPPAIRSY

SEQ ID NO: 25480 - DNA, 5357 bp, DROSOPHILA
ctaatttaacttatatattcggagaataaatgaaattgtatatacatatgtacgtatgacaggatcagaaatctctctgagaatatataaaaatcgaatcttcaattcagtcaaaatttaaaacccaccgatataatctatttagtgatacttatttaactaagtgttaataatttacaggtcttaatgacggttggtcttaatttacagttgtagagaaattcaataaattattaataagacaattgattagcaaaatagccattcgttggacaaattttccaaaaattgttgaataataataatcaaattttttaaatttatataattttaatagtaaaaaaggtacataagtaaaattagtataagtatatacataaatagtcccaaacactacgtggcgttgaagcctccatgccatgagaaacccttaatgaaataatttaacattaaacatgttatgattttaaaataattttataaaattttagccatcgtgccacataaatcaatgttgttcaaaactttgtgtagagataggtgggtctgtaacactcgaatcaaaaacaatattaagataaaaatagcgcgcacggcaagtgttgcatggaagaagatgagatcaatttagattctttggagattgctctttttaacgcgactaccatttcattgatattattttacaaaaatgttcctggaacattttagactccatcggtggtgtcttctttcttttttcttttaacattagccaattgattggatgtggaatcagaactgaaaacatttaaacgatatctacataaatacttccgaggtttttaatggtaagcttccctttaatgtgctccttgtgaatacagcattacaatgccctctagctcgatagttcaatttgtatgcgataggctgatacagccgatactaataatctgctctaggactgatagtgtacacacaacgtttgagcgttgcctaagaagttttttttaaataaatatttgtttacattgactaatcgattttttgtgttaaacaaccttataaaaaatgcgctaaacctaaaatagccaaatggatcattttaatttaaaaatatttatgcacctacagtgaatcagcggcatataaaattaattcgcattaaattcaatcgatattaaaaagtttatatattaaggagagagaatgtagagctaaataataataaaaatgacatatggggaattgatgcccaaactcaactacaaactgatcatacacaaaaccacaaataaatatgttgcgaaaggaattgtattgtgcaaacattatacatgttttacatgtactgtgtattattatcatactcggttctcagcattattgcgttaactgcattgaagaactgccggctcaggcgttatctcccttaaatgacatagtcgcccagtttaacttgccatcaataccagttcaatcaacagcttccagctatggcaatcgatcaattggaaacaatatagaaagtgttagagactctcaatctaaaaattattttactcacatgagcttcgactttatgcacaatgttttgtttgcgggtgctacaaataaaatacttaaacttaacgaaaaccttcgagtgctggccgaggctgttactgggccgttacatgattccccgcaatgtcacgctggaggctgtccggaagatattgagacatcgcttgtcaataacttcaacaaaattctagtagtaagctacgctcacgatggtattctcatagcgtgtggaagcattcgacaaggtaaaatagcaaacacatatcaaaataaaaataaaatacttaagtcggcgacttcgtatgggaccgaaactcctgacatatcgtattggtttatagaagttattggtcattttttgtagtcatcgtagaacaatgtcgcagtgtttttgagctccacataaaaaagcggcgaatataagtaattattcaaaagtgcggaaggaatatgatgataaacaaaacaggattttaaaatgttataaattaaaaaatctatagttgaactcttgaaacaatttgggtagtattaacgttaaagtattaaaataaaacaagataatatgctatagtcaagatctccgatactcagctagtgtgaatgcgaactcgaaatcgaaatttcatcatttttctgggatatcgatagatattggggaataaaagaagaaacaatttgaaaaatgttcaatagtgtgggcgtgaccggtttggcggctttagggagttagagtaggcgtggcaaaaagtttaagcaactaataaaattaaaaaaaatattctaaaatgtttgcaaaaatatgggcgggcagttttgggcataatattacttcaatcatgcgatgcgaatcgtctttaaaatacttttcaacgaatcagttaacaatttttactgttcctgaaatcaattctgatcgaataaacgaatttacatatttggtaagttttggccaatttcgtagcaatatgatgaaattgcgctcttttttaggaatatcaaattggaatataacaaaaaaaaaactgaaactaaacaactgaatctaatgtgcattttaaataataaaaatggatcattttatacatcatattaaaattaaaaaaatttcataaaaataatacgtagtagaaaataaaaattttaacataataaaaatacgaaaactgtttattgcaagtcatatgtatcttgaggcacgaagtgcggacacaagcactcaacaatcattgccttattaatttttcacacgtcgaaagctgaatactctaatgaatataataatattataaagtcatttttgaaatttttttttgtgataatatgtacataggtttgactctttctaatctattttcaaataataataacgttaaggcaatgcaaaacaagaatttttcgcatggtgccaattgatcaaaaaataatatagatttaaagtctatgaacttctaaggtgaagggcatatattgtcaaatttacaatgcatgagcacacgtgtgcacacacacagatgtctggtatcactgtatgcgtagaaaagagctgttcgttgtagcgctctccgctctctcgctctcgaacaaaaattcgagagagcctggagcaacctctagagccacggcgagaaaatcgtgggctaaggacaggcagacggacatgagtagatcgactcggttagtgatcaagatcaggatttttgatattttataggctcggtgacgttccgttctacatgtagtatacatttttactttacaagttacgggtatatcaagtccaatggatactatgacttaggtgttatattttgtccttaaaataggttttaaaaaattccgcgatagtaataaaattatctttattttcaggagcctgcgaaatttacagcctgccacgttttccggcaacgccccagttttttgcagttccattggctgctaacgatgaaaacgcgtctacatatgcatttgtaggtccggcgagatatgcgtggaaagaagaggatattttatatgtggggacaacatttacgaatgttggtgattatcgtcatgacgtgccagccatttcgtcccgccgacttgatgatttaaactatgctgaattttcaatacagcagtcaattataaatatcgatgtaaaatatcgggatcattttctagtcgattatatttacggctttaattcttctgaatatgcgtacttcataattgttcaaaaaaaatcacatttagctgatgaggccggttatgtaacacgcttggcacgcatttgcattacagatcctaattacgacagctatactgaaataactgttcaatgcactgcaactgaaaacaatgttgactacaatattgtaagggatgcgaaagtaactccagccagccacaaattggcgcaaaaaatgggcataaaaaaagacgatcacgttttagtaacggttttttcgccctcaagagaaataagtaatcagccagaaagtaagtctgctatgtgtatatatagcattaaagatattgaagacatgttcattgaaaatatccatctgtgttttaacggaaccacaaaagatcgaaatttgggctatatatccggcaccattaatgatggcagatgtccaatagttggttcgctcggtaacatttacaacttttgctctgtgggacttaaaataagcggagtatccccaatcactgcacacgcactttttcattttgataatgtttcagttacgtcagtcacagcaacttcaacgactgatcagcagcattctcttgcatttcttggaacgaacatgggagtaatcaaaaaagttttattatctggccaaagtccgggcgagtacgaggaaatagttgtggatgctggaaatcgtatactaccaaatacaatgatgtcgccaaaaaaagattttctttacgtactttctcaacgaaaaataactaagcttagaatcgaacactgttctgtgtacacgaattgttccgcttgcttagagtctcgggatcctttttgtggatggtgttccttggagaagcggtgcactgtacgatcaacatgccagcgagatacatctgcgtcgagatggctttcattaggtagtggacagcaatgcatagaatttgaatctattatcccagagaaaataccaatttctgaattatcgcacctgcatttaataattcgaactttgcccgaaccttttaatgcaaaataccgatgtgtttttggaaattccacccccattgatgccgaaattctggaaaacggactcggatgtgctactcccccattagatgaaagaccattaataccaacaaacactgatcatattttggtgccattgtcagtaagaagttcggagacaaataaggattttgtatcaaggaattttgctttttttgactgctcacatcatggaaattgccaggagtgtctacaaagttcctggggttgcaactggtgtatttttgataataagtgcgttcacaagtctttgcaatgccgtaacatagaaaatgctgtaagtactgttggtcactgcccccacttaaaaaaaaatcgtccggaaatacttctacccgtaagagtgccaatagaaattcggctagagattgaaaatttaccaaaacccaagagcgcacatgctggttttttatgtacaatacatattgaagctgctcagatgctactccctgctcacgttgagtcaaataaaattgtagtttgcgaaaaaacaccatatttctacgagattaatacacatgaatatcaggcgaaggttgtagttacatggaacttccag

SEQ ID NO: 25481 - DNA, 2730 bp, DROSOPHILA
atatttgtttacattgactaatcgattttttgtgttaaacaaccttataaaaaatgcgctaaacctaaaatagccaaatggatcattttaatttaaaaatatttatgcacctacagtgaatcagcggcatataaaattaattcgcattaaattcaatcgatattaaaaagtttatatattaaggagagagaatgtagagctaaataataataaaaatgacatatggggaattgatgcccaaactcaactacaaactgatcatacacaaaaccacaaataaatatgttgcgaaaggaattgtattgtgcaaacattatacatgttttacatgtactgtgtattattatcatactcggttctcagcattattgcgttaactgcattgaagaactgccggctcaggcgttatctcccttaaatgacatagtcgcccagtttaacttgccatcaataccagttcaatcaacagcttccagctatggcaatcgatcaattggaaacaatatagaaagtgttagagactctcaatctaaaaattattttactcacatgagcttcgactttatgcacaatgttttgtttgcgggtgctacaaataaaatacttaaacttaacgaaaaccttcgagtgctggccgaggctgttactgggccgttacatgattccccgcaatgtcacgctggaggctgtccggaagatattgagacatcgcttgtcaataacttcaacaaaattctagtagtaagctacgctcacgatggtattctcatagcgtgtggaagcattcgacaaggagcctgcgaaatttacagcctgccacgttttccggcaacgccccagttttttgcagttccattggctgctaacgatgaaaacgcgtctacatatgcatttgtaggtccggcgagatatgcgtggaaagaagaggatattttatatgtggggacaacatttacgaatgttggtgattatcgtcatgacgtgccagccatttcgtcccgccgacttgatgatttaaactatgctgaattttcaatacagcagtcaattataaatatcgatgtaaaatatcgggatcattttctagtcgattatatttacggctttaattcttctgaatatgcgtacttcataattgttcaaaaaaaatcacatttagctgatgaggccggttatgtaacacgcttggcacgcatttgcattacagatcctaattacgacagctatactgaaataactgttcaatgcactgcaactgaaaacaatgttgactacaatattgtaagggatgcgaaagtaactccagccagccacaaattggcgcaaaaaatgggcataaaaaaagacgatcacgttttagtaacggttttttcgccctcaagagaaataagtaatcagccagaaagtaagtctgctatgtgtatatatagcattaaagatattgaagacatgttcattgaaaatatccatctgtgttttaacggaaccacaaaagatcgaaatttgggctatatatccggcaccattaatgatggcagatgtccaatagttggttcgctcggtaacatttacaacttttgctctgtgggacttaaaataagcggagtatccccaatcactgcacacgcactttttcattttgataatgtttcagttacgtcagtcacagcaacttcaacgactgatcagcagcattctcttgcatttcttggaacgaacatgggagtaatcaaaaaagttttattatctggccaaagtccgggcgagtacgaggaaatagttgtggatgctggaaatcgtatactaccaaatacaatgatgtcgccaaaaaaagattttctttacgtactttctcaacgaaaaataactaagcttagaatcgaacactgttctgtgtacacgaattgttccgcttgcttagagtctcgggatcctttttgtggatggtgttccttggagaagcggtgcactgtacgatcaacatgccagcgagatacatctgcgtcgagatggctttcattaggtagtggacagcaatgcatagaatttgaatctattatcccagagaaaataccaatttctgaattatcgcacctgcatttaataattcgaactttgcccgaaccttttaatgcaaaataccgatgtgtttttggaaattccacccccattgatgccgaaattctggaaaacggactcggatgtgctactcccccattagatgaaagaccattaataccaacaaacactgatcatattttggtgccattgtcagtaagaagttcggagacaaataaggattttgtatcaaggaattttgctttttttgactgctcacatcatggaaattgccaggagtgtctacaaagttcctggggttgcaactggtgtatttttgataataagtgcgttcacaagtctttgcaatgccgtaacatagaaaatgctgtaagtactgttggtcactgcccccacttaaaaaaaaatcgtccggaaatacttctacccgtaagagtgccaatagaaattcggctagagattgaaaatttaccaaaacccaagagcgcacatgctggttttttatgtacaatacatattgaagctgctcagatgctactccctgctcacgttgagtcaaataaaattgtagtttgcgaaaaaacaccatatttctacgagattaatacacatgaatatcaggcgaaggttgtagttacatggaacttccag

SEQ ID NO: 25482 - protein, 816 aa, DROSOPHILA
MLRKELYCANIIHVLHVLCIIIILGSQHYCVNCIEELPAQALSPLNDIVAQFNLPSIPVQSTASSYGNRSIGNNIESVRDSQSKNYFTHMSFDFMHNVLFAGATNKILKLNENLRVLAEAVTGPLHDSPQCHAGGCPEDIETSLVNNFNKILVVSYAHDGILIACGSIRQGACEIYSLPRFPATPQFFAVPLAANDENASTYAFVGPARYAWKEEDILYVGTTFTNVGDYRHDVPAISSRRLDDLNYAEFSIQQSIINIDVKYRDHFLVDYIYGFNSSEYAYFIIVQKKSHLADEAGYVTRLARICITDPNYDSYTEITVQCTATENNVDYNIVRDAKVTPASHKLAQKMGIKKDDHVLVTVFSPSREISNQPESKSAMCIYSIKDIEDMFIENIHLCFNGTTKDRNLGYISGTINDGRCPIVGSLGNIYNFCSVGLKISGVSPITAHALFHFDNVSVTSVTATSTTDQQHSLAFLGTNMGVIKKVLLSGQSPGEYEEIVVDAGNRILPNTMMSPKKDFLYVLSQRKITKLRIEHCSVYTNCSACLESRDPFCGWCSLEKRCTVRSTCQRDTSASRWLSLGSGQQCIEFESIIPEKIPISELSHLHLIIRTLPEPFNAKYRCVFGNSTPIDAEILENGLGCATPPLDERPLIPTNTDHILVPLSVRSSETNKDFVSRNFAFFDCSHHGNCQECLQSSWGCNWCIFDNKCVHKSLQCRNIENAVSTVGHCPHLKKNRPEILLPVRVPIEIRLEIENLPKPKSAHAGFLCTIHIEAAQMLLPAHVESNKIVVCEKTPYFYEINTHEYQAKVVVTWNFQ

SEQ ID NO: 25483 - DNA, 3446 bp, DROSOPHILA
gtaggtgtctcaaattggatgcacttctaggtgtcggcttatccgtcaagcgccctttttttgctggttcgagcacttgcctgtatcaaaacatcaagaggtgggtgttagaacaaacccattttattgatacgctacaagtaacacgtaatatactgccaacaattaattttatgaaaaacaccaaccaatcgtcgaaattgtgacacgtcaattatcttcttcttcgcgacccagtcagtgttgccagcgttggcagatgtgcatacactgggaaccataagttttcaaaagtacacacatgaatatgaatgaattatcatgctctccagtcttctttatatagttaaatatacagattttacgtgatatttttgaatatatttaatcttcgtcaataatattcgaaaattgagttggtaaatgtatttctacgaacacttttagtgaccactgtaatcgtagttttacagcactggacaaagtgcattctattcacggtaacttcgctttgtttattttctgtaataccatggaaaatatataaataagtgacaaagatgacactggcacaccgggcgctcttcacttggtttatcgtcctggtcttcctgattcttctgtgtctccgcctggacccacgcaccacctggaattggttcgtcacctttacgccactctggttcttcgatgtgatcattatcatctacgtgatcattaaatttatccgcaagtggcggaacctaacctgcctgacggatctcctgttcctctacaaatggaacattgccggcgtcctgctgaccatcgcctcccaagtgatgatctgcctaacgctggagtacccgcaacagattcccatatacgtgaccgttgccccggtcatcctgctgctgagcaccgccatcttctatgttggcagcaggctgggaaaacgagagggctggatacagtaatattaagcatatattgtaggattaggtgtacataaagtgaaaactcaaaagccgtatttgctttgggtggcccgacgggtctgccggttggccgaccacatggcctgcagctcggcttcgttggccttcgccttgtgcgccaggtaggtgatctggtgcttgcgccgagtccctgccaccggctcctcgtccgtcagcacgccggtcggttggaaggtggtggacgaagccagagccgatcgcatccattcctcgcgatcaggtagcacctgagacccagatatgtcgatcacctgcatctccttggcctccttccgccggcgcttggcatttttgcccaccaatgcgtccatggcctctgcgtttaactgttgctcatggtagcgcttttgtgcaatctgagactgctcttcctgaagtcgggcggcttctgcttcggctgcttccttctcggctacctcctctaggtacttgctactggcttccaccatcttggccgctcgcttggccactagagcgctaatctcgttgctgctcacctcaggcagcttttgctcggaattcagggagaaaaagtctccagtgccatcttcgtcatcatcttcactatcgctggcatttaccagcgaagtgggtttacttataggtttggattttgttgacttcaaagcgtcttttgtctcaggattcttcttgtgcccggccttagggccatctacgccttcggtgttgtgtgcagctcgtcgctgcttaactgtatcgggaacaaaagctggtgctgctcgaggctgcgcaggattattgcttagactggaagcaagagtagtgctggctgatgggtaggctaccgcggatgaagagttcttggagaagttgcgctccgactttgcttggggcagcagactcaacaatcccgatcccttgggtacattgggcttatcaactttgttcttagccctgtcagctttctcctggtctacatctgagaaatctcttagtgaaggaatgctgatttttacttttcccttgactggcggcggtggaggtttctctatttctacgggcagcgcctttttgtgcagaaactcatcgtctttctcctctacaatggcttttcctttcgctgctgttcgtggcatgggcaggttggcaaaggcggaagtaacctggttgtccacatcctcattttccagatccttagcgggagcagtgacttttggtttgggtaaggctaatagcagtcttccgttgggcggctttaactcctgaagggacacttcctggggaacgtagtcgtcatcttcatcactaatgtgaccactggttgattcccgagctagatacgcttcacttggtgtgctcggcttggcttggggttttattacttccacttgtggtacagaattttcctcttcgttctccgaatcttcatcagaactggcagcataagcaacaagcgacatgtttataaaattgctaaagttaaacaatacaatacacaacagctgtttaatgtgcccggactctagagttgtcacctgcttgggctgccatggttggcaactccctttgcttaagcgctgtgctaaccaacactgttaaaattaccgctaaaacgtaatttcgaatttaaacttaaaattatatagtgcgttcaattcgttcgttttatttatgatagcattatacctgcaatcctcaaagtataatattcggagctgtaaaaaccctacggattataaaacaaacctcaaataggatacttataagtgctatacctgatccttattgtgtccagatggtttccatccttgattaccaggcgacaattaggggattcgttaggtagcccaatcgctcccgattacctgttctacaactttttttttttgtttaaataaggcggtcaattttaacattgatcagtacaactatatctttcggagaatacagttataacattagacatgcatcatcaccagaatctcggagacgcggccgccatgaatggaatgatcccgccatacgaagccatggctatgtacgagcagcccaagcccagattcatcttcaagatgccccgcgtggtgcctgaccagaggtccaagttcgatagcgacgagctcttccgccgattgagtagggagagcgaggttcgctacacaggataccgggaacgtgcaatggaggagcgcaggatgcggtttgtcaacgactgccgcaagggctatgcggagatatcgatggtagcttcaggaactaatctgcagctctacttcaacgccaaccacaatccgtacgcccaggagcaggattgcgatttcgagcgggagcggggcaaagttcatttgcgttctagtttcatcatgaacggggtgtgcgtccgcttccggggctgggtggatctggaccgactggatggcgctgcctgcctggagttcgatgaacaacgagcccagcaggaggatgctcagctgcaggagcagattc

SEQ ID NO: 25484 - DNA, 1446 bp, DROSOPHILA
ttgtttaactttagcaattttataaacatgtcgcttgttgcttatgctgccagttctgatgaagattcggagaacgaagaggaaaattctgtaccacaagtggaagtaataaaaccccaagccaagccgagcacaccaagtgaagcgtatctagctcgggaatcaaccagtggtcacattagtgatgaagatgacgactacgttccccaggaagtgtcccttcaggagttaaagccgcccaacggaagactgctattagccttacccaaaccaaaagtcactgctcccgctaaggatctggaaaatgaggatgtggacaaccaggttacttccgcctttgccaacctgcccatgccacgaacagcagcgaaaggaaaagccattgtagaggagaaagacgatgagtttctgcacaaaaaggcgctgcccgtagaaatagagaaacctccaccgccgccagtcaagggaaaagtaaaaatcagcattccttcactaagagatttctcagatgtagaccaggagaaagctgacagggctaagaacaaagttgataagcccaatgtacccaagggatcgggattgttgagtctgctgccccaagcaaagtcggagcgcaacttctccaagaactcttcatccgcggtagcctacccatcagccagcactactcttgcttccagtctaagcaataatcctgcgcagcctcgagcagcaccagcttttgttcccgatacagttaagcagcgacgagctgcacacaacaccgaaggcgtagatggccctaaggccgggcacaagaagaatcctgagacaaaagacgctttgaagtcaacaaaatccaaacctataagtaaacccacttcgctggtaaatgccagcgatagtgaagatgatgacgaagatggcactggagactttttctccctgaattccgagcaaaagctgcctgaggtgagcagcaacgagattagcgctctagtggccaagcgagcggccaagatggtggaagccagtagcaagtacctagaggaggtagccgagaaggaagcagccgaagcagaagccgcccgacttcaggaagagcagtctcagattgcacaaaagcgctaccatgagcaacagttaaacgcagaggccatggacgcattggtgggcaaaaatgccaagcgccggcggaaggaggccaaggagatgcaggtgatcgacatatctgggtctcaggtgctacctgatcgcgaggaatggatgcgatcggctctggcttcgtccaccaccttccaaccgaccggcgtgctgacggacgaggagccggtggcagggactcggcgcaagcaccagatcacctacctggcgcacaaggcgaaggccaacgaagccgagctgcaggccatgtggtcggccaaccggcagacccgtcgggccacccaaagcaaatacggcttttga

SEQ ID NO: 25485 - protein, 472 aa, DROSOPHILA
MSLVAYAASSDEDSENEEENSVPQVEVIKPQAKPSTPSEAYLARESTSGHISDEDDDYVPQEVSLQELKPPNGRLLLALPKPKVTAPAKDLENEDVDNQVTSAFANLPMPRTAAKGKAIVEEKDDEFLHKKALPVEIEKPPPPPVKGKVKISIPSLRDFSDVDQEKADRAKNKVDKPNVPKGSGLLSLLPQAKSERNFSKNSSSAVAYPSASTTLASSLSNNPAQPRAAPAFVPDTVKQRRAAHNTEGVDGPKAGHKKNPETKDALKSTKSKPISKPTSLVNASDSEDDDEDGTGDFFSLNSEQKLPEVSSNEISALVAKRAAKMVEASSKYLEEVAEKEAAEAEAARLQEEQSQIAQKRYHEQQLNAEAMDALVGKNAKRRRKEAKEMQVIDISGSQVLPDREEWMRSALASSTTFQPTGVLTDEEPVAGTRRKHQITYLAHKAKANEAELQAMWSANRQTRRATQSKYGF

SEQ ID NO: 25486 - DNA, 11133 bp, DROSOPHILA
aacgcaacgcaaataatcaaaacaaataagaaacgcaactcgtgtgcgtgtgtagtgtgtgtgcagagctaaaacctagcgaaggaaaggcaaaaacccgtggaaaaagcgaattcaaacgggtttactcgaagcctcctcacccgataccattttccacctacacttgcaaaaaagcgacagcgcgcgagagggacggcgcgagtgagcggagagtgggagagcgcagtgcaagtgagtgggagcgagagcgctgacaaagccagcgcaacatagcgaaaatcgcaaccaaatcgaaatcgaaattcaaccaaatcgaagattctggcgaacaaaggcgactaacaacaacaactgcagcagcggcacgtctcgtcttggttgcgctctcttttgttttcgtcccgtgttttaacaagcggcgaaacgggcgctgagtaagcgccagaaagagtgcaaaaaaaaggcgaaggaaagaaagaagccaaggagcaacgaactgtgtttgcggtgtgtgctctgcgtgcgaaagggtaagctctatggtctctcatgctctcgctctggaagtaggccggaaccgagatttgtttgctaaattatgtttaattgcacagcgggtttgtaaatctgtgattttgtttgtagaaaatacgcattgtatcaaagaaatatttttgtcggttctgtcaaattcgacgtgtgggagtgggagggaagttcagctagtcatgttgtcccgctctatatcgcaaacagcgttgcatttgtcgtcggcaggtcatcgtggtccgttttctctttttgtcggcatcgatgcatagagtccgtgttaatttccgtttaatcgctaaatagcacgctctctaattgtttaataattgccaggcgactgccacccccggaattagtttcactcggcggtctggctggatcccaacggaccaggtggcaacgccgcgctccacaccactcacgcacgcaatacattcgaaaagtgagaagtggtagaggaagaactcgaggaagaagaattagcggcaaactttatgttggacggtgaaaagcagaatcaaaagatatcaatttccgcgaagttaacagttaaataaccaacatacaggcggccaagtgtgccagcagaccgcgaaacattcgaagtaaacaaattcaagcgttttccattcagtttatcatcgctgcccaacaaacgaaactccccgagtgtattgctgtgtgcgtgcgtgctgtttaaacggtatattttactcgtctctcctctttgtttgcctttgccagccactgtgccatgcaaaattaataaaaggatacggctgtaaaacaaaaggtggtcaaaaaaaaaaattgcactcgtcgattaaataataactatcaaatcctctcggtttctgcgaacgtaagtgtgtgtgtgtgcgtgatgtgtgcgcctgtgcctgcgtggtgttagtgtgcgttgtgcttgtgaatggttgttattacaaaaaggagacatagaattgttgccaagcgtttagattgtcttgtactccccccacttgcatctgtcaaattggttacattttaaatgccggcctttgttgttgtcgctcttgttgcgaggattttactggccccgttttttctattgttgctgtagttgtcagccattgttcggccgccccttcacgccccctgccgcaattattacaagacgccaccgcaaaaaattctttcaatgcgttgccgcttctgccgctgctggcgctggtgtgtgtgtgtgggtaaatctatctagctgtcccgcttccgctgtcacccgcccaaggcagcctctcagttgcgtgtgctgcgaggcactggctgtcctgctcgcaccaaacattgcctgcattcagtgtcggatcaaaggggggagcgaaactgggaaatagttgccccaaacgttttcgtaataaacgcaatatcaacaaaataccaaatgattctacaaacagtttcgaatggtagtagtcgaatggaattacactctagttgttactttaacgaagcattaagaacttgaacgtatttcgcaacagcatgtgttggaaaactaccaagaaacttctttagtttcagtggaaatgaaatatcaaaagcatttctactaaaactcggtttagttgaaacccatacctattattgtttgaagaggttattttccaaattatttgcaatatctttctaagaagaaccaattttcgctacagatccacctctgtaagcgttagtggtgcggatcggttgggggtggctaaatagaggagttcccggacacacaataaccagcgtgttgaaaacaatttgtcgggagcaccacccacttgcaactgactagcctcgcctcgctacgcctgcacctatactcaattaaatgcctatctacgcttttgtattttgcagcccaccagaaagactgaaacaaggagcttcggcccaaaagcgatcccagctccttaaactcattctcgtcaagaaccacagccacatcctagcccatcctccagcgcagcgggaagacgaggagcgcggcggtggcgagaaggaagctaacgctaatgaggatctattggcagcatgagtacactggggggaagtaggggagagcgaaatgccaagcccaaattcacagcgttagatataaatcgcatgtacaagaatagccgcgtaagtagcgagcccctagacctagatctagatctacatctagatcttgatagatccaaacctatctgatcgccaacttgttcttattgtttgcagggcgagtcaagtgaaccatctgcacaaaagaatcaagtgccacgtaaacatggaatgcaaatcttgggcaaagtgccgtccgctaggcgaccaccagccaatttgccatccctgaaggccgagacccacaccagcagcaacaacaatctcttagtctcagtcgaaggtgggtgttctacgattttatcttattgaaagcgtgtgtactaagatgtacctttaactgggtgaattttccattttaggagccacatctggtggggcgggcgcaggcggagcagcgggatctggcgcggcaggaaccaacactagccacaacaacaccactgcccacagcggaagttcaggaacgagcggcggagcgggatcaggcggcggaggaactgcgtcttcatctgctggtggccatctatcccagcagctgactcacagccagcatcagcacaataataacgtcgctctcggccctaacgccggaaagtttgtcaacagcaacaacggcagcagcaacaacaacgccggcagctcaggcagcggcaacaagaacttcaaattaatcaacaactccgtgggcagttccggcggaggcggacaaggagggtcgggcggcggcggatcgtcaggagtaggaggtggatcagggtcaggatcgggcggacactcagtcaactcacccaagacatggtctgcaattaccacaggacacgagcggggctcgggcggtcagaactatggacgccagcaacagcaggtggtcccccattatcagagtccacagttccagtacgaatttcccacgctggacggcacagttggcagcggcgccggcggaggatcgggagcgggtgtgggttcaggatctggagcgggcaagagccattaccagaatcaggtgcaccatgccggccaccaaaaccatcaccagcatcagcagcaccaccagcagcatcaacagcaccaccaccagcagcaacagcaccatcgggactaccaccatggccacgggcgccagtatggacaccactcgcatcgcgactacagagatggcagcgacgacgtcggcggcgggtccgcggatctgggcgagctcagccttcggccacagaacgacacggccgcctggttgcagcagcaggagaaggcggccaaggtggcagcagctgcggcagcggaccagggcctcaacctacagggcccgggccaccatcagatgggcggtaatggcggagcaggaggagggtcgggcggagctgtgcccctgcccatactatcgctgatgccctcgttcatgcgtagcggagctccgatgcccgccagtggagcgacagcggccagcatcttggccggcggatcgttggacacttctgcgttgcccaacgctccctaccagaacggaatcctgggtgctcggtctgcctcgccagctgtggtgggcagtggaagcttcagggcggccactgccattcccaagcgaccaccgacctcctcgtcgcccccacaatctggcctaggcattggaggatcacccactcccccacaatcccagcagcaggccaacggaggcgctggcggagccgggcgcaaggataaggactacgtggtggagccggaggtggcccaaatgcagcgtcctatcatacgcgaagaggacttggagcgcctcaacgccatcgccaaggacgatagctggaccaagcaggacgacattgacttcacgaagaaactagcattctcggacgatgagtccactccggaagagcaccaaggccagggcaagcagcacagctccgcccaactgcaggcgcaaggatcctcctcctcaaccgatcaacgaaagctgtccgcttccacaaccagttggcagcgcggcaaggagagcaccgatcgcgaccagccatcggaaggcattcaggatcagcagcagcagcttcagcagcaacagcagcagcaagaggttcgccaacagaatggccaccgcggtagctctggcaacgttggagcaccagtggccggtggaattgccttggatgccagcgtgtacgagcgagtaaagcagcgcaaggaggaggaagagcgtcgcgagatggaacgcaagcaggcggctgctaagaagttgcaagaactggaaatgaagatgaatagcaaaaaggcagcggctgcggctctggctggagccgagggcggcgtgtcctctgcctcagtcccgttgagcaatgaggtgccacccacgtccgcaccgctaggcaatgccagcgaagatgagggcggaggccaaggcggcggcggagggttgaatcgtcgaccccggggaagcatctctagcttgggaagcggcgtaacacccacgggaggagctggcggcggcggcggaggagtttcgtcatcctcgtcagcaggcggcgactatggtcaaaagaacttccttacccatttccaatcaaatttaccaccacgtttccagcgccagcaacagcaacaacagcagcagctgccgcgcttggagaagagcgcctcggcaagcagtgcattcgatagcaattcccgctacctccagaagggaggagtaagcggaggaggcggtggtgtaagtggaggagcgcaagccaatgctggccagggtcgcagcatctccggcggttatgtgcagcgtggtgcaagtgtcggaggaagcagcggatacggacgaaatcgtcacgacagcagcagtgctcgggaggatcaggatctggatcagcagcgtttcacccgtggccaggactatcggcaggcacaagctctgccgcgcagcatatctgagaactcgcaccgtaagaccagcgtctcatcggctggcgacgatgtgctgggtggctcgtgctcctcatgggcggagcaaacggatgccgagcagaaggtgcaccatcggcaccgcgaggagagcttctcctcgtcgcacagccatgactcggcagtgcaaataaagatcctgcaacgcccggcccgacagccgagcctcagtgaggagtcctcgacccagcagaaacagctgcccgcctcgccgcagcagcaaaagacgctgacgacagatcccatgcctacccagattctgcgacgcagcgtggatatcgataagtccggtgatgagcgcgcggaggacaagtctgcattggaatctgatgacaaggcgaagtcggctggcaaggtggaggaggacaagagcggcaataagcgggtaagtcccaggagcggagctgcttgcggaggtcgaggtggccgtggttatgccggcagctctggtggatcatccgtcggatcgggcagtagctaccgcggccagagaaatgccagcgattggggaagcagtcgtggaagcggcggcgccggcggcaggcgctactacggcagcggcggtgagcaatcggagcactccgaggatgtggacgaggagtgttacagcagtggaggaggcggagccgctcgtcgcagcccaaaggaatcgggcaacggtgcgcccaattccggtgcgtcggcaaacaaggcaggattctcgccacgcggcgaaccatctagacgtggtcgaggcggcctctctagcggaggaggcgcctctgcttcttgttaccgtcgacagcccgtgggcactggatccgctggtggatctggttcgggcggatcgggccgcagctatggcagacttggctacgaggaatatggcaagcaacagcgaacttccgagtcggagacggacctagacaagaccaagcagaaccagctggcactcagcgccggcctgcacaaaccaagcaaggatgacaaggatttgcctgcgcttgggggcgaggagaaggacaagactgccgccctggcgcctgcccataacactgccctgctagcaaaggatgaattacagaaagatgcagcgggtcgcctgccgttgcctcccggcctcgcagcacctggctctgcagtgggatccgttactgccacatcctcatcggtcgtagttcccggtgcagcggacaagaagaagattgaatcctgcgccgttgtcggcggtgagaaggtgacgggtagcaagttgcccgccattggggaaaagacttcgctcggcgccgttggctcgggtccatcaaccagtcttctactggacgccggcgcacccgtcaacacgattatatttgagaactccacgtacaagcagcaggcagctgccgcttccgtggtaaccaaacccggaacgctctcggtgtcaagcagtggcgccaccatgaccgtggacagcctgtccagcgcactctcccaaatgagtttcggcggcaaggcgacggcggcgggctctggcgatgattcgcaggatatgaaactaggatttagcttcggtgacgatcccaccacacccctcaaggttgtggataacatcgataaaacggccagtcagcagcagcaacagcagcagcaacaacactctcaacagcaacaacaacagcagcagcagcaaaacaattcgacggcggatcttaacatgaagatagccagcgtaaagaaggtttgggagtcagccacgcccatgtccgacggcccatcgccagcacaggtgcagcagcaacagcaacagcagccccaacagcaacaacagtcccaggtgcaggtggcggcgcagcagcaacaacagcaggtggtgggaccgcagcaggcaggtgacgacggcagtggtcacatgagcgccgcctcctttgtggcagccgtggccgcctcacagcatcagcagcaacaccagcaaatgccgcactacgcggtgtcggcggtgcacatgcagagccaccaccaccaacagcagcagcaacagcagcaggcagcggtggcggcagcgcaggcgcagcaccaccagcagcaacaggcacaggcgcaccaccagcaccatgcactttcctcgccgggcccggtgcccggtagtcatggccatggctacagtcatggatcgccgttcgacgctggatcgttggagcaacagttccagcaagaggattatcccagtccacagcagcaacagcaggcgcaccagaagaccaagcagttgcagcagcagcagcatctgggcatgtcaccgccgcccagccagcagcaacagcagcagcactcgcaacagcagcagcaagcacagcaccagcaacaacagcagcaggcccatcagcagcagcaacagcagcagcagccttcattctaccaggcgtcaccgcagttcggcgttggaggcattcccactatccccagtccgccggccgtggtgtacaactcgtcgcagatgccgccaccgtcgcaggggggtaatctgtacgctccattccattcgctcgatcattcgagccgttcgcccgcctactcggcggcggcggccgcccacagctacccgaacccttatgcggcagcagcagcggcggcggcggcagcggccgctggcggaggtcccttcaatgtcaacgtgaacgcatatgcgatgcagactccgcacggcggcagcctaccgcccacagcgcccacaccggacatgtactcgaacctctcttcgcagtttcgattgggcggtggtccgggtcccggacccggtccctttggccagcccagctcgcagcagttaagcaatccgagcaatcatgctgcggtggctataatttcgtcaagcagcaactccatgatgtcgtcaggtgcggccaaaccgccgcagagccagcagacaatcggtgccattggctccaagtcggcaggtagcggtggcggtccaggaccaggacctggtccctatgccaccacccagacgtatatgaatctttatgcggctccaccgccgcaacatccaggacaaggtggaccaccgccgggtgcccatcagctgcagtcgaacagtttctactcgaattcggcgccaggcggtccgagcggaccacagttctacggtggtccgccgccgcagggcaatggtggagcgcagagctatggactggccaccgcggccggcatgtatggcggccatcagggcggaccgcccggctccaatgggccgccgggaccgccgcagtcgcagcacacgatgggcacgttcaacacgccgttcatgaactcgcagctgctgacggcggccagcattaatcagtaccgcggcggaccaacgcctggagcggcttatctcaagggtaaccagggccagacacacatgcaagactcggtaagcgcaggactagatacactaccaccccgaccagaaatcaaaataaattcaagatcactatcaagctaaagcaagattcgaagccagtaaatttcctgaagaagtaatgtatctgatgaaattatccatgagtgtcgtcataatttttgaaacgaattcgtgttattgaatttggctttatgtacgtttaagacgctcaataaatgtcggatacattagtatcaatttgttttcatactttaaaatcattcaaacgtactaaaccggataaaattagaattagccattgatttattctttttatatgctcctaatcacatgctttcattcgcagatgggtcgtcagctgaagagtccgctgagcgctgacatgagcctcggtctggccaagcaggtgcagtcgcagcccagtccaccgcatcacaagaactacggcgcggtaggtttcctttagactcagctcagtcgacttttgccttatacctttcctaattcatccttctttcctcttcagtgggatctgcagaaccaggtgcttcagcagcagcagcagcaatctcagcagcaacagcagcagcaacagcgccaggtcggcggcggcaatggtccgagcatgaacgccttgggcggtcgcggcagtggagcggtgggcagcggcagcggcaacggcggaggaggaggaggaggagctggtgggtcccaagtgggcggcaatggcggcggtaacggcgttggcagcgtgggccaaagtggcggcggcggccagggacgctatcccacgcccattcagcggcccaacaactatccgcagcatccgcaacaacagcagcaacaacagcagcaacagcaacagcagagagagcaggcggcagctgccgccgtggcggctcagcgggcacagaatatgcgacaggtgaccggtgccggcggaggcgtggccggaagtgcaggtggcggtggtagtcaaacaccagtgggaccggccggcggcaatggtggccccggtggcgcaggaggaggcggtggagctggcggtgcagcaggatcaggacccggaaagccctactatgcgaataacgctagcggagcggccgttgcggccaatcgaggtgagtggcatgcgaactgagtgccagatggtcaccacccatcgaccagccgatcccagccacccaccataacaaacccggaataactatgtacgagtacgaaacagaaacacaatgatgcaaattgataacgaaggaggatggccaagagaatgagcaacagctggaggaatgtattgcatccaaaacgagaatatgaacgtaaacagagcaagtcaggagtaaaactatatatgtggaatataatcaagttaccgagcgagacacaggcatccgaataataagcccacaaaatatgtgaaaggggcgatgcgagtagaatagtgctatagctgtttgggggaatccccgtcacaatcgcaaaatggcaactcagctaaatcaccgtagcgaggaggaaattaatttaaatcgcaatttgaaagtaagaaaaaagttaagacgaaagttaagaatcaacaggaaacgagtaaggaatacctaaatgcaagaagaaatatttaacaaaaatgaacagaatacaacaccatgccacaccacaacacacacacacacacacatgcatacatttacatatacatacatacatacagaatagcagattgtattttttgtcaaacaaatttacataataatatattacttttatatacttatgattttttgtagtagtctttctcctttaaacaaatcaagaaaaacaaaacgaacctttggcactgcgtatgctttaatttctttatatataaatattgtttactttttttgcaaccaacaaaaaattaactaataattctaatttatgattatgctacaatatacattatatataccatctatctatcctatctatctatattgatatccatatttctgtgtagacagcgaataagagagagacagacaaacagagagaaagagacagacatagacggtcaaaaagagagggagagagaaagagaacgaacggataaggacgaaaaatagagtttgtttaagctaagcgcaaagttaagttca

SEQ ID NO: 25487 - DNA, 7521 bp, DROSOPHILA
agaagtggtagaggaagaactcgaggaagaagaattagcggcaaactttatgttggacggtgaaaagcagaatcaaaagatatcaatttccgcgaagttaacagttaaataaccaacatacaggcggccaagtgtgccagcagaccgcgaaacattcgaagtaaacaaattcaagcgttttccattcagtttatcatcgctgcccaacaaacgaaactccccgagtgtattgctgtgtgcgtgcgtgctgtttaaacggtatattttactcgtctctcctctttgtttgcctttgccagccactgtgccatgcaaaattaataaaaggatacggctgtaaaacaaaaggtggtcaaaaaaaaaaattgcactcgtcgattaaataataactatcaaatcctctcggtttctgcgaaccccaccagaaagactgaaacaaggagcttcggcccaaaagcgatcccagctccttaaactcattctcgtcaagaaccacagccacatcctagcccatcctccagcgcagcgggaagacgaggagcgcggcggtggcgagaaggaagctaacgctaatgaggatctattggcagcatgagtacactggggggaagtaggggagagcgaaatgccaagcccaaattcacagcgttagatataaatcgcatgtacaagaatagccgcggcgagtcaagtgaaccatctgcacaaaagaatcaagtgccacgtaaacatggaatgcaaatcttgggcaaagtgccgtccgctaggcgaccaccagccaatttgccatccctgaaggccgagacccacaccagcagcaacaacaatctcttagtctcagtcgaaggagccacatctggtggggcgggcgcaggcggagcagcgggatctggcgcggcaggaaccaacactagccacaacaacaccactgcccacagcggaagttcaggaacgagcggcggagcgggatcaggcggcggaggaactgcgtcttcatctgctggtggccatctatcccagcagctgactcacagccagcatcagcacaataataacgtcgctctcggccctaacgccggaaagtttgtcaacagcaacaacggcagcagcaacaacaacgccggcagctcaggcagcggcaacaagaacttcaaattaatcaacaactccgtgggcagttccggcggaggcggacaaggagggtcgggcggcggcggatcgtcaggagtaggaggtggatcagggtcaggatcgggcggacactcagtcaactcacccaagacatggtctgcaattaccacaggacacgagcggggctcgggcggtcagaactatggacgccagcaacagcaggtggtcccccattatcagagtccacagttccagtacgaatttcccacgctggacggcacagttggcagcggcgccggcggaggatcgggagcgggtgtgggttcaggatctggagcgggcaagagccattaccagaatcaggtgcaccatgccggccaccaaaaccatcaccagcatcagcagcaccaccagcagcatcaacagcaccaccaccagcagcaacagcaccatcgggactaccaccatggccacgggcgccagtatggacaccactcgcatcgcgactacagagatggcagcgacgacgtcggcggcgggtccgcggatctgggcgagctcagccttcggccacagaacgacacggccgcctggttgcagcagcaggagaaggcggccaaggtggcagcagctgcggcagcggaccagggcctcaacctacagggcccgggccaccatcagatgggcggtaatggcggagcaggaggagggtcgggcggagctgtgcccctgcccatactatcgctgatgccctcgttcatgcgtagcggagctccgatgcccgccagtggagcgacagcggccagcatcttggccggcggatcgttggacacttctgcgttgcccaacgctccctaccagaacggaatcctgggtgctcggtctgcctcgccagctgtggtgggcagtggaagcttcagggcggccactgccattcccaagcgaccaccgacctcctcgtcgcccccacaatctggcctaggcattggaggatcacccactcccccacaatcccagcagcaggccaacggaggcgctggcggagccgggcgcaaggataaggactacgtggtggagccggaggtggcccaaatgcagcgtcctatcatacgcgaagaggacttggagcgcctcaacgccatcgccaaggacgatagctggaccaagcaggacgacattgacttcacgaagaaactagcattctcggacgatgagtccactccggaagagcaccaaggccagggcaagcagcacagctccgcccaactgcaggcgcaaggatcctcctcctcaaccgatcaacgaaagctgtccgcttccacaaccagttggcagcgcggcaaggagagcaccgatcgcgaccagccatcggaaggcattcaggatcagcagcagcagcttcagcagcaacagcagcagcaagaggttcgccaacagaatggccaccgcggtagctctggcaacgttggagcaccagtggccggtggaattgccttggatgccagcgtgtacgagcgagtaaagcagcgcaaggaggaggaagagcgtcgcgagatggaacgcaagcaggcggctgctaagaagttgcaagaactggaaatgaagatgaatagcaaaaaggcagcggctgcggctctggctggagccgagggcggcgtgtcctctgcctcagtcccgttgagcaatgaggtgccacccacgtccgcaccgctaggcaatgccagcgaagatgagggcggaggccaaggcggcggcggagggttgaatcgtcgaccccggggaagcatctctagcttgggaagcggcgtaacacccacgggaggagctggcggcggcggcggaggagtttcgtcatcctcgtcagcaggcggcgactatggtcaaaagaacttccttacccatttccaatcaaatttaccaccacgtttccagcgccagcaacagcaacaacagcagcagctgccgcgcttggagaagagcgcctcggcaagcagtgcattcgatagcaattcccgctacctccagaagggaggagtaagcggaggaggcggtggtgtaagtggaggagcgcaagccaatgctggccagggtcgcagcatctccggcggttatgtgcagcgtggtgcaagtgtcggaggaagcagcggatacggacgaaatcgtcacgacagcagcagtgctcgggaggatcaggatctggatcagcagcgtttcacccgtggccaggactatcggcaggcacaagctctgccgcgcagcatatctgagaactcgcaccgtaagaccagcgtctcatcggctggcgacgatgtgctgggtggctcgtgctcctcatgggcggagcaaacggatgccgagcagaaggtgcaccatcggcaccgcgaggagagcttctcctcgtcgcacagccatgactcggcagtgcaaataaagatcctgcaacgcccggcccgacagccgagcctcagtgaggagtcctcgacccagcagaaacagctgcccgcctcgccgcagcagcaaaagacgctgacgacagatcccatgcctacccagattctgcgacgcagcgtggatatcgataagtccggtgatgagcgcgcggaggacaagtctgcattggaatctgatgacaaggcgaagtcggctggcaaggtggaggaggacaagagcggcaataagcgggtaagtcccaggagcggagctgcttgcggaggtcgaggtggccgtggttatgccggcagctctggtggatcatccgtcggatcgggcagtagctaccgcggccagagaaatgccagcgattggggaagcagtcgtggaagcggcggcgccggcggcaggcgctactacggcagcggcggtgagcaatcggagcactccgaggatgtggacgaggagtgttacagcagtggaggaggcggagccgctcgtcgcagcccaaaggaatcgggcaacggtgcgcccaattccggtgcgtcggcaaacaaggcaggattctcgccacgcggcgaaccatctagacgtggtcgaggcggcctctctagcggaggaggcgcctctgcttcttgttaccgtcgacagcccgtgggcactggatccgctggtggatctggttcgggcggatcgggccgcagctatggcagacttggctacgaggaatatggcaagcaacagcgaacttccgagtcggagacggacctagacaagaccaagcagaaccagctggcactcagcgccggcctgcacaaaccaagcaaggatgacaaggatttgcctgcgcttgggggcgaggagaaggacaagactgccgccctggcgcctgcccataacactgccctgctagcaaaggatgaattacagaaagatgcagcgggtcgcctgccgttgcctcccggcctcgcagcacctggctctgcagtgggatccgttactgccacatcctcatcggtcgtagttcccggtgcagcggacaagaagaagattgaatcctgcgccgttgtcggcggtgagaaggtgacgggtagcaagttgcccgccattggggaaaagacttcgctcggcgccgttggctcgggtccatcaaccagtcttctactggacgccggcgcacccgtcaacacgattatatttgagaactccacgtacaagcagcaggcagctgccgcttccgtggtaaccaaacccggaacgctctcggtgtcaagcagtggcgccaccatgaccgtggacagcctgtccagcgcactctcccaaatgagtttcggcggcaaggcgacggcggcgggctctggcgatgattcgcaggatatgaaactaggatttagcttcggtgacgatcccaccacacccctcaaggttgtggataacatcgataaaacggccagtcagcagcagcaacagcagcagcaacaacactctcaacagcaacaacaacagcagcagcagcaaaacaattcgacggcggatcttaacatgaagatagccagcgtaaagaaggtttgggagtcagccacgcccatgtccgacggcccatcgccagcacaggtgcagcagcaacagcaacagcagccccaacagcaacaacagtcccaggtgcaggtggcggcgcagcagcaacaacagcaggtggtgggaccgcagcaggcaggtgacgacggcagtggtcacatgagcgccgcctcctttgtggcagccgtggccgcctcacagcatcagcagcaacaccagcaaatgccgcactacgcggtgtcggcggtgcacatgcagagccaccaccaccaacagcagcagcaacagcagcaggcagcggtggcggcagcgcaggcgcagcaccaccagcagcaacaggcacaggcgcaccaccagcaccatgcactttcctcgccgggcccggtgcccggtagtcatggccatggctacagtcatggatcgccgttcgacgctggatcgttggagcaacagttccagcaagaggattatcccagtccacagcagcaacagcaggcgcaccagaagaccaagcagttgcagcagcagcagcatctgggcatgtcaccgccgcccagccagcagcaacagcagcagcactcgcaacagcagcagcaagcacagcaccagcaacaacagcagcaggcccatcagcagcagcaacagcagcagcagccttcattctaccaggcgtcaccgcagttcggcgttggaggcattcccactatccccagtccgccggccgtggtgtacaactcgtcgcagatgccgccaccgtcgcaggggggtaatctgtacgctccattccattcgctcgatcattcgagccgttcgcccgcctactcggcggcggcggccgcccacagctacccgaacccttatgcggcagcagcagcggcggcggcggcagcggccgctggcggaggtcccttcaatgtcaacgtgaacgcatatgcgatgcagactccgcacggcggcagcctaccgcccacagcgcccacaccggacatgtactcgaacctctcttcgcagtttcgattgggcggtggtccgggtcccggacccggtccctttggccagcccagctcgcagcagttaagcaatccgagcaatcatgctgcggtggctataatttcgtcaagcagcaactccatgatgtcgtcaggtgcggccaaaccgccgcagagccagcagacaatcggtgccattggctccaagtcggcaggtagcggtggcggtccaggaccaggacctggtccctatgccaccacccagacgtatatgaatctttatgcggctccaccgccgcaacatccaggacaaggtggaccaccgccgggtgcccatcagctgcagtcgaacagtttctactcgaattcggcgccaggcggtccgagcggaccacagttctacggtggtccgccgccgcagggcaatggtggagcgcagagctatggactggccaccgcggccggcatgtatggcggccatcagggcggaccgcccggctccaatgggccgccgggaccgccgcagtcgcagcacacgatgggcacgttcaacacgccgttcatgaactcgcagctgctgacggcggccagcattaatcagtaccgcggcggaccaacgcctggagcggcttatctcaagggtaaccagggccagacacacatgcaagactcgatgggtcgtcagctgaagagtccgctgagcgctgacatgagcctcggtctggccaagcaggtgcagtcgcagcccagtccaccgcatcacaagaactacggcgcgtgggatctgcagaaccaggtgcttcagcagcagcagcagcaatctcagcagcaacagcagcagcaacagcgccaggtcggcggcggcaatggtccgagcatgaacgccttgggcggtcgcggcagtggagcggtgggcagcggcagcggcaacggcggaggaggaggaggaggagctggtgggtcccaagtgggcggcaatggcggcggtaacggcgttggcagcgtgggccaaagtggcggcggcggccagggacgctatcccacgcccattcagcggcccaacaactatccgcagcatccgcaacaacagcagcaacaacagcagcaacagcaacagcagagagagcaggcggcagctgccgccgtggcggctcagcgggcacagaatatgcgacaggtgaccggtgccggcggaggcgtggccggaagtgcaggtggcggtggtagtcaaacaccagtgggaccggccggcggcaatggtggccccggtggcgcaggaggaggcggtggagctggcggtgcagcaggatcaggacccggaaagccctactatgcgaataacgctagcggagcggccgttgcggccaatcgaggtgagtggcatgcgaactga

SEQ ID NO: 25488 - protein, 2309 aa, DROSOPHILA
MSTLGGSRGERNAKPKFTALDINRMYKNSRGESSEPSAQKNQVPRKHGMQILGKVPSARRPPANLPSLKAETHTSSNNNLLVSVEGATSGGAGAGGAAGSGAAGTNTSHNNTTAHSGSSGTSGGAGSGGGGTASSSAGGHLSQQLTHSQHQHNNNVALGPNAGKFVNSNNGSSNNNAGSSGSGNKNFKLINNSVGSSGGGGQGGSGGGGSSGVGGGSGSGSGGHSVNSPKTWSAITTGHERGSGGQNYGRQQQQVVPHYQSPQFQYEFPTLDGTVGSGAGGGSGAGVGSGSGAGKSHYQNQVHHAGHQNHHQHQQHHQQHQQHHHQQQQHHRDYHHGHGRQYGHHSHRDYRDGSDDVGGGSADLGELSLRPQNDTAAWLQQQEKAAKVAAAAAADQGLNLQGPGHHQMGGNGGAGGGSGGAVPLPILSLMPSFMRSGAPMPASGATAASILAGGSLDTSALPNAPYQNGILGARSASPAVVGSGSFRAATAIPKRPPTSSSPPQSGLGIGGSPTPPQSQQQANGGAGGAGRKDKDYVVEPEVAQMQRPIIREEDLERLNAIAKDDSWTKQDDIDFTKKLAFSDDESTPEEHQGQGKQHSSAQLQAQGSSSSTDQRKLSASTTSWQRGKESTDRDQPSEGIQDQQQQLQQQQQQQEVRQQNGHRGSSGNVGAPVAGGIALDASVYERVKQRKEEEERREMERKQAAAKKLQELEMKMNSKKAAAAALAGAEGGVSSASVPLSNEVPPTSAPLGNASEDEGGGQGGGGGLNRRPRGSISSLGSGVTPTGGAGGGGGGVSSSSSAGGDYGQKNFLTHFQSNLPPRFQRQQQQQQQQLPRLEKSASASSAFDSNSRYLQKGGVSGGGGGVSGGAQANAGQGRSISGGYVQRGASVGGSSGYGRNRHDSSSAREDQDLDQQRFTRGQDYRQAQALPRSISENSHRKTSVSSAGDDVLGGSCSSWAEQTDAEQKVHHRHREESFSSSHSHDSAVQIKILQRPARQPSLSEESSTQQKQLPASPQQQKTLTTDPMPTQILRRSVDIDKSGDERAEDKSALESDDKAKSAGKVEEDKSGNKRVSPRSGAACGGRGGRGYAGSSGGSSVGSGSSYRGQRNASDWGSSRGSGGAGGRRYYGSGGEQSEHSEDVDEECYSSGGGGAARRSPKESGNGAPNSGASANKAGFSPRGEPSRRGRGGLSSGGGASASCYRRQPVGTGSAGGSGSGGSGRSYGRLGYEEYGKQQRTSESETDLDKTKQNQLALSAGLHKPSKDDKDLPALGGEEKDKTAALAPAHNTALLAKDELQKDAAGRLPLPPGLAAPGSAVGSVTATSSSVVVPGAADKKKIESCAVVGGEKVTGSKLPAIGEKTSLGAVGSGPSTSLLLDAGAPVNTIIFENSTYKQQAAAASVVTKPGTLSVSSSGATMTVDSLSSALSQMSFGGKATAAGSGDDSQDMKLGFSFGDDPTTPLKVVDNIDKTASQQQQQQQQQHSQQQQQQQQQQNNSTADLNMKIASVKKVWESATPMSDGPSPAQVQQQQQQQPQQQQQSQVQVAAQQQQQQVVGPQQAGDDGSGHMSAASFVAAVAASQHQQQHQQMPHYAVSAVHMQSHHHQQQQQQQQAAVAAAQAQHHQQQQAQAHHQHHALSSPGPVPGSHGHGYSHGSPFDAGSLEQQFQQEDYPSPQQQQQAHQKTKQLQQQQHLGMSPPPSQQQQQQHSQQQQQAQHQQQQQQAHQQQQQQQQPSFYQASPQFGVGGIPTIPSPPAVVYNSSQMPPPSQGGNLYAPFHSLDHSSRSPAYSAAAAAHSYPNPYAAAAAAAAAAAAGGGPFNVNVNAYAMQTPHGGSLPPTAPTPDMYSNLSSQFRLGGGPGPGPGPFGQPSSQQLSNPSNHAAVAIISSSSNSMMSSGAAKPPQSQQTIGAIGSKSAGSGGGPGPGPGPYATTQTYMNLYAAPPPQHPGQGGPPPGAHQLQSNSFYSNSAPGGPSGPQFYGGPPPQGNGGAQSYGLATAAGMYGGHQGGPPGSNGPPGPPQSQHTMGTFNTPFMNSQLLTAASINQYRGGPTPGAAYLKGNQGQTHMQDSMGRQLKSPLSADMSLGLAKQVQSQPSPPHHKNYGAWDLQNQVLQQQQQQSQQQQQQQQRQVGGGNGPSMNALGGRGSGAVGSGSGNGGGGGGGAGGSQVGGNGGGNGVGSVGQSGGGGQGRYPTPIQRPNNYPQHPQQQQQQQQQQQQQREQAAAAAVAAQRAQNMRQVTGAGGGVAGSAGGGGSQTPVGPAGGNGGPGGAGGGGGAGGAAGSGPGKPYYANNASGAAVAANRGEWHAN

SEQ ID NO: 25489 - DNA, 4274 bp, DROSOPHILA
agccgagcatcagggattgggcgcccagcataacggccttcatgcccgacgagcacaccttgttcaccgtggtgcagcatacattggtgggcagtccggcgaagatggcagcctgacgggcgggggcctgtcccagaccagcagataccacattgcccataatcacctcctggacatcggtcttcgcaattccggccttttcgatggccgcctcgatggcacgggctcccaattgggtagccgtcagtggggccaattgactttggaagctgccaattggtgtgcgggctgccgaaaccaccacaacttcggcgattttggagctgtagttgcgatgggcgctccagcgacgcgtggcctgcagcagtcgggcggacatcttggaatttaattaatttgtattaactagcacagcaatcacacaggtaaatggcaagaatccaatcagaaatcacgccagacctgttgcttgcgtaacaaaccggtaatcggtctatcgataggcaacagctggcgcggtaaaagtgttggcaactgttaaataagattaaagcgactggtaattttctattagttagcattctttaaatgtaatttttaatttttgctgttttaagtatattgcttgaaaactacgctgtaaagatgcaatgctaagtttatatattctttttacaatacccagcactgaaaatgcgtaaattgaacttaacggttacaagcgaacaacaataaataaaaacacgaaaattgaaattttaaacacaaatgtatctcatttcatcaatatttattttaagactaatgcaaattgcacaatgaatggcagctgaaaaaactggaatcttaatgctaataatacgtgtttaaaatatggcattcaaaaaaatttttgcataaaaaaaatgtaaatatttcggaacttattccacatcacaacgctcatagtctccatggttgccatggctcctggactgcacatctttcctgatcaatttgatcagatcaccatctggtcgcgcgttgttagcttctgatggccagtggccaccaccaaagacctccgcatgcggttccgctgcagcgtggaattccgttccctcaccgattgccgcagatgctggcgacgtgctcctccgggtccagaaccaacgactccacctccgcttgcctccctctcggctgcattcatggccgccagcagctcgaaggcttgtttcttctgctcctttgtccagagattggccactggtggaacttctgccggctgttcctgcgtgatcggtggcttgacggccaaaggaggtcgctgcacgcgagttgcagctgcttgggctacctggttgaccgatggcaaggatttggatgtcgccttggatccgcgactcaacccgaaaagcgagagtatagatttcctgcgggtggaggaggcctggctgtcaccggaatcattgctggatacgctcatttgcatgggaacgccagtgggcggaggattcactgccggtttaaccgccggtgggggcatattctcgataccataggtaacaaacttttggggcgacttgaaggtaaccttacgcagagtatttagcgattttggtgccggaagtgtggctaaattgagtttagccaccgtgggcgacgtctcgttgagttcgatagtgcagtaggtgtcatcatggtgcgatttcgctggcttcctaggaggaatgggcggagctatcggctgtctgcaactacaagtgtgtttctcctgctgaagaagtttttcctgcatctgccgctccagcgtttgcacgcgctgttcggccagctgtaactcctgctcccgggtctgcagctcttcgagcttctgctgcaacagggattcttgggcacgaatggcgtggagacgggtctttagtacttcatcgaatatgttttgggtaagagcacgaggactgctaggggcctcctttagaagctcctgatcccttttctgctgctcctgatcctttttacggcgccgctcttccgccagttccacctgcctctcctccgctcgctcctctctccttatactttcataaagagagggatccgacagctgtagtttcttggcaggaaagattttgcgcttggcggagtagaagagttcacttcgcaaatctggagtaaacacaccagtaacgctgagtctcctttgcccatagccttcattgaagctgtactgttccgtaaacatggtgctcgatagctctggatgaactccatcttcctcttcgtcctcgaaaagcctggcacccgaaggcagtgtgtagaaatcctctccagaatcaactagaattgggaacttgccatccaactcgctaatattacgcaccaccagaggatgccgaatgataacctcgatgccaggacgctgttcatgatccactgccagcatgaaggcgatgatctcctgcagatcagtactatagattgccggaatccgactgaactcaccctgggcgatcttctcggacaactggtcaaaggctctgccgcgaaacggcggtcttagggcacacatctcgtataccaaacaaccaacggcccagacatcgctcttccgatcgtatttcctgcccttcaccaactccggactcatgtagtgcggagtgcccacaaaggaggcggcaaagctctgatctcgtcgcagcattctggccagaccgaaatctcccagtttggcattcccggccgcatccaggaaaatatttgctggcttgatatcgcgatgcaagatggttccgttggggattttgttgtggcacacctgaagcgcccggcaaagttggaagagcacccgccagatgtagggctcctcaaaccgctgcctctgggatctcgctcgctggacaatctgggcgagatcgccgccggcacagcactccataacaatgtacaccgacttggcctctcggttcaccagatgatggtagtattgcacaatgttaggatgctggagctgccgcagaacactgatttccgaaaccaaagcgtcgcacttggcctcgtccagttcatcgtagttcattcccttccaggcgaacaattcaccggtgcttttgtcgcgcaccttgtagcaggtgccgaaggatccattccccatcacggccaaaacctcgtaatcctgcagggtcttttgcgaaaagtccatgccggcagattcctctccgctcattttgccttaagtcttttttttactctttgggtattttgggtattccgccgccgattacaaatgatccgcttgctacaaaacccaaacacgatttgagactggtttttgggatgcaggatttctggaattctcattgctacctgcaagaacgggagagagagcaacaacaagtgcgcgagagagaggtttaagtagtgccgctaccccgctaaatagggcggaagaatgaatattctaaaaacaagctagatttgtaatttttacaaaatacattttgcaaatatgcaatctaatgatataattacatacataaacaaatagctatttcatcattaaattaagaaattgtaatatggattaaaatacaaaactatttaaaaaccaatatacaagacaactaccgattaaaattgatagcagtcatttcaacctgaccttcatataaataacctctccataaaaccctttcgcacctgcatgctaatgcccaatttggctattttcccgccgagagacaccagcactgttatgttattgttgcacgtctggatctctcgtttccttccaggaacaaagatcgtgctattaccctctcgctcccaaccacagttcaacggtatccacttgcaaatctctggcatctcaccctctcgctcacgctctcccccgctgtgagagagagaaagcccttgaaaggcgaaaatctggaaaatccgttccatttgatcccactgcgcctgtgtacaaactactgaccattggaaacaatggtctagagaggggcagcacgcccaagaacacaattccagcgattcatcacgctcaattttggaactcgagcccaaaaccgatcttaaaccggaatccaaaaccgagtacaaacccctagccctgagccataaaaataaattagttttgttccattggcatttcaatttgctgccttgtttgttaaagtggaaatgtccttatcggatttcatatttcatatttgaagtgagcgattatccattctgtctaacggtttttactggaagcagttacatagtacatataggcatggtcg

SEQ ID NO: 25490 - DNA, 2274 bp, DROSOPHILA
gatcatttgtaatcggcggcggaatacccaaaatacccaaagagtaaaaaaaagacttaaggcaaaatgagcggagaggaatctgccggcatggacttttcgcaaaagaccctgcaggattacgaggttttggccgtgatggggaatggatccttcggcacctgctacaaggtgcgcgacaaaagcaccggtgaattgttcgcctggaagggaatgaactacgatgaactggacgaggccaagtgcgacgctttggtttcggaaatcagtgttctgcggcagctccagcatcctaacattgtgcaatactaccatcatctggtgaaccgagaggccaagtcggtgtacattgttatggagtgctgtgccggcggcgatctcgcccagattgtccagcgagcgagatcccagaggcagcggtttgaggagccctacatctggcgggtgctcttccaactttgccgggcgcttcaggtgtgccacaacaaaatccccaacggaaccatcttgcatcgcgatatcaagccagcaaatattttcctggatgcggccgggaatgccaaactgggagatttcggtctggccagaatgctgcgacgagatcagagctttgccgcctcctttgtgggcactccgcactacatgagtccggagttggtgaagggcaggaaatacgatcggaagagcgatgtctgggccgttggttgtttggtatacgagatgtgtgccctaagaccgccgtttcgcggcagagcctttgaccagttgtccgagaagatcgcccagggtgagttcagtcggattccggcaatctatagtactgatctgcaggagatcatcgccttcatgctggcagtggatcatgaacagcgtcctggcatcgaggttatcattcggcatcctctggtggtgcgtaatattagcgagttggatggcaagttcccaattctagttgattctggagaggatttctacacactgccttcgggtgccaggcttttcgaggacgaagaggaagatggagttcatccagagctatcgagcaccatgtttacggaacagtacagcttcaatgaaggctatgggcaaaggagactcagcgttactggtgtgtttactccagatttgcgaagtgaactcttctactccgccaagcgcaaaatctttcctgccaagaaactacagctgtcggatccctctctttatgaaagtataaggagagaggagcgagcggaggagaggcaggtggaactggcggaagagcggcgccgtaaaaaggatcaggagcagcagaaaagggatcaggagcttctaaaggaggcccctagcagtcctcgtgctcttacccaaaacatattcgatgaagtactaaagacccgtctccacgccattcgtgcccaagaatccctgttgcagcagaagctcgaagagctgcagacccgggagcaggagttacagctggccgaacagcgcgtgcaaacgctggagcggcagatgcaggaaaaacttcttcagcaggagaaacacacttgtagttgcagacagccgatagctccgcccattcctcctaggaagccagcgaaatcgcaccatgatgacacctactgcactatcgaactcaacgagacgtcgcccacggtggctaaactcaatttagccacacttccggcaccaaaatcgctaaatactctgcgtaaggttaccttcaagtcgccccaaaagtttgttacctatggtatcgagaatatgcccccaccggcggttaaaccggcagtgaatcctccgcccactggcgttcccatgcaaatgagcgtatccagcaatgattccggtgacagccaggcctcctccacccgcaggaaatctatactctcgcttttcgggttgagtcgcggatccaaggcgacatccaaatccttgccatcggtcaaccaggtagcccaagcagctgcaactcgcgtgcagcgacctcctttggccgtcaagccaccgatcacgcaggaacagccggcagaagttccaccagtggccaatctctggacaaaggagcagaagaaacaagccttcgagctgctggcggccatgaatgcagccgagagggaggcaagcggaggtggagtcgttggttctggacccggaggagcacgtcgccagcatctgcggcaatcggtgagggaacggaattccacgctgcagcggaaccgcatgcggaggtctttggtggtggccactggccatcagaagctaacaacgcgcgaccagatggtgatctga

SEQ ID NO: 25491 - protein, 735 aa, DROSOPHILA
MSGEESAGMDFSQKTLQDYEVLAVMGNGSFGTCYKVRDKSTGELFAWKGMNYDELDEAKCDALVSEISVLRQLQHPNIVQYYHHLVNREAKSVYIVMECCAGGDLAQIVQRARSQRQRFEEPYIWRVLFQLCRALQVCHNKIPNGTILHRDIKPANIFLDAAGNAKLGDFGLARMLRRDQSFAASFVGTPHYMSPELVKGRKYDRKSDVWAVGCLVYEMCALRPPFRGRAFDQLSEKIAQGEFSRIPAIYSTDLQEIIAFMLAVDHEQRPGIEVIIRHPLVVRNISELDGKFPILVDSGEDFYTLPSGARLFEDEEEDGVHPELSSTMFTEQYSFNEGYGQRRLSVTGVFTPDLRSELFYSAKRKIFPAKKLQLSDPSLYESIRREERAEERQVELAEERRRKKDQEQQKRDQELLKEAPSSPRALTQNIFDEVLKTRLHAIRAQESLLQQKLEELQTREQELQLAEQRVQTLERQMQEKLLQQEKHTCSCRQPIAPPIPPRKPAKSHHDDTYCTIELNETSPTVAKLNLATLPAPKSLNTLRKVTFKSPQKFVTYGIENMPPPAVKPAVNPPPTGVPMQMSVSSNDSGDSQASSTRRKSILSLFGLSRGSKATSKSLPSVNQVAQAAATRVQRPPLAVKPPITQEQPAEVPPVANLWTKEQKKQAFELLAAMNAAEREASGGGVVGSGPGGARRQHLRQSVRERNSTLQRNRMRRSLVVATGHQKLTTRDQMVI

SEQ ID NO: 25492 - DNA, 2786 bp, DROSOPHILA
cctacaaagggaagaatggggaatccccgctgcgaaagccacggcgcattatcatctcattgcacaggacttaatcctgcggcaagttattaaagcgtaacgcgttccgtccgtgtcctttgccaatgcctttgcttctgctcctgctcctgctcctcgagtccttggatccctgaatcctgctccctttttattgttcgcgctgcgcttaacttgtttcgcattgaaacaggacaaagagggcggtggaatattaggggtgtgactgggtcggtaggcgacgccgccttaatgctaaatgatccaatatcctgtttcctgcatttgtgctctgcagcagcgttaaaaggtcctttgtggcctccgcccagcctccgttcgccattatttgccttggccaacttaaagatgttttccctctaagccaacttttcaccacccccagtctcgctctcaattatttgcttagcaaaaaggaaaatggaatcggcggaaaatgtagcgagtggggtacataattttgtatcttttctttacgcacggcaacttaaatagaagaatgtaaagtttttaattatgcaactcatcgccgacgttgtcgcattgtgtgcgaagtgggcccattccagttccagttcctcttctgcccgtttattccatctagtgagctggccaaaaacttaaaatacacataattagccatagtaccggggatacttctattttcttcccgtttgcttagcgacaaaatttcgccaccctctctcattgtacggagatgtgtatccttgggatatctttcgggcttagtcttggtccttttgaatcaaaatctaggccagtttctttctgcaagttgatgtttagtttggcatggaaaacgtcgacgacaaaggcctgcgctaattaaaggaaaatattaatttgctatagtaactaaaaactgaaatgcgacaaataacttaatatatatttcttgatttaagagagttactctcgcattttctgtcacttttctaaactttcacttgcaaaattactatcattcaattcatccttaatccatatacttaccattttacggcagttaattaaacaaaaattcaatacaactttctttagaatgttctcgagattaggtgaataatagaataggtcaaagtgcctaaatactattactacttaataataataatttatttttccttctttgatagccttacgtcctttgactgtggccacatctcgttcggctaccacccattccgcccaaggactaagtaggctccctgggcatggaagtcccggaaaggttcgcccgggtttcccgtccgacaattgggttaaaggacccatgggcgtcggcctgttggcatatatctgttccggagactgttgcgccattaagcacgagcacagcggcctatccttgggcatcatggaagatggctactacagcagtggaatcaccatcggtatcctgaccacatttgctgtgattaggcttcttccagcgattgtaaagtgggctgatagcgagattattgtaagtacagcggagagcttagtaaaatgttacaagtttttcgaaatttaaactattcctagtcacatagctatctaacaaaaaatcaattttataattaatttaacattctatcatctctcaaagaaaattgagtccgagtacgaaaagagtcgtgaaactaagatcaaggtcctatcaatctcgccctcgaacggaaataaggatcctagcaaggataatgccgatcaaaacgtgtagtcgatttgttgtattacttatttcaatttgtgaacacatgtccgtgtaaaaaataaaaatttgggtgtaagaggagctctggttgaagatgtaattaaacaactatgaacaaacaacagatagtgatttcaatctttcatttatgtattaaaatacgcttaaagagtgaagtatgattagttgttgtggatagctcctcttgtatggttgtcacatttttttccgggcatgaagtttgcggtggagcccactttttttagatgggagctccacgcgggggcgtggggatggagcacataaaatgttacatgtcgtaatattcaccacaagcaactcgcaacaagccaaagccaaaacatgccgaggaacatggcattgaaagcagttgccaaacaaaataggggatccctccccgaccaggaagaggcggcaacaatgaaaggatggcagagagcgcaaaaagaaaacaagattttcctctcgttttcttcctttatttttccttcggcatgacataatctttttaacaatttgtttttggggatgcggatgctggcggtgtggatatgacacatatcccgaccaaagtcaatgccgaagtatgcagaaatttgctttgttttttgttttcggtctccttttttccgctgctgctttgttatacataatcctggagaggtgtgacatttgtatgtataaatttcaactttgatccgcaaaggataaccctcgggtggccaaagccaattgccaggcacgaaatctaaataaacagacagaaaaacacacaacacacaaaaacacaaaaacggaaagcaaacgagtcccaacgaaaaatgtggccacgtttcgtgtgccttgagatctgtggctggaactcctcgagtttcagacctccgactcctccacacttaagttgtcaaaatcagcacaggattcgctctcattcatgtgcaatgtgtgtgcttgtgtgctgggaaaatgttattttcttttcatt

SEQ ID NO: 25493 - DNA, 582 bp, DROSOPHILA
attttctgtcacttttctaaactttcacttgcaaaattactatcattcaattcatccttaatccatatacttaccattttacggcagttaattaaacaaaaattcaatacaactttctttagaatgttctcgagattagccttacgtcctttgactgtggccacatctcgttcggctaccacccattccgcccaaggactaagtaggctccctgggcatggaagtcccggaaaggttcgcccgggtttcccgtccgacaattgggttaaaggacccatgggcgtcggcctgttggcatatatctgttccggagactgttgcgccattaagcacgagcacagcggcctatccttgggcatcatggaagatggctactacagcagtggaatcaccatcggtatcctgaccacatttgctgtgattaggcttcttccagcgattgtaaagtgggctgatagcgagattattaaaattgagtccgagtacgaaaagagtcgtgaaactaagatcaaggtcctatcaatctcgccctcgaacggaaataaggatcctagcaaggataatgccgatcaaaacgtgtag

SEQ ID NO: 25494 - protein, 152 aa, DROSOPHILA
MFSRLALRPLTVATSRSATTHSAQGLSRLPGHGSPGKVRPGFPSDNWVKGPMGVGLLAYICSGDCCAIKHEHSGLSLGIMEDGYYSSGITIGILTTFAVIRLLPAIVKWADSEIIKIESEYEKSRETKIKVLSISPSNGNKDPSKDNADQNV

SEQ ID NO: 25495 - DNA, 3109 bp, DROSOPHILA
tattgctaacgattctcgttgcttttcagatcgtcagctattgggaggcctttgctccgtttgcccgcgaaatcgtttaacttttattccgattatcgttgcatttccaaaaacttttgcataaccaacagctatgcgcgctattaactaattctgcgggaccaaattcgatcttaatcttgcgatttggagctacaacttcgccttaagcacttatcttgcaatttgccgccgaagctcgtattttttgggaaactgcttccgattcctctcaagcatttcgcgatgcattcacaatgcctctatctctttattcgtacacagtaattattatcagaaagctgaaagtttgctacagacccagggatctgcgtattctcattcaaaaattgtattcggtattatctaaaacaaagccatggatctagttagttagttgaaagtgaagaagactcattggcaatttccaaattgaagtttataccattattattgggaaatgggtttccctgtttactgttggtataattatgtatttatatatatatattccaattaaacattttgtatcatgacaaacagagcatttcaacaataaatttgtaaatatgtatagatgtaaatattttggtgttgttttgtacatattcgtagattgcctgattaattatatgaatatttccaccttttttggaatattttcgaaaaggaaagaattctgcgattcaatatcaaagtaaatcttcagtgcagtaataaataggatgaagcaactggctttaaaatcttcaatatcataaatttagatttgttgatatttataaatatgtagatcaagaaaagaatattcaaactgtttttacgaaacttaaaattaataattttaaattaattatatattttttgccagcaatggtgttctggtatttttgtaacactgcattttcgtaagggagtattcctcataacctgccctacggtcacaccgaacacaacaaaaagaaataagtgtttagtcatttacaatctcatttgtttctcgaagttttcccaataacaaccatatatagcatccgaagcaacgtgtctgcttagtgtagaggaaaacagtaaccggagaagtacaatcatggaatttccacacttgggacagcactgcagtgaggcaacgtgcaacagattgggtaagatcgaatgccatacgccaaccaggaagcagaagctaattgaattaagttccatccacgtccagattttctgcccgttaagtgcgactcgtgcgacaaggtcttctgcgcctctcactacagctacgaccgccacagctgtccaggagcctacaagaagaacgttcaggtgcccgtctgcccactgtgtcgggagcccgtgcccacgccacccggagtggagcccgatgtcactgttggccagcacattgaccagcagtgcaaatcggagagcaagaagatctacaccaatcgctgcaatgccaagggctgcaagcgaaaggagctcatcccggtgacctgctcgcagtgtcgcttgaacttttgcctgcgtcatcgacacaccagcgaccacgactgcaagccagtgcctgcatcttcgacaacgtccagccgtgggggatttcagtccatattcaagacctcctcggactcacgatccatggctgcccaggcggccgagagaaggcagaacagaaggcccgcgagcaatagcatcagcaataccaattccagacctcgacctgtgcaggccacacaagtacaaaacatacagggcaatatggtgagttggcaagctggtctcaactaatcatctagaccgttttagactttatcaaactttatgactccatgattgaaatactggtcatgagtcatctagaccgttttagacttcatcaaagtttatgaatacattattgaaaacttgcagagcgaagacgaggccctagcacgagcactagccttatccattatggagcaggatgacgcggcggaaagcaaccgtcaagctccggcaccaagcaacgcccagcaagtggctgttggcggtggtggcaatcagcagggaaatggcaaggacaagtgcctgctgtcctaggtcccaggaggcagcgcagcgagctctcaacatatccatcacttgaccagcagctagaaatctgcccaattattagatgttaatgaaactccgttattgtaatttgttggtaatttacttcgacttcgtcacattcttcgtggtttagcaaaaataaattaatgttaagtctacatttggaaagcgtagatagtttttaacacggatctttaaagggaaataagggaatcgaccctattgcgaacagatcttaatcagataaatatgatacaaggcttagctacataaatagatacacgattatagttatacagatacattgcaaattattcggaattggcctgcgtttgcgtttccgtcacttcctcctcctcgatcttggcaggaggttgtacttctgcgggcaccacttcgatctggccagcgacttcttcaacttttggctcctccacaagttcagatttgttggacatcgcgcttagctttctgccaaccgtggaaccttccactgacgacgacgtgctgattttgcgcgctgctgctgcaaagctggcgactccctcggcggccaaaatgctggcactggataaaagtatggaaacttgctccgccgacggacaactcgtgatgatcatatcatctgtggagtaaccattggtggtcagcagttgttccagctttacaaacgattgaatgatgttgttctgcatagaaaaacaaagataaattaatcatactttgtgggcaaacgttaaagcttactcggatcggtctgaagatgatgaattctgtatcacgattgcttaggtagagctgcatggaccgctgtagcaccgccagcttggctttgatcaagcgctgcgtctcctggattatactgctgatctgctgcggactggcccatggactttgccttagaacgtagctggctttcgtcgactccggcgattggggcgtggctggagtggactgcgccaacagactctgcgccttttctagg

SEQ ID NO: 25496 - DNA, 891 bp, DROSOPHILA
agaaataagtgtttagtcatttacaatctcatttgtttctcgaagttttcccaataacaaccatatatagcatccgaagcaacgtgtctgcttagtgtagaggaaaacagtaaccggagaagtacaatcatggaatttccacacttgggacagcactgcagtgaggcaacgtgcaacagattggattttctgcccgttaagtgcgactcgtgcgacaaggtcttctgcgcctctcactacagctacgaccgccacagctgtccaggagcctacaagaagaacgttcaggtgcccgtctgcccactgtgtcgggagcccgtgcccacgccacccggagtggagcccgatgtcactgttggccagcacattgaccagcagtgcaaatcggagagcaagaagatctacaccaatcgctgcaatgccaagggctgcaagcgaaaggagctcatcccggtgacctgctcgcagtgtcgcttgaacttttgcctgcgtcatcgacacaccagcgaccacgactgcaagccagtgcctgcatcttcgacaacgtccagccgtgggggatttcagtccatattcaagacctcctcggactcacgatccatggctgcccaggcggccgagagaaggcagaacagaaggcccgcgagcaatagcatcagcaataccaattccagacctcgacctgtgcaggccacacaagtacaaaacatacagggcaatatgagcgaagacgaggccctagcacgagcactagccttatccattatggagcaggatgacgcggcggaaagcaaccgtcaagctccggcaccaagcaacgcccagcaagtggctgttggcggtggtggcaatcagcagggaaatggcaaggacaagtgcctgctgtcctag

SEQ ID NO: 25497 - protein, 253 aa, DROSOPHILA
MEFPHLGQHCSEATCNRLDFLPVKCDSCDKVFCASHYSYDRHSCPGAYKKNVQVPVCPLCREPVPTPPGVEPDVTVGQHIDQQCKSESKKIYTNRCNAKGCKRKELIPVTCSQCRLNFCLRHRHTSDHDCKPVPASSTTSSRGGFQSIFKTSSDSRSMAAQAAERRQNRRPASNSISNTNSRPRPVQATQVQNIQGNMSEDEALARALALSIMEQDDAAESNRQAPAPSNAQQVAVGGGGNQQGNGKDKCLLS

SEQ ID NO: 25498 - DNA, 2618 bp, DROSOPHILA
ggcctcagttatcttctcctgcctgaattttgtcgttcacctgcgcttgttacgcaagttccgccgagaagtgcgtccggacagtccctgctatatgctgacccacatattcgcagtggtatgcctttatttacacgatcagccaataaagtcgttatactaagttccctcgatccttactcttccagacgagtctcaacggctggatctggtccgccatctttcacacaagggactttccactgaccgagctgctggactacgcctttgcctattccatcatcttgtgctcactttacgtcatggtcatgcggatgctgcaccgctactcgctgttcctacggggtgttatcacgttggcattcctctcctactacattaactactttgcctacctgagcgtgggacggttcaactatgcgttcaacatgatggtaaacgtggctacgggagttatagcggcagtgggatggttcgtttggtgtcactttgtgcgcacccgcaggccctactttagaaggatcctgcgtttctatattctcatggcgttggctatgagccttgaactgcttgactttccgcccatcctctggattctggatgctcatgctctgtggcacttggcaacaattcctctggcatccctatactatgagtgcgtagaaatattactttattctaatattgctacatgtgtttgcattttagcttcatgatagaggactgtcgaaccctgcgaaaggagaaggctgcggcgggcggctattcattctacaattagtattatctaagttattcttagcccttaaagcacgcaaagctatctggcaatttttctgacatatttcatgtaatttgtaacagagcgaaaacatgtaatgtattttattgaatgtcaaagcgaaaacatcctttgacagtaaccagaacggcaggaaaactaatagcttcgtttaaaaagacataatagagactttattacaacatttagaactccgtgctacatttgcccgcactgcgaaatggtcactgggagcttcggcttgttattggggcccgtgggcacgttctcgatcttgcgcatgatgagcagtccatccagaacccgaccgaacaccacgtgctttccgtctaaaaagttgcacttggcgcaggtgataaagaattggcagccgttcgtctccttgccactgtttgccatggaaaggaggccgggcgagtcgtgcttcagggtaaagttctcgtcgccgaaggtgttgccgtatatgctggtcacgccggtgccgtcgccctgcacaaagtcgccgccctggatcatgaagtccttgatcacccgatggaaactggcgcctttgtagccaatgggaacgccatccggtcggtactcgcccgtgcagaactgccggaagttttccgccgtgcggggcactgtgtccgcaaagagttcgaatatcattcgtccgatttcctgcacacaaaaggcgttagaaggcggagttatgtacagattatgactagattgttttcagctcaccgttgtgcctacggcaatgtcgaagaaaacgacgggattgttggagcttctcagttgggactgtatttgattccagttaggcattttaaaattattttatttgtttataaactttctaacaagtcaagattaagattttactaagccggcagatttttgtttatgtttattacgatggttcgatgacgatgcacgacaagtcgatagcatcacaagccggttatatcgatagcacacgtgtgccaagtgcttgtttatattttgctgtgcacatattggtgaaactatttaataatatttattaaggtgagtttatttatgattggattgattgatgagtagagtgcataaaatagtgcataaatattattattgttggatattgtttcggcattatttttagttgtttatttttattggcaagtttctcaaggcctgcaaaatatgtatgcatactaacatatttcgtggtccgatgggcaggattttttcctgataggatatgcgtgtgtaaattcttcaacatacatacgttcccacgctaaaagcttttatcacaaagaatgacagaatgacccaaaacacttgtatctgtatgtacatgcatttgtaccaaagtgggaaatggagatatgcaagagacaaagcaagtgcagtagcaagcaacaattgtatgccttagcatgcgtaaggagaccgatatatgtatatttatatttagtttacttataattagtttatacttttaagatgtagtggtaacgttttaaagcaaacttattgagacatatatcatatacaaaaattaaaaaaaatactatttgcgtcccccaaagatctcccagttggattttggatagactctttgccaaggattcccgtaattagccattttaggagttctgttggaaacgaatggccccaattagccctctctgttgatgaatgaagaccttttatcgacatagtacaaaaacgtatgataattaataaatattcgtgagcattgtactcaagaaaaatgtaaattttccgaaaaatatgcacgacaatgacccccatttgacgttaagatctgcttagt

SEQ ID NO: 25499 - DNA, 552 bp, DROSOPHILA
atgcctaactggaatcaaatacagtcccaactgagaagctccaacaatcccgtcgttttcttcgacattgccgtaggcacaacggaaatcggacgaatgatattcgaactctttgcggacacagtgccccgcacggcggaaaacttccggcagttctgcacgggcgagtaccgaccggatggcgttcccattggctacaaaggcgccagtttccatcgggtgatcaaggacttcatgatccagggcggcgactttgtgcagggcgacggcaccggcgtgaccagcatatacggcaacaccttcggcgacgagaactttaccctgaagcacgactcgcccggcctcctttccatggcaaacagtggcaaggagacgaacggctgccaattctttatcacctgcgccaagtgcaactttttagacggaaagcacgtggtgttcggtcgggttctggatggactgctcatcatgcgcaagatcgagaacgtgcccacgggccccaataacaagccgaagctcccagtgaccatttcgcagtgcgggcaaatgtag

SEQ ID NO: 25500 - protein, 183 aa, DROSOPHILA
MPNWNQIQSQLRSSNNPVVFFDIAVGTTEIGRMIFELFADTVPRTAENFRQFCTGEYRPDGVPIGYKGASFHRVIKDFMIQGGDFVQGDGTGVTSIYGNTFGDENFTLKHDSPGLLSMANSGKETNGCQFFITCAKCNFLDGKHVVFGRVLDGLLIMRKIENVPTGPNNKPKLPVTISQCGQM

SEQ ID NO: 25501 - DNA, 2668 bp, DROSOPHILA
ttaaactattgcaaatgaacactgtctatatagaaacactagttaaatccaattcttacggaatctgcgttgtgtcccagttcgtcagtgactgacacttccgattttaaccccatcgtatgattatgacaaccactgtgcgacgacggaaagtggtgtataaatagcgcgcaaggacggctaatcgcatgcgactggctgcccgatcccgcggaccttacctttgcaggccgagatgagaaagtagccggcgtcgcagatgtcgctgaagtccaggtggaccacgggtcgcgtgtggccactgcaggtcagcgggatttgtcgcaagttgttggcggccatggcagtgggctgctagtggattggtggactgtgtggtccttaatacttgtggttttctccgagtgtagcgaccgttatgtccgctggcgaactgtgcacttagtgaataactgacgttttgtggctactttgtacttggattggttgttgctcctggttaactgcgcttcactgcccgtacgataatgattttcccgttcgttgcttaggttcgagatgctgcggtggctttgcagggtgtgcagtgtatttacaatctgatgcactgaattttataaacaagaggggaaaataattacgcgacacgttgttgttgtggatggacgattggtagccgactccagcctcgatagtccgcacacacagtacctacctatcgtcagcggtgggcgcgtgaggcgataacttctcgattagctagagctgtgtcacggcagccaggggaggatacaaaggaaaaatgtcaaattacttatttacaatttggcatagaattgttttattttgttttttatttatattaagccaattaacagctttgttgtacgtaatttagaaatcacggccaaccactatcgatataatttagcgaacgagtcacgacattatggatgtagcccatccctatttacttgtcaaaacagcaaattttcattcgggccaagaatcgactgaaaatatgtccgctattctaaaccacgcaattcgccgccaattcggcgcttctgccgcccggaatatgtccggcaccgccgccgtggccggcgagcactctggtaagtgaccgtccagcgtcccaattgccaaattcatccccttttgtaaggttaaggttatgtaatttaccattgggcaagatcgattggtggagaaggattcgctcttataacacatcctttcatgctcatctcatctctcatccttcaggtggctacaaggtgtggaagcgcctgtccttcttcgtggccgtgcccgccgtgggactgtgcatgctgaacgcctacctgaagcaccaggaggagcacgacaagccccgccaggagttcgtcaagtacgactacctgcgccgccgcgagaagcgcttcccctggggtgagggccagaagagcctgttccacaacccccacgttaacgccctgcccgacggctacgagcactaggtggccaccgtctccggttccctctgcgggatgtattcgttgtttggtagtgatagacgttaatgtaaactgaactttacgcggaaatacacagaaaacacatatacccaaactccagttggcgcttcaataaagatcaaattagagcgaggagagatcccataaagaccatttcaatgagcgacagcggaattctggtgaggagtttatttaaaaggccttcggttaaaggaaaaattaaaagttacaattaaatagaatttaaatttaagcataagcacggatgcacttttcgcatgcaatatattcaactactatcattattttgcggatcggcgattcttaaggttgcgttccagtttgtgatgaggcttgccttcgttctttcctgtcttctgagtgattctttgagcatcccgactgcgagtttggcgcacggattgctgggcatccttgggaggattggttttacgctgctttggaggcggcggcgtgaaggattcgtcgctatcgtctaggtggtcctcatagagagcatcgtcttctaagtattccgtcacgaattcttcctgcttcacattgtccatgtcttcaaaatcgtcaagatgttcctccttctcatcgacgccgccttctccttcgccgtcgtcttcgaactcgttctggtacggctccatttccaccacatgatcgtcctcgatgtggcgctgcaggcatttctgcgtcaagaagatgtggtcacagaactcgcaggcatggcgctcgctctgcttgtgctggtccatgtggctctcgacactgtcgatatcttcgatctgcttgcgacacatgggacatttcaggctggcggtggcatgaatgagcgcatgatccagtaggtcgttatagttgctgtacgacaccttgcactcactgcacacgaacgaggcgtcggaagtctgcgtgtgcgtgcgcaggtggcgcgagagatgatgcgacagcatgtaggacttgtggcagtacttgcagggataggctctcttcccggcgtgggcaaccaggtggcgggccagcttggaagcggtggaaaagcttctctcgcaatgctgacaggggaagggaagattggtggagtggactgtctgaaagtggacataatcgttagccggggcaatcccaaatatgct

SEQ ID NO: 25502 - DNA, 517 bp, DROSOPHILA
ggccaagaatcgactgaaaatatgtccgctattctaaaccacgcaattcgccgccaattcggcgcttctgccgcccggaatatgtccggcaccgccgccgtggccggcgagcactctggtggctacaaggtgtggaagcgcctgtccttcttcgtggccgtgcccgccgtgggactgtgcatgctgaacgcctacctgaagcaccaggaggagcacgacaagccccgccaggagttcgtcaagtacgactacctgcgccgccgcgagaagcgcttcccctggggtgagggccagaagagcctgttccacaacccccacgttaacgccctgcccgacggctacgagcactaggtggccaccgtctccggttccctctgcgggatgtattcgttgtttggtagtgatagacgttaatgtaaactgaactttacgcggaaatacacagaaaacacatatacccaaactccagttggcgcttcaataaagatcaaattagagcgaggagagatcccataaa

SEQ ID NO: 25503 - protein, 109 aa, DROSOPHILA
MSAILNHAIRRQFGASAARNMSGTAAVAGEHSGGYKVWKRLSFFVAVPAVGLCMLNAYLKHQEEHDKPRQEFVKYDYLRRREKRFPWGEGQKSLFHNPHVNALPDGYEH

SEQ ID NO: 25504 - DNA, 4133 bp, DROSOPHILA
gcctgctgctctacatcggcattatcgacatcctgcaatcctacaggctgaagaagaagctggagcacacattcaaaagcatcatacacgatggggtaagactgatgattctagcaagaatttgccactgatatatactcttgcaggaaaccgtatcggtctgccggccctcgttctatgctcaaagattccaaaactttatggccaagaccgtgttccgcaagataccctcccgtaagtggaccggtcgtggaagtcgggctaagtactcgtactgtaaggcatttttgtgtgcagttggccgagttatgcaagcactcagttccggttccggttccggtttccgacatttttgagtagatagttagccatagacactttcacaccatttacattcgaacacaccgaacaccatttagacactcgtagcttgctaatgttggttaatcgatcgatgtgcagcaaaaatgcaatatggtacacttggcctgagtagacgccgatttgaagagatacctatatacatatctctacatcaaatcaatatccaccaacaaaccgctctgttctctgctttcttttatggccatgtctcgaatgcaatcacccactcttacgtacgcatatagtggatctcccagagatcaaggggaatcacagaaaatttcgtaccttggtgaccagctatataggtaaacaaacgaatggtcgatgtcctttaacttttgattatctctcactttctttacttacacctttcttaacgagtattttatagtgtttattaacgatgttttgtattcaccacttggttttatatgatttcgaaacggacgccaaagcatgcctctcaatctcacgttagttgatctcacatccctggcatcctcggcatccttggcatccttggcatcctggcaaccgtattgctcttggcttcgcatagttgctttggaagtgctatgctttttgaactttttcttttgatcgaaacaaatttatgcgttccgcaactaattactgcatttccatcatttttgcagcgcttaagcattcgccttcgaagagaaaaagcctttccaaggctattcagcgctccattgacagcgacaacgaggtggcctccaggcgtaagttaatcactctaaaaattaatgtatactaaccacgactacaacttgttctaaaacactctttcgattcctaaacctattataatttgctcagcggttcacgcctcgcactcgcacagcagtggcaagattcaccagccagccaagccgcccaccaccgagcccacgccagcgggagcggcaggtggagccgaaagaggagcaactgccctaggtccagcaaccaccagtggcgccagtgaacgggcaccaccgcccgtcaagcagcgtacgccggcggccagtaatctgaagacgcgagtgccaccgccagtaccgccacgcggctcgccacggcgcaaggatgcccaggatcggacgactccaggtacagaaccgcacaccactaatcccaacccggcaccagcacatacccacacccttcaggtgccagcgaacgagggcattccgcgattcggggatcgccgttcgcctagcaatgtccaggattggttggagctgcatgatctcttcgatggtccggacagtggtccatatggtccatatgcaccgcctgctcctctggcagacccaacggttactctactgagaagttcttcgctgcggcgccgggattccctgcactccgcctactccacggctcgatcagaaagtagcttccggcgccagcagccaagactcctcaaccacgtggacatctttcagcgcaagaacagctttgtggcgcgcagtgatcggtcatcggtgggctccatagttcggagctttccgccgatcagagcggaaagctatcgtacgggacgttcccgatcctcgggcagtattcacagccagcattctcctaggcgagggattcaagagaagctgcagcgacatcagaggcggaagcgttactttcactacgtggatttggcgctcggtggcgaggattgcgagaaccagccggaggaggataatctcctgcagtcggtcagtgcttttttggaggtcaaacgagaactggaggcgacacagcgtcctagaagacctctacccaagcttacgcttcccgacccggtcgtagagcctgcgaggagtcctcctggacagcagatcagacggggcaagagacgagcgcccaaggcagcgccctccacgatacccgagagcgacggcactcagggatcgactggacgcggacagggacgggattagctactcgcttgcacctcgcttacccagccacactacaccattacccagctaccttttattactactgtctacttctgccactcattccgttgtatattttgctctgctcattgtattgctaggcacaacgccctcatgcagctcgactcctccccccgcctttgacgacatctccgaggacagctcgaacaagaacagcagctcgtcgataggtcgccggtctcatcatcatcaccaccatcaccagcagtcgcagcagcatcagcagtcctactatctggatcgcaagatgaacattggacccgcctatcgaggctcctacaaggaggacattgtgaggtattaatgcttatgtatgttagccatctaagctatcccgccgtcgagtggaaatacccatttgtaacaaattgatttattgtttaactagcgtttcggaagtccatctggatacattactggcggtggacacgtcgtcgagcagccagtacggatcccgcggcggattggcctggaccccgcccgcttcaggtgagggctccactcccacatggacagagggcacaccaagttttacggactccagttcgagtggtgatctcggtaattggcacttgagatttgctttgaaatcgctttttgtgtttctatatctatctgtatatgtgtattcgttcacgcttgcaatcgtagacaacttctcgcccataaactcatctaaaatcgatcgacacaagccgacggtggaagaggccatcaactctctgtccgcgggaatggtaaatatcagaggagaccgactctagacacgatccccagcacacatagatacgtcccgtaccgctgcacccacgacacctccacacctagacagctccacccccatcacacacagagttagactcgcacacgtccatgtagaatcgtacactactagagttttccaaattgcagtgcatctttcgtttgggtgttcttccctagccattcccccacagcatcccactgatacatgacttctctattgcattcttatagatcaactaacatagcatgtggtgacggaacacaagacacaccaacccagatatatcacgatgtggactgagaaagagtccgagcgaaatatgcctcatactcttacatactgattatgcttgcgtgttcaggcgctcttgtatagctaggatataatcaaaaggcgccccacgtagaacagattcccccatgtcatgcccacgaccacgaccacagccacacccacacctgcccatcccttccagcggacactgggtgaaaaataaccaacaagagacataactcaatcaagcaaaagatattatatacaagcccaaagcatactccttatacacagaactacagaagcatatagcatataactggcaaatcaaatacgagtaaggtgctcaggatggcatcccgttggtgatcagagatccgtgatcagtgattcgtagtcccggtcccctatacgtttagtgtacggtgtaaagagttcgttatgcgttcgatcagataatatgaaaatatacaatacactgaaattatataaataaacgtttttgcgatactttcgatctccgatatatccacataagtacgtattatgtatacctatgtataatcagcaatcgcgatattacaatattattgtaaaatatttcaatttacaagccagacaaaccaaaagcaaaattatatacatattattcatctgtatttattaacgataattgtaacgcgcttaggtttactcaacacaataaacagaacagaaccggaccg

SEQ ID NO: 25505 - DNA, 1761 bp, DROSOPHILA
atgcgttccgcaactaattactgcatttccatcatttttgcagcgcttaagcattcgccttcgaagagaaaaagcctttccaaggctattcagcgctccattgacagcgacaacgaggtggcctccaggccggttcacgcctcgcactcgcacagcagtggcaagattcaccagccagccaagccgcccaccaccgagcccacgccagcgggagcggcaggtggagccgaaagaggagcaactgccctaggtccagcaaccaccagtggcgccagtgaacgggcaccaccgcccgtcaagcagcgtacgccggcggccagtaatctgaagacgcgagtgccaccgccagtaccgccacgcggctcgccacggcgcaaggatgcccaggatcggacgactccaggtacagaaccgcacaccactaatcccaacccggcaccagcacatacccacacccttcaggtgccagcgaacgagggcattccgcgattcggggatcgccgttcgcctagcaatgtccaggattggttggagctgcatgatctcttcgatggtccggacagtggtccatatggtccatatgcaccgcctgctcctctggcagacccaacggttactctactgagaagttcttcgctgcggcgccgggattccctgcactccgcctactccacggctcgatcagaaagtagcttccggcgccagcagccaagactcctcaaccacgtggacatctttcagcgcaagaacagctttgtggcgcgcagtgatcggtcatcggtgggctccatagttcggagctttccgccgatcagagcggaaagctatcgtacgggacgttcccgatcctcgggcagtattcacagccagcattctcctaggcgagggattcaagagaagctgcagcgacatcagaggcggaagcgttactttcactacgtggatttggcgctcggtggcgaggattgcgagaaccagccggaggaggataatctcctgcagtcgagcctgcgaggagtcctcctggacagcagatcagacggggcaagagacgagcgcccaaggcagcgccctccacgatacccgagagcgacggcactcagggatcgactggacgcggacagggacgggattagctactcgcttgcacctcgcttacccagccacactacaccattacccagctaccttttattactactgtctacttctgccactcattccgttgtatattttgctctgctcattgtattgctaggcacaacgccctcatgcagctcgactcctccccccgcctttgacgacatctccgaggacagctcgaacaagaacagcagctcgtcgataggtcgccggtctcatcatcatcaccaccatcaccagcagtcgcagcagcatcagcagtcctactatctggatcgcaagatgaacattggacccgcctatcgaggctcctacaaggaggacattgtgagcgtttcggaagtccatctggatacattactggcggtggacacgtcgtcgagcagccagtacggatcccgcggcggattggcctggaccccgcccgcttcaggtgagggctccactcccacatggacagagggcacaccaagttttacggactccagttcgagtggtgatctcgacaacttctcgcccataaactcatctaaaatcgatcgacacaagccgacggtggaagaggccatcaactctctgtccgcgggaatggtaaatatcagaggagaccgactctag

SEQ ID NO: 25506 - protein, 586 aa, DROSOPHILA
MRSATNYCISIIFAALKHSPSKRKSLSKAIQRSIDSDNEVASRPVHASHSHSSGKIHQPAKPPTTEPTPAGAAGGAERGATALGPATTSGASERAPPPVKQRTPAASNLKTRVPPPVPPRGSPRRKDAQDRTTPGTEPHTTNPNPAPAHTHTLQVPANEGIPRFGDRRSPSNVQDWLELHDLFDGPDSGPYGPYAPPAPLADPTVTLLRSSSLRRRDSLHSAYSTARSESSFRRQQPRLLNHVDIFQRKNSFVARSDRSSVGSIVRSFPPIRAESYRTGRSRSSGSIHSQHSPRRGIQEKLQRHQRRKRYFHYVDLALGGEDCENQPEEDNLLQSSLRGVLLDSRSDGARDERPRQRPPRYPRATALRDRLDADRDGISYSLAPRLPSHTTPLPSYLLLLLSTSATHSVVYFALLIVLLGTTPSCSSTPPPAFDDISEDSSNKNSSSSIGRRSHHHHHHHQQSQQHQQSYYLDRKMNIGPAYRGSYKEDIVSVSEVHLDTLLAVDTSSSSQYGSRGGLAWTPPASGEGSTPTWTEGTPSFTDSSSSGDLDNFSPINSSKIDRHKPTVEEAINSLSAGMVNIRGDRL

SEQ ID NO: 25507 - DNA, 3398 bp, DROSOPHILA
aattttaacagctgtattcagaaccagttcaatatacctaatatatatgtatttatatgcctatataagctcatcaggttgtcacgatcgttcagaatgtatctcacatttctccaaaaatgaactcgctcattgtaatttttggatttctttttatctcaactcagatagtcgcaacaaccgagtcggaatgtcctgaaatctgtcttgcaatttacagtccggtctgtgaagaagctatgataaatggaaaattggttagatgcttattcagtaatagctgcgaagcaggtcgtagcgcatgtcttcatgaaataagtgagtattttcatacaccgaacacatttatttgaatggtttttcttgcagattggcgccaaaaagaaggaaaatgtgaaacttcacccgaccacttatgccgtcaatacctttcatctaaaaatattacttcaaaagtaagctaattctttttatagactagacttatgacgttagtttacttaccgaattgacgtaggtcgcagaataaaatatggtttggcatatgtgtgtttctactatgaaattattgtcttaatattgtcttatttttttgcaaatgatattgacctgtatttacgaaatcatttattaaaatttaatatattttacaagtttcatttatttattttttttgttatggaaagctggttttttgattaatatactgatactgcggaacttatgcttttttgttgagtaaggtcttttattatttatgaacggagacaatgatattttgtgttctaattttaggcttaactaccatgtgaaccgttttgcatatgttgttatttgcttttattccttcgctttctggggaaatgcaaacattctaacagctggtttccccagtgaccttgactagcaaattttcacagaatacggggctctataaaacccataacacccaaattattagggttagtagcaactaaactttctcgaacaaacgcgaagcatgcggtgcaggatcttggtgctgtgtgcattcatatgcctccttgtaattttgaccgaggccaggcagaggaaagttaaccattccgctgatagaagatcattggcagtcagaagtggacacaggaatgagcggagtagtgctcttcatggaagaggattggctgcacgatcaaggaatcaaaggaaacgcagattaaatgctgccaagagaagcaggaggaagcgtaacttggctagaaagtcaaatcggaaaattagggccaagaccgagtcaatcgttagaagtgattctagttacgctactttaccattggacttccaacagaacttcgtgcgaaccaccgacaacctgcgatcggagaaggcctttttggccaatcgatatggctttagttttgccaaaagttctggaacggctactttgaaaaacacggcgaacatggagtatacctgcaaaatgaacattggtacacccaagcagaagttcacagttcttccggacaccggaagttcgaatatttgggtgccaggaccgcattgcaagagtaaggcctgcaagaaacacaaacaatatcatccggccaagtcaagtacctatgttaagaatgggaaatcctttgccatcacctacggttcgggtagtgtggcaggagttctggccaaggatacggtgagaatagctgggctggttgtgaccaatcaaactttcgccatgaccaccaaggaaccgggaaccactttcgtgacctcaaatttcgatggtatactagggctgggatatcgatccatagcggtggacaatgtgaagaccctggtgcagaatatgtgctcggaggatgtgatcaccagttgcaagtttgccatttgcatgaagggcggcggcagttcctctcgaggtggtgcaataatcttcggcagctccaatacaagtgcttatagcggatccaatagctacacatacactccggtgaccaaaaagggttactggcagttcactctgcaggacatttacgtgggcggcaccaaagtgagcggctcggtgcaggccattgtggattccggaacttcattgatcacagctccgacggccatctacaacaagatcaacaaggtcatcggatgcagggctacctccagcggagagtgttggatgaagtgcgccaagaaaatacccgacttcacctttgtcatcgcgggcaagaagttcgtcgtcaagggtaacaaaatgaaattaaaggtgaggaccaacagaggcaggacagtctgcatatcggcggtaactgaagttcccgacgagccagtgatcctgggcgatgccttcatccggcatttctgcacggaattcgacttggccaacaatcgcattggattcgctgccactacgtattccacttagacttatctgtattaacttataatgcagctgatctcgcatagacgatcattttaaattgtagtacacttgtaacttgaagcttcctgttcctatgtaacttctaaaattgttgtcaagttaaatcattttgctaagtatgtatatataactttttcatatattaaaagtattcgttttaaataaaaatagctaagatgcagaaccatttgaaagctttcggtctatccatttacctagttaattacctcgcccagctgcaaagttacgtgtgcgcaattccaattgtaaagcttaaaattaagagtaatattttcagttctgcaagtaaattcatagaagatgcttcgagttttgtgtttcttgctcgcgtttctgagtttagtctttgctactcagaaaattctgaaggtaccgctttacgttaggagaagtttcaatgaaagtgaagtcttcctggccagaagtgcaaccgaaggaggtgaaacacttcagcttcagctgctgctacagacgcacaacaatatggaatattatgggacaatagccatgggaaatcctaggcaaaactttactgtgatctttgacacgggatcttcgaatacgtggctaccctctgtgaactgtccgatgagtaattcggcttgtcaaaatcaccgcaagtacaactcttctcgatcaagtagttatattcctgatggaagaaacttcacactgcgatatgggtcgggaatggtggttggctatctatcgaaggacaccatgcacattgctggagctgagttaccccatttcacattcggcgaaagtctgttccttcaacactttgcctttagttccgtaaaattcgatggactagtgggcttgggcctgggagtcttgtcctggtccaatacgacaccatttctggaacttctgtgcgcacaacgattgcttgagaaatgtgtattttcggtttacctccgtcgagatccgcgggagatagtctttggaggatttgatg

SEQ ID NO: 25508 - DNA, 1398 bp, DROSOPHILA
atgcggtgcaggatcttggtgctgtgtgcattcatatgcctccttgtaattttgaccgaggccaggcagaggaaagttaaccattccgctgatagaagatcattggcagtcagaagtggacacaggaatgagcggagtagtgctcttcatggaagaggattggctgcacgatcaaggaatcaaaggaaacgcagattaaatgctgccaagagaagcaggaggaagcgtaacttggctagaaagtcaaatcggaaaattagggccaagaccgagtcaatcgttagaagtgattctagttacgctactttaccattggacttccaacagaacttcgtgcgaaccaccgacaacctgcgatcggagaaggcctttttggccaatcgatatggctttagttttgccaaaagttctggaacggctactttgaaaaacacggcgaacatggagtatacctgcaaaatgaacattggtacacccaagcagaagttcacagttcttccggacaccggaagttcgaatatttgggtgccaggaccgcattgcaagagtaaggcctgcaagaaacacaaacaatatcatccggccaagtcaagtacctatgttaagaatgggaaatcctttgccatcacctacggttcgggtagtgtggcaggagttctggccaaggatacggtgagaatagctgggctggttgtgaccaatcaaactttcgccatgaccaccaaggaaccgggaaccactttcgtgacctcaaatttcgatggtatactagggctgggatatcgatccatagcggtggacaatgtgaagaccctggtgcagaatatgtgctcggaggatgtgatcaccagttgcaagtttgccatttgcatgaagggcggcggcagttcctctcgaggtggtgcaataatcttcggcagctccaatacaagtgcttatagcggatccaatagctacacatacactccggtgaccaaaaagggttactggcagttcactctgcaggacatttacgtgggcggcaccaaagtgagcggctcggtgcaggccattgtggattccggaacttcattgatcacagctccgacggccatctacaacaagatcaacaaggtcatcggatgcagggctacctccagcggagagtgttggatgaagtgcgccaagaaaatacccgacttcacctttgtcatcgcgggcaagaagttcgtcgtcaagggtaacaaaatgaaattaaaggtgaggaccaacagaggcaggacagtctgcatatcggcggtaactgaagttcccgacgagccagtgatcctgggcgatgccttcatccggcatttctgcacggaattcgacttggccaacaatcgcattggattcgctgccactacgtattccacttag

SEQ ID NO: 25509 - protein, 465 aa, DROSOPHILA
MRCRILVLCAFICLLVILTEARQRKVNHSADRRSLAVRSGHRNERSSALHGRGLAARSRNQRKRRLNAAKRSRRKRNLARKSNRKIRAKTESIVRSDSSYATLPLDFQQNFVRTTDNLRSEKAFLANRYGFSFAKSSGTATLKNTANMEYTCKMNIGTPKQKFTVLPDTGSSNIWVPGPHCKSKACKKHKQYHPAKSSTYVKNGKSFAITYGSGSVAGVLAKDTVRIAGLVVTNQTFAMTTKEPGTTFVTSNFDGILGLGYRSIAVDNVKTLVQNMCSEDVITSCKFAICMKGGGSSSRGGAIIFGSSNTSAYSGSNSYTYTPVTKKGYWQFTLQDIYVGGTKVSGSVQAIVDSGTSLITAPTAIYNKINKVIGCRATSSGECWMKCAKKIPDFTFVIAGKKFVVKGNKMKLKVRTNRGRTVCISAVTEVPDEPVILGDAFIRHFCTEFDLANNRIGFAATTYST

SEQ ID NO: 25510 - DNA, 5234 bp, DROSOPHILA
atcctttcacaatcgccaatcactcactcacgcgaacaatgacgctgccaaatgctacgtggccgtcattttccggctccaactctgcaactttttgcactctaagtgtattcacatgtttattctaagcattcgtattggaattttagatagacaccccaaaaaacatgcataagcccatagatcgatcagcttataagaaaccgctaagatctttcaatggatttaagcataaatatttctaaacaagcaccatttaacatgcaattagagcactcactaagttcaaatgaattagcagcaataataatgtattaatttgtcaaacaagtcacgcgttcaccgattatgctgatttcttgcacataaacaaattcataaattctataacttatcagcacaaagtcgaatttttccatgcttagagatgttgacttccttgtccttatcagtaaacaaatttgcatgatgaaatggatgaacttcatattccttttctttctaatttaattttaattaataacatattgcatgtaacttgatactttcttaacatgctacaatacaaatgcgaactgcactttgcaagatgtttgctccgaaaatagactaatcagcgtggccagcaaacaaaagccaaaagatcaagaagtggcttgcagaattgtagatcaatgaaccaattaagatagattgactggcttgtgacccacaaaatagaaacgaaccggagttacgtaccctatttggtcagaatcccgaaaggccccaccgctttcgggaacaatccatgacaacaatttatttaattttaattgcataatgagtgagcggtttttttaggagcttctgggctgataaacatattttcgcaccagcaaaattcattcaacccaatcgggagtcaagcgataggcctataggatgcactttgggtcgataggaatttcgggtataaaagctgcagcgagcggactgaaaaatgcagttgcctgctggtctgtgttgcagcaagttaaatccatctgagctctccaatccttcagtttctcaattgatcagttaacatcaatagttgttacaatcaagatgaacagaatcatgctgttggtggcctttgcggccggcgttgtggctgctggaaggataactacgaatcaggacagggtccagggtattggtaatgtggtaacgcgcaaatgaaaggatttatatactatttatttcccctttttcgcagaccgcatgtccttggaggatctgcagctccaaaagtttatcctggatatcgtccagaatattcgtcagcctctacagcagagtgagctcatcaatctagatgtgggtctgattgcagacagtcagcgttatcgtggcggcattgataaggtgatgcataacgtcatcgatctggatcgccagcgtcgcctcctcgacgagcaccaggtgtactccgtgggtcgtttggagcatgtgcagcagctgcgtggcatataccgcctgctggctcgcgcccaggactttgacacccttcgccgtaatgtggtctacctgcgccgtaacattaaccctgtcctgctggttaatgccttggctctggccattcgcgatcgtgaggacactcaagctctgatcgtgcccgctgtccaggagctgctccccgaactgtatctggatgaggaagtgattcagcaggtgcgcagcgtcctaagggaacaaacccagcgcccatcgctcatggacatcgtgggtatgcgccagcgggctatgaacccagtgatgagcatcctgatgccctggagggagatccacatgcagatggctctaaggaaacagcagaacatccagaacgttttgggccagaaacgcgtcgttgtccgtgccgagaaccagggacaggttgagggcacctctctgctgacggacgatattgagttgcagaactttgttcaaaatctcatacaggaacttgcccttctggaggatgttactcagttggagcagagccaattgatcaacaatgatcaacgtgaagagcaatgggtcggtcgtcagcgcgtgcagtaccaagataacaaccaggaaagagatctgggtcaggatgtagacactggacgcctactccgtgtgagtcgccgccgccttctggagcaacaggatgaatatcagggtcagaacatctatggaaaccaaaaggatcgtttccagcgtctcctccgccgggatgacgacaacgacgacaatgatgacgatgatgatcaggatattcgcatgggtcgtgtccagctgcagcgtggtatcagccagggaggtctccgcattggaggagctcataacctgcccaccgttagcgtgaacagtgaccgtctgcttcacgtgagccgtcgccgtttgaacgccatccaacaagatcagcagcaggatcagctgaacggtcgccagcgtttcatgggtttggtgagaggagaccgcctcagtgagggtcgtcgtgttggtcagctggatgatgtgcgtcaggagcgtcagaacaactggcagaagcaggactacatcttgacacaaggtcgcactttcggagtccagcaggagcgtcaaaactatgccgatcagttggagagcgtgagccgcgacgacgagcgattggtgcatattaaccgacgccgcctcaaccaggacaaccaggacatccagcaacaacagatgcattttccccgcaggattaactccattggcgagggtcgccgcgtcatgggtgagcgccccatccaagatgaggacattctgaagctaatccgcggcgaaaaccgtctgaagctgatgaccgatgatgagatccttgagatgctgcaaaggaaccgccagcagcgtctgcaaaagcaccagaacgatgatgatgacgatgtcaacgatgacgatgtgaatgtggtgcaccgacagggactacgaagccgccgcagccttcccaatctccgtcagcaaaacaaccgcctcagcgaaattgtcctgcacaatcttcgccagctggtcgcacgtcttaaccaggaaagcatcgcccagggacagctgatcgaagagcagcagcagttgatcaacaatccccgcctgacgcaatccgagcgatatgccctccgcttgaaccaaatccgaatcaattcccagcgcagccgtcaagtcctcgcccagatcggccagattgagcagcgtatccaggaggttattggtcaggtgctgaaccaggtgaatgtcaactcgctgcgtggccaggtaatcgatcaacgccaagtggaatccctgatcgccgatgtactgctgggtcgccttggtcaggttggcatcatgaccattatccgccaggtggtccaggacaacaacattgagcaaatcgatcgtactggcttgggcatccgcctcagcgatcccgtcgtgcagtacaccctgcgccggattgtgaggatcgtggacgaacagcgtgaacaaatccttggaggctaccgccaggagcaactgcagatgcgcggtgtttcgatcaacgatgttcgtgtggataaactgcgcactcgcatcgaggagcacgaattggacctgagcaacttggtcgagcagcaggttcagggcatccagcaggagattgtgggacgccagcgtcgcctcaacaacaaggccttcaccattgacatggacatcacttcggatcaggatcaggatgctattattcgcatcttcctgggacccgcagaggatcaacagggaaggcaaggagcttccctggatgagcgccgacgtgacttcgttcttctcgatgccatccaagtgcagctggagaatggacgcaaccgcattcatcgcaggtccatcgatatcccctggacaactagcgatgtgacgcccctggtggagatctaccgccaagtgatgctgcaattgaagggtcagcaggcgcaacaggtcgtgggtatccaacagctggtcggcgagaacggacgcttcccccagcacttgctgctaccccgtggaaggcccgagggtctccccatgcaactcctggtcgtggtttctcctctggttgagctgcaggttcaggacgtcgtccccgctatcaccattggcattggctccgcctctcttcgtgatgcccgcccattgggttatcctctggaccggcccatccataacgagcaggagctcctgcagttgaccaatgtcctgcttcaggatgtggtcatcattcaggagaactaagttcccaatacgaagttccaaatatgttaaaccgatcgtctggccagctgctattcaatggacctatccgaaaatcccctgtcgaaccctagttttaattaatcgaatctaaatcaatttagcaaaatagcaaaatgttaaatactcttgtaattcatatatatatatatatatatttgtcattaaagttttttgcaagcaatgcaatgcaatcaagcattaaacttttgtttcatattggccgcaaaaataagttaacaaaatgttcactggtaaagttataaagccctgatcattgcctacacaaattgtatccttttgggaaaactcttgctattaagggctcccctaaacctccaattttgctccttattgaaattgtcacttttctcgattatcccccaaaatggttttatcgttttatcgcacctcatatacccaagtgccgttcaccttttctaatttcgaaaaacaatttcaatgcaaattgcatgtccatcgtggagcgggatgaggggcattggaattgctgatggtagggattacaggcggctgccacgcccccaaacaatgcccgcccacagaacaagcggatgccaggatagccagacaatgcaacgaccaaatggctggcaggcaacccatcctggcactataatagacttttcttattcttgccacacaactcaatttgcaacaacgacagggaaatacgtatacgaatacatatacatatataactgaaccatagcgcagacgcccagcgaagcgtcaattgccaaattaattggccgtaaaaaattgaaaatgaaaatataatcacactttccgttgtcgagctttcgttgtcactggctggctcaggtccaaacggatccaaacggcttttcaccctctatatgtatttggtccgctatagaagcgttttcccatcacgcccggatctagaagcgaatcctggggattggggatatgggggcagctgggaagtcgac

SEQ ID NO: 25511 - DNA, 3174 bp, DROSOPHILA
ctgtgttgcagcaagttaaatccatctgagctctccaatccttcagtttctcaattgatcagttaacatcaatagttgttacaatcaagatgaacagaatcatgctgttggtggcctttgcggccggcgttgtggctgctggaaggataactacgaatcaggacagggtccagggtattgaccgcatgtccttggaggatctgcagctccaaaagtttatcctggatatcgtccagaatattcgtcagcctctacagcagagtgagctcatcaatctagatgtgggtctgattgcagacagtcagcgttatcgtggcggcattgataaggtgatgcataacgtcatcgatctggatcgccagcgtcgcctcctcgacgagcaccaggtgtactccgtgggtcgtttggagcatgtgcagcagctgcgtggcatataccgcctgctggctcgcgcccaggactttgacacccttcgccgtaatgtggtctacctgcgccgtaacattaaccctgtcctgctggttaatgccttggctctggccattcgcgatcgtgaggacactcaagctctgatcgtgcccgctgtccaggagctgctccccgaactgtatctggatgaggaagtgattcagcaggtgcgcagcgtcctaagggaacaaacccagcgcccatcgctcatggacatcgtgggtatgcgccagcgggctatgaacccagtgatgagcatcctgatgccctggagggagatccacatgcagatggctctaaggaaacagcagaacatccagaacgttttgggccagaaacgcgtcgttgtccgtgccgagaaccagggacaggttgagggcacctctctgctgacggacgatattgagttgcagaactttgttcaaaatctcatacaggaacttgcccttctggaggatgttactcagttggagcagagccaattgatcaacaatgatcaacgtgaagagcaatgggtcggtcgtcagcgcgtgcagtaccaagataacaaccaggaaagagatctgggtcaggatgtagacactggacgcctactccgtgtgagtcgccgccgccttctggagcaacaggatgaatatcagggtcagaacatctatggaaaccaaaaggatcgtttccagcgtctcctccgccgggatgacgacaacgacgacaatgatgacgatgatgatcaggatattcgcatgggtcgtgtccagctgcagcgtggtatcagccagggaggtctccgcattggaggagctcataacctgcccaccgttagcgtgaacagtgaccgtctgcttcacgtgagccgtcgccgtttgaacgccatccaacaagatcagcagcaggatcagctgaacggtcgccagcgtttcatgggtttggtgagaggagaccgcctcagtgagggtcgtcgtgttggtcagctggatgatgtgcgtcaggagcgtcagaacaactggcagaagcaggactacatcttgacacaaggtcgcactttcggagtccagcaggagcgtcaaaactatgccgatcagttggagagcgtgagccgcgacgacgagcgattggtgcatattaaccgacgccgcctcaaccaggacaaccaggacatccagcaacaacagatgcattttccccgcaggattaactccattggcgagggtcgccgcgtcatgggtgagcgccccatccaagatgaggacattctgaagctaatccgcggcgaaaaccgtctgaagctgatgaccgatgatgagatccttgagatgctgcaaaggaaccgccagcagcgtctgcaaaagcaccagaacgatgatgatgacgatgtcaacgatgacgatgtgaatgtggtgcaccgacagggactacgaagccgccgcagccttcccaatctccgtcagcaaaacaaccgcctcagcgaaattgtcctgcacaatcttcgccagctggtcgcacgtcttaaccaggaaagcatcgcccagggacagctgatcgaagagcagcagcagttgatcaacaatccccgcctgacgcaatccgagcgatatgccctccgcttgaaccaaatccgaatcaattcccagcgcagccgtcaagtcctcgcccagatcggccagattgagcagcgtatccaggaggttattggtcaggtgctgaaccaggtgaatgtcaactcgctgcgtggccaggtaatcgatcaacgccaagtggaatccctgatcgccgatgtactgctgggtcgccttggtcaggttggcatcatgaccattatccgccaggtggtccaggacaacaacattgagcaaatcgatcgtactggcttgggcatccgcctcagcgatcccgtcgtgcagtacaccctgcgccggattgtgaggatcgtggacgaacagcgtgaacaaatccttggaggctaccgccaggagcaactgcagatgcgcggtgtttcgatcaacgatgttcgtgtggataaactgcgcactcgcatcgaggagcacgaattggacctgagcaacttggtcgagcagcaggttcagggcatccagcaggagattgtgggacgccagcgtcgcctcaacaacaaggccttcaccattgacatggacatcacttcggatcaggatcaggatgctattattcgcatcttcctgggacccgcagaggatcaacagggaaggcaaggagcttccctggatgagcgccgacgtgacttcgttcttctcgatgccatccaagtgcagctggagaatggacgcaaccgcattcatcgcaggtccatcgatatcccctggacaactagcgatgtgacgcccctggtggagatctaccgccaagtgatgctgcaattgaagggtcagcaggcgcaacaggtcgtgggtatccaacagctggtcggcgagaacggacgcttcccccagcacttgctgctaccccgtggaaggcccgagggtctccccatgcaactcctggtcgtggtttctcctctggttgagctgcaggttcaggacgtcgtccccgctatcaccattggcattggctccgcctctcttcgtgatgcccgcccattgggttatcctctggaccggcccatccataacgagcaggagctcctgcagttgaccaatgtcctgcttcaggatgtggtcatcattcaggaga

SEQ ID NO: 25512 - protein, 1028 aa, DROSOPHILA
MNRIMLLVAFAAGVVAAGRITTNQDRVQGIDRMSLEDLQLQKFILDIVQNIRQPLQQSELINLDVGLIADSQRYRGGIDKVMHNVIDLDRQRRLLDEHQVYSVGRLEHVQQLRGIYRLLARAQDFDTLRRNVVYLRRNINPVLLVNALALAIRDREDTQALIVPAVQELLPELYLDEEVIQQVRSVLREQTQRPSLMDIVGMRQRAMNPVMSILMPWREIHMQMALRKQQNIQNVLGQKRVVVRAENQGQVEGTSLLTDDIELQNFVQNLIQELALLEDVTQLEQSQLINNDQREEQWVGRQRVQYQDNNQERDLGQDVDTGRLLRVSRRRLLEQQDEYQGQNIYGNQKDRFQRLLRRDDDNDDNDDDDDQDIRMGRVQLQRGISQGGLRIGGAHNLPTVSVNSDRLLHVSRRRLNAIQQDQQQDQLNGRQRFMGLVRGDRLSEGRRVGQLDDVRQERQNNWQKQDYILTQGRTFGVQQERQNYADQLESVSRDDERLVHINRRRLNQDNQDIQQQQMHFPRRINSIGEGRRVMGERPIQDEDILKLIRGENRLKLMTDDEILEMLQRNRQQRLQKHQNDDDDDVNDDDVNVVHRQGLRSRRSLPNLRQQNNRLSEIVLHNLRQLVARLNQESIAQGQLIEEQQQLINNPRLTQSERYALRLNQIRINSQRSRQVLAQIGQIEQRIQEVIGQVLNQVNVNSLRGQVIDQRQVESLIADVLLGRLGQVGIMTIIRQVVQDNNIEQIDRTGLGIRLSDPVVQYTLRRIVRIVDEQREQILGGYRQEQLQMRGVSINDVRVDKLRTRIEEHELDLSNLVEQQVQGIQQEIVGRQRRLNNKAFTIDMDITSDQDQDAIIRIFLGPAEDQQGRQGASLDERRRDFVLLDAIQVQLENGRNRIHRRSIDIPWTTSDVTPLVEIYRQVMLQLKGQQAQQVVGIQQLVGENGRFPQHLLLPRGRPEGLPMQLLVVVSPLVELQVQDVVPAITIGIGSASLRDARPLGYPLDRPIHNEQELLQLTNVLLQDVVIIQE

SEQ ID NO: 25513 - DNA, 5838 bp, DROSOPHILA
gccctatgctatcatgctatcaacataagtaatttttcaattaggaagcgacgaagtgtgcgtccattcgagcaatgtaatggtatatccacgagtttaatgcaaataaaaatataatattaattaattattattaattataattatttttataatttttataataattttttttaataattattataattattatttatatataaataattatttctaaaaaagtgcaatagttttcggaagtttgttctgatcaaatagaacattaaacattaaattaaaaaaaaaaaaaatattatacacctatttttacagctaagtgtggattcaacttaactgatcagacaaacgtgaagcagtcagaaaggaaagcatacatgaaagacatccattggcgcccaggataacctcctttcttattgccggatggcccgctttgctcacctcacggattcgttccgtgtctatggtcaggatcccgttgattatatccagaatagctgcctccatttttggggagttactgttcgcgcccaggcggataatccaatgcaatccggtacaaattgcagacgacgttacgcggtattgagaattgaaaagtggaataccggggagaaatccccgtcgcacgttttgcgcttgttgcagtttacagtttatcgtaagcttattttacattctactcttgaattggctagcggttatcattgcggtttaacgagtggggatgtaacgtaaatttatctcgcgcagttaattggtgacttgtgttaacatttttctttaatatatgtatttatgtttttttgtttattatatatgtgtatttatgtttttttgtttattgtggagttttgatatatgcgctagcagcagtgatgcagtagaatactaaaaatatttacatttttgacatttgatcgaccggacaagtaagcaaaggccgcttcgacactagtatgcagccctggatcttttatcatttatcgacgtccatttttgatcgaagcgacgcgccttttttttgttttcgcgttcgcactgcaaactgtaactgtttaaggacaaagcggaatggacagtagcagtggaagccaaggaaatggcagtttcatggaccagaactcgctgggcatcctgaacatggacaatctaaagggtaagcaggtggagcacgccggaaataagccgaagcagcaagtaatcctcattccctacagtcttcggcgacttgtccagcttcagcaaaagtggaaggaggagcggcactggtcgggactctcccgccgtccacgagcggctccgagaagaacgactgcgtgcgctggagacactggaaaagccccgaccgtcgcgttccagccaagcaaagagcactgccctccagatgcgcttgtccacaaacatctcggagctggtaacagacgacaccatcgatctgaacagcagcagctcctttgctttggtcacgcccgccaccaagggcacaaacatctcttttgagcctgcggagatcaccggcaggtccacactctgccaggcgggaaaacagcgccgcagggagaagccatccctgtcggtggccgaaattctaaagtcatccttcgttgagaaggctcgcctgttggaaaggaagctgcaggatgccagtcaggcggaggccagctatcacttatcacgtggcagctccagcagcctctcagattcattcaactgctcgcgcagcttaccgcgcactgcggacatgagtgaactgagtcttaacggaggtgggggattttcctttggatctgcctcgttggcggcggaaggccaggatgagagctttgctcccgccgagctaatgcagtccaaattggtgctcggtgaaatctcctgggcgcaggagttcacggccatgccgacggccacgttgagcacacaggcgttgaagaagattgccgcaccaacatccgagatagaaacctcggtgtccaagtaagcaacataaaatagtcttccaaatataatttgatcaactttcaacttttatttacagttctgtcttggccggagatccagacttttcgctgggcaactacttccagacgcgttcggaaaatatatggaacattgtgagcaatagcagcccgaatcgttcgcgaaccaaccaaccgctattggaaccagaaagtaacgtgacactggattcggttggcgagaagaccccacagccagacaataaaacatacactaaaacggatgccataactggctcgaatctcggacgcaatcttatgcgtaagatgcaacaggatcggattgaaactgcgctaaagagcaggaatggtctggcagccaaagagaccaagcgtccgccgtcgagctccgagatcctaagtctctccgcgatcgacaaggcgctaagggacatagatctcaattcggatacatccactgtagaggttgtcaaccacctgtgggagcatggtcgtggaaacaattatgacgatggggaaaacaaggagaaccagagcagcaactcccatgcggagcgcacttcgtgcggctccaacaagcttaccgacaccatgagtttcacggactctgtgctaaactcaacggattttcgtcatttgcagcagagcatctcgcgcaagccgctcagtccgctggcggaccatccgcaaatcaccatcagccgtgcggacaccgatcccgtagagacagaagccgaggcggacatcgatgagtggccctcgacgccggtaaaggagcctagccgcagagtgagacgtactaagatttctccaagagccgcaagtccgtcgagtagcgacggcgtacgtccactgacctgcaccgaggatgaaaacgatgaggaggacgaggacaagacgccagtgaacaagaagagggtttcgatcgctacaatgggcttgattccgcgcaaagcctcctccttaagcagcactcgcttggatggttgtgacgttgccgtggcctcttctaccgaacgtgattttggcatttcaccgaacctggccaaaaatctatcgcccctgtcctcgccaagaagctgtctctcgtcgccgctgctggacagcacaaccagttccgaccgccggcagctcatgagtggagcagcccgcaaagcaaactcctcgcccgcaggtagtgaggccagttccaccagcggattcacagcgagtggaagacgtgggttgggaaccagctctgttgcagtgccacgtagtatttcgcgctgctcgaactctagtgagttcagtcatcgcgatggaaaactgctccccctaaaggtgacccacacgaccctctgttggggaagcacaaagctgcggacagatgtgcgtaagtccatgcaggttaagaacacagcggacaaacggctggtcattcggcttggcatccagggacccggattccagctggtgggcaccgacagcagcacgatcacactccaagccatggaatgccgctcggtagtgatcaacttttgccccactgtctgtggagcggccatcggagccttgtctttctatgcaccaccaggagcgcataacagcaaccagccgggcctagagattccgttgtacggctacgggggcagtgcgtccatcaccataaacggtctgctaaagggaccggtgggcgccagtttccttaccatcggcgatgtatgcgagctgtccgctggtccgctttcggcgaatctcaagtttcacaacaagggccctctcaccgctttcgttggtatatcagtggactccaccgtgctcatgaaactgcgcctcagcgaggccttcgaggtacgtccgagccgcttgatattgccgccaaatagcgagcgctgcgtgcagatacttttccgaccgaatcgtgaggacttgaagaacatacttaagaagaccgcacaggtgttgaccctggccaatatgcggattttctgcggagacgagcccaacagacagcgtatgcgtagcttggtccaaaggatgagcagccgacagcgagagaaactcacatcgccgatgctggacagcatttggggcgaatttccggacgagcagccagtgcgcaacatcggtcagctgaacgaaccgccagagtttattctggacttggtcacagtagtgcggattattgatgttgcgcttaccctcaatcgggactttgatgaatcgtctgagagttccctgatgttcctgccggaggccgacgaaaccgtgctattccgcaccatatgtgtggccaattcgccgacgccaacgcagagccatctattggagccagtggatgagctattggaggcggacaccacaacgttgacgcccgtcgagcaaaactggtgtgtgcagccaggtttgctggaattcggagtgggctgttcgccactggccactttgtccgtaaccaacagcttctgctccaggcagctcatcgaggtcacatgcaatgtgcccgatttggtgcgaatcagtcccagtgagtgctacgtatccccggatggcggccacgcggagatcgatgtgcgcctgctccgctcacccaggcaggatttgctcgaaagggagccgctcattgtggtctccatggaaaacgagcgcatcagtgtcccgattagttttaaattttaaaatttgttttatttgtgcctgctaattctgctttccctatgtttgtgtagttagtttaaacaaaaattgtattgtgtacttgtgaaatgaaaccgtgtttgcagagtatttgtaaggaaaacgcataaccctaaagttaaaatactcgcttgtttcctaaaagttgaatttagcttaaataaaaactaataaagtatatgagttaattttaaattttgatatgttgctctcgaatattcaaaaagtaacgtatatgtagcgatagttcgtcgaaaagtgagttggcgggcacattgcaaggtgcaagccgagtacggtcacactgaggaaagtgcatcatttaatttccagcattttccgatgaaaatggatgccgacagcagtggaacccagcatcgaggtacccactatatagtataaccgatctgatcagattctgatccagtgccatctttttgttgttttttttctagtgtcatattgtgtgaaatgtgaaatggatgagaatgaacgctggacgaccagacagagaaagagaagctaggacaataggactctcaactgcgcattacgtggattccgtctccgacgatgcgccaaacactatgcgttagatgcattgactaaccgcacactcttttcacatagattcccgtggctcaaggtctcgatcccggcgagaaagagaataccatgggcgatcaagcgagagggacagcagaaagaaggagcacaagattccgtactttgcagacgaggttcgagaacaggatcggttgagaagattgcgccaaagagcgcaccaatccaccagacgcactcgctccagatccagatcacagtcgtccatcagagagagcaggcacagaaggcatcgccagcgctctaggagccgcaatcgcaaccgaagtcgcagcagtgaacgaaaacgccgtcaacatagccgaagtcgcagcagtgaacgaagacgccgtcaacggagcccgcatcggtataatcctccgccaaagatcatcaactactatgtgcaagtgccaccacaggatttctacgttagtagttatttgtattgaaacaaataacaaatctaacttaaatcgattttgcaggggatgtctggtatgcagcaaagttttggataccaaaggctaccacgtcctccgccgtttccaccggccccctacagataccgccagcg

SEQ ID NO: 25514 - DNA, 3716 bp, DROSOPHILA
ttttgatcgaagcgacgcgccttttttttgttttcgcgttcgcactgcaaactgtaactgtttaaggacaaagcggaatggacagtagcagtggaagccaaggaaatggcagtttcatggaccagaactcgctgggcatcctgaacatggacaatctaaaggtcttcggcgacttgtccagcttcagcaaaagtggaaggaggagcggcactggtcgggactctcccgccgtccacgagcggctccgagaagaacgactgcgtgcgctggagacactggaaaagccccgaccgtcgcgttccagccaagcaaagagcactgccctccagatgcgcttgtccacaaacatctcggagctggtaacagacgacaccatcgatctgaacagcagcagctcctttgctttggtcacgcccgccaccaagggcacaaacatctcttttgagcctgcggagatcaccggcaggtccacactctgccaggcgggaaaacagcgccgcagggagaagccatccctgtcggtggccgaaattctaaagtcatccttcgttgagaaggctcgcctgttggaaaggaagctgcaggatgccagtcaggcggaggccagctatcacttatcacgtggcagctccagcagcctctcagattcattcaactgctcgcgcagcttaccgcgcactgcggacatgagtgaactgagtcttaacggaggtgggggattttcctttggatctgcctcgttggcggcggaaggccaggatgagagctttgctcccgccgagctaatgcagtccaaattggtgctcggtgaaatctcctgggcgcaggagttcacggccatgccgacggccacgttgagcacacaggcgttgaagaagattgccgcaccaacatccgagatagaaacctcggtgtccaattctgtcttggccggagatccagacttttcgctgggcaactacttccagacgcgttcggaaaatatatggaacattgtgagcaatagcagcccgaatcgttcgcgaaccaaccaaccgctattggaaccagaaagtaacgtgacactggattcggttggcgagaagaccccacagccagacaataaaacatacactaaaacggatgccataactggctcgaatctcggacgcaatcttatgcgtaagatgcaacaggatcggattgaaactgcgctaaagagcaggaatggtctggcagccaaagagaccaagcgtccgccgtcgagctccgagatcctaagtctctccgcgatcgacaaggcgctaagggacatagatctcaattcggatacatccactgtagaggttgtcaaccacctgtgggagcatggtcgtggaaacaattatgacgatggggaaaacaaggagaaccagagcagcaactcccatgcggagcgcacttcgtgcggctccaacaagcttaccgacaccatgagtttcacggactctgtgctaaactcaacggattttcgtcatttgcagcagagcatctcgcgcaagccgctcagtccgctggcggaccatccgcaaatcaccatcagccgtgcggacaccgatcccgtagagacagaagccgaggcggacatcgatgagtggccctcgacgccggtaaaggagcctagccgcagagtgagacgtactaagatttctccaagagccgcaagtccgtcgagtagcgacggcgtacgtccactgacctgcaccgaggatgaaaacgatgaggaggacgaggacaagacgccagtgaacaagaagagggtttcgatcgctacaatgggcttgattccgcgcaaagcctcctccttaagcagcactcgcttggatggttgtgacgttgccgtggcctcttctaccgaacgtgattttggcatttcaccgaacctggccaaaaatctatcgcccctgtcctcgccaagaagctgtctctcgtcgccgctgctggacagcacaaccagttccgaccgccggcagctcatgagtggagcagcccgcaaagcaaactcctcgcccgcaggtagtgaggccagttccaccagcggattcacagcgagtggaagacgtgggttgggaaccagctctgttgcagtgccacgtagtatttcgcgctgctcgaactctagtgagttcagtcatcgcgatggaaaactgctccccctaaaggtgacccacacgaccctctgttggggaagcacaaagctgcggacagatgtgcgtaagtccatgcaggttaagaacacagcggacaaacggctggtcattcggcttggcatccagggacccggattccagctggtgggcaccgacagcagcacgatcacactccaagccatggaatgccgctcggtagtgatcaacttttgccccactgtctgtggagcggccatcggagccttgtctttctatgcaccaccaggagcgcataacagcaaccagccgggcctagagattccgttgtacggctacgggggcagtgcgtccatcaccataaacggtctgctaaagggaccggtgggcgccagtttccttaccatcggcgatgtatgcgagctgtccgctggtccgctttcggcgaatctcaagtttcacaacaagggccctctcaccgctttcgttggtatatcagtggactccaccgtgctcatgaaactgcgcctcagcgaggccttcgaggtacgtccgagccgcttgatattgccgccaaatagcgagcgctgcgtgcagatacttttccgaccgaatcgtgaggacttgaagaacatacttaagaagaccgcacaggtgttgaccctggccaatatgcggattttctgcggagacgagcccaacagacagcgtatgcgtagcttggtccaaaggatgagcagccgacagcgagagaaactcacatcgccgatgctggacagcatttggggcgaatttccggacgagcagccagtgcgcaacatcggtcagctgaacgaaccgccagagtttattctggacttggtcacagtagtgcggattattgatgttgcgcttaccctcaatcgggactttgatgaatcgtctgagagttccctgatgttcctgccggaggccgacgaaaccgtgctattccgcaccatatgtgtggccaattcgccgacgccaacgcagagccatctattggagccagtggatgagctattggaggcggacaccacaacgttgacgcccgtcgagcaaaactggtgtgtgcagccaggtttgctggaattcggagtgggctgttcgccactggccactttgtccgtaaccaacagcttctgctccaggcagctcatcgaggtcacatgcaatgtgcccgatttggtgcgaatcagtcccagtgagtgctacgtatccccggatggcggccacgcggagatcgatgtgcgcctgctccgctcacccaggcaggatttgctcgaaagggagccgctcattgtggtctccatggaaaacgagcgcatcagtgtcccgattagttttaaattttaaaatttgttttatttgtgcctgctaattctgctttccctatgtttgtgtagttagtttaaacaaaaattgtattgtgtacttgtgaaatgaaaccgtgtttgcagagtatttgtaaggaaaacgcataaccctaaagttaaaatactcgcttgtttcctaaaagttgaatttagcttaaataaaaactaataaagtata

SEQ ID NO: 25515 - protein, 1146 aa, DROSOPHILA
MDSSSGSQGNGSFMDQNSLGILNMDNLKVFGDLSSFSKSGRRSGTGRDSPAVHERLREERLRALETLEKPRPSRSSQAKSTALQMRLSTNISELVTDDTIDLNSSSSFALVTPATKGTNISFEPAEITGRSTLCQAGKQRRREKPSLSVAEILKSSFVEKARLLERKLQDASQAEASYHLSRGSSSSLSDSFNCSRSLPRTADMSELSLNGGGGFSFGSASLAAEGQDESFAPAELMQSKLVLGEISWAQEFTAMPTATLSTQALKKIAAPTSEIETSVSNSVLAGDPDFSLGNYFQTRSENIWNIVSNSSPNRSRTNQPLLEPESNVTLDSVGEKTPQPDNKTYTKTDAITGSNLGRNLMRKMQQDRIETALKSRNGLAAKETKRPPSSSEILSLSAIDKALRDIDLNSDTSTVEVVNHLWEHGRGNNYDDGENKENQSSNSHAERTSCGSNKLTDTMSFTDSVLNSTDFRHLQQSISRKPLSPLADHPQITISRADTDPVETEAEADIDEWPSTPVKEPSRRVRRTKISPRAASPSSSDGVRPLTCTEDENDEEDEDKTPVNKKRVSIATMGLIPRKASSLSSTRLDGCDVAVASSTERDFGISPNLAKNLSPLSSPRSCLSSPLLDSTTSSDRRQLMSGAARKANSSPAGSEASSTSGFTASGRRGLGTSSVAVPRSISRCSNSSEFSHRDGKLLPLKVTHTTLCWGSTKLRTDVRKSMQVKNTADKRLVIRLGIQGPGFQLVGTDSSTITLQAMECRSVVINFCPTVCGAAIGALSFYAPPGAHNSNQPGLEIPLYGYGGSASITINGLLKGPVGASFLTIGDVCELSAGPLSANLKFHNKGPLTAFVGISVDSTVLMKLRLSEAFEVRPSRLILPPNSERCVQILFRPNREDLKNILKKTAQVLTLANMRIFCGDEPNRQRMRSLVQRMSSRQREKLTSPMLDSIWGEFPDEQPVRNIGQLNEPPEFILDLVTVVRIIDVALTLNRDFDESSESSLMFLPEADETVLFRTICVANSPTPTQSHLLEPVDELLEADTTTLTPVEQNWCVQPGLLEFGVGCSPLATLSVTNSFCSRQLIEVTCNVPDLVRISPSECYVSPDGGHAEIDVRLLRSPRQDLLEREPLIVVSMENERISVPISFKF

SEQ ID NO: 25516 - DNA, 3017 bp, DROSOPHILA
gttgtcgtgtgttcggtatcgcttgtcttccgacttttttgagtgaggtgaagacccccatgtatcatgggggcatcatgcaattaatttggctccggttgacccgcagccccaaaaaacaatgagctataaaaaccgtagtcacacttcgagttcagcagcacaaatcaacttgtgatccaagcagcaacaagcccatctcctcaagatggtaagttcagggattacactacctaaaggataatcggcaaaatatatatgctaaaatttgattgaaaaaaatatctaaaccatatgtatttccatcctagaaattccttatcattgccgtcgccttcttggcctgcgcctacgctgatgtttccgagccggctgccggaggatacgattacccccagcccgctccaccggcgcctgtgaagagctacattcccccaccgccaccaccacccccaccagcacccaagaacacctacattcctcccccggctgctcctgccaaggcctacatcccacccccaccaccaccaccaccaccggcgccaaagaacacctacatccctccagcaccggctccagttgctcccgtggagacctacatccctcccgcagccccagcccccgcctacatcccacccgctcctgtccaggccgaggagcccatcatcgaggagatcgagcagccagcccaggacggctaccgctacaagaccgtccgtcgccgcgtcttccgtcaccgcaactaagtctgtgtcccccaattgttgactaatgtgataggccccaggcaatgttcaccttgcccaggtatcagttaatgttttctttaaagatggatgtgaagagtaaataaataatcaaaaagcacaacagtctctattacgtataaatcaaaagacagtaggctgacaaaaagggctcaaaaatacaagttatgcaacatgttcccgcaaagaaatcaaaacacgactctcaccggacgtggaggatcccttccagaatgtgcccgattggggaaggccatagaagagtgccctgttgcgcggtcagatggcttcctgctctaataattctgggctttttggtatggtcctaccacgtatttgtttaccaaatctgcataaagaaagtttcggactacttgaccattggactgttgctctttttctaccatctactgttgttcatgtttctatggacatggtttcggtgcattttcgtagctccagttaggattcccgatcaatggaaaatatcacccgaggatgtcgacaaattgaagcgaaacgatggaatagagggagcatctcgagtcttaaattatgcagctagaaatttacccattgccacgtgcaccatcgatggactagtgagatattgcaagacttgctggattattaagccggatagagctcatcactgtcgaacctgccacatgtgcgtcctgaaaatggaccaccactgtccttggatagtgaactgcgtgcactttcacaacttcaagtacttcatactcttcctgttttacgctgaagtatattgcttttatctgttctgcgtaatggtctatgatttgtacctgatttgtggctttgaagttactgccctgaaaaatcagcattcctggaacattcttcagtacttggtatgcatactctttaacatattcaccgtgattatgtacactgtcagcttgttaaacgtatctcgaaatcgcaccactatggagtcggcttatgccacatactttcttcttggcggcaagaacaataatggtttcaatttgggatattttgttaattttcgtgacctttatggcgataagtggtacctctggccctttccgatcttctctagtcgtggtgacggattttcattccccttggcccacgatcgactaaaggaagtccgtaccggtaaccagaaaaaagataatcaacccaccagaactcagatgtacaaggaaaacatgaatcgaattctcggaattcatcagccacctttcaatgaagaataggttcgcttaaaataaaagagcaatgttaaatttttattacgatgcactgttattgaaatttatgtgtcttaaattttctcattttccatttcaaatcaaggaaagcgaaacaaaaaaatttcgaggagacagctcccgtagacaattcgaaaagggggaactccatcaacgtcttaatttacgagtcattggcaagtgcatcaggatctgactccatccgcttggcaattgcaatccgctggccttttcttcgacccgctgagtggccaacatcgataaatcctcgacattccggttctctagtccgctcctgcccacaaacgcattggagtcgtttataaagcgcttaacattcgtgacatatttcgcatttggccgggtgtcggtcgcagaaatttatagactttatccattaggaaaacaattacgagtgcaaacaatggccattgaccaatgtgcgatgtccagcggatggactccccggccagaggcgattccttgggcactgagcatatgttgggattgtcgcgcccccaagttcaatgtcctcgtctatattttcttattatgctgcggcgacttcttgactgctgcaacacaaatccaattaccttcaaaataataaacttatgtacataccaaaaaggaaaagaatgccatccagggtcctaccatttctccggctgactctacgcacattttgctttatcaactgttgatagactccgtggggaattttccgtatgtcacgacaaagaagacgatggaaatggaaatgggagctgtctgccgtcgggcggcattttttcttcatgctcctgtagtctgttcccgttctcgcatgcactgggaaaagccggaaagaagtttaatatgataggtacgttttttcgtagcagaacaatcttctcccacttctgtcatttcataatggatttatcatcaattagcattatttcctacttctattgcaatattttattatatttaactagaattt

SEQ ID NO: 25517 - DNA, 1017 bp, DROSOPHILA
atgtgcccgattggggaaggccatagaagagtgccctgttgcgcggtcagatggcttcctgctctaataattctgggctttttggtatggtcctaccacgtatttgtttaccaaatctgcataaagaaagtttcggactacttgaccattggactgttgctctttttctaccatctactgttgttcatgtttctatggacatggtttcggtgcattttcgtagctccagttaggattcccgatcaatggaaaatatcacccgaggatgtcgacaaattgaagcgaaacgatggaatagagggagcatctcgagtcttaaattatgcagctagaaatttacccattgccacgtgcaccatcgatggactagtgagatattgcaagacttgctggattattaagccggatagagctcatcactgtcgaacctgccacatgtgcgtcctgaaaatggaccaccactgtccttggatagtgaactgcgtgcactttcacaacttcaagtacttcatactcttcctgttttacgctgaagtatattgcttttatctgttctgcgtaatggtctatgatttgtacctgatttgtggctttgaagttactgccctgaaaaatcagcattcctggaacattcttcagtacttggtatgcatactctttaacatattcaccgtgattatgtacactgtcagcttgttaaacgtatctcgaaatcgcaccactatggagtcggcttatgccacatactttcttcttggcggcaagaacaataatggtttcaatttgggatattttgttaattttcgtgacctttatggcgataagtggtacctctggccctttccgatcttctctagtcgtggtgacggattttcattccccttggcccacgatcgactaaaggaagtccgtaccggtaaccagaaaaaagataatcaacccaccagaactcagatgtacaaggaaaacatgaatcgaattctcggaattcatcagccacctttcaatgaagaatag

SEQ ID NO: 25518 - protein, 338 aa, DROSOPHILA
MCPIGEGHRRVPCCAVRWLPALIILGFLVWSYHVFVYQICIKKVSDYLTIGLLLFFYHLLLFMFLWTWFRCIFVAPVRIPDQWKISPEDVDKLKRNDGIEGASRVLNYAARNLPIATCTIDGLVRYCKTCWIIKPDRAHHCRTCHMCVLKMDHHCPWIVNCVHFHNFKYFILFLFYAEVYCFYLFCVMVYDLYLICGFEVTALKNQHSWNILQYLVCILFNIFTVIMYTVSLLNVSRNRTTMESAYATYFLLGGKNNNGFNLGYFVNFRDLYGDKWYLWPFPIFSSRGDGFSFPLAHDRLKEVRTGNQKKDNQPTRTQMYKENMNRILGIHQPPFNEE

SEQ ID NO: 25519 - DNA, 2258 bp, DROSOPHILA
cgtgctctttaatcataaatttggaacatatctgatttggaattaaccaagagaccgcgttcggagcgaaatcaaagcaaatgcatttcccccaggcgaacacaaagtaaaatctgatttatttattttgctaatctcggcaatagcttaatggggggcgatgtcgcagcgcaaatggccgaatctctgccgatccactggccatagccatagtcatataacacggaaatggatgtgccggctggccagcggactgatggacagttgcgacttacttttcgccgggcttgtatagatcccaatgcgctgtaatggccaatgaaaaattggtctagactcagccaaattgacaatgaaaaataaccatggaatcattggttcgataaatagaaaccgaatgcgagaagtgatggcgaaagtgacacagatggttataagcaagcaaaatggtataaaattaaaatttaaaatttgaataactcgcatatttttaattaagtaaaaatggaaatttacatagacaaattttggttaataaacattcgaaaaagttttaatgaattttgctatttattagctcaaagtttatttacacatcataatgtgctatatttttgtagctttaaaaaaagtgaattttaattagtctgcttccgaaaaatttgtattcccagtatttttccacccacttttagtctctactaattaatggaaactagatcaaataggacgcaattttagcacatctaataaactgcactttgctctttatagcgtgcatatttttttcttgtttatttgttagttgttttcgtttcggttttccaatgctggatactagccaaaaagctgcatgccactagacagtttgcacaagagccggattcctatttttagagcttccatggatgacgatgcgggatgcagtgcgaatggtaatcgttatgtcaagtaagtcacatgtagtccgcgcattatgcgaattgcggacataaacatttcatggggcggggtaaaagtaaaagcctagggcaaacatttgaatctggaaactcacctttttgtgacttttgaagacggaacacttgaacgtatccgtgctggcatcgcgcgctatgtagctgaatatcttgagatcgctgctgtcgtgggacacgtagaatattctatagatgggatgattgagcaactcgatgtcctcggggtcattggtccagttctttttctaaacaacaagtagttcaattataccaagcatatatatgtagttaggcattgacttacttttcgacggcgctttttgagcacaacgcgcacgccatttaccgatatgtgaatggtgacctttcgcttcttcagattctgcactttgcactcgtactgtggggtagaaaaaaaaaacgaataatatgtatctgtataagttttccgccgatttcacgtaattccagaattttcaattaacatttgactgcctgtgacggctcgcctaatggcacagacatgacaataacaagcgccaaatttaccacgtcttccctgctccacttctccattcccatcagctgacagacagggccaatacacaataacccacatactaacacaaacccccaaaagaagaagaaaacccgactaactcggtttaagccacggcacgcacgacttcgtggagcgatggaaaagggaaagaataaacaagcctcgttactttttatgctactagaatggtatttttttctcttcgagccagcttccttttgccttttggccatatgtacatatatagtcgcatgggagatgagcaatcgagtggacgtgttcacagaagtcgcggataaaacaaaaacgtaattgtgatccatcacaaacatttgcgcagatcgtgtgcttatctcacaaacaaaatctatttttagtcactgcataacggtgacggcttcggttcgcgaaacttatcagcaactagcaatttctaagctgtgttgtttttgcccctcgccctgcgcgctgcgcaagcgggaggttgttacaatttaccttacaagtaaaccggtaaatcttatcgtgtttagtaaatatcaattgcattatacggcataagtataaagacaattgatataatggagaattcatttgctcaatcgcgacctagcaatgggtgcgataaatttgagaaaatgaggaaagtagcaggtgttgagccaggagaattacgctcccaactccgcgccagctgtgcagttgtttcccctaac

SEQ ID NO: 25520 - DNA, 348 bp, DROSOPHILA
atggagaagtggagcagggaagacgtgtacgagtgcaaagtgcagaatctgaagaagcgaaaggtcaccattcacatatcggtaaatggcgtgcgcgttgtgctcaaaaagcgccgtcgaaaaaaaaagaactggaccaatgaccccgaggacatcgagttgctcaatcatcccatctatagaatattctacgtgtcccacgacagcagcgatctcaagatattcagctacatagcgcgcgatgccagcacggatacgttcaagtgttccgtcttcaaaagtcacaaaaaggtgagtttccagattcaaatgtttgccctaggcttttacttttaccccgccccatga

SEQ ID NO: 25521 - protein, 115 aa, DROSOPHILA
MEKWSREDVYECKVQNLKKRKVTIHISVNGVRVVLKKRRRKKKNWTNDPEDIELLNHPIYRIFYVSHDSSDLKIFSYIARDASTDTFKCSVFKSHKKVSFQIQMFALGFYFYPAP

SEQ ID NO: 25522 - DNA, 5616 bp, DROSOPHILA
ttgtttgtttgttcaagataaccaggctagatgtccgatctgattaaagtgcgagtgcagtggatcaaatatttaaccgatactaatgttgtgccatatttttttgtctctttcccggtatcatcgccatcaccacgtggttatctcaccattccccactctgtgttcgtctgcaataatgtgttttgtatatttgtttatagcgtaatcaaccttcttgcatctttttttattctatttttaaaactgtatgtatttaacgccggcaacaaaacatattatgtagcaacaacacttaagaacggaaaattgtagtggatcccggaaggtgttaaacgctgcagccgatgctggatgagggatgaatggagccaggagtcagaggaaggagagaatcggagaatcagcatgggaggagacccactaaacgcgacacacaactaaacattactacttacatacttatattatatataaattaccataggcataacgatcattattaaaaacatttgtagagtttggaacatttgatcgcatctgaatgcaaaaataaaattgtagtgaaacaatatcacacgatctattgaaaagtttaatgtggagcaaaattgaatatttaactcccaaaattgtataccaatttctaggtttcagttgtcagttcaaagtttggaaatgtaatattttcctttttatagtttcgttcaaattaagctttatatacattctgattatttggcaggtgcattgattatttataatttgtgagaggtatggctatgaaaagcatagattatacaaacaaaatacttgtatttttacattttaaaaatactgttaatttattttgaaatcctaaaatcattccagcagtaaacgattttgatagcaagctagactgatatcgataggcgccaaacagacacctggcgatagttggggcttctttttggttttttaattggatgatggtggtggtggtggtggtggtggcgagcagtttctagcgagagatcagttggacttttgcgacgaagcgatacgcttgtttgttttgccgttccgctgcgcgttggccaatgtttgcctaactctcgaatcgaattccgaaaccgagtgtggacgcgtaagtgccattgaattattccgtctgacgctcgagcgccatcgaatcggatgcggcgtggaatgtggtggagtcaatggggggatcagatgcaaatttgattgggcaaatgggtggaaccaatcaattgtgtgtatacaataaaacgaggtgtttgtgtgtgcccaaccaaacacagccaaatgcggaacattatcagtttacccacggctgtcgcaatctccgcgtccgtttaccgtccactgacctacgatccacctgcccccgtggacgcaacaagtgtccgaatatttatagtctatgggctctatgcattaattactcgcatatgtcaaaaacgctgagctgttattacaattagtgcttcattatttagcccgatttccccaagtggcgcgtttcgctaagcgttattatttttaccttccgctaaacacttggcgccgattcgattccctccttaccctcgaaaccagtgatactccatcgtgcgactgagcattatctgacggctaattttcccccgataagccggaatataaattgaagtgctctttatttatgtccgcgatacaacggcgaaatcgaggcaaaaaaagaaggccggtacttaaattaccattgcgttgggcaggcaacgagggtcaggggtcttccatttcgacatatatctatgtacacatttataagcatttctacagtccaacttccctcagttagatatgttatgattaggaggttgacaagaataatagttgcaatattaatttattagtttatacaagaaagttttgagatttcataatctcattgaagtatttatatattttattttaaaaagtatttgtatttgcttgtgttctgcattgtactttgtactttaacaatgtatgcttaaactgaaacaccactttctaatttaattcagtccgaaaacaaatatattccaagctaaactttaacttttgttcccacttagggacgttggactgtagcttacaagtgtgtttgaatggcattgctgtaatttcaagtctgcatatttaagcactgtagtttgttcacttagacctcgggttaaggtaatctctggcaatagacagtgggccctgtagctggttgaactgtcaaacatttcactttttttatgatagccatattactaaggtcaaagttacagggtccgcccataaaaagactattactttttaaaagttaattttagtgataataaaatgcacttaaatagctagtaaaactgtacttaaataaacatgctgtattagtctatatataattaaacccatcatattaatggatcaataatagttacggcgatctttaagtttgtaactttcaacgggaaaactttgtaattattcagctcactcctgttgaggaaactcattatgttgcaattttaattgatcgtggtgatttggaaataagtagactggctggcgacaaagcttttatttttatggcattcattcaatcaccattgaattagtcctcaagtgcataatgggattagcgttcgattaaacttgttcagccgatagaagtggatgaataataatgcggagatttggaatgttccgaaatcggatgttccaccgtaggagcacatgaatgatgcatggacaggcaaaggcttggactcccacacggactttgccgccgttggggcggcacactcgtgtgaatcacgatgcttacgatgtcgcaaggctttttttggccgaactcaccattactatcttatccgaaaaagattgaaatttaattagagttatcaatttcaatgggggtttaggccacgccacattaatccggccaaccgagtgcccggcccagtctttgccaatcaccgcatgggaccagaggatatccggacaatccactggccacgtaatcaatcactttatggactaatagccgacagcccacagaaacatgcacaaggccattaaaaacaaatccagtaagtaagtgtgcgaaaatggaaaattccgctaatacaatttggataattattaaaccagggctcctctgcggactcaagaactccaaggcggatctaacgacagccaagtttatactatattatgggtaagaactaatattattattagtaaatatgaagaaaaattatacataaagccatgttattgcactaatatccaaatttcttaaatatattcaagtattcacctatagcattatcttttattcacagacccacggtggcagatagcgatatctatgacctaaccgatttccagagtcttctggaggacgagcacttggatttgggcaagaacaccgtgctctatttgcacggctacttggaagatccggatgtggagagcattcacgtcatagccgaggcctatctggagcgaaaggataccaatcttatcgtcctagactggggtgaactggccgatggcaattacatgttcgatgccttcccgaacctcaaacagctgggcccagagttggccaaggtcctgctcaaaatgttcgaccatggcctggacattgagaagttccacattgtcggacactcgatgggcggccagctggccggactcctcggccgagagattactaaacgcaccaagggtgtcagaaagataaaaaggtaaaatgaaagaggtttgatttcaaattatttattcatgctcggttcgattttagtctatgccgacgtcatgatatacgatgtttaatatacgatatttagttaataattttaatgtccaaagcttaacacttttgtattaccatatggtaatacaaaaagtttttttttagaatcgttgttcggcaaagtttataaagtttatattgaatccttttcttgtctcacttatctccaatcttcttttatagaatttccgctttggatcccgcatttccgctcttctatccgggcacgcacctgtctgccaatgatgcggagttcgtcgacgtgatacacacggacgcctggctgtacggagctccgacgagcacgggcacggcggatttctggccaaatggtggatacagcctgcagcctggctgtcccaagcgaaactacaagatgctcagcgacaacgatctgtccagtcatcggaggagctggtggttctgggccgagagcgtttcggatcgatatcccattggattcgatgctgtgcccgccaagaaatggtcggacttcaagcagaacaaaatagtagagaattgcccgcccgtggtgatgggtcatcattgtcccacgacgtaagtttctacttgccttatatgcatagcgcagaatttagtttcatcatttgaaattgtgattttcagaattcatggcgacttttacttacaaaccaacggacatacaccttttgctcgaggcaaggagggcactgtctacgttgaccccaaggatctgctgggaaatacccacagcatcacctgtgactgcccgtcggagaaaacgaattaataagaccatctacaattgcactgtgtacattatgaaatgtagctatattaatattgttgtttctatgacgccttacaccacattttgatttacgagaaaaatatacttaaattttgttgttgaaaaaaactttgcattactttggggtatttatacattattattgcactatttggggttttaaatgagttttattaattactttttttgaatggattttttgaactttcaaataatttaaatctggttgctggttccgctcttgcaattcattccggaaccagttcgaaagttgcgatatcgataacacagctatcgacccgtcaacctctgccaccgataacattgtttgcaacaattgagcatattgacaacaaaacgaaattcgacaggctaaaatgaagataaaactaatagattcggtggtgcgcagttttaaggtggccaagatcttccgagagaacacggacaagatcaacgccatcgattttgcgcccaacggcgaacatctaatatcctgcagcgaggatgaccagatcgtgatctacgactgcgaaaaggggacgcagtcgcgcacggtgaactcgaagaagtatggagtggatttaatccactttacgcacgccaacaacacggccatccatagctccaccaaggtggacgacaccatacgctatctcagcctgcacgacaacaaatatctgcgctacttccccggccacaccaagaaggttatctcgctgtgcatttcgccggtggaggacacctttctctccggctcgctggacaagacgctgcgcctgtgggacttgcgctcgcccaactgccagggactgatgcatctctctggacgacccattgctgcctacgatcccgagggcttgatcttcgccgctggcgttaactcggaaagcattaaattgtacgaccttcgctctttcgacaaaggccccttcgtcacatttaaacttaatcaggagaaggaatgcgactggactgg

SEQ ID NO: 25523 - DNA, 1292 bp, DROSOPHILA
cagtttctagcgagagatcagttggacttttgcgacgaagcgatacgcttgtttgttttgccgttccgctgcgcgttggccaatgtttgcctaactctcgaatcgaattccgaaaccgagtgtggacgcgccacgccacattaatccggccaaccgagtgcccggcccagtctttgccaatcaccgcatgggaccagaggatatccggacaatccactggccacgtaatcaatcactttatggactaatagccgacagcccacagaaacatgcacaaggccattaaaaacaaatccaggctcctctgcggactcaagaactccaaggcggatctaacgacagccaagtttatactatattatggacccacggtggcagatagcgatatctatgacctaaccgatttccagagtcttctggaggacgagcacttggatttgggcaagaacaccgtgctctatttgcacggctacttggaagatccggatgtggagagcattcacgtcatagccgaggcctatctggagcgaaaggataccaatcttatcgtcctagactggggtgaactggccgatggcaattacatgttcgatgccttcccgaacctcaaacagctgggcccagagttggccaaggtcctgctcaaaatgttcgaccatggcctggacattgagaagttccacattgtcggacactcgatgggcggccagctggccggactcctcggccgagagattactaaacgcaccaagggtgtcagaaagataaaaagaatttccgctttggatcccgcatttccgctcttctatccgggcacgcacctgtctgccaatgatgcggagttcgtcgacgtgatacacacggacgcctggctgtacggagctccgacgagcacgggcacggcggatttctggccaaatggtggatacagcctgcagcctggctgtcccaagcgaaactacaagatgctcagcgacaacgatctgtccagtcatcggaggagctggtggttctgggccgagagcgtttcggatcgatatcccattggattcgatgctgtgcccgccaagaaatggtcggacttcaagcagaacaaaatagtagagaattgcccgcccgtggtgatgggtcatcattgtcccacgacaattcatggcgacttttacttacaaaccaacggacatacaccttttgctcgaggcaaggagggcactgtctacgttgaccccaaggatctgctgggaaatacccacagcatcacctgtgactgcccgtcggagaaaacgaattaa

SEQ ID NO: 25524 - protein, 340 aa, DROSOPHILA
MHKAIKNKSRLLCGLKNSKADLTTAKFILYYGPTVADSDIYDLTDFQSLLEDEHLDLGKNTVLYLHGYLEDPDVESIHVIAEAYLERKDTNLIVLDWGELADGNYMFDAFPNLKQLGPELAKVLLKMFDHGLDIEKFHIVGHSMGGQLAGLLGREITKRTKGVRKIKRISALDPAFPLFYPGTHLSANDAEFVDVIHTDAWLYGAPTSTGTADFWPNGGYSLQPGCPKRNYKMLSDNDLSSHRRSWWFWAESVSDRYPIGFDAVPAKKWSDFKQNKIVENCPPVVMGHHCPTTIHGDFYLQTNGHTPFARGKEGTVYVDPKDLLGNTHSITCDCPSEKTN

SEQ ID NO: 25525 - DNA, 39651 bp, DROSOPHILA
agtagtccaaagataaaacgcaaatcaaccaaatggccacgaactgcgacttcatcgagcagccagtgaaacagcagccgttggccaatgcaccagtcatgggcgtccaggaggataaggcacaggagcccaaggagttgccggatgagccggcgaagcagccagacggccaaccataccagcatttcgctggcgaggatagcttcgaatgcgccttcgagtcgaccatggacgacctggagcagggtgtcctggatggttacgagtcggactcggaggcgagtgccaacgaccagatcactgattccgcctcctctggcagcctgggccaattggcccagcagcagcagcgcgaggagcgattgaggggcttgccgggtccacttcatggccagcatatcgattccgagatgctcaagtgcatgccgcgatcgaactccttcgactttcacagcagcagtggcagcagctcggatgacgaggatgatccggatgatgacgacgacgatcaagttcaccacagcctggggctcagcctcagcgggaagtttgtcaaggttgatctctattcgggtcaccagagacccggctatctgttacctccctacatcgaacgacgccgcttgtcgcagtgcaaggaggaggatgacgaggatgagggcgacaggacgcagctgggcggcggctcatcatccacgggagagtcaaccaaatccgaaaaagcttcgaaggcgccaccaaggccacccacgccacaggatgaggcctccaaggagaagtttaaggatctggagcgtctgcggcagcagtttatgcacaagatcgataggatcaatacgcgaaatatcgaggagagtgaggcaccgccgccaccacctcctccgccgcctcccataccagccacgattctaccaaaggcgctaaaggcgctactgcacacccaggaaccagtggcgcctccttcccgtccatctccagttggcccaccaagtcctgcacccacgtccagcgttattgtggcaaaggaaacaccggttcctgtaacaccggagcccgtttccccgctgccgctgcccacggagccgccgctgattatcaagggcaaatttaaggtgacactcgcccaggagacacccgaactgcgagtcgaggcccagaagctgagcaaactgaatgccagctcgaatgcccacaccatcagctttccctccagcttcggaggctactcctcggtgcagggactgttctcccagcgatatggctcaaatcggtttcccaccgccgctccccacatgtccaagcagttcttcgagccatcgctggtggagattcgcacgccggcccagagcaacgtggcgctgaatacaactgggctggccaatagcaatcaccaaagcctcacttgtgatacaaatagtttagccaacaagccgcgcacgcccagcgaacgggagctggacgagatctggatacggcggcaggacggtggattgagtggcactgctgcaccaggcgcaccgggtgctccacttcctctgctccagcagcagcagcagcagcagagacccgtctccctgggtggggcgtctaccatgccccgtttgctgaggagcgagagcagtgcctccaccacaagtccatcccgccagctcaccaactcgggatccgtctccgtttccgtgtccgatgatgtaagtgaagggttcaaaaacaaagtctatatgggagatataatatatttattaaagttattatatatttttaaaggatgaaactagtacatatatctatggtacttagctacttttggtggatgataactattgtgctaggaaaatgtagtatatatctcaaattagtattattatgaatgaaattattcttactttaagtcttctatctatggcagatgcataaaagctcaaaagaaactaaaaaaaacccataaacctaatgcccgcagctaattgaggctaaatgggggtatgtgtaatctttatattcacagatccgactgacgtcatttgagatatgtgcctttatcattttcaaataatttatcatgtacaaattgggcagtgaaaggtctggtgagcgaaaactgggatgggcaactcaagggaagtcaatgatgtcatgagagcagttccaatacatcatttcttaatttttagttctttaaatttaggggtttgtgtgtttagggatatttcttaatacactccatttgattgcaatatctagtaatattttttttattacttcttgagaggattactgccctttgcgatgctgaaaagccgccacttgacctgcacttttggtcgaatctgcggtcttgagtcttacactttgtttactcaatattaataattattcgcttgccccgttgtttctacgatatccataaagttgtctatttatatctcgaaaaaagagaaagaggtatacgtattatttcaattcagtcttcgcttcctcttcaacttttcgagtttatttgtccgaccgaaaggtaaacacggcgaaaaatcagctttttggggcttgtttttatcgtgccacacatgttgtgcctatatatagtatagtatagtatactatagcatagtatagtcgggtatttctctatatctgttggcggctctccgcttatcatgacacaatttgtcaacatttcccgctggaatccatcgccacttcttatttgttttgacggaacgcggacatatcgcgtatatatatatatatatatacgtataggtatacgtatgaaaggcagtataaaatttccatatatatatatctccctatataggcagatacaaggtatttaccttgtcttggcaaacaatgacgtcagttttctccatttccgccactccctgaaaaacttagaagtgggggtcttccctttgcagccgtctagcgtgttttttttataactgcttaaatattgaattagaccgtgtcaaacgcttcagaccgaacaccagctaccctatattgctacatatattgttttaaactttggattttcgtctcgtttctctgagtgttaacccaattaagcccgccgtgccaatttgacaccgcctttgtcgttaactcatcgcagtcgtctgcgaccctcggggcacgtgactcggctttttttttttagacatgaaacccatttgccgtgaagaaagccgctcgaactctttgtagttttcgctataaataatcgaaacacaggtgtttgcggttttcgatcaagttttttggtcaatgttgcgtgaaaaaggtccaagtgaaaactggtatatgtgattgtaaaagttgttaacacctctgggaatccaaactaaacattcgaagttcagttttaaaaactaaagttttgttataaaactaaacaggaaaacataaaaacatttttgcctaattagctttaatatttatacattactttcaactaatattacagaaaggtagatcgctagacttattaaaacgatattgacagtctgttagacttgcgtaagtaagcttacatatttatttccagtaaaaaaaatcaaatatgagaaacaaacaacgatgaagtgaataattagttcattcttttctttactgcagaaccgatagatcatttgtcataataagctgcttattagcataattgtttataaacgattttaaaggggatgccccttgtagtgaaataatttcggatttctcaagtctgtttttttttttttgagttcctggagttccctgaattttggttagaattctccgaaccgttgagctattgcttccttgacaacggtcgtcctggcccacattcggtttgcaatttcgcgtaatcataaattaattgacttcgttcgattggcgagcaacaggcgggataggtcttcccattgccttcgtcatggtccaattaaaggaacgcatcgggtgtcgcctgctcctccaattgccgtcaccccgggttacgccactgaatccattgtgtattgtggcgaataaattgtatttgtagacaattcggcaataattgcagccgctgaaaagagacggacagcactgggaatagtacaaaataggggtcagaggtgaaagaatatggggtataattgataatgccattcggctgggtccttccaatcggtcggcccttggttttagtttgtcttggccagcggcgccagaaacatgcaaagtactctcgaaatcgaagtcgaaagcccactggatgccaattcgaatccccatagtcacatcaccatcccaaaacagccaagtcagccacaaactaattcgcaaaaacgacatgttcgcttccaggagcaggatggcagcctcggaggagccggccggatgccaggatcacgaccctccagcgctcccgcagagccaaatgccaaggcggccaagaaggcctacaaaaagatggaaaaggagcagcggtaagttcaaaaacgaaatttcaactaggcctagggattattaaatggctagaaggtgtagtatataataatatagagctggaagtaggaaaaatatttgttccagagctatagcagcaacatggctcgtgcccaattaaatgtcatttgtagtaacaaaattattttctcacgccacagtcgccaggagaaggagcagtcgcgacgggaaaaggaggcccgcaagctggagcgcgagacggcgagaaggaacgaacgcgaggcggccaagctggagaagatcaacaggcacagcgagaagatctcacgcagcacggagcgaatggccatggccggtgtgggatcgcggtccggttcgctggagcggaggcgaagcggcgaggactcgcccgtgctcaatcagtcgacggtgcacggtatagcgtcacccaaccgaaggccaacgatattcgacgttttccgaccgcgtgcgaaatccgatgcgaagcggcagaaggagaagcatctgctggatccctcgtccgccgacagcagcgccaccagcagcacctactccgtttccggcggcacaggcccggccacgagctcggcagcaggtggagcaggaggagcggcggcagcagcaggacagggcgcagcgggaggagccggtggccttatgaactccatgaaggtggccatgcagaactttagccatcgccagcatcccgccgtgacgataacgagcgccgacggcacgcaatcaacggcaaagagcaagtacaaagacggcagtgcccatccgcatcaaggcagcgacgcgcaggtgagtcctggcatcccgcattattcgtttattttccatgctaattgatatctccttggacagtattaccacacggtgacggcggtgcgtccaaactcttcccaacggtcgccgatgaccaaggtcatggatctgttccggcatcgatccagctcggttgtcagcgaagccgacaaacgcaaagcggtaagtggactcttttacattttaaagatttcagtttgacgtaatttgtaaggaaggaagtttagttgctgtattaatacatatttgtatggtttttaagtattactttatttataagcaatttataagtcatgtatcataaattaactaaatgaatgaatattccctcaattccctcaaatggaattttaatttaatatacaaaagcaaaatgtttaactttgtaatttttcctatttaaaacgacgtccaatttacgctgctcatatttttaagttttcggtacaaatgattacccgccaaaaattgaattgaaatgattactttcaagattgatcgataactttgctgaaatacctgtattattgtcggttgaaatccgcgaatgttctacagcgccacctgtcgaactgcagctaaaactgcttcatcggtttgagtctccactcacattttcccgctgagtaaagtgactccgctattaacattttaaatcatcgtttttgtatttttataaaatattcataaacaaatacatagtttattgtcctatttcttaagcattgcaagatgacacaaggcattagattaacattttatcttaaagaagtaagcactttgtttatctagaataaatataaaaaaatctcaacctttaattaatagaaaacacgttgattaggggttattcagttcataaatatcgcttatcacgtcccattagattcatagctgcgttattaagtgattaccagcatttcactcccaaatgccatgttgtctcgaaatgtccacttgaggcttatcggcggcaagaactcgtcattaataatcatccagtctataaataattatgcgccattattgatttcgactcgataggcctcaatcgatttgattgataagcttcgttttttgattgtcgtttatagtaggagaggcaaaagaactgaatgagttaaggaaatgtatgaaactttttagacacagtgaggtatcttacaattattaaaaacacaaacttattatgaggcaaattaaatgatttttttttttttcttgcataaaataatatgtaaaatgtgttaagaacttgtttattgcactcactacttcagagacattagtcacataattaaaaactaaatgtgcaaagacaatttaattatttttaacagtgtatagaaatggcaaaatcctttagagcgaaagcttcaacaacaggtgatcggcacagctgctttccctctcccactgctgcccgcctttcttcgattctctctctcgctctctctcgtttctctggcactttttggacttttgcacactcgtacgtatattacgtatacgccagcgtcgccgccgttgtcacttgagcattttttgtttggccgccgatcgagcggatgtgttgttattttcacttgcatttccaattgaactagccaggcggtcattgtgcgcgtaattctcgctcctgatcctttggattctggacccaatttcgaattggaatcggaatactattcattccaactgtgcgttgcccaaattataaataagaccatcgcgtgtgtccgtgtgttgacatcgaacattttcgtttatttattgtttttcttggcaagaaaacgatttcaacgttctggaaaaaactaaaatctgtgtctggagtgctactttaaataatttattagaaaaccgattgccgaatgcctataaataaataataatttaaaattttcaacggaaatttataaagaaataattacatttttcggataactgcgagttagttaaactatattgttttgaattctgctgattgccgattgcttaacaacaaaatagcgactcaaaaatgctggcacaaccactgaataaataaagaaatttttatatttatattccgtggcgtgaaaacaaaccattcaacatttgcccaaaacaattatttttaaatcaaacaaatctatgccgttttattttatgctgccatttaagttctaatgtgccgcgacaattaatttaatttaaaacacaccgcgaatttcctcctttttggcggacaatttgtgttcttaattttcaagttcactggcgaaaaacgcgcgcacgttcataatttgtataatatttgttctattattatttatttaaataaaaacgatttctaaggcatggaaatagacatttagaaggtgtgtggccgaaaacgagaaagccgacataataaatggccaacatgtgatcggtgctttggcgcttttgctggttattgttcataaaatacgctaaataatagctgatggttgtgctgtttttttttttttcaaagcctttaagccaatttcttggtcgctcatttgttaggtgtccaacttttgtggcaaggaaagtgctgaagagtgttagcaattgttcttaactttgtacttgaaatgccatttgccaaaccgttaaagtaaattatcgagctttgctaaatcaatcatctaacttaattattccattagagattatgaaatctgtcgcaatagtttgacgttttccctgaggacacgcagctgttgtttataataggggattttccacgcctcaacattgtttttggctgatttgttggtcattatcactgactgacggttgactattttatggcatctcaatggatgatatcactgttttctctggcccttttcacgcgattgcttaactgggcgataagctgcccagtgtgttatttgcaaaatgaaaaccaggaaagaaacagaaacttatcagttctggccacaaaatcaacaagaaggaagattcagttagggaagcgaaagcgtctggaaattaatttagaatatatgtatgtatgtagaacggaagacggccgagcagagataagataaatgcaagctagggcggctaaattaagtgagcaaatttagcagataaccaaatatataattgcagctgataactccctagatcgaagctagaaatcaggaaaagaagttgattcctaatcggaatgcccaccatattagtcccatcgaaatcagctttccctatatggcacatgcccacttgggatttcgttcgctatttattttccacaaggaagtgagaagaaagtgaattgtgcttcaaacagacatttctcatttctctggttctatgcccccacttatttcattatttctatttatgcatttcgcgtgtgttctctgctttgccctttttttttttggtctctgctcgttagtcaatcatttgtcaaaatgggaacttttctctgttcccactacttgtttaatatttcaagaataccgcctatatttattttgatttttatctcactcgcccagaggtcaaccacagacaggcgacgaagcttatttgttgatgtggaagtatgtttatggtgcgagaagcctaattaggaatgtgtaaaaatacatattaatttggttatatatatagagttcacaaaggtatttgaatgcatttcgaatttcgagccaattctctattcattattattattgatatccagaaaaagtatatccttacacaatgcatatttatttaatttccttatttataatttatggaaatatgaaaattccttgcttaataaggtatgcttgcacatttattaaaacaacttaatatgcaagttaaaatatcttaaatagtttcttaaaaagttaattggctaaatgttagaattcaaaatatttcaacatataaattctgtagcattcaaaacatatattattttaacagatttttacaattgcttaatatgccttaggacgttgatgatttcacttaaatgtttagtaaatttaggtcaaaacggctagtaaataaatatattgtttcacggaaggcaacttttttttttttttttgtttggttgaaatcttttacgcgcttggtcacatgccaattggaaattaacatgccgctgttaacgcaatgttaattaaattcttctagactcgagattgtttttgaatcgatcgcacaactggcagaattccaatcaggcgcggaataatgctaaatggaactaagtcgaattgatttgtggccaaaaatgtaagatttggccacagttgcctggccaaaacccttaccctttcgagcaatattgcttcctttttgtgtttcgttgtggtttatttgccttccggcgagcagctaattaacgttaatgacttttacattctgtttgcgttttgttgtctggtcgcggagtctgttttgctagaattttatttacttactattagttttgcgcgcatttctctaacaaatattggcgctaacggcgaagaaagaaatattagaaatgaaagcgaaatacatacgtttctgtgaatttgcgaattttcaatggtcgtataaaggctaattatacttgtattatttacgtctataatatttgctgcttgtttgtcgtgctaaaaacaagttacaccgtcgcgggtaaacaaaacaatcaaaatacgataagaacgcaaaagcgcaagctgacaatattaagtatacgccccgaggtgtgtggaaatcagaagtttgttaaaaaattatcaattccttgagactcggtcaggtgttaagtctgaaagtatgagaattaaataagattgggtaatattttgacgggctttataaatttgcatcagtcgacggcagcacatttagtcgattgtttacttgctgtaggaaattaatatagatatctatatctgtgaacccttcatatctatgtcaatatgcggttttggccatcggcaattattagtgcggaaattttggtatgtcgagctgagttttatatttgctatagctaggatatttcctcgctggaaaacctctttttccagttttaatcagttttcattgtatagaatcgctggtcttctggtctcgtgtctgttgctttttaattgggtgcacctttcaatcaaagtttttgtcaatttcaattgaacggacacaagacagcaggcaatcaactagcaagagaaacacgcctcctcttaaatccactgaactttatggctgcgttcgttcaatcaacttaatgcgtcaccagtttgttctttcgaatgatcatgctttgtgcttatttgttaattaaaagagttcggggtcaaggattaatttgtggggtgatggggaaaggtgataagacgcggaccgctggaaataattatagctgctccaatgagattctgcgacattgtcgttatttcacttattttcccatttccttaaacacgaaaactcggcgaaaattcttgccgggtaattaaaaaatatacataaattggcattaccgcgctgggaaaggcagggaaatttacatagtttatgggtggcaatggcaaatcccctatatgcacttatcaaattttattttatttattacgagtaaataaaaaagcagaaaacaaaatgatataaatgtttaaaacggcacagtaaagcgcccctggcgttgagtagcgaaatcaaatgttgcaagcagttgaccggcaagcagtgatcgcgggtaaacaagcagttgacggctgaatttaaatttgaatttgaattggttttcttgtgtagataaacattttatcaatttattaacaaaaatatataaccaaaagtgaactttggtaattatgaatcacaccagctgataacagaacaaaaatttccaaaacaacaatacataaaactgcggcaaaatgtcggcggtgaagcgttggatatatcggcacactcactcgagcagctctgccacgcccacctcgcccggccccccgcccgtctcgcccaccaataaaacgcgtcgcggacgcagccactcccttgatgtgcaatccttaccaggaattcgcgccatgatggtcaacagtgtaagaatagcaaccgattgaataacataaactagttaatcttaatcttaattactttagtaataatatgataatatttttaaaatattatattaaaataaacacctaaattatgactagcaataaataagacccgtatattaatataacattataaagcactttcacagctacgtatttatatttaaggggaatttaagctatagtatttttaacttattcatttatttcctttacagcgcgcggcggcgcatcagcaacagttggctgtgcaaagtaagtacgaaatagagtttgcaatttattccagaatacttttagaacagcaagtaccaggtagaaaacatagaaaataaccatttacagaacccataaaccgaaccgacttaatttaagcgttcacaacaacacggctacaaatttaaattaaccttgactttgaaaactgcgcaaagccgaaaagaaaccgaaaacacaccgcgaaagcaaaaaacaaaacaaacaaacaaacgaatacgcgaataaaattcagcaccgaaaccaagttggagttattgcgcatagacagcgaagtgttttacatatgtatgtaaatgccaaatactagaattacttaacacttttatccaattcgctaggatcggcaacagcgagatggaacgcagaagttcgtccaaagcaaataaacaaatagcaaagacgctggaaaacgtttaattcgattgcgtgggtgtgggaacgaacatctgtcgctgtggaatatttttgactttcattgacaacccgcgaatcgagtcgtttcaaaaccactaatcggatggttaattcaatcaatttgttaaaagtgatttatagttctcgatgaacaatatatgtatatgtatcttaatatcttaacttcaagataactgaatgcatatcggagtatatttaaatccaaaccatacttccaggttatctaaatacttttaatttaaattattgtcttgaatctttttttttatttttgaattcacatagcttaaatggcaagaaaaattaaagtgtttccataaattccatttaagctttagttaagcgatattgacttctcgctaaactaggatgtattttaaagatatctttctcatctaactagtaaactttttcccactgttcatacaaatatgaatgtatgtacatatgtatgttacatacttagatatcgtatggttcataaaagtggaaaattgtgtcgtttgtaattgttacatctgcgttacgaaatagcgggaacaacaactgaacaaatagaaccgaagaatgcgcagccaaagcaattttcctatttcgcgcaacaaaaaccaggcgaaaacaaaatgtgtgaatgcggtcaccgttatagagccccaaaaatagtgtttacaatttctagaccagaattaaataccgacaaaagggaatcgtggtgactgagagagcgggatagagagacccagacctagacctatgctccagtgcagtgtgcgagcgagagggctggactaactgttgctgggatgtgtttacccttcggctgaccttgaaagttttcgtgtacaggctgcactttttgttgttgctgttgtgttccttatgctaagctgcagtttcaatgtcaggcaaaaagcaaaagtaagaaccaacaagcaaacaggctctttaatgatgcgactttggctattttgtagcagatgcgctgatccctcttatcgaatatttggctagaggcagttttttttttcagaaattgccaccaatttcagacatttttcacttgaaactgtagattcaagttaataacaaatattgtgcatattcgacgggactgtaagctgtctatagttctataatttcactgtatctactcaaagaaagcagtccggattcacataccactagtccccaaattaatgttattttacatattattcaaccccaaatgatttgttttttttttttaattttactaaattcagagtacttactttacttttacggcattttcgaaagatcgaatttagagatattttggaagcgccagttgacatcactgcctctctccctcttcgatgcagttgtgtgttgccgtatcaagtgtctcgggccatgacgtaatacaaaagcgtgcgagagcgagaaggaatcgaagagagagaagcttagaaagcatacaactcggagatttcgttcagcccacaaacgaatctcaagcggcattgatgttgaaggcaggcgagacagtgacaaaatgtgtgggcttgctttatatcattttatttcttttttattaggttttttttcatcgcggcaatagcataaaaacatacatagactgcgcagcaagaaaactagaacagactcggtgtctgcagagagagagcaggatggagatagaatgagtgttagcgggggttgggcgaaggggggcagcaccgcccatgctaagggcgaaataggcgaaatatttggactgttgtttatttggcctacgtgcgttagggcacgcacaccaagaatccacgaaaagagcattagaatcgatgaacgaagaaccgagtggaaaaaacaacaaaataataacaataacagcaatgtagatgttaaagccatgtaaggcagctaaaagacaacagcagtacagtggaacccacctatgtaccaacgatacgaataaatatattcacatttaatgttatgatattagtcttcggatttcaaaggttacggcgccatagagagtacctttaactcgcttaaaggagattaaaaacttaactgaagcctacggcgttttactctgaaatagccactattttttagtgttgcccagaaatatgaaatataaaatatgtggatcttaggggctgttcgatttcacattttcaaaatcgattataaattatcttcaaacgtctattaaagcgaaaccccattattaaaaagcctcaaaatcagattcattgaagtagttctatgcataaaaaaaaggtatttaattaccaattatattggctcccaaaatgcattcttgaaagtataagatctttcgcatggtttgagttatagaagtttgtctgttttaattaatatcccatattaacgagagaggcggagagagttccagaaatggatcggaaaacagaaagtggttttttgttgcccaaatcggtcagctgactgcgtgccacgcctcaaaacgccctaggcagggccctaaccaactcaaagttgcttatctattcaagttttcaggtattattatgtttttttctttgccgattagaccacctctgcgccgttttgctttgctcgcttgattttctgttgtgctcacctttttctcgcgccgctgtgtaccgtgtaacgagtatataaaacagagaggcccgcactcacgcacacaccctcgtaccgccttgccggtttacacacagatatggaagtatatatacacatatacagctgcagatgcagatacagctacagttatacaccgaagtgctggagcacatgggcggaccgaccaaccgaccgcttttagttcgattccaactgccggcagagtcggatgctcagccacgtgacttttgaatttcgatcagttaatttcttcagtgaattgggaattgtgtcttgtgtatggtgtgcattcactaattaaaacctttagtcgaaaaagcaaataactcgagaagtggcccgtcgatcagagtgaaatattatttaaacggttggcagccacgggggaattattagtaatttttaagacgcgaaaacataattagtttcaaacaaaagacaaagaaaactggattttcggacagcacacgaaaatatttccgagctatccggctataaatatgcatgagcgggcaatttatggtcaaaaccaaacaataaaattaccgcaaagtcagctgaatgtgcgtggaaaatcttttcgattcttataatttaacatttaaaaatggtagacaaattcgaagggaattgaacaaataaaatatttacggcgaccgtaaatgcaagtgacttgtatatttaggatgcagtaagcaatccagattaacttaatgccaaaaaaaaaaaacaagttgaaaaaccgtctcgctaattaacgagatactttaacgaattacaaaaaaaaatacgagcgcccagcaaaatgcgaagagatcggagaaacatttgcataagttaaagtttaatttgtgcgagcaaccaaggacgtgtaattgccataaaaattaaacagataaataatttcagccgcctaaagcaacggggaaaaatagaccatgtgactgagttttataaataaaatacatttaaatacacagaaacagtgagtgagaaaagtgtgacgacatttccgaagaagaaatacatttaattttgcagttagagtgctgatatcgaaagagattctcatctgtagaagtctcttccgacactaaattatacttttttagggaaaatggattcaaacccgaattctttcaaaatctactaggaaactgttcgctaaccggcgaaatatttgcgaactagcgcggcgattgatttgatttaagtttttgttttcttgtcccacgacatttcggttctttgctcctcgccaaagtttatttaaataactaaaaagggggaatgatgggatttgatttatggccaagaggcgccaatcggctgctgtttcgccgttagctgagtttttgacgtaagcggaggatgatattttaatgagccggaaagaatatacatacggtttttgtgactgtttctgtgcggcattttgtgattttgtgggttttgttttgcataataaaccatgattaaaattgaataaaaccaaatgatctggaaacgggctctgcaggtgttattttggcctgatgtgatctttgctcccttcctttgaatttcttttgtgcctggtttctcgttactggcgtttataaatagcccacagttctctcaattaaccagcaatcgaaatcgaatgcaaggctaatcaataaataatttcataaaaataacaaacgtttatttctgtcacgattcgaatgcgatcgcagatgggtagccgcatttgccgcgatttatcaatatatatttacatattatactattatagttggcactgataacctcgtagagaatcagagctttccacaaccaccaccaccaccataatcggcaattgaaatccgcttggaataggtcagtttcggattcggtttccctcggcaagccatttatgaggcacaaacaatctgctccgccgagatactttatagttgttattgcgtgggttaaacaaatagaatacgaaagcttaaatttaaatatgttttgcagccaattcaattgaatttatgcgcttttgtttacgtgtagtttccataaatgaaattaaatttcggagcagccggctcaaaacacgataaacaacaacaaaacagcatgtgggaagctactcttttcactcggatttctgtaaaaaaaaaaaaaaaaaaaaaaacaggagaagatggagaaggaggggagaatttcaagagcgtcgaatagcgaagaaatgaaaacacggcaaagaagaaattgcgcagcaaaaatattctgctgcgctttattttcgctttttttccccttggtattttgtttttggacaaccaccacttgaaaaaaagagagagcacctcgcactctcagagaaaaaagagcagaagagaacttttaccgattttgcgtgcagcgcaaaaggctccggaatcaagacaagccctcggcaaacttcgagatacatttggttccacactcgcctcccatatttattccccaatgtctttgcatcaaggtagttgaggtgctaagagcctcgccaatgtttggcaatccgaaaagggcactcaaacatccaagcaaacacactcagtgagttgtaaacgttttacgatcgtgtaatcctatggttagaactgcctataaactcacatttagaaggggtttgcttataagcgtgttcatacatatatgtatattcagaagtttttgatttcgatttgcgagcaacgcaacgcatttcattatctctgtataagaactttaaattcttggtactataactcaatttaacaatcttgaatcttgcctatatataccgaagacattaataaatttaaggtattattaagtcaaccaattctgctaataagtaaatatgctactttctaaagtacttgaacaatgcccaagttggttttcattcataatcaaaagtgcacatttgcaagtatgcacatatgcatatgcaaataggaagaagtaaaaatttccgaaatctatatttccaaacgcaaacaagatatgaatattttttcactgcgtagaatgcaacaaaaactgtaattagcgccatgaataaactcaatatcttttcaaaacctgtttcaaaaacaaactaaactattacggaattattagtgttgactgtttattttgcgttgactagttcactgaactgctggaaagttccaagcactcttgtttatctaaatgtatttcagatgcaactttcggatattttcaatggcatgtttttagttcatcaatcaatcacattttcatttcgtaacagcatcctaaatacgtttttgttattttttttttttaccgatttctgtagattagagctcaacttaaaagcttgtttcggatgtttgttgtttgattttttttttaacgtactaagtggaggggtcgcctgagaattaggtcaagacgaggaacttactttaaacggcaattaaatttctgtttacttcgatttgctgttgtttctcccaagctgtttaattataatctcggcccgcaacaacataaatatttcatatcacccgcctccccgtctgatgatcgccttttgtcttattgttgttcatgctgtgttgccttaattacaacacgttgcgattgcagttgtctgctcttgttgttgccgcataaattttatagtgcacttagcatacagggtgctccagaattccagatgatgcctgataacgaacatgtagtagaaacgattacttatactttacagcttgatattgaaaacattctggaaacttcctcaagaaagttgtgccattttagtttagtttttgtcaccactaagaaggcgcagattttgcgcaattaactttcattttcctcctaattgtttaaagccgctcctatttcaccattgcaccattatggcgacttaatattctcggtaattcgaggacatttctctccgttaattgagttcacgccagcgaacttaatgagatccccaggcggtctcctcttggccatcgtcttggctgggactcgttgccgtttccctggccagcttgttaagtcccgcggaacgacctctgccagtcggttggatgtggatgtggatgttgacgtcgcacgtcagctccagaccacgcccatgagcaaacattatacggacatacatacaaacatatatattctcgagtacatatatttcaactcgcacactctgcagcgattgtccttgaactggtttctgtcacttaatcctgtatcatatggacaataaaggcatctgcggcgctttggaccaaggaatcgccccattatcaagtgaacgagctaaatgtgtgtagctagtgaggcgtacagtggaaactggccaagaaggtctgcttacatttgtatattaccttaaccttttactcaaaactataaaagttaaaaaaaaattttttttctttgaaaatacgttgttagaaacatgcgccctcgaaaacccaaaggttctgataagccaaattgtaccataaatactttattaaaattatttacacaaaatactatagaatcatataagctaaagtgcacaaacaactaaacagcgattgacaataagtctcccatacttaaatccaatatatggccctaaaacgtgacttattcttactttttgctccttttcttcgtttgccgtttgcgagctgctaatttaaaatacaaattttcactgcaatttacggtttttagcacgcagctctttatggtgatttatatgaggggtttatatatatagattcgaatacagatacatgtggataaatacatatataaatcaaatatgagtgtggctaaaagtcaaacacacccactttaaaagccgataattagcatgcacgattgactgaccgtttcgctcgcccacaatatcccgcgacacaagatcagatctggatagggattgaccttggccgaccctccagggggaggtgactaatcgaacagctttcgattggcatcgggacaggaacatcggttggtcaacagcaaatgctcaaaattcgcgtcgccttgagtgggtaaacaactggcaggtctccacccccccaaaatgtatctatacatgcacgcggcgaatgtatctgcagttgcaatatagtttatatttaccgagtgcacacagtgggtttttgtactcaaatctacgtacgtccgatgtgcagccaagactttgctgcgcccgttgataacaaaacaagaataacaattcacttgtttgttcatcgtttgcaccgctagatatgcacacactcgatatgatatataaacacactcatttggatatacatatacacacagtcgattgcaaatatatggacggcaatagtgtacacacgtactatgtaaatccaagtgtactttcctacagtcaacaaattaattcgctgtaagatctgttgagaacctgtgagcaattaataatgttttgctgaggaggctttgcgggccgagaggatgataattgttaattttgctaattgagatttttatgttttcacatgcggaagtagtaaacttttttatttgccaaatcgaggttcaacgagttgacaggagtgctaaaaaaaacagtaggactattaaataatactaaactacttgggaatgctaaacgctgtgagtgtggactattatgcacacaggatacacaggatacacaatcgtgcctattaatttatgcttttcatttgagttgcgtgcgcgcttggcattttcctgccagccaggctggatttttcatttagcctgacatttccattttccattcactgtcctcccgacagtctgtctgtttgccgtattccacccattattattcttgccattgtccttgactgcaaagagaaaaaaaaagcagaatgtgctgtaatcttcgttgttttcccggcctctgcaatctttgtgccgcatcttggccagatgccaaatgctaagttcaatagccacaacacaggctcataaaagccaattagcaccgccgcacaacctgccaaatttcgataccgcgacttgtgcctgctcgcttgtatgattttccgagccttcattccatttccattgacgtcagcaagtgagtgggagctaataaaaaaaaaaccatcgcactggaggccggcaaagtgcggaagcgggaatggtctgaaagtcttagaagataacaacaatcttacaacttgacatttccatcagttggccaagcaataattagaaacaataattgcctagcgatacgcaaacttgtatattttaagcaaatggtttagaaatagcccataaccattaatctacattaattttaagcatataatcagaagtattcacctaaaggaaatgaaaaattacaatttgttcaaattgttttgtttgttggccgtataggctcttcccccaatttattctttgcttctttaagttctgttttctttccacttctctttgccaccagtttcgtggcctatttgataaatcgccttctggtgacgcaagcccaaagaagtcaacttcgcggcgcgtgaatctcatttgttatgatccttgaaagcccaaaatgacgcaaaagaaagtacagcagaagatagcaaagtaataagtatatatgtatataaattggtctgatagagctccacacacatatgcacatattcgcattcgatgggcaacagtcaatgccagcgctggggttaaagatcaccagatagtacggattcaattgcgcggaaaacccaagcccaagtcgagcccctgccgttggcccccacttccacttgccactttccgcctgctgagggggccacttcaccggttggttatgcaaagagctgaaatgtgaatcagatgtccgactccattagaacggcaaacagaaagtcagctagctgaaataaaacaacaactaacggcggtgcactcattaattgaattcaagtcgtacagagggtacactgctaaaaaaaaaatgaacttttcaagtgctgaaactaaacactcatttataagattgggtatatttcacttttatatatttatttcactttttctacttcatgaattgggcaacacaggttgttttgctttcttctcgttttcagtctgagatatcatttatattctaatttactgtagtttttctcagtgtagtagtgagtaggcgtgtgtgcccttgcaagtgaactgcacttgttgctgccaggaaatcttgactcggctgccggctcatttcatttgcaaatttctccggctgcgaccgattgcactcggcaaacaaacactggccaccagggtagctccgtgtgcacagctatccgtatggccacgtccacatccacatccattcagtgtgtgtatgtccaggtgttatataagccaaacgcgtgagtcgagtttacgatgagtcgccactgaaagccgagtcatcaacagagggcgttagaggtcttctttgctcggtaatgtttgttctatgccctctccgtaacataaactatataacttattttaactatatacattatatatactatataaactatatagtcggatatgtagaacttcttacggtagagtcagtggaatgatgactcacgaaatttggatcagaatgtaagctgtttgccattaatttatacactttttcgtcttcttttcactaaatgcggattggcagacaataaattcaatggcatacgagtcaccgattttaatgagatgtataaaaattcttataaactattcacaagaatgtttgtttcatcgaattttttgaatagtaaacagctcattttaaatgtcatgaattttagccaagatttgatttaacttttcttgttgatggcgtattaattatgcgtgtatttctttcttcatatttttgtagttacttgtttaaacgaaataaactttgtttaatagccataaaactttgaagtgtgcaatatagactttccttatttattgtgctggtaagacttagtaatcttctgattttgacccttctgtcagcgaaatgtaaattgactaggacactcaggctacataagtgcgatgccaaattggcattagccaagatagaaatgcatgtaattggaggacgcctatctattctaatcgacgggatgcgtcggaaaatttgccttccccaaggttcttttccgatctgcggttcagttccgttccgtttcttttctattctatgattttcttttatttttcgaaccacaacacgaaaaccgaaaccagaaaataattagcggacggcgtgcagtgcagtgttttgttaaacgtgcggttgccaatgactgcacttccgcttgtagtagcaaactgcatacatacttacactgcatttgtttaattgcacggctctaatgatgcggaaacagcatcaaaaaaaaatggcggggaaggggggtaaggagagcacatttcccgcccactaaaacttggacgtacgcaatgcatcccaaagtgcgcacaagtaattcgcaagtgaaaattagtgacagttttatgggtttgttcttggaaataagtgggctgtctgaaattgcaaggacatttcgattgtaagagcttatagcttacatgtcaaatgttgtccccggcacacaaagttcaaagttttcagcgaaggtcgcgacctctgtgcattccaacaaggtttctatttgtgttgatagaaatactgaccaagtcagtgggttcagcgactccttagaaggtcgctgcgtgttacggctctattaatattggggtgacaactgcccaatataaaagcgaaaaaaaaaaacaatcgattaggttgccaattgtcagttagttaagtggcatttcacttgtagatagtacgaagatcgagaacgttgccctttaaaatagttatatcatccaacagcgcgtatttggaatgccgtgccccaaaccaaccccttttcccccttttaatccgtgggccagttcaaatatttgccccgagatattcgccccgcccgatcctcctgcttttggagctgaatcatcgggttatctgctttcagcgcaaagaggcaaacaaaagtcagcacaaaacaagccgtagttgaagccaaatgcgaaattggaggaggctaaaaacaaaataagaaccaaagaagaagaagctacttaaattcgcacaccttagcacatccgtcagaatgctccccacatgaccagtgcatggcgatatgggaatggaggggggaatcgggcggaaagtgctccgtacttatttacacatatccaatatccaatcacgttcaaggtaaatgctggccgaatttcgcgcaaacttaactgcgatgcgcagagcccagaaataactacaacctcaacttgtttacagttactcgggctactgggctactaaagataaattaagcatacgccccatggtcggttaaacatattgtttgcacctctgtggcttttatttatggctccctttcaatcacatctaatttgcgataggcccaaagcaaacaaacacggcgcttatcagcctaaaacgttagcgtagcatagtattttcttatcgccggggcttgtctagtgggggtctgcctgataatttagcaatttaaaaattttgcactccctaatcaaagttctcttgcgtaaacacttgacctaaatgcgcaattcttgggacctatagaattttggagccaactgtgttgtacataaccgaaaacagacctgtgtggtaaattagatttctttaagagggtacaatatgtaaagggatttttcttaaaaagaaatagttaatcacgcttttgattgaacgaaaaggaataaattgagagagtttctcgaaagggggttcaatcacctaacctctaaaatactccagtgacgtatacgcatatatagtatagtattatataccatctatatactttcactttcttcacacgcatgcgtcataaatgggggcacaaagtggaaagtcggaaaggaagttgacctccgacaatcgtgtttctcttttatatttttggcgtgtcacgtttcaaaatattgcatacttagatgggcgttcttgtccttatgccaaaaatgcgctgttcatttgttttttgcgcacttaaaaaaccaagacgatgtttcctatactcgcccagaaaattctttcagtttagtgatttatggacgagttatgtggatgcccttcagatgcccctcaactaattcgaatggtaatccgccgcagttgctaatggattacacatgctcgagtgttggttgcactgaatgggaggaaatggttcaattcatgcttttactctcgctttctgcactcacatgcatacatacatacatatgtacttagatttcaaggacgcccaacagccccactgttagcgctaacagcgctgttagcttgccctctcatgctctctctctctctttggcacttgttcgacagcacgtgcaccgtttgttcttttcattctcattcttctttgggattttgagccaagcggttgtgtgcgtatcagtgttcgtgtgtgtgcgcgcgtaggcggccggccgtatttttatatgtatgtgtgtttatatatagaatttcgcattattaaacaaatttgattataaaaaaggttggcgacttaacctcaattgaaccggctgctctcttcgcgcactttgttctacgaatcgccatgtaaatttcattaaatttgatcaaagttgtgaaatatccccctgaaagcctcttgagaaagctaatcaatattccccagtgttctgcctctttacgtacatattttcaatctttcccattgtttttatcagtgcgccttcggctctttcttcatttgaaatcgcttgccgtgttgttattgttgcattgataataaaaatagaacttaactttattttctgtgctttgctttggctcgcttctcgaatgcccggcccccgcccgaatctctctcccactcctcctgctgcgtttgttgtttgttttacacacagcgataaagataaaggccgtttatttaaatcaagcatgcgatttgagttctcatgtgagttgatcccgaagagtgaacaattctgatacatacatatatgtagcttttctcgaacagatgcaactggtatttattgcattataaaataatttaattacccaagaggctgggacaacagacagccaggcaacaaccgcaagtgcggcaggcctagaaagctggccaggcgacaaatgtgacgattgcactcttgcaaaattgtaaaataaatccaatatagtcttgaattagaaattattttcttatagctactgcagtgcagtgttcgaaatctcagtccaatatataagggtttaacatatatagtagagtttgagtttgtgcaaatataaaatattcgagttcatttatttttattgcgctctcatggcattgaactttgtaaattttgtcgcctgggtcgctgaacccgcctagaaaagtgaccctgagcgcatgttgcatgagcgcaggcgacgcgtgcgtcgcaaacgatctctgtggaaatcgttccgatcgattaggcctttatttatttacccgctacattttgcaacggcttcgcaacgacaacaaggcagggaattaaatgaattgaaataaatgagaataaagctatgcgcgcattgactctgccttgttgtttttcaattgtgggtggtagtggtgaacttgctcaagtgcattcatcatttgatatatgtatgtatgttgttggcggcggctgacgctatttttcaaactgtcgattacggccaatataacttttacaaaaagtgtctaacaatattgaaaataaacaatcgcgtcgtggaaagcaaaaaacaacagaaagaacaaataaaacgcggcgatgtgtgcagctttgacttaatttcagtgcgttcaacctatgagcaaacgagacggatagcgatagagagggatgcagagcaaaagctttcgagctagtgcatcgatagtgggcgagaaggagagcgagagagtgatgtgttgtgtttttatttacagttgaaggattattatgtgacttttacaaggcgagacagagacagcgacaaccgatcgcagtgcttactttaaccaaattgacaagtgcaacaataacaactgttttacactgcgttacaaaagtgtaacatcaagaactacacaataacaaaaacaaaaccaaaagcaacaacaattgacaacacaacgggataaggagaacggcccagcaatgcatggaataacacacctgtaccgccagcatgccgtggaaaaacagctgagcggtggcgagagctggtcccgccaaatttacccgagctacggcagcagtgccgatgcctcctcgcagggcagtcgcctctacagcgtggactcctccagcagctccagctccaattccaataattccggaggtggaggcagtggaactgcaggggttgagaatttgggaggagtcaccggcagcgcctacgcccagtggcagagcgaccgacactctctgccacaggctgtgcccgatgcccctcggtcgctggctaaccaccactaccgcaactcgcccacccaccaagcccactaccagcagcccactagcggcagtctcaagcggacaccctcctcgaagcgcagcttcctggaacgatctcacagtccggctatatatggtgtgagtagaatggtcaagccaaggatgcaaaccgatcaggaaagcgaagagagtgcttgctagaatcaggaactctctaaatgaaacagctaccaataaaaaaaaaacaaaagtaaatgtcgtaattaatgaagaacggttttatatatactgaaaatacgaaaaagtttattaaactttttgaattcagcatgtttctagcttataatcggtttgcacctcttaatcggatatctttaagacatgtagttaatcctatccaaacaaaacttttagagcatgcgtcgcagtgcaggtccggacttcggctctcccccgcccaccgcacccgtcggtggaggcggctacttcccacacgatctcgacgacatctacgagagccagacggaccatcagtatttcacccacacgggtgctagcggaccacagcagcagcgacccacggctatctcgatctttcatcgagtgagtgctgcccacacctcgctggacgactataccttgcccggggatgcatcgcgccagtccatgaatagtacagacagcggggtgagcagcggtcccttcaatcgccagcgtttcgacaactcgtcattcgccaagagtctcagcatcgacgaacaggacccacagcactcgccccataaggaaggtcacagcaagcacggaaagcaccatcaccatcatagccatcaccaccattcgatccacgagctagtgaagcattttggcaaaaagatgcacctgtggccgaggaagcaccacgacgcccagagcgtttgcacctcgccacagaacgatccgcaggagaacttccgcaccagatccaagagcttggatgtgaacacgctcagtcgccccaaccgcattctcgatgactgcggggccacctacaagatatacgatcgcatagtcaaagaaggtaaagggtttcgggcgggttgctttccatttggtacttgctgttcgattaggtctagtcttgctcctttaattctgtattcaagcacctgtacttatggcaatttgttgtattcttttaggtgctcacatgcgtcgtgcctccgcggatttggagaaacgtcgtgcatcagttggtgccgcaggtcgaggactgcgaggggatggtactttggatccacaccatgcagccatcctcttcagagactcacgaggggtaagtttaaaacttgcagctagcgtataaattagcagaggaagtatctcataaattgtctctttgtagtttaattagcttaaaaaaaattaagaaagaaagaaataaagaaattcagttgaaaaattcagtactaagcttaatgaaattaagaaaaaagaaagaaaagaaagaaataaaaaaattcagttgaaaagttgaatttctttatcttgtttagtttgataaatattttgaaaatttaattagggctgtgacatacttatcgtcctcgttatgcataacaaacgacaaactgcgtagataataccccataactttttatacaattatcttttcaactagatgtaataatttatgatcttgcatataccatctcgccagtattttcccttccactttctgttttgccttttcttatcgccttaaaaagcaatctgctcgcttctctgattcagagctattaatagcttaaaaatacacttctatgtatccccttttctcagaggcttacactgtttgactcctcccccttcttgtttacttcgttcggttcgcttcaccttgacatttctgatatactctgttacccgttgagaaatgcgtttttccagttgcttgcataataccttcaaggccgtgttctgtctacgtaattctccctcttcttctatttgcacctgttgaatgttgagagtatcaagcaatttgtcagttttcaagaactccataataacccttagcctattttgttttatattgcatacttagaggttttcgcactttacactcaatgtagactacatgtagagtaccacgcggcttattaaaagtacttattacgtatacgacgtgagcaactagggatagtcacttacatatgaaattttagcgagattggtgaaactatttcaaataggtgagtcactttatattaaaatcaagaagtcatgctgatagctagttgacttctctgatggttttgtcatcaactttgaattagtcggagaattacctttctctggggtttcgctcacacctacatatgtatatgtaaaacccaaggcctcataatgggcctaatgaccattataaacagttattatattgttaccgtctgttattgtttacttcgccgtccacaacgtggtcacccatgaaaactggtttatatcgatagatttgaatcatgtgtcaagtgtttgttgttatactatgcacattcatgggaattctttgcgaacttttctgtattctgacgtcagcggattgggctttcaccattaaattctttttggtatttgtttgttgttggtatgtgcccgctaatgatgatgattaattagccaactactcttcacatgtcaggcttttctcactgttcttcgcttcctctctgtctctctctatttctaatttctctttagcaaggccacaatcttgcattaccgtttgcctaacttatcgctcaaagaaaacaacaaatgtacacagaagctctttactttgtcgatgcgtatttaaactgtgtctcttcactcttgaattgagtggattcgcctttgagtcgagtacccttgccgcttcttcttcttcttccgcctgcagtggccttcttggtcatttcgattgtgggtgcaagtgggtctctctcgttgtcttctctcttgtttactcaagcgatataacgattaagtcgaaaaagaaataaacgagacccattcttctgataccctttctgcatacgggattcataatttccactcggttgcgatctctctctttgtctctctcttgggtaagaagaaaacagcctacagcagggagacagctgaaagataagcaaagcaaatgaggtgaaccgttggacaaaccaaaagtttattttcgatgcagtcaacccagatttttactgcactcgaaataattattgaatcgtacttctcagatttttgcaatataagctaaaacatttttataagaccagcaacactcaggatgacgacatctaatcaatcaattgtggcaacaattgaatacagaaagtattatttgttttattcactgttgttaaacgtgtaatatcatcagaatgtgtgatttattgcgattattttgtgaagtgtaagtgcattctagggtcttgtagcttcgttacaagtatatttacattgtgtggcgtgtgtgttcttgtatttgcctatactctagcactctcgcgcacttttggcgctctcctaggccaatccgctcgctctttttctcctctgctctttgtcgtggtgcgatcatgtgtggggtccggctggcgctcgctaaactcttaaccagtggctttttaaccagtttaagtttacatttgcgtgagcgcagacgtgtccggaaagcgaacggaagacaagtggaacggaacacggccgtataatcagaaatcaaacagagtagtggtgtcgtcacttttgcgactctccataaaaatccgtctgccagtgcttgttgcttcttcttgagtgcgcggttttcatgtatcgccgccggtattccgccttcgagcccagcacaccccgcgtgggagtgctaccctctccaccgcctcaatatgccaaccctcccgccgacactgccgccccgaaaacgccacccaagctgagcgtacactttgaccccaatttgccgaaagacaacgatagcaacaacaacctcaccggcagcgaaaatgcaaatgctaaaggcggcggtcgcaaggcgcgttcactaagcaattcgccactgtatcaccgaaaaaagcggtacggccatctgccggcgctgatgtcgaataacgggccgacggccagcagcaactaccagctgctgaacagtgcgaatctgcgagatctcatcgacggccaacgccactcgcatcacgtaagcaggcgcgatgacagccaaagccacagtcatagcgaaagcccaagtcacattggccacattagccaaagcaaccaaagcataccaagcctcccaagcctgccaagcggcaaaaacaagacgaaagatggcaaaaagctgaaggcaactttaacggcggccatgtcatcgtcgctgctgcgacgcaaggcgcacagcaatcacagtcaacagcagaaactgcaactgcaacagcaacagcaagagcaacatcagcaacagctgcagcagcaacaattgagaagcaacaacagcaaggcaattgcaaatgctgcccgccattcgctgggtcattcaccctccgctgccgccgccgctgctgcagtgcagcagacgcttgtctacgagcggcgacgcgtcagcagcgcccactcctccccctcgcccacctccaggcaccactccccagtgcaccagtgcatgctgatgcggcggcgcagcgactacagcgtcgagcagatcgagcagtggaaacgccagcagcaattgttgccgcgatccggacgcaagattagcgtaagtgcaccgggagaaacaggctggagttgtataatatatgtcaaattcttacatctttttaaacagttatcttcgcttgacaaagtgtttttaatataatataacaatattgaagaccaatggtttttgtatcggtgctcttacggacagatatttagctgttgaagccgtagtacgtacgtgtatcgaaatacttcaatcgatacgcttttctttttgtgtgaaaatgcattgagatgaaaacaaaggaaaagccaccgagtgtgtgccagttgcaaagctttaaggcgaagctttttcgtcaattgaattcggctgcattgagtgcaatatatatttagacaaaatgagggtcagccatacaatgcacatagaaaaaacaaatagtcaatacacaatttgcataaattgaaataagattgaactgtatgttttgctcattgacataaatgaatttggttcttgaactcttctcttttaagttaattaaaaatctggagaaacttttaaactgaattataaatagaaatttgttgaatattcttttacctcgaaagataacaaggtacatatgtatttctcagtgcacacttttcttgaccccatttctacatgctaagagcactgcgagagaggaagagaatgtgagttgcgggcaaagcgtttaggctaaaccaaaattggcccgcaactgtgtgcgagtgtaattgttcaattgccgtatctgatatggggtacttgtcccattgcctcgtttccacgaccgccctctctcccctcgctaatgtgtcataattccacaattgcacatttcaatgttaattcaaagctactcaaccgagtgagcatacagctcctcatcccccccttcttcaaccactcggctcacaaatatttcattggggctgaaattattgttcctctgggttttatctgcgatttcgcgttctgattgccagataacgtgtaagagaactatatcagcgcagtttatatttctatttacgtttgtgtttccttattgtttacttatggtattgtgttgtcgacacttctatccctgaaatgtgccaatcattgtgacccacatgtaatatcggaatggtgaataaaatagggctaatattccaaactatatcagagtgtaaagaaagaggaagtgctaagacatcgtaacttaaggtgtaagttatactacgccacaaataacttgcataacgattaacgaacgtataagtatatgtttgtacatatgtacattttacgacttttcgagttagctcgtttatttctttaatgatagtttacatttcatcatgtagttaacagttataaattaagttttagcatttcgaaagtagataaacgaggtaaataaatttagaaaacttgattttagagattaacatgtttccgttggactttcaaaacaaaagatttatatgtaatacgaggaaactaatactttccttggtgatatttaaaaatctttgagaagaattttattttccttttttatgcatgttactttactaaattctaaccaatccttttttatattacagttgcctgtcgctgatccgttcctagagaaagtaaatctatcagatctgggtaagttttgaaaccaccctcttaatccagtccagtgtccccttttccgcaacggccgtcccgagagacaaacaacaatgtctagtttaaatgaattagcaaacatacttggctggcgttcggtcaaaagtcggcctctgaggattttcgttgggcacacgacgccatcgccagaatatgatagaacctgatataccaatatatctatgtacatacataaataggccaaagaagaagataacttgtggaatcagtcataattcacggggattatggtagcaagtgatttgaatgttagcgtgggctgtctaaaatttacatatagttctttattcccgacaaaacaagtggatagacttctgttcttaaagttcctaaagagaaacgaacacacccccaaaagttcatatttgcttttcttttttaccaaagctaattataagttccaagtacgccggagaccaaatacgcaaatgaagtgagggtactacaatgagagccgaaaggagggaaaacgaaaaaacagtgcatgtaatttgttggcaatttcagacatttcatgatcctcattaaacgtcaattcccagccgatccgattcaaccgatctctcagcaaagattatattcaatttattaaacgctctgagaactcttcgatttagtggcgaggctttctgctcagagcgtttccactattatttcagtctatcatttgtttgtttttctgcgcttttcccctgacgaaaaacttttccgccacagagagccacagcgagcggaggaggagatggaaaacacagagtgtagatcagtttatgataaaatttcgaatcgtttagaacgtcgccaacgaaagacgggcagacgacacaaaatcggcggttttccgttccgtgtgctttccgtgtggaattattggcagcaggaaccattcgagatctatacgtgtctatacatatgtgccaagtgtgtgtctatggacactgcccagagccgtaattacttgcttaccaactcagcaatcgaatccaaccgaccaactgcaagcaaatcaaagtcgacccatcgaaggtcttcgctgttctcttagtcattcgctaagaattttcgaatagcgccgcgacgccaaaagcaactgaaccatcaccaccaccctcgccgactggccacttttcccccacaatcgccgcccattgcgaaaatgggttttcatttgtttagatgccacacggcaaaaaaaaaagaaatagcagagtaatcaacaaagccaacaacgccaaggagcatttcaattaactcttgtggcccgtggcccctgtcaaaagaaacacaaaacgcagaagcgaacagaatcgaaaacgataaaccatatttacctttgctttggcaattggatgcatatgcatatgcattgaaaatcaatcattgaacagcaacagagtacaaaaaagattaaagagaccttcaccgatctcaacaagcgttattgccttcatttccttcgactttctttatctgtgcgaacggttcgccgcccggcaaccgcagtaaattccatttattaaacaacatttaaatgtttacaaagcttagtcgggaatatctttttgccgcttgcatgcatatagctccaaatattttacaatttatttcgatgtgtatattttctggccgcggtatctggccttcgtgttttttctatatattatatttggtcgtttttaaactttctgtttgtctgttgtttgcttatattgtggtggatatcatccggataatttgttggaaatacttttaccagtggttttaaaaatttccactaatctcatactgggaggcggcaggttttccttaaattatttccgctcattaatgcattccatttctatgtcgatgaatcataaatttactttgatctgacttcgtgccaaataaaacatcagattgtctgatcaaaaaataacctgccaattagtaaattgaacgaaaataattttttgcactttaaataaagttatttattatttctgaaatagatttccctatggttttcgcaaaagaggcgcactaatccctacagacattcgaaatttcagtgttgagtcctatgctgcggttaattaatttcttggcacaactgcctgtcccaatatctgttatgtgtcgctataatggctgaattggtttgggtgtatgtttggcttgcatttatcaggcccctgacaagaccgatctgcagcccctgtgattttatatagtttttgattaacaccttttggccccgcctcaatatttatttgtttacattgtgccacagcacagtaggcagtctacattatgcccctctcacttggtggtttctctttctctaaatgggaattgaaataataatatttattgttgaacaatttggcgaatctattctatttcgatgtgttttcctaagctgtggctgcttcggttgcttttgtcgtacgctaaatttattttaattaaaaatgtcttaatttaattcaacgaaacgcgtgcgccctcaaatttatgggcaccggttgttctatttttgggttcgaatacgctgagcgcgaataaatatcgcctaacatccgtagctcactacagtgagaagcgcgtagagcggcgcagctctgttagcgggctgttagctagttggacaatcaataaggcaaatcaattagcgaagcaaatcgagtcgcgcagttaattgctagcgcccacagttcacaggcagaagaccagatcaaattggatcgcatcaatctagcgtaatgcgacactgaaaatcgctaaaaacaaaaacccaaaaataaaagagcgaagcgtcaaagtgaagcacagtggaaacccagaacgcatgttacagttgcacttctactcgaatcatgcgggtcgtttggtactcggaggtggcaaccgtcgcccgaccgacgtcctttgctatccgttggagagcatcaaagagttcgagcagatctctgaggcctggaaacgcctgctagccgagttgctcaagaaaggtggacatcccagatccctaaaccttcagcccatatcgtaaataaatccattatttaaccgacttctcttcttatttctgcagaagaggacgactcacagatcttcgtgaagttctttcgttttcacaagtgctatgatctgatacccacctccgccaagttggttgtcttcgacacccagcttcttgtaaagaaggccttctacgccctcgtctacaacggtgtgcgagcggcaccgctctgggattcggagaagcaacagttcgtgggcatgctaaccatcacggactttatcaagatcctgcaaatgtattacaaatcgccaaatgcgtccatggagcagctggaagagcacaaactggacacgtggcggagtaagtgaaaacccacatttgcattgaatgatgatactaactaaatggtatcctctgctaggcgtgctgcacaaccaggtgatgccgttggtcagcatcggaccggatgcgtccctctacgatgccatcaaaattctcatccacagccgcatacatcgcctgcccgtcatcgatccggcgaccggcaatgtcctctacatcctgacacataaacgcatacttaggttccttttcctatacgtgagtttctggaatattaactacttacctaaaagcaaaatatttatgtgatacttcctatgcgcagattaatgaattaccaaagcccgcgtacatgcaaaaaagtttgcgcgaactgaagattggcacctataacaacatcgagaccgccgacgagacgacgagcatcatcacggcgctcaagaaatttgtggagcgacgagtctcagccctgccactagtggattccgatggtcgcctcgttgacatttacgcaaagtttgatgtgattgtaagtatacctcttagtgatcacagatagatagatagatagatgtgaagtataaatctttccaacaaatgttgtattgttaaaagaaatatgatttagattatacgtatataagttagaaagatcttaaagtaatgtaaatattcttttcgttcagaatctcgccgccgagaaaacctacaacgatctcgatgtttcgctgcgcaaagccaacgagcaccggaacgagtggttcgagggcgtgcagaagtgcaatctggacgaatcgctctacacgatcatggaacgaatcgtccgcgccgaagtacatcgactggtggtggtcgacgagaatcgcaaagtgatcggcattatctcgctgtccgatatactgctctacctcgtcctgcgaccaagcggtgaaggcgtcggtggctcggagagctcattgcgtgcgtccgatcccgttctgctgcgcaaagtggctgaggttgaaataccagcgacagccgcagcggcgacgacaacaaccccgcctcgcagtccatcggccggatccggcaatcgcagcctgatcgaggacatacccgaagaggagacggcgccggcgaggagcgacgatgccgacagtgataacaataagtccgccagtgaggataaagccaacaataaccagcacgaccagacgacgacggctgcgacagctaatggtgatagcaacaacagccccgtagaagtgtcctttgccgatgaggcgcaggaagaagaagctgccgaccaggtcgagcgcagcaattgtgatgatgatgaccagccagcgttagcggagattgagcgcaagaatgcatcgatggacgacgacgaggacgatgggatgagcagcgccgtgtccgctgcctccgctttgggccagtcactgacgcccgcggcgcaagaaatggcgttggttagtgaataaacctaaacctacaccttaacacttaatttaaacttatgctaaagagatacagctgttacagatacaaaagaaacaaaaaaaaaaacaattgctaaacaataactaagaaccccaaaacacaacattaatgataaagcagagaacattatatttgaatatgaatatttgttaaggatattaatgggtaaatggaggttatatgaatagtaatgagaagcttaatatcgcatattaatatccgcggacattgcaactttgattggagtaaaaatctttttggattgagacgtcaacggtgtgtcactcttctccagcagactattcacatagctctgggctcgaccctgttccatcttgaggatgtttatggattaaagccatcatggctgctaatattaaaggaattttcggttgtgtggataaattctgagcaacgcaaaataagccctgtatttcttctggttgcaaacttgttaaaatcgttattaccgtacaaccggactagataggtacaatgaagggataatttctactataatttaagtccgagatctctcaaggatggagctgaacttgataatcggaatgattaactttttattgataggtttctttccaaaacaaattgcaccttccaatttttcttagtgatatatcgatgaattctgtggcaaacattgtataggaatgtatcaatattccaactcagggtgaaggggcaaattcaacctcggatttgaaactgataaccagggagacaggtcctgtcgaacagtgcatgggatctcgtatgagtaatcagtatgcgtcataatgcaacattgtacacagataccaactttacaatcaaggtaattttcacatgttcgaaagcctgggttgagttaaagaatgcctatagaaatgaaattcattccttggatatctttcactggtcatcgggaggaccatggtaaaaagagctgaagatatccatatgtgttaggagtttgacatgggtgctgtctattgcatgtgagtatgtatgggctgccaggagctgcggattgaccaacgatttatttg

SEQ ID NO: 25526 - DNA, 3261 bp, DROSOPHILA
cacgtccagcgttattgtggcaaaggaaacaccggttcctgtaacaccggagcccgtttccccgctgccgctgcccacggagccgccgctgattatcaagggcaaatttaaggtgacactcgcccaggagacacccgaactgcgagtcgaggcccagaagctgagcaaactgaatgccagctcgaatgcccacaccatcagctttccctccagcttcggaggctactcctcggtgcagggactgttctcccagcgatatggctcaaatcggtttcccaccgccgctccccacatgtccaagcagttcttcgagccatcgctggtggagattcgcacgccggcccagagcaacgtggcgctgaatacaactgggctggccaatagcaatcaccaaagcctcacttgtgatacaaatagtttagccaacaagccgcgcacgcccagcgaacgggagctggacgagatctggatacggcggcaggacggtggattgagtggcactgctgcaccaggcgcaccgggtgctccacttcctctgctccagcagcagcagcagcagcagagacccgtctccctgggtggggcgtctaccatgccccgtttgctgaggagcgagagcagtgcctccaccacaagtccatcccgccagctcaccaactcgggatccgtctccgtttccgtgtccgatgatgagcaggatggcagcctcggaggagccggccggatgccaggatcacgaccctccagcgctcccgcagagccaaatgccaaggcggccaagaaggcctacaaaaagatggaaaaggagcagcgtcgccaggagaaggagcagtcgcgacgggaaaaggaggcccgcaagctggagcgcgagacggcgagaaggaacgaacgcgaggcggccaagctggagaagatcaacaggcacagcgagaagatctcacgcagcacggagcgaatggccatggccggtgtgggatcgcggtccggttcgctggagcggaggcgaagcggcgaggactcgcccgtgctcaatcagtcgacggtgcacggtatagcgtcacccaaccgaaggccaacgatattcgacgttttccgaccgcgtgcgaaatccgatgcgaagcggcagaaggagaagcatctgctggatccctcgtccgccgacagcagcgccaccagcagcacctactccgtttccggcggcacaggcccggccacgagctcggcagcaggtggagcaggaggagcggcggcagcagcaggacagggcgcagcgggaggagccggtggccttatgaactccatgaaggtggccatgcagaactttagccatcgccagcatcccgccgtgacgataacgagcgccgacggcacgcaatcaacggcaaagagcaagtacaaagacggcagtgcccatccgcatcaaggcagcgacgcgcagtattaccacacggtgacggcggtgcgtccaaactcttcccaacggtcgccgatgaccaaggtcatggatctgttccggcatcgatccagctcggttgtcagcgaagccgacaaacgcaaagcggctcacatgcgtcgtgcctccgcggatttggagaaacgtcgtgcatcagttggtgccgcaggtcgaggactgcgaggggatggtactttggatccacaccatgcagccatcctcttcagagactcacgagggttgcctgtcgctgatccgttcctagagaaagtaaatctatcagatctggaagaggacgactcacagatcttcgtgaagttctttcgttttcacaagtgctatgatctgatacccacctccgccaagttggttgtcttcgacacccagcttcttgtaaagaaggccttctacgccctcgtctacaacggtgtgcgagcggcaccgctctgggattcggagaagcaacagttcgtgggcatgctaaccatcacggactttatcaagatcctgcaaatgtattacaaatcgccaaatgcgtccatggagcagctggaagagcacaaactggacacgtggcggagcgtgctgcacaaccaggtgatgccgttggtcagcatcggaccggatgcgtccctctacgatgccatcaaaattctcatccacagccgcatacatcgcctgcccgtcatcgatccggcgaccggcaatgtcctctacatcctgacacataaacgcatacttaggttccttttcctatacattaatgaattaccaaagcccgcgtacatgcaaaaaagtttgcgcgaactgaagattggcacctataacaacatcgagaccgccgacgagacgacgagcatcatcacggcgctcaagaaatttgtggagcgacgagtctcagccctgccactagtggattccgatggtcgcctcgttgacatttacgcaaagtttgatgtgattaatctcgccgccgagaaaacctacaacgatctcgatgtttcgctgcgcaaagccaacgagcaccggaacgagtggttcgagggcgtgcagaagtgcaatctggacgaatcgctctacacgatcatggaacgaatcgtccgcgccgaagtacatcgactggtggtggtcgacgagaatcgcaaagtgatcggcattatctcgctgtccgatatactgctctacctcgtcctgcgaccaagcggtgaaggcgtcggtggctcggagagctcattgcgtgcgtccgatcccgttctgctgcgcaaagtggctgaggttgaaataccagcgacagccgcagcggcgacgacaacaaccccgcctcgcagtccatcggccggatccggcaatcgcagcctgatcgaggacatacccgaagaggagacggcgccggcgaggagcgacgatgccgacagtgataacaataagtccgccagtgaggataaagccaacaataaccagcacgaccagacgacgacggctgcgacagctaatggtgatagcaacaacagccccgtagaagtgtcctttgccgatgaggcgcaggaagaagaagctgccgaccaggtcgagcgcagcaattgtgatgatgatgaccagccagcgttagcggagattgagcgcaagaatgcatcgatggacgacgacgaggacgatgggatgagcagcgccgtgtccgctgcctccgctttgggccagtcactgacgcccgcggcgcaagaaatggcgttggttagtgaataaacctaaacctacaccttaacacttaatttaaacttatgctaaagagatacagctgttacagatac

SEQ ID NO: 25527 - protein, 634 aa, DROSOPHILA
MNSMKVAMQNFSHRQHPAVTITSADGTQSTAKSKYKDGSAHPHQGSDAQYYHTVTAVRPNSSQRSPMTKVMDLFRHRSSSVVSEADKRKAAHMRRASADLEKRRASVGAAGRGLRGDGTLDPHHAAILFRDSRGLPVADPFLEKVNLSDLEEDDSQIFVKFFRFHKCYDLIPTSAKLVVFDTQLLVKKAFYALVYNGVRAAPLWDSEKQQFVGMLTITDFIKILQMYYKSPNASMEQLEEHKLDTWRSVLHNQVMPLVSIGPDASLYDAIKILIHSRIHRLPVIDPATGNVLYILTHKRILRFLFLYINELPKPAYMQKSLRELKIGTYNNIETADETTSIITALKKFVERRVSALPLVDSDGRLVDIYAKFDVINLAAEKTYNDLDVSLRKANEHRNEWFEGVQKCNLDESLYTIMERIVRAEVHRLVVVDENRKVIGIISLSDILLYLVLRPSGEGVGGSESSLRASDPVLLRKVAEVEIPATAAAATTTTPPRSPSAGSGNRSLIEDIPEEETAPARSDDADSDNNKSASEDKANNNQHDQTTTAATANGDSNNSPVEVSFADEAQEEEAADQVERSNCDDDDQPALAEIERKNASMDDDEDDGMSSAVSAASALGQSLTPAAQEMALVSE

SEQ ID NO: 25528 - DNA, 2758 bp, DROSOPHILA
ggatggtatttacttttcgaaattgattctccattaaagcagcgagtaatttaaattgtagtttagatacatttcggagccagttagttactgcaccgaaaccggtacctttgaggtaaacgcgttcgctaccttttctttgtcactgttgacatttcatggttccgatcaccgcaagtgggcgatccactcaattggcgatactttgtcatgtgcggccaattagcaatggcaactgccacgctggcggacaaacaaaacccgctgactagcatagaaatccggaaaaatgcaggcatcacagctcggaaaaccctcacactcagacctctgccaagcagcgaacaattcagtgcatttttgcagcaatctgtgctcatttttatgagtttcgctggcgactacgctcactcctccaaaccaacgacattctgacggactgctgttcaaatgggaaatagagacatgttggcttttctgcttccgattcgcagccgtatgcgtttcctgtctgtgaggcatgcacttggaaaaatcaagatgcatacgttttaaaaaaaatatttcataccaacatctgacgatcttttgccggcagacgggaccatttgagtggaatgtgcctatatgactatgcctatgcaacagagcagacttattaatgtataaattctttttgagtgcagcttcactcattgttgcacaaacaaatacagtgccacacacattcagacagatggctcacatggagaacaagagcaggccacatatgctaatacacggaggcagtcgaccatggcatgtagcatacccactcacccacctcctcctcttccgactgaccactcaaatccaaccggtcacgtcaactaatccctgggaagttgttcgagcatcgcagtgaaagttagccaaaaaccaactgcacaattattaggcattaaaggatgctttatgaagcaaaggagttgcaccgagcatggctttaatgttttccgctttaccaactcaggcttatcgactccttgtttagggatcctggattgatggcctccatcttgcgcattcccttgctgtccactacatacacctcaaagttccgctggttgatgatcagtcgcctttggatctccaggacgcacttcttcatcagcgagtaggcatcctcttggctgagcttcgagttccaatatctctgcagaatgctgccacagaacatgctgccccaaccatgacctgcatgattgattgactgagcagcgccataggagtcgatgtagtggaggtcaggtccctcaaccgcatcgtatcctgccaggagcattgccacctggtatctggtgttggtccttatataatccgccagtgttttcctggtaaaatgggcagctgacttcgcacttagatggtatccgtgggaaatcttgtacagatgcaaatttttggatatgaagtcggtgaactgaatggtatcgccaccatcacccaccgtggccatcatattgaagtctgatagtcggtggatttttgattggtctaaaaatttattggcattatataagttcccaatatcagataaacaaaaagggcgtgattaccatctttcatgaagaccagcgatttggcctgcattgtatctgatgctagcatcacaaagtctggtcccttgatccccaaaatagtttccatcgccatggtaaccaaaaattttattaaagtgatacactattgtgaatattatgtgtttacttttgaaatattcgtgttcgtgttcagtggtagtactacttgatgtagaatgtgagtgaaatgactgggctactaagaacccaggccatctcgatcggccatcagggtgaagaaggagtaggctcccttccaacaggccacgtaggtgctcaggtggatgggcaccaggttgccggcgaggagaagctgcatccgcttagtgcgctccgccaggatgagcatgtgcccacgatagctggcactttgatccacccagttgctgcagaataccgcatagtgaagctcagcaaaactctcctgcaccatggttccatagtagcacaatggatatgtctgcacggtgatgcccaagagaaagcaaagataatagatgcgatcgtacaaggtctccacgtaaaatatcaggacaaatagggtgatggcgatgttgatgccaataaccataaactgcaccatcatgggatacgaaacgagactcttggtcacatcgagtaatctaaaggaagattgagtattagaactggaaacatagagatagtaggattacctatacagcgcgttttgatccctgatgcagttgaccagatcctgttcgttctcctccagagtcttgtaaccatatccgatttcagagattctcaggatcagcaattgacattgctcggagatcaggtacagtacgagcgggggaaacgagtcagctgcaaagcattgcataatttgaaagacatagccaatctcctggaaaaccagagctccgatgtaggccaccatcgagttcttccagtcgaagggaaaccacatgggcatgggtaagcttagctcagtttcgaaaacgaagggaactgcagcaatgatgaagactacagcgtaggtgatctggaacagcttggacatccttagcaggtgctcggtcatatttctatgacgctcagactggctctcgccagaaacccgggcatccagctgaccaataagactctggacctcgaccatctttgttagttgg

SEQ ID NO: 25529 - DNA, 696 bp, DROSOPHILA
atttcaaaagtaaacacataatattcacaatagtgtatcactttaataaaatttttggttaccatggcgatggaaactattttggggatcaagggaccagactttgtgatgctagcatcagatacaatgcaggccaaatcgctggtcttcatgaaagatgaccaatcaaaaatccaccgactatcagacttcaatatgatggccacggtgggtgatggtggcgataccattcagttcaccgacttcatatccaaaaatttgcatctgtacaagatttcccacggataccatctaagtgcgaagtcagctgcccattttaccaggaaaacactggcggattatataaggaccaacaccagataccaggtggcaatgctcctggcaggatacgatgcggttgagggacctgacctccactacatcgactcctatggcgctgctcagtcaatcaatcatgcaggtcatggttggggcagcatgttctgtggcagcattctgcagagatattggaactcgaagctcagccaagaggatgcctactcgctgatgaagaagtgcgtcctggagatccaaaggcgactgatcatcaaccagcggaactttgaggtgtatgtagtggacagcaagggaatgcgcaagatggaggccatcaatccaggatccctaaacaaggagtcgataagcctgagttggtaa

SEQ ID NO: 25530 - protein, 210 aa, DROSOPHILA
MAMETILGIKGPDFVMLASDTMQAKSLVFMKDDQSKIHRLSDFNMMATVGDGGDTIQFTDFISKNLHLYKISHGYHLSAKSAAHFTRKTLADYIRTNTRYQVAMLLAGYDAVEGPDLHYIDSYGAAQSINHAGHGWGSMFCGSILQRYWNSKLSQEDAYSLMKKCVLEIQRRLIINQRNFEVYVVDSKGMRKMEAINPGSLNKESISLSW

SEQ ID NO: 25531 - DNA, 2647 bp, DROSOPHILA
ggtcacatcgagtaatctaaaggaagattgagtattagaactggaaacatagagatagtaggattacctatacagcgcgttttgatccctgatgcagttgaccagatcctgttcgttctcctccagagtcttgtaaccatatccgatttcagagattctcaggatcagcaattgacattgctcggagatcaggtacagtacgagcgggggaaacgagtcagctgcaaagcattgcataatttgaaagacatagccaatctcctggaaaaccagagctccgatgtaggccaccatcgagttcttccagtcgaagggaaaccacatgggcatgggtaagcttagctcagtttcgaaaacgaagggaactgcagcaatgatgaagactacagcgtaggtgatctggaacagcttggacatccttagcaggtgctcggtcatatttctatgacgctcagactggctctcgccagaaacccgggcatccagctgaccaataagactctggacctcgaccatctttgttagttgggccacgtacatgcagaacttcatgagattggacagcgaagtgaccgtcaggctcaagctgaaattattttccaccggatcttcgaaactgtatactcctctcagtagcatgggtgtcggcaggtacaccaagatgcacaatagcatcgaccaactccagtacctaccctcgctgagatccaaggcaccacaaattcgccaggcattcaactggactcgaaaatagtcgatttttagggtttcgctgagcttcattttgaattcttggtgtctttctttttcactggcatactttcaaaaggacctcgaccatttatatcacctttctgtgtcagttgcgccattagtcaggggttattaaatcgcaaattaaatcattatcgaggggtcgcatataattttcccaaaacttgggaaaatgcacaccctttgagtgccattcagcaaaggagtatctatatatcacttaatacagagctttatattaaattattttcattcaaattttatgaatctttgataagctacaaaaaatataaagggcttcgattattattttgtgtttaatatccttcgcttgggaccagctaagatatcccctctaagggactccaggttgatgctattcatctttgttatgccatttttgcttatcaggaacaaatctatgttgcgcaagttgataacgaatcgtttatacagctcaatcacacactttttgataacatcataggctgcctgcgtatccatgtccggtttgtagaactcctcgagaatgggagtgcagaagttcatggcggctccgtggccaccgtaccgaacgggaaccgagttacccaaataatcgatgtagtgcaactcgggaccgctggtcaaatcgtatccgcccaccaacagcgacacctggaacgtgcaatcgctcttcaaataggcggacaaatgcctccggatgaagtgcaccgctccgcgaacggttaagtcgtatccgttggttatcttgtaaagatccatgttccggaggatgaaatccgagaacttcaggcagtctccaccgtccccagcggtcgacatcatgcagtagtccgagatgcggtgagtctttctgacctctacactcatttataaattattactatcctccttatcaaaggcctacttaccgtcatccagccacatcgccgacttgttcctcatggtatccgaggccagtatgatgaaatcagttcctttaacacccaaaatggtttccattttaggtaatgtttgattcagtaaattttagtcgggtttcgaaagccttctcagttacttctgtcttttggtgaccgataaacattcagatgccagaacataagtaataactcactcactttccttccatattagaccacgcatttgtcgcttctcagcgcgactttgcgaagttcgggggccgtaagagtcctgcgtgtcctgtcaacaagtccaccccctcgaccaaacacccaaccaattctcgtctgcgtccatttccgttcggtttgtgccaccgttgggggcacttaaaaagcacttagttgtgtttcattgaaataattttcagcatttccgcacttgaacacgattttcattatccgctagctgcattttactatcccccattgtctgcacttttaatgtgatggaaattcgcgccattctgaataattattgcatctatttgtgaaatggaaatatttccgcaattaaaaacatattttctagcacccttcaagtaatgacgaccattccatcctcatccagatttccatcccggttcgcacatcctttgtgtttgccatttcagacatttatactgcaattaaatgcgagaactgccaacagcgaaggaagcgaaagttaatggaattcgctggaataataaaatgggtcgtaggacgcagtgtttaccttgattttaagatctgatcctcaactgtatcctattgttttgttttgccatttaaacatttgaaaagagtatcaaaaaatcggacacagtgacataaacaaacattcggtatgaattaaatttgcagttcaatttgatgacgactctggggagcatgagttccgtggctgctgaaaatgtcatttacgc

SEQ ID NO: 25532 - DNA, 647 bp, DROSOPHILA
atgagtgtagaggtcagaaagactcaccgcatctcggactactgcatgatgtcgaccgctggggacggtggagactgcctgaagttctcggatttcatcctccggaacatggatctttacaagataaccaacggatacgacttaaccgttcgcggagcggtgcacttcatccggaggcatttgtccgcctatttgaagagcgattgcacgttccaggtgtcgctgttggtgggcggatacgatttgaccagcggtcccgagttgcactacatcgattatttgggtaactcggttcccgttcggtacggtggccacggagccgccatgaacttctgcactcccattctcgaggagttctacaaaccggacatggatacgcaggcagcctatgatgttatcaaaaagtgtgtgattgagctgtataaacgattcgttatcaacttgcgcaacatagatttgttcctgataagcaaaaatggcataacaaagatgaatagcatcaacctggagtcccttagaggggatatcttagctggtcccaagcgaaggatattaaacacaaaataataatcgaagccctttatattttttgtagcttatcaaagattcataaaatttgaatgaaaataatttaatataaagctctg

SEQ ID NO: 25533 - protein, 188 aa, DROSOPHILA
MSVEVRKTHRISDYCMMSTAGDGGDCLKFSDFILRNMDLYKITNGYDLTVRGAVHFIRRHLSAYLKSDCTFQVSLLVGGYDLTSGPELHYIDYLGNSVPVRYGGHGAAMNFCTPILEEFYKPDMDTQAAYDVIKKCVIELYKRFVINLRNIDLFLISKNGITKMNSINLESLRGDILAGPKRRILNTK

SEQ ID NO: 25534 - DNA, 3580 bp, DROSOPHILA
gctgctcacttcatcaagggggtcaaagtcaactcggcattcgcccagtcatcagcagactgaactccactaataaccccgatgcgaatttctagttctctgcagcgatatttatggccaggcattagggtgatggcaaccgccgaattgctcaatggcaatcagcaaaccttaaaatagtttttgcgccaagaaataaaattatatatggcttaatatagcaatcttcaccaaaacgctcttttagaagtctcagcttttttttttattgttttgattcgctttatgttttgtgatagatctgcatttataatgtatatggtgatataatatcttaggctccatgcgcgatgctctgccgtgtgggtgcagggatgcggaatttgtgatgtgctgtgtatatgtgtgaatataaaatcagacctcatttaacgatgaaacgtatgttcattactccatacaaccctaacaactctaagcggtaaggtaaatactaatgccacaaggggatcatctaattgcataacttaaagtaattgcttggctgacatggtagctcctttagatcctgttttagcaatggaacccttgagcggaagtcatctcgttttgccaatttcagatgcaagcaattctgcactactcgaaatgtaaatcaacttacgacaacattaagtagacaaattggaattttataaataattgtacatatattaatttctctactgcagatttcattcgacaatcaactggttttgcaatttttttttttctatgcaagattttgatgataaatgcgtgtaattgtgtgttaagtgtgtgtttttgtcttctatatggttccgttgattttgtataacaaggtacaaatgctccccaaacgctaaaaaggttgcattgtaaaactgcgctagttcgcattaatatatgttttactcgtactatgaatgggattgtatgtgcttttacgatgattgtttcttggcatccacttcagcatctaaaaggttattggttcgatgggaacagtgcattcgctatacatgacgcggtacatggccatttcagagatgccatggtagtggacaaaagcggccgcaatgaccagtatgtggaatatttgatgtgattgaccctgcaaaataaaagactgttagaacggtgcaaaggacaaaaccatcaagaatcgtacccaaatgtcaaactttccagggaaccagcgttcgggaacacggagggcgtacagcagtgcgcccagaatgtagaggaggcctgcaagatgtattttgccattgttttaccattattttaatatgcatatctacaagcactcacccatcagaattagccatcccagactggcgcggctcatctggctgaaccagccctccatgatgctgtagtgaatagctggaatcacacccgacaggccaaagctcataaatacgccagcgcgcaagggacgaagtgccggctccgaaaacttgtcccatagcgagaccacgatggagaggatgcccagaatgctaacaacggataggtatatcacctttggctggtaatgacagtagaagccatagtacagccaaggcacaaaggaacccatgatcagcagcgcaattccacagtagtcaagtctgttggtaaacaaaacaattaacataatatccatttaattagtcgaggaatacttacttagaaaacagtcttcccatctctacagaatgacagctcagtgtgtgaaaagcgaatgagaatcctaggcacacaatcgcaccgataaagaaggcgccaaaaacgatcttctcctgtgtctggatctcaaccgagggacgcgagatgaagtataatgccacgccgatgaaggcgatgcagccaagaagatgtgtccagatgttgcccgtttccgtgtgcacgcggaaaattgatttaaagcacgcacggaaagaggggagcggtgggcgatggccgcggtgtaggaagtcgttatcctgcagccacttgggtagatttttgtagtggcacactttccagctagcctcccagacctacggatgaaatggaaaaaaataacatatcattctatagataagacattacgtttggtaactataaacaaacaacaacaacaaaaaatacagtcccaacacttaatactatttattgaaataaaaacaaaaatacaaaagctacaatattacaaatcttgaagagtatcttccatttaagccattcttcacttggcagcatcacttggcttaccttgcgcacaaactcctctgcctgctcggcggcattgtgtgccaatgcgcccaaatcaatttcatcggagagaactccggccttcagcacttccgtcatctgtggaatagagtgataagacattaaacagctctcaaaacaaatataaaaagcttaataacaaagaaaaactaagagcaaatgggactaacgactgcattttcagcttgctccttgactgtgtcagggttttgggttctgtaagtttcttgactgagatccggctccagatccgggttgacacgcactataacctccggctgggtctgcatcttgagcggctaacagagattcgaacggaactagaactaaatgtgcgaggcaatgagcgattgtactgtgaagcctctgccagtcgcatactcaatttgttggcggaacaagaaagcaccgaatgcgttccgcgataagataagcttgcccgaaactgactccgggcattatcagcaccgcatcgacgtaaatttgtgatttttttccagcatctgtcgtataaagggctatgccaaagctttttgcgttcaatctaagcctgacctttaaagccggtgatcaaacgggcagattgtctagagtataaggctcaaagtcaagaaattttacttgacacctttcggacagacattaaaggcaaggagagataagaggtataactttcaaatggctatggaatatgctttaaattgagcaattgtatttagtgagtcataaaaatggagaaatggccacgataaggtttaagtacaatggttatggtacattttgcatgtggcaaatagacattggccaatgcaacatttcgattgataagacgcccgacattgaaatgactgcctgcgcagagggaaaattgcgactaacaagtggcagccgataaccacatggtggtaggtcagcgataagagctccgccacatgttttgacgattgcatttcgtacttttccacctggtggaaaatggaaataaaggttaatagccccaactcacctccgcctcaataagctgtgtgtcctccggggtcgaggggagtggacaaccggcgtcatcctcctcgaccaactcatcgtcgtactccagaatgtccagatcattggggctaagcgagtcctccggtccccagccacgtcgcttgcgcaggatcatctgcacctgctcaaagatatcctcgtctgaaccttctctacgcaaggtggccgtggtggtggtcaccgcctcgccggtagcatgtccttcggcgtccatgccgaaagtggctcgagcctgggtggttacctccac

SEQ ID NO: 25535 - DNA, 1096 bp, DROSOPHILA
gctcaagatgcagacccagccggaggttatagtgcgtgtcaacccggatctggagccggatctcagtcaagaaacttacagaacccaaaaccctgacacagtcaaggagcaagctgaaaatgcagtcatgacggaagtgctgaaggccggagttctctccgatgaaattgatttgggcgcattggcacacaatgccgccgagcaggcagaggagtttgtgcgcaaggtctgggaggctagctggaaagtgtgccactacaaaaatctacccaagtggctgcaggataacgacttcctacaccgcggccatcgcccaccgctcccctctttccgtgcgtgctttaaatcaattttccgcgtgcacacggaaacgggcaacatctggacacatcttcttggctgcatcgccttcatcggcgtggcattatacttcatctcgcgtccctcggttgagatccagacacaggagaagatcgtttttggcgccttctttatcggtgcgattgtgtgcctaggattctcattcgcttttcacacactgagctgtcattctgtagagatgggaagactgttttctaaacttgactactgtggaattgcgctgctgatcatgggttcctttgtgccttggctgtactatggcttctactgtcattaccagccaaaggtgatatacctatccgttgttagcattctgggcatcctctccatcgtggtctcgctatgggacaagttttcggagccggcacttcgtcccttgcgcgctggcgtatttatgagctttggcctgtcgggtgtgattccagctattcactacagcatcatggagggctggttcagccagatgagccgcgccagtctgggatggctaattctgatgggcctcctctacattctgggcgcactgctgtacgccctccgtgttcccgaacgctggttccctggaaagtttgacatttggggtcaatcacatcaaatattccacatactggtcattgcggccgcttttgtccactaccatggcatctctgaaatggccatgtaccgcgtcatgtatagcgaatgcactgttcccatcgaaccaataaccttttag

SEQ ID NO: 25536 - protein, 322 aa, DROSOPHILA
MTEVLKAGVLSDEIDLGALAHNAAEQAEEFVRKVWEASWKVCHYKNLPKWLQDNDFLHRGHRPPLPSFRACFKSIFRVHTETGNIWTHLLGCIAFIGVALYFISRPSVEIQTQEKIVFGAFFIGAIVCLGFSFAFHTLSCHSVEMGRLFSKLDYCGIALLIMGSFVPWLYYGFYCHYQPKVIYLSVVSILGILSIVVSLWDKFSEPALRPLRAGVFMSFGLSGVIPAIHYSIMEGWFSQMSRASLGWLILMGLLYILGALLYALRVPERWFPGKFDIWGQSHQIFHILVIAAAFVHYHGISEMAMYRVMYSECTVPIEPITF

SEQ ID NO: 25537 - DNA, 4439 bp, DROSOPHILA
tttttctctctgctctgttggcaagtcacacctaattttccaatttggatgatattatattccaactaccatattatatttactaccaaccaatattcctcgattaatttggctggtggctcagcatgcgcggcctcaacttctgattactgaattgggtctgtcataaactaaattgttatttaatacttgatcgatatttcatttttatatgcatgactatcggaacacttaatcttggcaagcggacaggcacttatataaagttaactgggccgcacacggtggtcctggccagtaaactgacccaaataagaccacaagatggacatcgtcttctttggctggctcgtaaaaactttgctggcgttggctctttggccatttgacttggccgcttgtctacgcccctcccctttttcgaccgccttagttgcccgggactacgcggcgtatacgtaacaggaatttatgacaaattgttgctgctaaccgaatcgctaagaggtctgcaatgtgtgggcactgaggcatcataaatcaagccgggagccaactgaaaataatatataaagctgctggcatttatgctttccctctgcagtcgtagtcccattttggttttctttggagttttatttctaaccattatcttttttcgagtatcggcctacaaaaaatcgacaggacacgttgggttgccaagcactttaaagttttacctaacgacttgctaaagttgttaactggtgtaatttatgcctttcttcaaaatttgattcaaaatttcaaatcacgagcacttcggcatagaaacattatccgggaaataaaaatgtttaaaatatttttaagaacttcaatattttcccttttctgctccgactttctgactcgtctcgttaagttggcagctggcgattgtcgttcgacctccattcatacttaattttttactctactgaaagggtgcgtattgtcgctgaccaaagacggtttgtcaccagatgttcagcctccgcgaactgggcgtcatcagtctgctgctcaccgacttgatggccgccgccgaagagggtaccgcctctgtcgtaccgcccagatcggtggctgccactcgatccgtccggcatccgagggcattactccggctgcccaaaagttccatgggcaaactgggcaggttggctgctggtggactactgggcgccatctctatatagtagctgtcatctctgctgggcgagtgcaggctactgcgactgcttcccgacgaggaagacgaggtggaggagctcttgtccgccagcgaggagctatagaattgctggcagcgttgctgttgcagttcccgcgcttgtagattgtgcagcggggagctgtagggtgcttctctccgcgtgctgtggtgccacttttgcaggcgagccggatcaccgccattggagttcacagatccctgatagtgcaggaagctgtgcgcatcatcggtttcgtttaggtgtctttgatgatgcggtcgcaattgaccagagcggttgctcctttgccaaggcaattcacagcgatagacgtgggccaaaccggcgagcaggacgatgaacaaaacgcaggccaccaggagcatgactcctggatgatttcctgtaagattatgatggttttcctcccgctggtccattaggtgttccggtttcgattcgctctttagctccacataggctttaagctgcgcaaaggtgctcaactcctcgggagcagcctctttgggtgtgttcacactgctatgttggtgttgcggtgtcttcgaggtggctgccatatcctccacggtttttgccgcgtgtttggtactgtaggtcatcttcttgatgctcagcgatggtttctttttgtggcctttcgccggcgacttcgtgtcgccgtttattgcatccgcttgccgcttatcagtcgctgactggtgcttttcctgctccgctgactgatgttgttggctcgggtccagaacttccgaatccgcatccgccacggtggccgtaccaggcagcaacaactgctcggcatccaccaataggacatcgcccttgtgcatcagcagcggtgtgccaattagatgtcgatccttaacgtgcagctgcagtgttgcatgtttgtgtggcgttgttgcaacttgaccggatgtgtcccttgttgggtattttaataaagtctcgtgtgccttatcggctggcattttgtcagattttttgccggccaaaatggtttgtggcacttcaattgctggtggtgttgctatttctgcagctgatgttgctactgtttttgtggcaccgctaatgttcgttggcttgtcggaatttatttccgttgttgctgtggcagcatctcgtgttgccaaaatgggaagcgctgttgttgcctttgtctgggccaaacttggcaggttctttgctggcgtttctgttgttttggccggcatgccaggcatttgttgccgacgctgcagttgcgctaacgaagttgtttctgtgggccgcaacgtttttgtggttaactgggcagggatgttgccagctgattgtattgctgctgctgctgcgagtgttggtgttgctgtggtgtcgcttgatgttgctgttgcaattgcttctctttctgctgttgttgccgccgcagtcgactgtgctgctgatgttgcttgtatgcctgttttttctgatgttgctgctgttgccgctgctacttccactgatgttgctgttgcttgtgcttcttgtgacttttcaacttttgacatacttctgggtgttgttgttaatgtagctgatgcccttgttaggctgcaagaaggcggctttgtgtcattttccggttttcttataccacactctcggctgctgaagttttcgtaaaaattgtggaattgcagatactccgtcttcaaatccacgcgcccacttacacttgccccattcgattgacccgcatccactgacctgcaaggactggcccattcggcaatgcccagcaaatcgctgcacttaatggggttgtcctccagtagaagatcccttaactgtggcagtgtgtgcactatcgattggctaacgctctccacccctgacgattccagattcagggtgagcaatttggggagcgatagcgggggcaggaagatcaatcgattgttggataagtccagagtctgtagattgaccaatcccacaaaagcctgtggcggaagctccattatctgattgtgctgcagaaataagtgttccagcgatggcggcagactacttggcactcgcatcagtagattacggtctaggaaaagggattcgaggagctccaatcgtcccaaggcatcgtcctccacttgggcaatgcgggagtgcgagagatcaagatactgcagcagcggatagctgtccatgtcaccgcaattaattgcctaaaaattaatagaaaatttctattagtttaaaacatttaataaattgcatgaaaattataaaaacattttgattttaggaaatccatgaggtagtggtgctttctttaaaattgactataaagggctgcgaaaacttttatgatttaatccctgtctagccactgacttcgccgagcactcaagaagttattgttctgggcgaaagtctggggaaatttgattagtggctgacaaagagggaaagtgcgagatgcatgcccccatgcgacattgtttaaaaattaacttaaatctgccattataattacttcaaaggactcggcggcgaacttgcccccttttgcgatccatgccacgcctgcgatgcccagagcgatgctcgtctggcacaaaagtaaacatagacgcgactcgttaaatgaaacgagtgccaggcaaccaggaagccagacagcctgccgtcgtctctgtcctggggcaccaaagaaatgaaagtattatactgccaaagtggtgatgaggtggagaagaatgtggaggagcaggcgggcaattggggcctcaggatgggcaaccagcggcccctaaacgccataatttgccatgaaaaggctgcgtgttgactgccgataaaggcagtggcaaaaggcagtcggcctggcccggcgaacaaattaaaatggcttggcaacaaaggcacccgggagcagtgatgaaccactcactccagtagcagccggaatggcagaagcgactgcacagatagttggctagtccacttgaaaaaaatcatcatcatcaaagtataatataatataaaacatcagatgatttcaccaaatgaagaggaaactattgtttaaatacgatacagatttgagttggtatttgagtttgaaagaaactcaaacttcagtatctcaaaataggctcaataaaaatggatatttaatagaggttactttgaagtgtacttcta

SEQ ID NO: 25538 - DNA, 2439 bp, DROSOPHILA
atggacagctatccgctgctgcagtatcttgatctctcgcactcccgcattgcccaagtggaggacgatgccttgggacgattggagctcctcgaatcccttttcctagaccgtaatctactgatgcgagtgccaagtagtctgccgccatcgctggaacacttatttctgcagcacaatcagataatggagcttccgccacaggcttttgtgggattggtcaatctacagactctggacttatccaacaatcgattgatcttcctgcccccgctatcgctccccaaattgctcaccctgaatctggaatcgtcaggggtggagagcgttagccaatcgatagtgcacacactgccacagttaagggatcttctactggaggacaaccccattaagtgcagcgatttgctgggcattgccgaatgggccagtccttgcaggtcagtggatgcgggtcaatcgaatggggcaagtgtaagtgggcgcgtggatttgaagacggagtatctgcaattccacaatttttacgaaaacttcagcagccgagagtgtggtataagaaaaccggaaaatgacacaaagccgccttcttgcagcctaacaagggcatcagctacattaacaacaacacccagaagtatgtcaaaagttgaaaagtcacaagaagcacaagcaacagcaacatcagtggaagtagcagcggcaacagcagcaacatcagaaaaaacaggcatacaagcaacatcagcagcacagtcgactgcggcggcaacaacagcagaaagagaagcaattgcaacagcaacatcaagcgacaccacagcaacaccaacactcgcagcagcagcagcaatacaatcagctggcaacatccctgcccagttaaccacaaaaacgttgcggcccacagaaacaacttcgttagcgcaactgcagcgtcggcaacaaatgcctggcatgccggccaaaacaacagaaacgccagcaaagaacctgccaagtttggcccagacaaaggcaacaacagcgcttcccattttggcaacacgagatgctgccacagcaacaacggaaataaattccgacaagccaacgaacattagcggtgccacaaaaacagtagcaacatcagctgcagaaatagcaacaccaccagcaattgaagtgccacaaaccattttggccggcaaaaaatctgacaaaatgccagccgataaggcacacgagactttattaaaatacccaacaagggacacatccggtcaagttgcaacaacgccacacaaacatgcaacactgcagctgcacgttaaggatcgacatctaattggcacaccgctgctgatgcacaagggcgatgtcctattggtggatgccgagcagttgttgctgcctggtacggccaccgtggcggatgcggattcggaagttctggacccgagccaacaacatcagtcagcggagcaggaaaagcaccagtcagcgactgataagcggcaagcggatgcaataaacggcgacacgaagtcgccggcgaaaggccacaaaaagaaaccatcgctgagcatcaagaagatgacctacagtaccaaacacgcggcaaaaaccgtggaggatatggcagccacctcgaagacaccgcaacaccaacatagcagtgtgaacacacccaaagaggctgctcccgaggagttgagcacctttgcgcagcttaaagcctatgtggagctaaagagcgaatcgaaaccggaacacctaatggaccagcgggaggaaaaccatcataatcttacaggaaatcatccaggagtcatgctcctggtggcctgcgttttgttcatcgtcctgctcgccggtttggcccacgtctatcgctgtgaattgccttggcaaaggagcaaccgctctggtcaattgcgaccgcatcatcaaagacacctaaacgaaaccgatgatgcgcacagcttcctgcactatcagggatctgtgaactccaatggcggtgatccggctcgcctgcaaaagtggcaccacagcacgcggagagaagcaccctacagctccccgctgcacaatctacaagcgcgggaactgcaacagcaacgctgccagcaattctatagctcctcgctggcggacaagagctcctccacctcgtcttcctcgtcgggaagcagtcgcagtagcctgcactcgcccagcagagatgacagctactatatagagatggcgcccagtagtccaccagcagccaacctgcccagtttgcccatggaacttttgggcagccggagtaatgccctcggatgccggacggatcgagtggcagccaccgatctgggcggtacgacagaggcggtaccctcttcggcggcggccatcaagtcggtgagcagcagactgatgacgcccagttcgcggaggctgaacatctggtga

SEQ ID NO: 25539 - protein, 812 aa, DROSOPHILA
MDSYPLLQYLDLSHSRIAQVEDDALGRLELLESLFLDRNLLMRVPSSLPPSLEHLFLQHNQIMELPPQAFVGLVNLQTLDLSNNRLIFLPPLSLPKLLTLNLESSGVESVSQSIVHTLPQLRDLLLEDNPIKCSDLLGIAEWASPCRSVDAGQSNGASVSGRVDLKTEYLQFHNFYENFSSRECGIRKPENDTKPPSCSLTRASATLTTTPRSMSKVEKSQEAQATATSVEVAAATAATSEKTGIQATSAAQSTAAATTAEREAIATATSSDTTATPTLAAAAAIQSAGNIPAQLTTKTLRPTETTSLAQLQRRQQMPGMPAKTTETPAKNLPSLAQTKATTALPILATRDAATATTEINSDKPTNISGATKTVATSAAEIATPPAIEVPQTILAGKKSDKMPADKAHETLLKYPTRDTSGQVATTPHKHATLQLHVKDRHLIGTPLLMHKGDVLLVDAEQLLLPGTATVADADSEVLDPSQQHQSAEQEKHQSATDKRQADAINGDTKSPAKGHKKKPSLSIKKMTYSTKHAAKTVEDMAATSKTPQHQHSSVNTPKEAAPEELSTFAQLKAYVELKSESKPEHLMDQREENHHNLTGNHPGVMLLVACVLFIVLLAGLAHVYRCELPWQRSNRSGQLRPHHQRHLNETDDAHSFLHYQGSVNSNGGDPARLQKWHHSTRREAPYSSPLHNLQARELQQQRCQQFYSSSLADKSSSTSSSSSGSSRSSLHSPSRDDSYYIEMAPSSPPAANLPSLPMELLGSRSNALGCRTDRVAATDLGGTTEAVPSSAAAIKSVSSRLMTPSSRRLNIW

SEQ ID NO: 25540 - DNA, 3538 bp, DROSOPHILA
aaaattttgggcgtgacacttttgtgcgatttgtgggctaccaaatattttttggcatatcgaacaaaaattacatgactaataaaaattttaaaaattataaaaaaagtttcttggcaaatcgatagatatttacaaaactaagaaaaattatgaacaaaatataaaacatttttcaatagtattggcgtggccgtttttggcgttcgatgggcgtggcaaaaagtatattttttgcaaatcgatacaaactttcaagactaatacaaaaatatccagacatttgtatgcgttagagcaagcgtgtcaaaatgggtcaacaaaccggctctgggtcgaggcgttcatataggcatggctagttcgattcggctattgaacctgatcaagaatatatatatattacattacattatacattatagggtcggaaacgctatcttctgcctgttatatactttcccacgaatctagtatacccttttgccctataaataataactaatctctactcgttttcgagaaattcaccaactagtaagaaaaccttttaatttttttttttttaattttttgtgttagtactacccataaatatttcttcctgtaagtatacacttttatcgcttgttcttcagaaccattgtttttcaaaatctttcaattcttctatgatcaatcacagcagattttcatttgttcgtcacaacggtgacaggacatccgttgtcattcgttcatggtttatcaaacccttttaatccaaatgaaaattttaaaaatttgaatatgtatatcatcaacaaatgtttactaaacaatgtacaggagtctctcaaaatataatggatatatagatatatttatatgtgcaccattgtgatgtttatcgtttcaacgccttccgattttataattttcccacttcgtgcagataggcgccaagaagtttagtctaaaagtatgcaaattttagaaatgagccgtgatatacatgatgctatcttacgccttcgatgtaattgtaaatatcgattttctcattttgagaatgggcaccgtcgtcacatgcacccactggcacaaggataacgtttttaccagtggcttcctgcaatgttaacgttactggaatagatcccccttcgcgggtcatatctggttccacattgaaaacatgctttatggctctttttgcagcctcataatgaggatggttagggtcctcagtccagggcttgccagctgagagcattgtaacctaaaaaaaaaagtattatgtagcacactgcgtagctgtacattacaaaatacaaaccttcattttgttaggagatcctcgctcggcccatttatcattaaggtattttacaacacactcctcaatatgctttggatcttggttggggacaaggcgaatagagaacttaccaataaccttcttcggaatgacagtttttgcgcctggctcataaaatgcaccttcaattccgtgaacagaaagactgggatagcgccacctggcttgaagtaaccttgttttatcgccattatgcggcagctgttcaacaccaatgtctttcctaaggagattagagcgtttcagagatttatgacttcagttagaggataagattagcttacttgtactcagaaacttcaaagtctatgttctcatatatagattgctcgttcttaatctgtggtgcgacctgtagcaatgcgaaaagaattaaggttaaacagacaggttttgggttacgcactgcttacgtcgcgatccacaccagggactaggatatttgtatctttatcgacaagaatgctcagcaaatgacacagatccggcattgcttcgtgaactgtacccccaaaaactccactatgcaagtctttgctggagcattccacctccacttgaaagtatgccaaaccgcgaagcccatatgtgaggcaagggcgtttttttccaagccagtagttatcggatatgcaaacaaaatcaacatccgctaagaaattatctttacgttccaataacaagtcatcgaggccttcgctgccgctttcctccattccctcaaatacgaatttaacattcacaggcagtgcaatgttgagcttctgataagcttcgatagcgtggatccagcacagaacaggtcccttgtcgtcggatgccccgcgtccaaacagttttccatccacctctgtaagctcaaagggattggtgttccatccatcttccttcagggcgggctgcacatccaaatgaccatagaccaacacggtcttcttagaggggtctttgcccaaagttcccagcagaacctttggtagaggtataatctggccgttcggcaaagtctgctgacccacatctgccagctctgtctcggcgcccagagacctcagccgatccgcggtccattccaccatacgaccgatctcgcctcgcttttcgggccaggctgatacggactgaatacccacaacggtttttagggccccgatgtaatcttcttttttgccgtccacaaagcttaaaagagattgcggtttatgaccattagataagagtgcacgctgataaaagtggtgttatctagcctaaactagagcattttgcggctaatgggataatcatttggtggttatgtcgggttcgcctttcaattctcgatgttcgaacaaaaaggcgacaagagaaaacatttgcatcaaattttagacatgtcgccaccatgatcaaatgcaaattaacaaagtattgagatgtacagttgttgtcattgtgcactttgagtaaattatgcatacatatattgtgtgcctccatattaacaaattcggcatacagccgagctgattcttccaagtggttttttatcaacatcgtcgttgttttttcatacacatatttgcttgcaagtgtgtgtacatgttttcatccttgcatctctattcaatatcatcttattatacttacgcaaagaatttttgaagttcacttgataactcgggcatcgcgcttttttttctatggaatactgtaacagctgtaatcgtctccggtctctagctatttaaatctaacctgctgtcggcgcgcgcttatatttataaaactcaagtaatggcggtagtgtgaccgcggaagagaaataaaaatacttggccataacgcgattatatacttaaatatgtgcataaatttttagtgtatttccacgaaaatgcatccatcatctggttgatatgttccataataaatggattccatcgccacttctcttacgtattataagttagttacagaattccaagtttgatccaaagaatagttagctaaagacaaaatggttatgttgaaaagaaactactgttatttatggggtgacatgccatgttatgtgaaaaattttctaagtaagcctttatcattctagcttttgtttattatttgagacggttacttataaaacgacaattttgcattttttttaataacgttttcaatacgaaattcacttgtgaa

SEQ ID NO: 25541 - DNA, 1347 bp, DROSOPHILA
gtggacggcaaaaaagaagattacatcggggccctaaaaaccgttgtgggtattcagtccgtatcagcctggcccgaaaagcgaggcgagatcggtcgtatggtggaatggaccgcggatcggctgaggtctctgggcgccgagacagagctggcagatgtgggtcagcagactttgccgaacggccagattatacctctaccaaaggttctgctgggaactttgggcaaagacccctctaagaagaccgtgttggtctatggtcatttggatgtgcagcccgccctgaaggaagatggatggaacaccaatccctttgagcttacagaggtggatggaaaactgtttggacgcggggcatccgacgacaagggacctgttctgtgctggatccacgctatcgaagcttatcagaagctcaacattgcactgcctgtgaatgttaaattcgtatttgagggaatggaggaaagcggcagcgaaggcctcgatgacttgttattggaacgtaaagataatttcttagcggatgttgattttgtttgcatatccgataactactggcttggaaaaaaacgcccttgcctcacatatgggcttcgcggtttggcatactttcaagtggaggtggaatgctccagcaaagacttgcatagtggagtttttgggggtacagttcacgaagcaatgccggatctgtgtcatttgctgagcattcttgtcgataaagatacaaatatcctagtccctggtgtggatcgcgacgtcgcaccacagattaagaacgagcaatctatatatgagaacatagactttgaagtttctgagtacaagaaagacattggtgttgaacagctgccgcataatggcgataaaacaaggttacttcaagccaggtggcgctatcccagtctttctgttcacggaattgaaggtgcattttatgagccaggcgcaaaaactgtcattccgaagaaggttattggtaagttctctattcgccttgtccccaaccaagatccaaagcatattgaggagtgtgttgtaaaataccttaatgataaatgggccgagcgaggatctcctaacaaaatgaaggtttctggcaagccctggactgaggaccctaaccatcctcattatgaggctgcaaaaagagccataaagcatgttttcaatgtggaaccagatatgacccgcgaagggggatctattccagtaacgttaacattgcaggaagccactggtaaaaacgttatccttgtgccagtgggtgcatgtgacgacggtgcccattctcaaaatgagaaaatcgatatttacaattacatcgaaggcgtaagatag

SEQ ID NO: 25542 - protein, 415 aa, DROSOPHILA
MVEWTADRLRSLGAETELADVGQQTLPNGQIIPLPKVLLGTLGKDPSKKTVLVYGHLDVQPALKEDGWNTNPFELTEVDGKLFGRGASDDKGPVLCWIHAIEAYQKLNIALPVNVKFVFEGMEESGSEGLDDLLLERKDNFLADVDFVCISDNYWLGKKRPCLTYGLRGLAYFQVEVECSSKDLHSGVFGGTVHEAMPDLCHLLSILVDKDTNILVPGVDRDVAPQIKNEQSIYENIDFEVSEYKKDIGVEQLPHNGDKTRLLQARWRYPSLSVHGIEGAFYEPGAKTVIPKKVIGKFSIRLVPNQDPKHIEECVVKYLNDKWAERGSPNKMKVSGKPWTEDPNHPHYEAAKRAIKHVFNVEPDMTREGGSIPVTLTLQEATGKNVILVPVGACDDGAHSQNEKIDIYNYIEGVR

SEQ ID NO: 25543 - DNA, 4082 bp, DROSOPHILA
ggtcgagcgaggcatgggaactatcctgaatttcgaggatataggcgaaaacacggtgatgagggcactaaagaaggctttggacaaaaagtgagagtaccatgtcatgcactgttttagccgaaactaaatgtacttgatttgcaggttccacgatgctgccaaagtagtctcccactcgttccaccaccgcccacagcaggccctgcatacagccatttggtgggtggagcatgtggcccacactggcggagctcctctgttgaagcccagtgccgtcgagatgtcacgattcgtttactactccctggatgtctatgccgtgttggccctcgtcctgggcagcatcattgccagttgggtgtggctccttcgactctgttgcggatccagtgccgcccagaagactaagaaggattagctcgactcatccctgcacagcttcgtttgtggtctatgtgatattttatatgttctgtgtaagacatttttaattctaaagacgcctcccccacggactgtatctagatgtaatcctagcgacgccaaattaatttaatgtttgatactattgggatttacccgattaaaacgaacgtagttttcgaatattgtatctagtacgggaatattattaaaataatgttataatgttgtaatgaacaactgcaaggaacaacttatttttaaatgaatggaaatgaacatattagaagaaatataatatctgaaaattgtttctagtacggaaataaataaagtttttaaaatatttcactctttttcaatgccgtgcgcatcagtaatgttcaaatgctcggaaattcgtagatgaaattccctatgtatttatttctagccaagagcacttacatgttgcgatactttttaagttccccctaaaagattgaattatgtatgtgtgtatgtatgtaaatataagtatatgtatgctttcggcgcctaattgagcttttttactcgccggcgtcagttgatgctcatcttccgaccgttccggatctagctctatctccccgtgtgagtgaaacgccggagaatattatttttgtttgctaattgtaaaatgaaaaaaataatcgcatttgttaaatttagaagtgcattccacagcatgtaaaactcatatcatcacgaaaatcgatttgcaccgctgactcgacaagaacttgaccctttcccccggttttccagcgcaatgtgtggttgttggaaggttttctgcctgctggcgctactttccctggtcgctttcagcgattccctgcgaattctgggtctgtttccgcacccggccatcagtcacttcaagttctttcacccaatcatgcgcggattggccgaggccggtcacagcgtggatgtcatcagtccattcgaggacaaggaccctccaaacggatacaaggaccacctgctgccgccctccaccttgacagacactattagcttagaggtgcgttgttcaaagccataatgagatggcatacccataaaaaaagggtacataaaggggtcataacttaaatgatgagtgagtgctggtgttattatattttaggtgatacgaacttgaaatgtgtaagcgtaaccccagatgtactattatacaatagtattatattctgagcttatctcagattttaaccttttcttttaacctatacttaaattaagaaacccactttttctatcggttttaccaggacttcgaacggccctacagcttcctatttcactatgtagagttctttatcctgcacaaaatgggaagagaggactgcaataccacactgcacagcagagccctaactgagatccttaagaatcctcctggctactacgatgtaattttactggagcaattcaatactgactgtgcgatgagcgtggcccatgttttccaagctccggtcattggaatgagcagctgtgccctgatgccatggcattatgaacgatttggagcccctctgatcccatcgtatatatcagcattgttccagggacaatcccaggagatgtcctttgcgggacgattgggcaactggattactgtgcactccctcaacttgctgtataagtaagtagtctatatgggattgggggcttcgaacacattcatacattgatctcgtctagaatgtttacagttcccgccggaaacgccttgattcgccaaagattcggtcctggactgccgtccacggaggacttggtgaggaatacttctctaatgctggtcaaccagcacttttcgctcagtgggccaaagcctttgcccccaaacgtcatcgaagtgggtggtgtacatataagtccaccgaaaccgctgccctcggatcttcagaaaatactggataacgcacccaaaggagtcatcctaattagctggggctctcagctgaaagcgtgttctctttccgctgctcggagagatggaatcgttaaagcgattggaagattggagcaggaggtcatctggaagtatgaaaatgacacgctgcccaataagccaccaaatctgcacatcaggaagtggctgcctcagcgagacatcctcgctcatccaaatctaaaggtatttatgtcccacggtggcttaatgggcaccacggaggcggtctccagtgctgtgccgattgtgggtgtcccaatttacggcgaccaatccctcaatattgccgcattggtgcagcgcggaatggccttgcaattagagcttaagaaactggatgagaatactgtctacgaagcgttgaccaaggcactagatccttctttcaaggcaagagccaaggaggtggcctcatcgtacaacaaccgcatccaaggtcccttggagacggccatttggtgggtggaacatgtggcggagacgaaaggagctcctctgacccaaccaagtgccgtgcatctctcccgctttgtttactactccttggatgtctactcggtcgtggccctaagcctgctactacctgtgatcacgctcttgggactaatccgaatgtttaaaagaagggaacccaaaggtgaccgcaaactaaaacgcaaataagcccaatcaatagattactgttttggttttcaagaattacctttggatttaaactatgaaacaatagattgctaagtcaaatacgtgtgatacattattagaaaccaaaatacattttaccagaacagaattggcaagaaccagtttaagttttatataaagcagttcccgtttaataaaaatatttacaaaatcaagatcccatcccttacaatttggccttggccgcacccgggaaacccagacgatacaaggcaaccacaacagcaccacccagtcccagattgtgctgcagagccaactgagcattgggcacctggcgcttctcagccaatccacggagctgccagcagagctcagcacattgtgccagacccgtggcgcccagaggatggcccttcgagatcagaccaccactggggttgaccacgaacttgccaccgtaggtgttgtctccagcgtcgatgaactcgccggccttgccctctccacacagtccaagtgcctcatacgtgatcaactcgttggccgagaagcaatcgtgcagttccaccacctggacatcctggggcttgtacccactcttggcgaacagacgctcggtggccagacgggtcatatcggttccagcaatcttcatcaagctcttgtcggcaaaggtggacgccgggtcactggccatctccatgcccacaatctccacagcctgcttttccaatccgtggcgacgcacgaaggcctcggaggcgagaatggcagctccagatccatcggaagtgggacagcactgcagcttggtcagcactccctccacaacctggggcgacttcataatctgctccagggtgtattcatcgcggaactgcgagtagctaaaagaaacaatggagagaaatgaagtggcgtgaatgaggatcagctgcatgcaataccgagtggttgacggtctacggtctacttatttctctgttttcagcgataagataagcacacgcgtaag

SEQ ID NO: 25544 - DNA, 1488 bp, DROSOPHILA
ctcatcttccgaccgttccggatctagctctatctccccgtcgcaatgtgtggttgttggaaggttttctgcctgctggcgctactttccctggtcgctttcagcgattccctgcgaattctgggtctgtttccgcacccggccatcagtcacttcaagttctttcacccaatcatgcgcggattggccgaggccggtcacagcgtggatgtcatcagtccattcgaggacaaggaccctccaaacggatacaaggaccacctgctgccgccctccaccttgacagacactattagcttagaggacttcgaacggccctacagcttcctatttcactatgtagagttctttatcctgcacaaaatgggaagagaggactgcaataccacactgcacagcagagccctaactgagatccttaagaatcctcctggctactacgatgtaattttactggagcaattcaatactgactgtgcgatgagcgtggcccatgttttccaagctccggtcattggaatgagcagctgtgccctgatgccatggcattatgaacgatttggagcccctctgatcccatcgtatatatcagcattgttccagggacaatcccaggagatgtcctttgcgggacgattgggcaactggattactgtgcactccctcaacttgctgtataaaatgtttacagttcccgccggaaacgccttgattcgccaaagattcggtcctggactgccgtccacggaggacttggtgaggaatacttctctaatgctggtcaaccagcacttttcgctcagagtcatcctaattagctggggctctcagctgaaagcgtgttctctttccgctgctcggagagatggaatcgttaaagcgattggaagattggagcaggaggtcatctggaagtatgaaaatgacacgctgcccaataagccaccaaatctgcacatcaggaagtggctgcctcagcgagacatcctcgctcatccaaatctaaaggtatttatgtcccacggtggcttaatgggcaccacggaggcggtctccagtgctgtgccgattgtgggtgtcccaatttacggcgaccaatccctcaatattgccgcattggtgcagcgcggaatggccttgcaattagagcttaagaaactggatgagaatactgtctacgaagcgttgaccaaggcactagatccttctttcaaggcaagagccaaggaggtggcctcatcgtacaacaaccgcatccaaggtcccttggagacggccatttggtgggtggaacatgtggcggagacgaaaggagctcctctgacccaaccaagtgccgtgcatctctcccgctttgtttactactccttggatgtctactcggtcgtggccctaagcctgctactacctgtgatcacgctcttgggactaatccgaatgtttaaaagaagggaacccaaaggtgaccgcaaactaaaacgcaaataa

SEQ ID NO: 25545 - protein, 480 aa, DROSOPHILA
MCGCWKVFCLLALLSLVAFSDSLRILGLFPHPAISHFKFFHPIMRGLAEAGHSVDVISPFEDKDPPNGYKDHLLPPSTLTDTISLEDFERPYSFLFHYVEFFILHKMGREDCNTTLHSRALTEILKNPPGYYDVILLEQFNTDCAMSVAHVFQAPVIGMSSCALMPWHYERFGAPLIPSYISALFQGQSQEMSFAGRLGNWITVHSLNLLYKMFTVPAGNALIRQRFGPGLPSTEDLVRNTSLMLVNQHFSLRVILISWGSQLKACSLSAARRDGIVKAIGRLEQEVIWKYENDTLPNKPPNLHIRKWLPQRDILAHPNLKVFMSHGGLMGTTEAVSSAVPIVGVPIYGDQSLNIAALVQRGMALQLELKKLDENTVYEALTKALDPSFKARAKEVASSYNNRIQGPLETAIWWVEHVAETKGAPLTQPSAVHLSRFVYYSLDVYSVVALSLLLPVITLLGLIRMFKRREPKGDRKLKRK

SEQ ID NO: 25546 - DNA, 4027 bp, DROSOPHILA
aaaattttgggcgtgacacttttgtgcgatttgtgggctaccaaatattttttggcatatcgaacaaaaattacatgactaataaaaattttaaaaattataaaaaaagtttcttggcaaatcgatagatatttacaaaactaagaaaaattatgaacaaaatataaaacatttttcaatagtattggcgtggccgtttttggcgttcgatgggcgtggcaaaaagtatattttttgcaaatcgatacaaactttcaagactaatacaaaaatatccagacatttgtatgcgttagagcaagcgtgtcaaaatgggtcaacaaaccggctctgggtcgaggcgttcatataggcatggctagttcgattcggctattgaacctgatcaagaatatatatatattacattacattatacattatagggtcggaaacgctatcttctgcctgttatatactttcccacgaatctagtatacccttttgccctataaataataactaatctctactcgttttcgagaaattcaccaactagtaagaaaaccttttaatttttttttttttaattttttgtgttagtactacccataaatatttcttcctgtaagtatacacttttatcgcttgttcttcagaaccattgtttttcaaaatctttcaattcttctatgatcaatcacagcagattttcatttgttcgtcacaacggtgacaggacatccgttgtcattcgttcatggtttatcaaacccttttaatccaaatgaaaattttaaaaatttgaatatgtatatcatcaacaaatgtttactaaacaatgtacaggagtctctcaaaatataatggatatatagatatatttatatgtgcaccattgtgatgtttatcgtttcaacgccttccgattttataattttcccacttcgtgcagataggcgccaagaagtttagtctaaaagtatgcaaattttagaaatgagccgtgatatacatgatgctatcttacgccttcgatgtaattgtaaatatcgattttctcattttgagaatgggcaccgtcgtcacatgcacccactggcacaaggataacgtttttaccagtggcttcctgcaatgttaacgttactggaatagatcccccttcgcgggtcatatctggttccacattgaaaacatgctttatggctctttttgcagcctcataatgaggatggttagggtcctcagtccagggcttgccagctgagagcattgtaacctaaaaaaaaaagtattatgtagcacactgcgtagctgtacattacaaaatacaaaccttcattttgttaggagatcctcgctcggcccatttatcattaaggtattttacaacacactcctcaatatgctttggatcttggttggggacaaggcgaatagagaacttaccaataaccttcttcggaatgacagtttttgcgcctggctcataaaatgcaccttcaattccgtgaacagaaagactgggatagcgccacctggcttgaagtaaccttgttttatcgccattatgcggcagctgttcaacaccaatgtctttcctaaggagattagagcgtttcagagatttatgacttcagttagaggataagattagcttacttgtactcagaaacttcaaagtctatgttctcatatatagattgctcgttcttaatctgtggtgcgacctgtagcaatgcgaaaagaattaaggttaaacagacaggttttgggttacgcactgcttacgtcgcgatccacaccagggactaggatatttgtatctttatcgacaagaatgctcagcaaatgacacagatccggcattgcttcgtgaactgtacccccaaaaactccactatgcaagtctttgctggagcattccacctccacttgaaagtatgccaaaccgcgaagcccatatgtgaggcaagggcgtttttttccaagccagtagttatcggatatgcaaacaaaatcaacatccgctaagaaattatctttacgttccaataacaagtcatcgaggccttcgctgccgctttcctccattccctcaaatacgaatttaacattcacaggcagtgcaatgttgagcttctgataagcttcgatagcgtggatccagcacagaacaggtcccttgtcgtcggatgccccgcgtccaaacagttttccatccacctctgtaagctcaaagggattggtgttccatccatcttccttcagggcgggctgcacatccaaatgaccatagaccaacacggtcttcttagaggggtctttgcccaaagttcccagcagaacctttggtagaggtataatctggccgttcggcaaagtctgctgacccacatctgccagctctgtctcggcgcccagagacctcagccgatccgcggtccattccaccatacgaccgatctcgcctcgcttttcgggccaggctgatacggactgaatacccacaacggtttttagggccccgatgtaatcttcttttttgccgtccacaaagcttaaaagagattgcggtttatgaccattagataagagtgcacgctgataaaagtggtgttatctagcctaaactagagcattttgcggctaatgggataatcatttggtggttatgtcgggttcgcctttcaattctcgatgttcgaacaaaaaggcgacaagagaaaacatttgcatcaaattttagacatgtcgccaccatgatcaaatgcaaattaacaaagtattgagatgtacagttgttgtcattgtgcactttgagtaaattatgcatacatatattgtgtgcctccatattaacaaattcggcatacagccgagctgattcttccaagtggttttttatcaacatcgtcgttgttttttcatacacatatttgcttgcaagtgtgtgtacatgttttcatccttgcatctctattcaatatcatcttattatacttacgcaaagaatttttgaagttcacttgataactcgggcatcgcgcttttttttctatggaatactgtaacagctgtaatcgtctccggtctctagctatttaaatctaacctgctgtcggcgcgcgcttatatttataaaactcaagtaatggcggtagtgtgaccgcggaagagaaataaaaatacttggccataacgcgattatatacttaaatatgtgcataaatttttagtgtatttccacgaaaatgcatccatcatctggttgatatgttccataataaatggattccatcgccacttctcttacgtattataagttagttacagaattccaagtttgatccaaagaatagttagctaaagacaaaatggttatgttgaaaagaaactactgttatttatggggtgacatgccatgttatgtgaaaaattttctaagtaagcctttatcattctagcttttgtttattatttgagacggttacttataaaacgacaattttgcattttttttaataacgttttcaatacgaaattcacttgtgaaagggaaaaattaaaatatttttaaaattgaaatatgatgacgcgatataaattttatatttatattttaatttaaattggcgattgattacatcgagcttttattctgaaacgaatgaggaatatcaattccctgtgaaacaattttttttcaaacgcctacaaagacccaaaaatgtcccgcccacatttgtaaaaacttacataggctgtaaatagggatatagtgattgaaaatagttccgataaagttgtctatacttttatattttataccctcctctaaaggcctatgataaacctatttgaagaaatctacatttagcataaaaaattgagggggatcggttcataagtgtacgcgtagttttggccacaagcatcagaattactgtttggagaaaaacgcgttaaagcaaatttttctgtaattctgtgtaatctttcaccgtcatccgttacgtcgaatctattttacgtattatataag

SEQ ID NO: 25547 - DNA, 1389 bp, DROSOPHILA
atgcccgagttatcaagtgaacttcaaaaattctttgcctttgtggacggcaaaaaagaagattacatcggggccctaaaaaccgttgtgggtattcagtccgtatcagcctggcccgaaaagcgaggcgagatcggtcgtatggtggaatggaccgcggatcggctgaggtctctgggcgccgagacagagctggcagatgtgggtcagcagactttgccgaacggccagattatacctctaccaaaggttctgctgggaactttgggcaaagacccctctaagaagaccgtgttggtctatggtcatttggatgtgcagcccgccctgaaggaagatggatggaacaccaatccctttgagcttacagaggtggatggaaaactgtttggacgcggggcatccgacgacaagggacctgttctgtgctggatccacgctatcgaagcttatcagaagctcaacattgcactgcctgtgaatgttaaattcgtatttgagggaatggaggaaagcggcagcgaaggcctcgatgacttgttattggaacgtaaagataatttcttagcggatgttgattttgtttgcatatccgataactactggcttggaaaaaaacgcccttgcctcacatatgggcttcgcggtttggcatactttcaagtggaggtggaatgctccagcaaagacttgcatagtggagtttttgggggtacagttcacgaagcaatgccggatctgtgtcatttgctgagcattcttgtcgataaagatacaaatatcctagtccctggtgtggatcgcgacgtcgcaccacagattaagaacgagcaatctatatatgagaacatagactttgaagtttctgagtacaagaaagacattggtgttgaacagctgccgcataatggcgataaaacaaggttacttcaagccaggtggcgctatcccagtctttctgttcacggaattgaaggtgcattttatgagccaggcgcaaaaactgtcattccgaagaaggttattggtaagttctctattcgccttgtccccaaccaagatccaaagcatattgaggagtgtgttgtaaaataccttaatgataaatgggccgagcgaggatctcctaacaaaatgaaggtttctggcaagccctggactgaggaccctaaccatcctcattatgaggctgcaaaaagagccataaagcatgttttcaatgtggaaccagatatgacccgcgaagggggatctattccagtaacgttaacattgcaggaagccactggtaaaaacgttatccttgtgccagtgggtgcatgtgacgacggtgcccattctcaaaatgagaaaatcgatatttacaattacatcgaaggcgtaagatag

SEQ ID NO: 25548 - protein, 462 aa, DROSOPHILA
MPELSSELQKFFAFVDGKKEDYIGALKTVVGIQSVSAWPEKRGEIGRMVEWTADRLRSLGAETELADVGQQTLPNGQIIPLPKVLLGTLGKDPSKKTVLVYGHLDVQPALKEDGWNTNPFELTEVDGKLFGRGASDDKGPVLCWIHAIEAYQKLNIALPVNVKFVFEGMEESGSEGLDDLLLERKDNFLADVDFVCISDNYWLGKKRPCLTYGLRGLAYFQVEVECSSKDLHSGVFGGTVHEAMPDLCHLLSILVDKDTNILVPGVDRDVAPQIKNEQSIYENIDFEVSEYKKDIGVEQLPHNGDKTRLLQARWRYPSLSVHGIEGAFYEPGAKTVIPKKVIGKFSIRLVPNQDPKHIEECVVKYLNDKWAERGSPNKMKVSGKPWTEDPNHPHYEAAKRAIKHVFNVEPDMTREGGSIPVTLTLQEATGKNVILVPVGACDDGAHSQNEKIDIYNYIEGVR

SEQ ID NO: 25549 - DNA, 2663 bp, DROSOPHILA
ctgcacatcgcggtaattggagtgcccaatgtgggaaagagcacgttcatcaacaacacggtgaaccaccgagtgtgtcccacctcggccaaggtgcacaccactcggcagtcgaacacggccatttacaccaccggccagacgcagttggtcttttacgatacgccgggcctggtcacgcaacatgagattcgtcggcaccacctggaccagaactttaagagtgcctaccgccatgccatacagcatgcggacatcatcgccgtggtgcacgatgcctcaaatgcctggactaggaaggaactgcatcccactgtcttggatacgctgaaggcgtatagcaacctgcccagtttcctggtgctgaataagatagacgccctgaagtcgaagcgtttgctgttggatctgatcaagacactcaccaacgacaccttgacagttggcaagcgggaagtccaggcaaaaagtgctctcgccaaggaaataagaatcaacaagcgggagtctagctggagccattttagcgacgtgtttcttgtttccgccttgaccggcaatgggctgcaggagatgcagaactacctggtgggccaggctaagcccagggattggaaatacccagctgacattcatacggactccagcccagaagcattaattgtggagagtgtgcgggctcgtctgctggactacttgccgcaggagataccctacaaccttaagtgcgagatcgagtactacagtgtggaaaaaagtgagtacttctgtacactcgtaaagaaatccttttcaattccgattttctttgcagatgttgtctacacatccgtgcaggttcagtgccccaccacgcgaatcgagcgcctaatctgtggcgagggtaatggcaagctgcggcagatcacggagcgagttacatcagacctggtggagatgttcggccaagcagtgtcccttactatatctacagtttccaagggcaagaagaccgccgcttgagcacttgttgattacttgtactttatttgtaacgttgcataaacctaagagttcacaaaagcttcaaatgcgccaccaatttgtctagatcttcggcaggggctggacccagtccgaggaccgttgctgtcccagattccagctgagtgcgcccggcatccctcaccaaggcggccaccacgttcgactcttgggcctgtcgctccagggagtttagctgctcgaagttgtccacgcgcagcactatcttcggctgtcccaggcgacaccaacgctgcagaatggcgttctgcagcttggttccctgcacagagctctggtagcacatgaccgccgcatgggcgcactgggccgctgtctttcccttggacatctttaggtcggttcggaccaccagcgccagtttggtggacttgccgaaggccaaaccgttgctgaggaacttctgcaggatgctacttgacgtgggcatacttctggctctgctgctccacgtacttctgcatgcacgcccggaactctttcaccttctcctggcaagccctccagtcgcccgtctcggcgatacactcctgcaccttgtagtgaagctctatgcagccggtcttcttcagcattagttccacgggatcctggtccgtcgatgcggacattttcttctccacttcgccggctgaattcgttcgtttcgaaattacgaaattcggtcagggttgtcaacacatcgaagggacacggatatattctgtacgacatttggcccactatcgaattgaaagaatttactgtaaaatatattttcttgcattataaatgtgtttattccatagacagaataggaaatttttagatctttgggacctttttctgtataaatacatgatgatttgttttacctacaatatatgttgaaaaaagtatatgaaacatacattcctatggttttacaatttttgtatggcttaaaatgcttttttaacatttcccaaatcaaatttttaagaacgcattagtatagttttctaagaatggaccacacagaagtaaagtaaagctcatataaataaaagtttgtgtttgttctttgggatagatgtagaaaacttttcggccaaacaagtgtgcacggggtatgaccatttattcgtgactcttgcgcggcgttgcggtaatttgagcgaaggccgccacgggcacaccgatgcgaatgcaatcaacgagaaacgagcgaattgcaacgagcaggcgaaaaatcacaaaaagcggaaaatcacaacaatcgtgggtgcaaacgaaacggaaactgcgaggcaacggaaagtcgggtcccggaaaatccaaacggatggccctgcagtgaaacgctgatgaaagcagaggcgcacttggcgcgattcgaggggcaaagcgcgttgcgttgtgctgctctgcgttcttttccaaaaccgatttcgattccaaaaaccaaaccaatccaatacccacacttatacacttgcacaccgacacaccagcgcacacacacagacacgcgcgcgcatacagtgagcgagtgaaagtgcatctacatctgtgatttcgtatataataatgcgtcgcgcatacgcggatttggccagcagaagcaccaaagactaacaagtgatccggagccggggact

SEQ ID NO: 25550 - DNA, 663 bp, DROSOPHILA
agaagaaaatgtccgcatcgacggaccaggatcccgtggaactaatgctgaagaagaccggctgcatagagcttcactacaaggtgcaggagtgtatcgccgagacgggcgactggagggcttgccaggagaaggtgaaagagttccgggcgtgcatgcagaagtacgtggagcagcagagccagaagtatgcccacgtcaagtagcatcctgcagaagttcctcagcaacggtttggccttcggcaagtccaccaaactggcgctggtggtccgaaccgacctaaagatgtccaagggaaagacagcggcccagtgcgcccatgcggcggtcatgtgctaccagagctctgtgcagggaaccaagctgcagaacgccattctgcagcgttggtgtcgcctgggacagccgaagatagtgctgcgcgtggacaacttcgagcagctaaactccctggagcgacaggcccaagagtcgaacgtggtggccgccttggtgagggatgccgggcgcactcagctggaatctgggacagcaacggtcctcggactgggtccagcccctgccgaagatctagacaaattggtggcgcatttgaagcttttgtgaactcttaggtttatgcaacgttacaaataaagtacaagtaatcaacaagtgctc

SEQ ID NO: 25551 - protein, 65 aa, DROSOPHILA
MSASTDQDPVELMLKKTGCIELHYKVQECIAETGDWRACQEKVKEFRACMQKYVEQQSQKYAHVK

SEQ ID NO: 25552 - DNA, 2982 bp, DROSOPHILA
tcgaaatcctcgggagcgttgtaacgtccgccgccatttccaacgttgttgttgtaccgctggctactgccaccgccgcgtttgggcatcttactaatattcactcaaaaacgtatgcaacaaaaagatatgcgaatttcagcacgtttttagctgagtggtgttgtgtgtttgtgtgggtgctgttgttattactgagaaaactgtcttgagggcaaaaaactatgtgcgatgtattttttgcattcacacaaactgctgccaacttctggaaaaatttttctcgacttcctgaacctatttgctaatatagcagcaaagtagctgctgttttttggcaaatttccacggccaaagtacaacgcaattttgtgaaatttaattcactagcgatcttctttcgatagccagtggccgatggttggcagaaactggacggatgtttgcgacctttttacaagttattcttcgaggaaatttgatttaattgccaccaaagcgaaaaagttacgaaaactaactagaaatatgtagcgagcgaagtatattcgcttgatgttgatattgttttcttaatttctgacaggtctatcgatgatggcgggccaactatcgcacaggtcgtaatcagtgatgacactctagcgcagaacaaccgcgataaatctaaagattattggctattttttgttttgttgcagttaaactttagaatgcaatattattttattggactgttttgaagagagttacctcattcttactttaaatattatatagttgtagcacacacgtacacactccttttttgctcaatatcaaataagttgttattttacgaatagaggtagtgaaatgttttcgtataagatttacttactttcattttgtcgcaaacggtgcaatgtatttcataaattggtaatcgatagttgagagagggaatggtgattactgacaaatcgaagtcgagtcgagttttattatcagatcaagcaatatgtcggagaaaaagggtgcgctaaaagtaatcccgtccgcttcggaggagcaacttgtccaggccctgggcgatcttctccagcgctgctcccaggaggcgctggccaaacatgataagttcagcgtgggactttcgggtaaggatcaacgcacaggtcatgcaggtcaagtgggttggcttgtgataagccaaacttgaggggtgaccttgccaggtgcgatctttaaacttgtgctcccaaagtcaagtgtcttgtttcgcttacaggtggttccctcgtccagttgctaacgaaagccctgaaatcgtgcaacttaaaaacggccaaatgggtgtttttcttctgtgacgagcggtatgttcgcctggatgacagcgattccacctatggtgcctacagggccgagtggctaacccaattgccctgcatccaggaatcccagttcgtccgcgccgataccagccaaccgctggacgcctgcgccgcagattacgaggcgaaggtcaaaagtcaagtcgatcgcttcgatctgctgctgcttggcatgggacccgatggccacacctgctccctctttcccgagcagccagccaccctgcaggagaccaagcgcctggttatccccatccggaactcgcccaagccgcctcccgagcggatcactttcaccctgccgctgatcaataaggcacggaatgtcgccttcgtggttacgggcgccgcaaaagccagtgtcgtcaaggtgaggtctctttagcttgataagatggaaaagaatatgagcaagaaatctgatatttttaaccacaattcaaaaacttcatttgtaaggtttatttttgttgttattatattttttagagtgtgtttgtcgatctggacaagaagtttcccgctgcgtgggtgaatccgaccaaagggcagttgacattgattgtggacgcgggtgctggaaaagaaattgaaaccttaaaatgacattccttagttaactatcgcatcttgtaaataataattaccttgataatcttttcgagagcgtttaatttgttgagctattaaggttggagaaaataaataaacactccaaatattgtgattttacaattatttttgaatttctttatatatttatttaatgtttagaaaatgtttgtaaaatgcaaatctggtttaaaaaagctatcggcaacatgaaaaatatcgatatttacgcagtgtggccgaactcggtaacacaacaaatggcgcacccagtatgacggcactcgcgagcacaacaaacgcttcgtattgttaaaataaaagaaaaattatgaaaattcagcagcaattgtgctaattgtcgatgcccacatgcaatagcaaagatcgaaggacgcgcaacagccatggcaacgccacagccgcagccgcagctggagttgggttcgtgccaggaggcgcaaactgagccggcggtcagcaagttggtttcccagttagagcccctgaccacaatggacaccgtggacgcggagcgcgtctgccgcgtgtgcctaaaggatgtatcgttggagggggagctacacttcatcttcaacgaaacgcccgtcgagcaggacgcaaatctggcccgcatcctggacgagtgcaccctgcaccagtgcgagcgaaacgacggcatgcccccacatatgtgcagctcctgcgtggaggcggcccgcaacgcctaccgcttcaagcggcacgcggagcgttcctactgctcgctggtcgcattgctgggccggtcgccccagctgaaggcgcgaggagccgaggcggccagtcagacggatcaggtggccttgctgccatgcgaaatgtgccacgaccagttcctcaacagcctggagctcaggctgcaccgcaaccaggtgcacagaacgaccaaggaggccacgtcggctggcacagatggcctgccatccgaggattttaagtgcaaattttgtcc

SEQ ID NO: 25553 - DNA, 732 bp, DROSOPHILA
atgtcggagaaaaagggtgcgctaaaagtaatcccgtccgcttcggaggagcaacttgtccaggccctgggcgatcttctccagcgctgctcccaggaggcgctggccaaacatgataagttcagcgtgggactttcgggtggttccctcgtccagttgctaacgaaagccctgaaatcgtgcaacttaaaaacggccaaatgggtgtttttcttctgtgacgagcggtatgttcgcctggatgacagcgattccacctatggtgcctacagggccgagtggctaacccaattgccctgcatccaggaatcccagttcgtccgcgccgataccagccaaccgctggacgcctgcgccgcagattacgaggcgaaggtcaaaagtcaagtcgatcgcttcgatctgctgctgcttggcatgggacccgatggccacacctgctccctctttcccgagcagccagccaccctgcaggagaccaagcgcctggttatccccatccggaactcgcccaagccgcctcccgagcggatcactttcaccctgccgctgatcaataaggcacggaatgtcgccttcgtggttacgggcgccgcaaaagccagtgtcgtcaagagtgtgtttgtcgatctggacaagaagtttcccgctgcgtgggtgaatccgaccaaagggcagttgacattgattgtggacgcgggtgctggaaaagaaattgaaaccttaaaatga

SEQ ID NO: 25554 - protein, 243 aa, DROSOPHILA
MSEKKGALKVIPSASEEQLVQALGDLLQRCSQEALAKHDKFSVGLSGGSLVQLLTKALKSCNLKTAKWVFFFCDERYVRLDDSDSTYGAYRAEWLTQLPCIQESQFVRADTSQPLDACAADYEAKVKSQVDRFDLLLLGMGPDGHTCSLFPEQPATLQETKRLVIPIRNSPKPPPERITFTLPLINKARNVAFVVTGAAKASVVKSVFVDLDKKFPAAWVNPTKGQLTLIVDAGAGKEIETLK

SEQ ID NO: 25555 - DNA, 11358 bp, DROSOPHILA
ttggatatttccgtttcctggctgtgcattctccttgtcgtccgcttgcattcctttctccagcgccattaaggtgctgtttccgaagttgaacgactgcgagaatgccattgcgccggtgcgtttttatactgaactaagaattgttgcaaactgcttgttacaagtgaaatgaataaaatgaaaacgaaacgtcgcgcggtcaatgtggccgtcttatgattagtttcaaatatactattcatgtttgtgacactttgaatgaactgtttacaccgccagcggtcccactgaaaccttgttcacactgcacgcgactttcttacaaaatatcttaattaaacagattttatttataccgttactttccgaattccatatgcgtgctatggggcatttagcacaaagctaaggtcccactaaaaccttgttcacactgcacgcgcctttcttacaaaatatcttaattagacagattttatttataccgttactttccgaattccatatgcgtgctatagggcatttagcacaaagctaaggtcccactaaaaccttgttcacactgcacgcgcctttcttacaaaatatcttaattagacagattttatttataccgttactttccgaattccatatgcgtgctatagggcatttagcacaaagctaaggtcccactaaaaccttgttcacactgcacgcgcctttcttacaaaatatcttgattagactgatttcatttatacctttactttcttgctaagtgtaagctaagtgtagttaagtgtaagcctgaaatccaagcccaagaccaaaactgaaagcaaaagacccacagcaaaaactcaaaaaactccacgacgcaacaaactcgcgttcgaatcgcaagcaagctgcgctgaaatcgctaacaagccaaccaaaagccgcacgaaagttgcgcccaagccgcaatgaatttaacgctgactttatgaactttaaaagaaacctttggcttatttttgtttatttctttatttgtatatatccttagaatagtttgtgttgttcaagattacataaaatttgtttacatatctattagatcaatatcccatttacatagttagcattatacaaaatcgcgcgccgcaagctgatgacattccattttagttggtttttttttataatatggttgttggtggatagtgtgtggttgtggttaattagccgcgatacaaatttggatattatgctagacgacaaatgtgcgacattataaaataaataacatggttactgctcgccgcccttgccggatatcttttgatggccactccttttggtttctggggttaggcggaatggatcctcatcatctggccatcatctacatcttataggtggcgggcacggatcggggatagtccagatcgtacatctgggccttgatgaacgccagcttattgaccggctctggacgaacagtggccaatccgtttttgtaggcgtactccacaatcctttcggcaatggccatcgaacagctgacaatggagctgagtggtggatacaagctgcccttggccaggtcgtccttggagaccagctccgccaagcgctcggcggcgaccaagaatacctgctcgggaatgttcagcatgccggcacacagaacacccagtgccacgccagggaaaatgtacgagttgttgccctgacccggatagaacttcttgttgttgtacgtcacaggagcaaaaggcgaaccgctggcgaagatgcagcgccccttggtgtacgtatacgcctcctcggcggtgcactccgccttgctggtcggattggacagtgcaaagatgatcggcgtctcattaatatcggccatcagctcaaggatctcctggttgaaggcgccgccctgcgcagccgctccaatcaggacattgggacgcacctttcgcaccgcctctgccaaagtatcgatgggttcgtgcagctgggcaaagtgcagcttgtgttcggtgagtccgccctttggacgatcgcgggtgatgacaccacggctacatagaaagcatctataagtatcaggatgtattttgattatatatcgacctacctatccaccatccagatgcgggccttggcctcctcctcggtgagaccctccaccttcatggccatcaggcacaggttggcaataccaagagccgcttctccggcgcccaggaacaacagcgtgttatccttcagctgggtcttcttgatctttagcgaggccagcagaccagccacggccaccgacgcggttccttgaatatcgtcgttgaaggtgcagaaggagtcgcggtatttggacaacagcctgaaggcattggcgttggcaaagtcctcgaactggattaggcagttttgaccaaagcgacgaacgcaggcatgcatgaactcatcgatgaactcatcgtacagatctccagtggccctgcgttcgcgcagaccgatgtacaggggatcctccaggatggattcggtattggtgcccacatccaaggtgatgggcaggcactgcgatggcttaatgcccgccaaggccgtatacagggacagtttgcccacgggtatacccattccgttggcgcccagatctcccagtcccaggatgcgctcgccgtccgtgacaacgatggcacgcacatccgtttccggccagttctttagcacgtcgtagatgtgtcccttgtccttgatggatatgaacatgcccttggcgttctggtggatcaaactgtagcgctggcaggccaatcccacggtgggcgtgtacaccagtggcatcatgtaggcgatgtctgagctgagcacgttgtagaacagacgctcgttccgctccgataggctgatcaggtacatgtacttgtccagatcctgatccagtcgcgccagcagagcgcggcagtgctccacctgctcactgggctcacggaccacatagggcagcatgccatggatgcccaactgctggcgctcctcgtgtgtgaaggccaggccctgaaattgaaagggatatgcattttagttaccaatacctactattaatatctgtaggattcgtaataggatggcatgatcgcctcattgaatgattatagaatctcctctcaaatcaaaacaaacaaaatgtaggatggtggaaaagtttgacccgcttatcatggacttgaattcccaggcacgcgcccctattcatatagagtattccacggctactagccaccgagacagaggcagttattaccgatgcttcgcagatccgaggagatagatccctcgacttcacgagtcgggcatcaagttcaaagtcgttttctagcgcccagtcgcttgaaaacatatttgcaatcgcagctttaattaaaacacattttttttcgagggggaagtgaatcagcgctggcctcgattcacacgcacagctaatatgtttagtacgagattttgaaagtttttgctccgtaattgctgcggttattatcgaaatggacaaagcaggcggggattatgttgggggcgttgctgccgacattaaataaaaaaatacgtgcaagttggcattcaaatagaaatcacgctggattatgtggtttttgtttttaaactacggatgtacctgctaatatgcacattagggaataattactcgtgctttgggttacttttccgagtggctgctgttttcaaatcgtgctcattacaaaggttttcttaatgagtctattttaagcttcttgggacatttgatttagcttaataataaatgcacatttttatttccaagcgatatatcaaaatgcaaccaattccaaatctgttgtgtaagttttccgaattatttttgtaaattgaatattttgttagtatgtcaaattaagttattattggaaattatacttgataggttttctatcatttatcatcatttaaaattaatctcgtttgtttcggtcacgcaataataaatttatagtttttcatatgaatttttagttttccgataaaaacaaactattcgtattctagttaattgattcgtaattcgtattctagttaacgtttttgatgcctatcactatgaataagcaatatttaaaataattttggtcagcttgcaaaatatcatatatcatattaagagctgacacagataaataatattgttgtgtttttaaggaattttagctggaaatcgagctgattcccctttttttttttaagtttgcgaagtaaaatacatatgtatttacatacgcatcaaattcaattagctctgaactggctgtttggacaataaacactgaagtgatccccataaacaattgtttactgccagaattgcctcgaacttaaccattatcgtgtggctacgtcatcggtgggctggtgaaatacatccatatgtacatacatacgttaaaaaaagattgagagaacgacaccgttgacattgaaagcgacacacgaccgtcgataagcgtgcgaaagtgttttcgaaccgcctggcaacaagttctccccattctccagcacatatatgtacatacatatatatatgatggattaatattcatgtattcatgcccccagcaattgcctccaaacttgccacatcatgcctaagtcatatgaactaaactatagtttcatcatcctcatcaccttttcaagttctgactttagtttgtattatattagtagttatagcaaatcatgtaagattgcttataaagagggggcaccaaaaatcgaatccagacatgcgtatacgtaatgtgcaactccgatattacgcatacacatttcgcatggtattgcaaaaaggcaaaacgaaacgaaaactgacaaaagtcgcagccacaagcaaaaccaaaccaaaaaatcacaaaaatgagctggttcatatttttttttacactgtctggcgcgaccagttcgatcatcatcatcgcagcggtgatcatcattatagcaatggctaatcattaagtcgactatcaacgaccgtctgtgtctgaactttgaatacggactcggatcggatgacgaaagcgtcgctttaatcagcaacagttgagcagacacacagacaacgggcaatctcagctgattgtttcccttctggcaaaggtgagctgatgaagggtttttttttttctgtaccagcctccctcccagcaggtgaaacgctgctgctcttttgtgggtcatacgatgtggaatgatgacacaggatgaatgcgccactgaatcggagcataatagtttatgatgcacactgcaaaaatgcgcgtaatctttgagtaatttaggttatccaaaaggaaaacataaattccaacctatatatgtaagctatttcaaagcatttcagccattaattgcaattgacaagcacactattatatattattctttctttagttgcccaatataagcaatcgataaatcattgggtaaacaatgaaataatccaactatttcaacaagtttcgagctcgccccgctctttcggcacattgaccgcctgaatttgtttaaatttttaatttcctcagagcgccaataaataacaacaaagagcaggggaatataattctattcgccaactgcatgtggtgtgagcaaaccacacagataaatatttaatgtgtgtatatacatatatagggctgataccaagtgtttttgtggtgattatcgtcattcggttgtttatttctgcggttcgaaacagagttaaatttattgctgaatgtaggtcagttttcgcggactggctttaattttgtttcttatttttttcattggagataggcactcgaaaactttccatgggtaaatcaaaacaaagctcagctgttcggggaaggaggttgagataaacaagagtcacttgttggcagcgtgtaagaagtacataataacaatctgtagtaaacaagtgccagcccctactcgataaggaaacccaagataatttctcgctaaattgttaaattattatttttaagtcttttcgtccgattgtgccgtgacgtaagcgggaaaaaaatccacttggttgtcatggggaaacaccattctggatggccctccattattctcagtggagcttctgtttacaatgccaaatggttggccccttttggtcagtttttttttttagtagctacacgggggaaaataatgtctttactagaaattacgtaatttctttagattcctagcattttaaattgtaatatccgttctaaccattaccacctttacattaaaactctgttttttcagtgcaactgttttaaataaacaaacgcaaagcccatgcgcgctctctcttctctctttcaaaaatgctctctaattttatattttgtgaaacaattcgtgcattagctcattcatgtctgcgtgggaaaaaagcgtagaagccaatgcaagctgaaaaactgcacaagcattgaacttgaaaatgcaatctgagataaatttgtaaacgaaatctgcgtgaccgattcgtgtcaactatttcataccgtacaatttcggcatgtgccacagacagctaattgcctcaattataaaagttggtctatcgattttcttcggctaaggcaccagaaaaaaaatgaaaaaaagcaacaaaaaaaactgacaaaaacaatgagctttggtcttccagagtggcgcgtgtgccatttgccatccctttcactcgctatgtcatctaaaggtcacccacaccacttgccgaaaaatgaagccactgccaaaaagtatctttttttcgctctgaactcagcagctgacgtttccgcctaatagttatttatgtatttatgatttggaatttttttattctcgtgcttgtggtaaaaatagcaggtggcctagaataaattcacactttttcaagaagaaattccaacattggaactcacttctagcgaaatttcacataattaacgattattagtaaatatctttcagatacatatggatggctaaggtaagttctaaggtaaggcttaagttcttcaaattctagaccaattaaacttcttctaatagtctataattatgactctacctctaaatatttacccaaacacggttcactaacacaattcgccgatatggggagcggaaaaaaaaaccgaatgcgaacccacccttaaaaacctttgcctggtatttttccactaagttcacggaactgggcaacttaaaagcgtattcgcatattcctacttgtggaactcacctttgagtagcgcttgtccaagagtcgggtgaatccggagaggctgccgaccacctcattgtcaccagtgccccaaaggcccaggcgatcgcgctgcgcgtatttatctagtttcgaatcgggtttgctcatcttgtcttccaaatttgtttcgctagtggagctgtatgaacgtagttgctgttgttgttgctgttgctggtggtgaagggcgtgcaaactgctctgcagctgattccagtggtgtcgcgaggataacgataacggcagacccttgggcagttccaaatcggtggctaaggctatattacccggattcgaatctctgtccctatgcgtttccgtatccgtatgcggcgatgtgtccacttcggcggcactttgcgttgtgattcgtgtcgttagttttgcgaaattggaaagttcgtattcgagtgtggttgtcgttgtggtcgtatgatttttacacacacgactactacaacagctctgactctctctctcatggctattgttgttgttgctgttgctgtttctcttcgtgtaacagccgagctcgcgctctttgccgcgactatatgaggaaggactctgcgaattgttggcggtgggataaaccggcgtgctgagggagagagagagagcagacaatatgtgaatgaatgtcaatgcgggagtgacaataacaaccaattcgtcaccaacattcggatactctttctgaaagaaccgatgttaacatttttaattgaattttaatcgtacacactccacgttcccacactaacaattgttaataatatatatattacattttaatagtatatatatcttatttgaatagtatattatataacagtatataataatatatgaatttcaccataaaaagctttttgtaatagccaaaaagtcgtagagcaataaaatggtatttagggttaaaagaggcccttaaagggtgggtactcttcgtttcagattccttatcaaggttttcagaacctttgaaatgcgctgatatgtttgaacgtatgtgcatggtcatatgatgaggcgatgcatcgcagacacgccttccagatggaaaccgataagtggtgccaaagtgacactgattattgccaattcagaaacacaccctcttgatctgtggtccaatcgtatgacaccacattatacttgttattctgaaattcttgcattcgactcacggtccaaaagtttttctgataccagaacagcgtcgtaggatcgagtacatggcggtgctcttaaaagtcttctatattatatacttattagtatattgatttgccgacaattatctcactgagtatttgacttttgtctgcgttgctgcagctttcgtgctgaactgaaccgcagtattcgatttgttttgctaccaccatatgtatacactttgcgattttgttttgtttccgcgctctttggctctttctctccgattagtttcagttgtgtggggtatatcagctgactgataagggcggtgcaaacactatctgcacatataaacgccattaaacaacgattattaccatcaaatcatttgtctgggacctggaaaacattgcgatgcggcgtgaatagcatgcgaaaagtttccgtgagaacagcagcggtcgaaataatagtattcaaattagactatagagtattgcagttagcaatttcttatctactattatttataatcagtagctttgattttaatgtaaacttaagtacaacgtgcgtgcattacttgaattaaataaaccgaaccttttctattagagattattagactcgatggcgttaaatataaaccaataatacctcctgaacttgtggcatctgactaagtataaattatttaaagagacgcctcaaggtagaagccccaaaccccaaccttaaccttcagtgtcccgaatcgcttcagttcccgccccactttgcacttgactcactcatacgaccggtgggcccgttccgcttttgctcggatgtctgtttgatatattcaattattacacaaaaattgaaagtaaaacacggcaggcgaataaattggaatatatcacacatgtttgtgtgtgtgcccgagcaaccttcataaatattaacaatttacttcagctttgccaacgaattacattttccaagtaccttcgtgagcaaaacacacctgtcgctctaacttttttttttctttttacttcgaaaatcgttaattaagaaggtggtgctctaattttttatcgatggcgtgtgtcagaagttattcttttttatcgcaacgccgacgagtcgcctgtaaatcgttgataaaacactagtaaaacgaatcattgaccactaatgacacctcgagaaacaaattattggaggggcggggctgagggcggtggcttggcttgcatttgcacaagaaaaaacttgtagttgcaggaaaggatctacttaaatatattaagtatcgaaacaaaaaatgttaagaatttgtaatggttttttataaataacttttttatgtaaaatataatttcctaatctttcagttattagtttttagtaacaataaaaataaacaaattaattacaaacatgtttgcgcattagtaaacacaaactctttggccaactctcgcattttcgaaatcctcttttgccaatcgcttgagttcagcttcagtttgttcacttttccatttcatttcttacccattttcatcgaaatttgttatgacattgcgatcggcgcaaatggaactggaattacccattttgggttctaaatttcagttaaattagctccagttaaatagttatagttaattatttggtaaacgcaaaacttgtgaacttttctaacgcgaaaattaactcagttcgcttgaccacgcgatgtttcaccggaattattaaaaacagttattaacaaaaattaaaaaaagtgtattttgagctattgcgcttgacttagcaactccgaaccgcctgaaactgaatcaaaaactgaactcgcgctgaaatcgcggctctgcgaacaccggaggcaacttgctagcagcgggcggcccaaaggagaaggagaaggagagtgtccggtgctgccctcccgctcgcacccgcacgcaggcagcacgcgacatttgctccactgagtcactttggtaggcccagacggctacagtggcccctcgctaaaaaggatgaaatctaaaatgcatttttaataggtttttagtttatttcttatataaaaatcaataactttaaacactatttaacgttgatattaggtaatctgctgttttatttaactataatttgtaaatttttatgctttacaaaaggactatacaaaaatgggtttgtttgtattctctttttaattttaatctagcaagactttcatttcggggtttcaccgtatttgattaatcgttgcagccttagagaagctttggcgctgagttgtacttcacttggagtcacacaaaacctgagcggttggttaatcgcagtgacctctgggcggcacacacaaatgcatgaagcaatttgttgctggccaattaaaaaataataatttcagctttcaaagaaggcaactcgattgctgaccatcgcgtcccagtcggctgcacttggcaagtggcgaagaaaaatttataaatccaatgaattccgggtcatttcaaatgcactgagttgaaacgatggggaaggggactcggtagtcggtgtggtggatccttaggcttttttcgccttttgactctgattttatcacctaatgattttaccgctgtttcatttgtcgcctgggtggcactcgaattttaattagatttgctttattgcactgctgtctgttgaaatcataatatatattgcactaatgttcaaagatcttgttcaattgtgcaaatatgacacacattaattactgggtttggtttgctatatcgaatttattgttgaagtgtcggcttgtgtttactgtctaaaatttgcgaaagtgtcgtatgaaaagt

SEQ ID NO: 25556 - DNA, 2924 bp, DROSOPHILA
agccgcgatttcagcgcgagttcagtttttgattcagtttcaggcggttcggagttgctaagtcaagcgcaatagctcaaaatacactttttttaatttttgttaataactgtttttaataattccggtgaaacatcgcgtggtcaagcgaactgagttaattttcgcgttagaaaagttcacaagttttgcgtttaccaaataattaactataactatttaactggagctaatttaactgaaatttagaacccaaaatgggtaattccagttccatttgcgccgatcgcaatgtcataacaaatttcgatgaaaatggcacgccggtttatcccaccgccaacaattcgcagagtccttcctcatatagtcgcggcaaagagcgcgagctcggctgttacacgaagagaaacagcaacagcaacaacaacaatagccatgagagagagagtcagagctgttgtagtagtcgtgtgtgtaaaaatcatacgaccacaacgacaaccacactcgaatacgaactttccaatttcgcaaaactaacgacacgaatcacaacgcaaagtgccgccgaagtggacacatcgccgcatacggatacggaaacgcatagggacagagattcgaatccgggtaatatagccttagccaccgatttggaactgcccaagggtctgccgttatcgttatcctcgcgacaccactggaatcagctgcagagcagtttgcacgcccttcaccaccagcaacagcaacaacaacagcaactacgttcatacagctccactagcgaaacaaatttggaagacaagatgagcaaacccgattcgaaactagataaatacgcgcagcgcgatcgcctgggcctttggggcactggtgacaatgaggtggtcggcagcctctccggattcacccgactcttggacaagcgctactcaaagggcctggccttcacacacgaggagcgccagcagttgggcatccatggcatgctgccctatgtggtccgtgagcccagtgagcaggtggagcactgccgcgctctgctggcgcgactggatcaggatctggacaagtacatgtacctgatcagcctatcggagcggaacgagcgtctgttctacaacgtgctcagctcagacatcgcctacatgatgccactggtgtacacgcccaccgtgggattggcctgccagcgctacagtttgatccaccagaacgccaagggcatgttcatatccatcaaggacaagggacacatctacgacgtgctaaagaactggccggaaacggatgtgcgtgccatcgttgtcacggacggcgagcgcatcctgggactgggagatctgggcgccaacggaatgggtatacccgtgggcaaactgtccctgtatacggccttggcgggcattaagccatcgcagtgcctgcccatcaccttggatgtgggcaccaataccgaatccatcctggaggatcccctgtacatcggtctgcgcgaacgcagggccactggagatctgtacgatgagttcatcgatgagttcatgcatgcctgcgttcgtcgctttggtcaaaactgcctaatccagttcgaggactttgccaacgccaatgccttcaggctgttgtccaaataccgcgactccttctgcaccttcaacgacgatattcaaggaaccgcgtcggtggccgtggctggtctgctggcctcgctaaagatcaagaagacccagctgaaggataacacgctgttgttcctgggcgccggagaagcggctcttggtattgccaacctgtgcctgatggccatgaaggtggagggtctcaccgaggaggaggccaaggcccgcatctggatggtggatagccgtggtgtcatcacccgcgatcgtccaaagggcggactcaccgaacacaagctgcactttgcccagctgcacgaacccatcgatactttggcagaggcggtgcgaaaggtgcgtcccaatgtcctgattggagcggctgcgcagggcggcgccttcaaccaggagatccttgagctgatggccgatattaatgagacgccgatcatctttgcactgtccaatccgaccagcaaggcggagtgcaccgccgaggaggcgtatacgtacaccaaggggcgctgcatcttcgccagcggttcgccttttgctcctgtgacgtacaacaacaagaagttctatccgggtcagggcaacaactcgtacattttccctggcgtggcactgggtgttctgtgtgccggcatgctgaacattcccgagcaggtattcttggtcgccgccgagcgcttggcggagctggtctccaaggacgacctggccaagggcagcttgtatccaccactcagctccattgtcagctgttcgatggccattgccgaaaggattgtggagtacgcctacaaaaacggattggccactgttcgtccagagccggtcaataagctggcgttcatcaaggcccagatgtacgatctggactatccccgatccgtgcccgccacctataagatgtagatgatggccagatgatgaggatccattccgcctaaccccagaaaccaaaaggagtggccatcaaaagatatccggcaagggcggcgagcagtaaccatgttatttattttataatgtcgcacatttgtcgtctagcataatatccaaatttgtatcgcggctaattaaccacaaccacacactatccaccaacaaccatattataaaaaaaaaccaactaaaatggaatgtcatcagcttgcggcgcgcgattttgtataatgctaactatgtaaatgggatattgatctaatagatatgtaaacaaattttatgtaatcttgaacaacacaaactattctaaggatatatacaaataaagaaataaacaaaaat

SEQ ID NO: 25557 - protein, 763 aa, DROSOPHILA
MGNSSSICADRNVITNFDENGTPVYPTANNSQSPSSYSRGKERELGCYTKRNSNSNNNNSHERESQSCCSSRVCKNHTTTTTTTLEYELSNFAKLTTRITTQSAAEVDTSPHTDTETHRDRDSNPGNIALATDLELPKGLPLSLSSRHHWNQLQSSLHALHHQQQQQQQQLRSYSSTSETNLEDKMSKPDSKLDKYAQRDRLGLWGTGDNEVVGSLSGFTRLLDKRYSKGLAFTHEERQQLGIHGMLPYVVREPSEQVEHCRALLARLDQDLDKYMYLISLSERNERLFYNVLSSDIAYMMPLVYTPTVGLACQRYSLIHQNAKGMFISIKDKGHIYDVLKNWPETDVRAIVVTDGERILGLGDLGANGMGIPVGKLSLYTALAGIKPSQCLPITLDVGTNTESILEDPLYIGLRERRATGDLYDEFIDEFMHACVRRFGQNCLIQFEDFANANAFRLLSKYRDSFCTFNDDIQGTASVAVAGLLASLKIKKTQLKDNTLLFLGAGEAALGIANLCLMAMKVEGLTEEEAKARIWMVDSRGVITRDRPKGGLTEHKLHFAQLHEPIDTLAEAVRKVRPNVLIGAAAQGGAFNQEILELMADINETPIIFALSNPTSKAECTAEEAYTYTKGRCIFASGSPFAPVTYNNKKFYPGQGNNSYIFPGVALGVLCAGMLNIPEQVFLVAAERLAELVSKDDLAKGSLYPPLSSIVSCSMAIAERIVEYAYKNGLATVRPEPVNKLAFIKAQMYDLDYPRSVPATYKM

SEQ ID NO: 25558 - DNA, 4263 bp, DROSOPHILA
gttcgaggctacgcgtgaacggaccaaaggaccaaaatacaaaatacaaatatacaaaaaaaaaaaaaaaatactgacagagacggaaaaacgagaacgaggtgcgagcgggagagggaagcgcagcgataaagtgataaagtttgcccatgcgtttgtcaaatcgcgttttattgctggctttgatattgatatggctaaaaagggcaagaggaacaggaactggtgccccaaatgcataagtagcttgaattgtttgcattcgattgtaacgtcgtgccccaaaatcaacataatgcttttgtctaccaaaatcggcatcttttttttttgtttgaatgtgcaagcttgcatagaaagcatcatttagtgttcatttaaatactggtgtttttgattaatagttttcatttaaaaaatatcaactggcccaatagttgttatgaaaagcgagacctcgaaaaatgtgtagaaatgggtagaaaaactaaaaaaaaaaagtcggcatgtaacaaggacactcgcctggcgttgccaccttgttcaggtgttttaagaactgcaattagtttaaggacatacttatggtgcaattaaattcttcacaataattgtttcgcttacgttacataatagaacgaacttaagaacagtgcatccgataggattgcagtgtatacaactattgttgtaattttatgtgcatttcatttatacccaaaaccatcgctgaagaattcgcgatttcatttgttcagagattatacacaagtgctgaagaattcgcggcacagatttgctgtttttaattataccttgtgcattactataaaacaacgaaaaccttgcaatccacagctttttgaaacatgccagggtaagacagccagagatgcctgtgattctgctaccacgatgcgagaacaaaagctggaaatgacagcgcaatcgattccaaaaagttgagacccaacagacgacacaagcaaaagctgtcaatatgacatgttttacgcgcgtcggagtatcctgtggcctgttctttttcctactgggcgcccagctacaattgattcggtatgtgatgttgtaacttaacttaaccaaataactggggaatttcaaaattgaaatgttctaactgtacctaatacctaaaatttcgaatacatttttccagatgcattcgaaaggatgtactagctggccgccttgagaacgtcacgcaaacaatatcaaacatactgcaaggatacgatattcgacttaggcccaatttcggaggagagccactacatgtcggcatggatttgaccatcgccagctttgatgccatatcagaagttaacatggtaggtgtattcaagactcttaaagggtaaaaaataatactaattgaaatttggtcatcgaatcctaggattatacgataacaatgtatttaaatcagtattggcgcgacgagcgtttggcatttaatatctttggacaatatttcgacgatgagaatgatgatggcataagcgatgtgctgacattatccggagactttgctgaaaagatatgggtaccggatacgttcttcgccaatgacaaaaacaggtgaagtaaaacccatgcttttcgatttttgttcttttaattttctaaattattcggatttagttttctgcacgatgtcaccgaaaggaacaaactggtgcgacttggcggcgatggagctgttacttatggcatgagattcaccacgaccctcgcctgcatgatggatctgcactactatccattggactcgcagaattgcactgtggaaattgagagctgtgagtagactcctgaactcgtttggttgtctagaaatattatttacttacctatttagttgttggatttacctgatatattttatgatagtttaggacttacacaagatttattatgtattataaactaagacagatatgcttataaataggtatcaaattagcattcctttctacatatgtagctagtataacacagaagacaattaaaacaattccaagacagatacagacaggttaaagatagttaaagttaaaggtttctataatcagctcgatcgagtaaaatcttaagtttgcgagtattactatataacttatactataatataatatataataacctatttttatcactaatatctaaagtttagaaaagtgtgtaaaatacttttaactatttcagatggatacacggtcagcgatgtggtcatgtactggaagccaacgccagtgcgcggagtggaggatgcggagctgccgcagttcaccatcattgggtatgagaccaatgaccgaaaggagcggctggccactggagtctatcagcgcctctcgctctcattcaaactgcaacggaatatcggatactttgtattccaaacttatctgcccagcattctgatcgtaatgctgtcgtgggtctcgttctggattaaccacgaggcgacgagtgcccgggttgcattgggcatcaccacggtgctcaccatgaccaccattagcacgggtgttcgcagctcactgccgcgcatatcgtatgtgaaggcgatcgacatttatctggtcatgtgcttcgttttcgtgttcgcagccctcttggaatacgctgccgttaactatacttactggggcaaaagggctaaaaagaaaataaagaaagtcaaagaatgttgtccaggcaagatcggtaggtctacggtctaaaattcgttcaatatataccaattgtttaaacccacacccatgcccacaggaaagagtgaaagatccgagacgtgttcaacgacagaggacattatcgagctgcaggatgttcgaatgagtcctataccatctttgcgaagaggtacctacaatgccaccctcgactccatcggcaccgagaccatgaatctaggaaagttccccccaagttttcgaataactcgtaattatggcaccggacatagccagcttagacgtcgcgcccaaaggggtatgttctacttatatgtattagcttattgttaactaatattgaaatccgattttaaggtatctcaacccgcccacgcatgttgcacgccctgaagagaggtgcctctgctattaaggcaaccataccgaagatcaaagatgtcaatattattgacaaatactcccgaatgatatttccgatcagttttcttgcgttcaatcttggctactggctgttttatattctggaatgatatatatgtataatgtgaacgagtaattaattcccctagcaacagaaccatgagatccaaatacgactttttataacctccataataaagattgacttcgccatagtatttgggcgtacctgaatcattagcacgacgcatttttatgcttctcctcccacccacaggtgtataaatgtataagtgtatcgaatgatggataaatgtaactattctgtttaatgatcatcgatacggaaatgagcaaatttaaaatataaacgtacgtgacacacccgaaatttccattgagaacgcactgattatcagtttctactgtttactactccgagtcgcttatagatagtcttacgtctagcgattctatatatatataatcctgcatccattgtcaatccgctccttcaattcaatcgaataaccaccaatgctcctcgagctctccgttagcactaatgtggcgaggactcaggctcactgggttcgaatccaccgtcgcacattggtcgatcacacgaaaacgctggccaaatatccaaaaatcaatattaagacctcaagtattttcggcagtagtatatattataataaataaaatgaatgaaaaactgcagaaagaaaacttgtataatttgccatgtagaacacactgcaccctaaatgctccattttcgtttctgtaggaatttacttattaagttatgtaaaatactgtcggaaaaatataaaaaaaaaaaaaaaaaactactgcacaaccggacatacccgaaccatggaataatggttcccggaattctcattttgctcctctgatgaagaagatgggtttgtcgcgatgtaatcagcaccgcctatgtaacttacaaattagtgatagtttacaataacatttaaaaacggaacgaactaataataataggtaaaactacacacctgctgtggactttggcaagttgactacatcgcgccgaaatgttgacatattttgggtgaatctaataaataag

SEQ ID NO: 25559 - DNA, 1498 bp, DROSOPHILA
atgacatgttttacgcgcgtcggagtatcctgtggcctgttctttttcctactgggcgcccagctacaattgattcgatgcattcgaaaggatgtactagctggccgccttgagaacgtcacgcaaacaatatcaaacatactgcaaggatacgatattcgacttaggcccaatttcggaggagagccactacatgtcggcatggatttgaccatcgccagctttgatgccatatcagaagttaacatggattatacgataacaatgtatttaaatcagtattggcgcgacgagcgtttggcatttaatatctttggacaatatttcgacgatgagaatgatgatggcataagcgatgtgctgacattatccggagactttgctgaaaagatatgggtaccggatacgttcttcgccaatgacaaaaacagttttctgcacgatgtcaccgaaaggaacaaactggtgcgacttggcggcgatggagctgttacttatggcatgagattcaccacgaccctcgcctgcatgatggatctgcactactatccattggactcgcagaattgcactgtggaaattgagagctatggatacacggtcagcgatgtggtcatgtactggaagccaacgccagtgcgcggagtggaggatgcggagctgccgcagttcaccatcattgggtatgagaccaatgaccgaaaggagcggctggccactggagtctatcagcgcctctcgctctcattcaaactgcaacggaatatcggatactttgtattccaaacttatctgcccagcattctgatcgtaatgctgtcgtgggtctcgttctggattaaccacgaggcgacgagtgcccgggttgcattgggcatcaccacggtgctcaccatgaccaccattagcacgggtgttcgcagctcactgccgcgcatatcgtatgtgaaggcgatcgacatttatctggtcatgtgcttcgttttcgtgttcgcagccctcttggaatacgctgccgttaactatacttactggggcaaaagggctaaaaagaaaataaagaaagtcaaagaatgttgtccaggcaagatcggaaagagtgaaagatccgagacgtgttcaacgacagaggacattatcgagctgcaggatgttcgaatgagtcctataccatctttgcgaagaggtacctacaatgccaccctcgactccatcggcaccgagaccatgaatctaggaaagttccccccaagttttcgaataactcgtaattatggcaccggacatagccagcttagacgtcgcgcccaaaggggtatctcaacccgcccacgcatgttgcacgccctgaagagaggtgcctctgctattaaggcaaccataccgaagatcaaagatgtcaatattattgacaaatactcccgaatgatatttccgatcagttttcttgcgttcaatcttggctactggctgttttatattctggaatgatatatat

SEQ ID NO: 25560 - protein, 496 aa, DROSOPHILA
MTCFTRVGVSCGLFFFLLGAQLQLIRCIRKDVLAGRLENVTQTISNILQGYDIRLRPNFGGEPLHVGMDLTIASFDAISEVNMDYTITMYLNQYWRDERLAFNIFGQYFDDENDDGISDVLTLSGDFAEKIWVPDTFFANDKNSFLHDVTERNKLVRLGGDGAVTYGMRFTTTLACMMDLHYYPLDSQNCTVEIESYGYTVSDVVMYWKPTPVRGVEDAELPQFTIIGYETNDRKERLATGVYQRLSLSFKLQRNIGYFVFQTYLPSILIVMLSWVSFWINHEATSARVALGITTVLTMTTISTGVRSSLPRISYVKAIDIYLVMCFVFVFAALLEYAAVNYTYWGKRAKKKIKKVKECCPGKIGKSERSETCSTTEDIIELQDVRMSPIPSLRRGTYNATLDSIGTETMNLGKFPPSFRITRNYGTGHSQLRRRAQRGISTRPRMLHALKRGASAIKATIPKIKDVNIIDKYSRMIFPISFLAFNLGYWLFYILE

SEQ ID NO: 25561 - DNA, 7441 bp, DROSOPHILA
gaagaagagcgagtggctttggttttgggccgtggttccagcgattttaagccgcttttgcaattgactgaggcgcatcgcagggcagtcggagctgtcgcattgcgtagtaaatcatcggtcgatccatagaatctggactgtgactgcaacacaggcaacaggatccgggactggggcaatccgggggcaagctcaccgcctgttgacatccaagttggccggctgttgcggcggcataaatcaagcatggccataaccgcggccacaacaattggcgcaacatgcgagtgcaacaaattgcagccgggcacttttaaatggagtaagctggtccaggtccagctcccagctcccagtcccatctgcatggggtttaattagcccaggagctggcgaagctggaggagatgccccaatcgaagtgcatactgggaaaacgatggcatgccgtcgtcgccacacacggagctcgatcgcaccaaaaaagaggtgttaaaatgtgtgcagttctcgcgatcagataaaatgtcaaaatgaacataaaagcttctacatccgaggaatggccaattgctgccagtccgctgacaagcgatctgccatcccattccgcaattctgcgatttcgattgtgattccgatacagagatactgagatccagagatccagagttccagctccgagctacaaattgccagcgagaatttcataaattccgactggaatcaacagtcggtgtcagcggtaatggaccacaccgcgtccattatgcccataaacgttgacacttccgccactggacggaggcatggaggacggagcagctccttctggctcgactttgactttgacgtcgtcgatcaaaaacacacaccgaaatttgtccagccatctctgttcgctgtccataccagctgccccccaaaatgattggagccccagtctctccagatgatcgggctacaaatttcttggtgtttctgtgtcacgcgcggaatgccggcaacagcttcgtttaaattccaattgacgtttaatgatttggcgatcctgcaccaagaaaaattgggtatacaaaagaatgagcaataagaagtatttatttatgttaaaattaattttgattgcctaattgatctttaacttatgaactagtataagttattttaatgtacgtctattattcaagatcagataaaatcataagatttttttttctgtgctctgatgattacttttctgctctcccattttagttctcgcccaaccgcacagtttgagcccctccacgcccatcctcacccaaggagcaccccctgctgcggcgttgggcggcatcttctgcggaggcagtgcagcagcgggaccaggagcagcagcggcggcggccacgaatctcaacgccctggcctcgcagcatcgactactggagttgtcccgcttcggactgcgtggatatgatctggcgcagcatatgctatcccaacaaggagccgtatccaagttgctgggtgagtaagggaaaggggggtggtagttgcgaagggcatttggaaagcaggaagtcagacgtggtctagaccaccctgaccaatgcgatcagcggcattaaccgcagcggaaccacaaaacacgcgccccaaatgcaattgccaagtgtcaccaagcgtcccaatcgatttgcacggctccgttagttggggtcacgtaaacacgacaaatcgattggcaatcgccatcgcccccatctgcacctggacgccctccttgtcctctcacctacctcgcgaggcagtctgcagcagccgcacacctgttgccacctgtggccagaatacccagccatgtcaatctcgatttgcacacatctgcactcgaaacggccaatttgaattgcaagcttagatcttgagccggaaacaaagaattccttagaaacaaataacaataacaatagtattcaaaagtattaaattaaatttgccactctgaaatgagaatatctttatctttaaacgctgttactataatgtctattataatttttatacaataatacaataatatacaataattagtttacaaaccgcaattcaaatgatatagcaactaactagggaagtgctgttttgtcactagctagtttagtagatacgccaaataaatctgcccattcacagatactcactagcgtagctttcaatcgcggcatccgatctctgtggatgccattcattcccattccagtcaattgaaattgtgtaaataatttccgttttgctcaaaaagccagctagaaaacaaatgtgcaagtacatttgtgcccattcattcattaatttaaggcaaccaaatgcgccgagaaaaaaaaaccgactgccaatgcgataaatgcaaagtaaatccaaagaaatgttagttaatcagggtatttacattttaaactatgatttttctttattgctggaaatttgcctgactgaaatgaatgtcttataatgtatatatatttacatttgctatcaagtatctacgagatgcgtcataaattacctggaatcaaagttaatacccgctaattctgcgatctaaagtgattatcactggcattttcttgcagtgtaatccgacgacagagctcaatttacaagataaacgcgcgcgcctgtgaactgcttccgacgaattatcatttgagccgactttgtgactccggtgacttggtgacttggtgactcggctggctgccactgcgacttggagtctggggccgctgagctgatgttgtcaaatattcaaattagcgctacgctgaatggacgccggctgctggcttaattgtctagttagttagtggctcggagcaggcagtcaacaggtagcaggtatctgccattccatctcccatctgctatgtgtggaagtatctggcagatagtagctagtagctagtaactggtgtgtggaagcctccaaaagcgatacaatgcattgcgcccgccgggcttttgacccatccgaaacgcccacacggccacgccaactttgaacaatgtgaaaattatgcgagtcgcacaatactcacaatactcacaatattcgcaatactcaagcccgaaggcacccaagtcagcccaagtggtaatagaatgtaaaacagtcaaattgattgcacaactgggatggggaatgtgtctacttaagtttaaacagccggacacgcccacaaagcgaacagatttcgcggctaccaaaattaatttcgataactatccccacatttttcacaatcaggcctaaatttgttctcaaaacaaatgttgttttcgatgattaaacataaatcaatatcaatttgaataatattaaaatgggtaggaagttactgattttaatctttagaattggaagattagtacttgctaaaactaaaaaccatactaagtagatactttatatttcactagttttcatataacttccccactatttaagatccatatactgtagtacattgttgaaaccccaatttatccatcttgcaggcaccctgcgaccacctggcctaattggcggctccaagccgaaggtggccaccccgactgtcgtctccaagatcgagcagtacaagcgcgagaatccgacgatctttgcatgggaaatccgcgagcgactgatcaccgaaggtaggtgaatggaaaacaaagaccaggaggataccgattgggattatcaagtaggaatattgagtagggagtagtgagtagggagcatcgaatgggtagggacacaatgcgagtagctgggctaattaactgacagggaacccccgaaagcgaaattggccaacaaatgacaacggtcgcgacaggcgactggacttggttccaactcgcttacgcgcttctccagattcttcagcttcccagctccgtcagctcttccctcagattgacaggaggaacttggaaggagcagccatcagcatcgggcatcggcactggattgatgtgtttatggtgctcgtaatgctcgactgcccgtcgagggctcatttaatgttgtaaggaatcggtaggatgtatatatgtatatgtatgtattttgtgtatattgttccactgcggcagatttagatttatcgatcggctaatttatgaacatccgctgcgagtcgtccgattgatatgtaaatgtgctcacatttgtgtcactcatttcgggctccctccgccaaagtttgcgagataatcgcggccagaataggagccagttaagtagtccaatcggcgactcagcaaccagtccatcagttgacagttgcacccgtgggcagtggaaaatggtcaggggtgagcggagagtggacggtgtacagtgaaccggcgacagtggacactgggcacaggaggacagtgtgcaatgaatcgatccgatagcaatctctcgcatgagacgcacgaacacacacatggcgagatggcaatcgctccgctcattacagtcaatctgctcggctcatttcggggtcaccagcaggtcatgatgcacagcatccggtgtaggagacagcgactaaatgggtatacaaatcagtttccttttcttgtgaatatccattgaaattaactgattttatgcgttgagatttaggaattatttcagcagctaatctgttgcagacatgtacttaattcacatgctcactataataatgtacattttataggtattgtagctatttaggggtaaaatcagaaaaactccttaaaagtgagaaaatcttggcaagcaagtaagtccagagatatcagcaagagaaggtattcaggtattagaatatacccaatagtatttttgaaaatcatttcaaattaatcatgcattccatatccccaaggtgtctgcaccaatgccactgctccttcggtgagcagcatcaatcgcatattgcgtaatcgagcggcggaaagggcagctgcggaatttgctcgggcggcgagttacggctatgccatccatcccacacatccgcatccgtacaccagtttccccacttggccggcgcatcatccgctgtggggagccgtgcccctggccacgccacctggtggcggccctgctggagccggtggtgcactgcagccgggcggcagtggcagcagctatggcagtgatggcaacatgagctcaaatcccaatagcagcaacagcaacaccacccacagcaatggccacaataccaacagcggcagtggatgcggggatagtagtgccggaagtggacgcctctccctgccggcactttcgccggattccggaagtagggacagccgctccccagacgcagatgccaatcggatgataggtgagtcaacttaagcacttataacagcctgatttcttgaatcaattaacatatataccattgcagatatcgaaggcgaggacagcgagtcgcaggacagtgaccagccgaagttccggcgcaatcgcaccaccttcagtccggagcagctggatgagctggagaaggagttcgacaagtcgcactatccctgcgtgaatacccgcgagaaactggccgcccggacggcactgagcgaggccagggtgcaggtgagtcgatagaacctacattattattggcataccagcaacaagatcccaactcgaacacccccctactaaccacacagacggagctagcagttagcagctccggtgatgaacacacagtgaatcccacgtctctttttttatcgactaacaaattgtctcttcaccgattgatcaaccaggtttggttttccaacagacgagcgaaatggcggcgccaccagcgggtcaacttgatcaagcagcgcgactcgccctcgacatcgagctcacccacgccgttggtcaatccggtggtcagtccggtcagtccaatcccagttccagttccagttgcagttccagaatctggccaacagaagcagccatatccgtacagcaccagcaacatgtgcaacaccagcagcagcagcagcaacagtcaaccgtgcaacaccatcaatcccggcagcaaaatgagcagcaaaaccagcagcgtcagcagcaaccagcacatggaagagccagcagcggcggtggccactgcctcacccacagcatcagctccattatcaatgggcggtgagaacagtgcatttcgcgctctgcccatgaccttgccgatgcccatgaccttgcccacggcatcggcggcggccttcgcgctcagcttcgcccgccagtacatagccaagtacatgggcacgcccctcaatctgggacatggttcgtcaccaatccaggcacagtctggacgggatcatcagtcggaggagcgagagtatgaggatgagcaggaggaggaggaggttatcaatgtggagcacgacgccgagtgaccatttcattcctatcgctttaaatcgagaatttagtgcaatttttacataatttattcagtttctatcactgcaaacaaaacttctaaccgcgtgctgagtacaaataaaatcgaaacgataagttctcacgagtttcgtataattggtttgggaattcacaagatgacaccctttgacacacctggcgaaacacgaggggggaacggttttggggggggggggaggcatggagatctcgaaagagtcttttcgaaaataactcaagtggacaaatctgacaattttgtggctaccaaaagcgaagtgaaaagcagacacacagaggcacaggcttcagctccacagtaaccaattcaagtgcctggcgagagatgggtatgagatctggtggggatctgggggggatgtggaggggatccatcgctggagccgggtgattaatgtggctttaattacatgcgctggcgagtagtcgtcgtcgccgtcctcgtttttgtcgtcaatgtgtatgctcggatggatcactataattatatagatggccgaattaaattttaatttaacgcctgtcaaatcagaaaaccactgccataatcgttcgctcaagagatgattcgagttgattcaagttgatccacgggggcagcacccgaaaacagttattcatttcatcgccgatcggtgagaatcaatcgcgctatgcgccaactatttctcctatcccccatccattcaccgatccaccgatccaccgatccatccatccatccattattgattgtccggattgtaatgagccaccgaaggcgtcaattccagcgtcgatctttgatgaaagaatgacgccaggggaatgcgaaacaattaatgcctgaatctccatacctggatggatacctgcggctttcgatgagtcgtcgaaatgaattgtgctccacaagatagcgctacaccggaaaaaattcgattaaatgtccatttgacatgcgctgcttac

SEQ ID NO: 25562 - DNA, 1692 bp, DROSOPHILA
atgccggcaacagcttcgtttaaattccaattgacgtttaatgatttggcgatcctgcaccaagaaaaattggttctcgcccaaccgcacagtttgagcccctccacgcccatcctcacccaaggagcaccccctgctgcggcgttgggcggcatcttctgcggaggcagtgcagcagcgggaccaggagcagcagcggcggcggccacgaatctcaacgccctggcctcgcagcatcgactactggagttgtcccgcttcggactgcgtggatatgatctggcgcagcatatgctatcccaacaaggagccgtatccaagttgctgggcaccctgcgaccacctggcctaattggcggctccaagccgaaggtggccaccccgactgtcgtctccaagatcgagcagtacaagcgcgagaatccgacgatctttgcatgggaaatccgcgagcgactgatcaccgaaggtgtctgcaccaatgccactgctccttcggtgagcagcatcaatcgcatattgcgtaatcgagcggcggaaagggcagctgcggaatttgctcgggcggcgagttacggctatgccatccatcccacacatccgcatccgtacaccagtttccccacttggccggcgcatcatccgctgtggggagccgtgcccctggccacgccacctggtggcggccctgctggagccggtggtgcactgcagccgggcggcagtggcagcagctatggcagtgatggcaacatgagctcaaatcccaatagcagcaacagcaacaccacccacagcaatggccacaataccaacagcggcagtggatgcggggatagtagtgccggaagtggacgcctctccctgccggcactttcgccggattccggaagtagggacgacagtgaccagccgaagttccggcgcaatcgcaccaccttcagtccggagcagctggatgagctggagaaggagttcgacaagtcgcactatccctgcgtgaatacccgcgagaaactggccgcccggacggcactgagcgaggccagggtgcaggtttggttttccaacagacgagcgaaatggcggcgccaccagcgggtcaacttgatcaagcagcgcgactcgccctcgacatcgagctcacccacgccgttggtcaatccggtggtcagtccggtcagtccaatcccagttccagttccagttgcagttccagaatctggccaacagaagcagccatatccgtacagcaccagcaacatgtgcaacaccagcagcagcagcagcaacagtcaaccgtgcaacaccatcaatcccggcagcaaaatgagcagcaaaaccagcagcgtcagcagcaaccagcacatggaagagccagcagcggcggtggccactgcctcacccacagcatcagctccattatcaatgggcggtgagaacagtgcatttcgcgctctgcccatgaccttgccgatgcccatgaccttgcccacggcatcggcggcggccttcgcgctcagcttcgcccgccagtacatagccaagtacatgggcacgcccctcaatctgggacatggttcgtcaccaatccaggcacagtctggacgggatcatcagtcggaggagcgagagtatgaggatgagcaggaggaggaggaggttatcaatgtggagcacgacgccgagtga

SEQ ID NO: 25563 - protein, 563 aa, DROSOPHILA
MPATASFKFQLTFNDLAILHQEKLVLAQPHSLSPSTPILTQGAPPAAALGGIFCGGSAAAGPGAAAAAATNLNALASQHRLLELSRFGLRGYDLAQHMLSQQGAVSKLLGTLRPPGLIGGSKPKVATPTVVSKIEQYKRENPTIFAWEIRERLITEGVCTNATAPSVSSINRILRNRAAERAAAEFARAASYGYAIHPTHPHPYTSFPTWPAHHPLWGAVPLATPPGGGPAGAGGALQPGGSGSSYGSDGNMSSNPNSSNSNTTHSNGHNTNSGSGCGDSSAGSGRLSLPALSPDSGSRDDSDQPKFRRNRTTFSPEQLDELEKEFDKSHYPCVNTREKLAARTALSEARVQVWFSNRRAKWRRHQRVNLIKQRDSPSTSSSPTPLVNPVVSPVSPIPVPVPVAVPESGQQKQPYPYSTSNMCNTSSSSSNSQPCNTINPGSKMSSKTSSVSSNQHMEEPAAAVATASPTASAPLSMGGENSAFRALPMTLPMPMTLPTASAAAFALSFARQYIAKYMGTPLNLGHGSSPIQAQSGRDHQSEEREYEDEQEEEEVINVEHDAE

SEQ ID NO: 25564 - DNA, 4787 bp, DROSOPHILA
cgatatcttgacattcattcatatgtacgttcggatagatggatggaaatggccagatcgactcggttattgatgctaatagcgaatatatatactttttagggtcggaaaagtttacttttccctataatatatattttttaggaaatcaatcactctacttggccagatcgacttggctattaatcctgatcaaaaatatatatttatatatttgattatatggtcggaaacgcttccgtctgcctgttgcatacttttcaacgacttcagaataatttagcaatgatttatactttcacctctctttttcctatcaacgtttggtatgcgatcctattagattttggattacctttcagttagttagcgattttaagttcttcgccttcacacgtccccctgtgcttcgtcactacgccgattgccgaccacagtgatttgctagggaaaagtatagcattaacttttttttaatttaaatgtgtgagttatttttatttgcagttgtataaaaatattttgcctattaatagaaatgatattccaagagttgtataagttaaatttctcaaaaataattataaaacatcaaattatgttatacaaaaattttgttggtttttaaaatacttaaataatgtaaaacgtgaataaatgtcttttttatatgtaatcaagtaattttaattttcaattacataatgtgcacagcaaattgattaattagcgaaatctttcgcggataaggcaatatttatgaacaactttaggtaagtcgcaattggtgacaatacttcgttatctcctagatatttgacgccttgtgacagatttcagtgaggagctccaacacaataattttagttgggactagtaaatgattaattcaactagaaatatctataaatttaagtatgcctttgtggggtacacgtgtgttagttaaaaatatatgtataaatagaaagcatgagttgctattcgcagtgagcattatttaacttccgttgctaacgctaggattagcacaactatcgccaattattcccggcacgtccgggtcggcatcaacatttatgggattcaatttggccgctgcggtcatagcctcgcgacgctgacgtttcatctctagaagcagttttctctgggcctccctctttaaagctgctgccgagttaggtgggggaggtgccgagccattcacacgaacgctggatgcctttccgactgttttcacttgcgaaacaccgacttttgacggctttattgtcttagttggtatggtgtgcaaatcgggttggtcagcgacggactgtgcttttaccttccagtcgttacttttgagtttctctatatcagcaaaaatagaatccacgtgctccacctgcaaataaaccatatcccagaatccttgtaaatcatccagagttgttggaaacttatcctctggtgagcgattcagattattgtggcaaagacctaaaatattaatgttagtaacaagtgatttaatgctttgcaatacgcgtaccctcgaattgtttcattttctgcgataccaagagacgggccttacccgacgctgatcgcagtagcccaaaggtatcttcggagatatctggatttgtctgtagagttcagtgtcgaaaataataataaaaacaattgagattttaatcactatttagatcacttacagacaaggcgtctgcatatttttcagcaagagcggctagcaccaagagacggctttgttcctcttttagtattttcagaaagaaatttccatccttaacaacagcttcaacagaaatattggaagtgctgatgtattcctctgaggctagtttgtccatttttgtggattcgtggtctacttcatctgtgggaccatggtctggacttgactcgttatctacaagcagtacatcaggagccatgcaagatcgaggagcacccctttttggtgacacagtaggcaactgggcgcggaactcttgactaaggtgcctaaacacgggcaggtcaagatctccgttaagccctggagaatgcaacggctcgtctatcctcgccgttgtactctgagaacacttcttctgcattttttttcgaaactccccatagtctttactgggggagagctgcttgaatttccgagccagttcggagccttgtagagagtcgatctccacctgccccctttccgatcgccctgcagcattcgatggtgactggccgtgctttttggggctgtagaaaccctgggctaatgcacccggcccgtaaagtcgctccacccgttgcttgataaaactgccatttccattgctgtgaccagaacccgaactaaaattcccgctactgtcgttgctgttgttgttaggctcgatgggtttgcacttggtggccggagaaggcatgctgtgcagagttggtgtcgctagaaagtggttgcgtttgcagtactgtagactgctggtggagggacgaatcggggaaacctcacgtgacttgtttatgtcctgccgaatcttggagtcgtaggtggtaaggttggaataaccgttgacgcagcaagccaggtttaaatagctgggcttcttttcgggagcttcttgtgaattttctgcagaagtctcgtcaaaatcattggagctcggctcttggtcgcactccacaattgcaggtgacagcaccatgtgctccagctctgacgacctggattcaacgtaggcaggggttttgtgctgaggctggggaggcaagttaggcacacagcgctcccgaaggttggcagtaaattcgcgtgttatgtcccttactgagaccggcgttggaaagttcaggctcccactggtatctgcaattcggggaaatcaacccgatgtaatccacagatgggttgcaaggcgattgaagttggttatatgtatatccacataaatatccatataaatatttacctgatatatcggaggagtcggcgtctacatccagtgaacagctgccaatagagtccagactgcgatccatgaaaactgagcctgttgtataaaaagcattgggcttagttattcatgcaatttacaattcttaaccgtaattagccgttagtggttgacctccaaaaggaataaacacgaataaactgataacgcccacgtctgacttggttttaatgtggaaattgagcattcagagaatcgaaagagcctgacaggtaatttttatttatcttattcggaacccaaaacataatgattcagatctcctctatctctccaatcagatccatatattttgaaacaccagtcaaattcaataatataagcagcgcactacgccttctaagttaagcctgtgaatgtgtaagtgtaagcttagcagatgggaacagctttaacggcactttgaaagttccgctttgctggcttttctttgatgcttcgcccagttcccgtactttttccctcccatggccccgtgtagaattcattatggcaccaacaaacgacacacaactatttataattcggtgagatgaaaaacatgatgatgtcggtggcgttcgaagtttaaagaacacaactcctttgggtaataacacacacacgcacttcgatctattttggtctcataacacaacgtgaagactgcgcagcttgagcgtatagaaatccaagctaatacgtgccaagtgaagccttcaataatccaatttacttattcctgaaaaccaataaaaactgatcggtgaacagcggttgtgttgccatgacctggacattaaaaacgccatttcgccgaccgcttcgcattttaagattaaatagtgcatggtatttttaggacaagtgttaaggtaacggcgataagattctgttaaaagtgaaactgtgaaaatgtaacacaggggtgcttgaaaactatctatatgctttgacaagacagtccgtcagttcgtttcaatgcttattaatcgcaattttaaagcaatttgcatcaagctttcatgtaagccaaaccgagccggtccgatattatatccatggaaaaaataagatgaagaaaatgtaaatttgttgttcgtgatcatgatgtgacaaatatcggacatgcattcggcatacgtaatatttttttcgaattcgatttaggcaaaatttttggatttcgttaaaaaaaaggatttaaatttgcaatttatttttttgaagccacgagaaggcagaaattgttatttacattcaacagtaaacaactgatttagctgttttccagacgatagcgctgcaatctttttcacagtcttaattgcggttcttccgaattactagttctctttgaccatttgcgtaaatatattaaataacattatttaaaatcaactcttttggccatcctttaaattaaataaagaactcttttatatttgataagtatttatacctgcttatacctgattttaaaattgtttaaaagtgtgggcgtgaccgttttgcgcgtttcgtaggcgaaaagatggcgtggccagttttttggtatataaataaaaaatgaaaaaacaaaaaataaaacgaagaaaaatctaaactttttttgtgggcgtggcagttttgggaggctatgggcgttagagtggacgtgccaaaaagtttttgggaaatcgataaaaagttacatgactaatagttacgaaaaaatatccaaaagtttttcaaaaatgtggtcgtcgcagttttgggcggttttgcggcgttagagtttgcgtggcaaac

SEQ ID NO: 25565 - DNA, 1411 bp, DROSOPHILA
tcatggcaacacaaccgctgttcaccgatcagtttttattggttttcaggaataagtaaattggattattgaaggcttcacttggcacgtattagcttggatttctatacgctcaagctgcgcagtcttcacgttgtgttatgagaccaaaatagatcgaagctcagttttcatggatcgcagtctggactctattggcagctgttcactggatgtagacgccgactcctccgatatatcagataccagtgggagcctgaactttccaacgccggtctcagtaagggacataacacgcgaatttactgccaaccttcgggagcgctgtgtgcctaacttgcctccccagcctcagcacaaaacccctgcctacgttgaatccaggtcgtcagagctggagcacatggtgctgtcacctgcaattgtggagtgcgaccaagagccgagctccaatgattttgacgagacttctgcagaaaattcacaagaagctcccgaaaagaagcccagctatttaaacctggcttgctgcgtcaacggttattccaaccttaccacctacgactccaagattcggcaggacataaacaagtcacgtgaggtttccccgattcgtccctccaccagcagtctacagtactgcaaacgcaaccactttctagcgacaccaactctgcacagcatgccttctccggccaccaacacttccaatatttctgttgaagctgttgttaaggatggaaatttctttctgaaaatactaaaagaggaacaaagccgtctcttggtgctagccgctcttgctgaaaaatatgcagacgccttgtctacaaatccagatatctccgaagatacctttgggctactgcgatcagcgtcgggtaaggcccgtctcttggtatcgcagaaaatgaaacaattcgagggtctttgccacaataatctgaatcgctcaccagaggataagtttccaacaactctggatgatttacaaggattctgggatatggtttatttgcaggtggagcacgtggattctatttttgctgatatagagaaactcaaaagtaacgactggaaggtaaaagcacagtccgtcgctgaccaacccgatttgcacaccataccaactaagacaataaagccgtcaaaagtcggtgtttcgcaagtgaaaacagtcggaaaggcatccagcgttcgtgtgaatggctcggcacctcccccacctaactcggcagcagctttaaagagggaggcccagagaaaactgcttctagagatgaaacgtcagcgtcgcgaggctatgaccgcagcggccaaattgaatcccataaatgttgatgccgacccggacgtgccgggaataattggcgatagttgtgctaatcctagcgttagcaacggaagttaa

SEQ ID NO: 25566 - protein, 412 aa, DROSOPHILA
MDRSLDSIGSCSLDVDADSSDISDTSGSLNFPTPVSVRDITREFTANLRERCVPNLPPQPQHKTPAYVESRSSELEHMVLSPAIVECDQEPSSNDFDETSAENSQEAPEKKPSYLNLACCVNGYSNLTTYDSKIRQDINKSREVSPIRPSTSSLQYCKRNHFLATPTLHSMPSPATNTSNISVEAVVKDGNFFLKILKEEQSRLLVLAALAEKYADALSTNPDISEDTFGLLRSASGKARLLVSQKMKQFEGLCHNNLNRSPEDKFPTTLDDLQGFWDMVYLQVEHVDSIFADIEKLKSNDWKVKAQSVADQPDLHTIPTKTIKPSKVGVSQVKTVGKASSVRVNGSAPPPPNSAAALKREAQRKLLLEMKRQRREAMTAAAKLNPINVDADPDVPGIIGDSCANPSVSNGS

SEQ ID NO: 25567 - DNA, 2970 bp, DROSOPHILA
tccatgccaggcctggatgcacatgggccggatggggatcaggtatatatcgagagcgtcgagagttcggtttgcgttttgcccaccaagacgaaacccaaaaaggtcgccttttacggcagcaatggtcagcgctacactttcctgttcaagggcatggaggatctccatctggacgaacgcatcatgcagttcctgtccatctcgaatgccattatggcctgccgcagcgacgcacccggcaatggctgctatcgtgcccaccactattcggttataccattgggaccgcaatccggactgattagctgggtggacggggtcacaccagtctttgcgctctacaagaagtggcaacagagacggtcccaagttgctgggaatgcgggagcaggtgctgtggcaaatgtcccgcgacgtttcacagacttgttctacaacaaactctcgcccctgttggccaagcacaatatgcaggtgagcgatccacgacgccaatggccaatatccgtcctgctccaggtgctcgacgaattgtcacaggaaacacccaatgatctgcttgcccgcgaactgtggtgccaggcgggaaatgccgccgagtggcggcaatcggtgcgtcgctttgtccgctgcatgtcggtcatgtcgatgattggctatgtcattggcctgggcgatcgtcatttggacaacgtgcttatcaacctgggaagcggcgacatcgtgcatatcgactacaacgtgtgcttcgagaagggccgcaccctgcgcatccccgagaaggtgcccttccgtcttacccagaatctagtgcaggccatgggcatcacaggaatcgaggtaagactattgctcatcctataccaatcaattatctcaacaaatcgctgctgggggtgtttaagaaacggtgctcctaaagataatgtccacttttattgctatatctccatttaattctaccaagttaaagcgttgggtttcccaattccgttgatcactgagtggccttcggtttgatctcctgagatgaggatgtggcctccatgcggtgcttgctgtccgccggcaattgatcctcgcactgcctcgccgttcggcagcataatgtttggacaaaggctcgccgaaagccagagttcttccacgagtagataatcggattgagagcagagttggcaatggccagagagaacgtcgtcttgtagatcatcgagctgctctggcagatgctaaatagctgggcaatggccacacagaagtacggtagccaacagagcgtgaagcagcccatgatgaagaccacaatctggacgctcttccagtctggatggagcagcagatttcgcatggtggtggcctcgtccgtgttgtagaccaccgactgtcgcaatcgcagcgcctgcttggatgcctcgcgcatgatgcgccagtagacgaggaacatacagatccagatgatcacaaaacccggcgttatcactccggcaatgtaaccaggcgcgagaacttcgtcgaattcgcacgcctgtgcatccggccatcgattccagaacactggcagcagagccaccaatgcacccaagcaccaattgaatatgatgatgctatatgccactcgacgggtcatgtatctacggtttcaaagggtttcacatatgtagccattgaattaggatttatcgcgttcgcttaataccttaccttctatagtgcagagcatagacgactgctatataccgatccaccgcaatcgagatcagagtcaacatggacacgcagcaggcgcagatgagcaggaagaagcgcagcaggcagggacctctcatggcgccaatgtccgagcccatgtaaaataccagatgatagggcagtgccagtcccacacagaagtcggagacggccagcgacaggatgaacagattggagatgaccgatcgcaggtggcggcaggtgcgcaccgccacaatggtcagaatattgccgcccaggataaggacaaacaagaaggcattgatggctagccacagcagatggccggcaccgaaactggtcgcctggagggttatttccgttggcgtttccgtggcgttctggtgctgccacaggaacgggacgacacccaacgcttccggggagcttcgataatcccaagcgggcgatgagctgctggtaaatgccatgagccacgatggtaaacgaagcgcacgcgacgccagtggttggctatctggcaaccgtgggagctggagttgtgctgacttttggccaggacttcggctcggctcggatcggattcagattcaattgggtttcggctcggaccgtgggcgtcgtttgtttacgtttcgctggtggctttacgacatcgtcatcgcgccagttaactgatagcgcgcccagatccaccgtgagaactgcaatccgttgataagccctccactttggcccaaccaccattcaccaccctcatacctaaccactcacccacccatcgagtcaatccaaccactccaaccagccaaactatccattgcccccgagtatttcgagtgtccggactcccgggcccaatgcatggccaaacagatcgctgggggttttagcagattagcccagctccgcggaccaaaatagattgataaaaggccagggccagcaactgggatacgtggtaaacagatacatcattgatattcccaaatttcctcgatacattgcaagcgaagaaactatatgtaaatagtgatatcatcataattgttataaatccgagaccaacagtacaaccagtactattaggattgacatggttatccactcttggttcttttagaattagaaatcaggagaatatatagtatatataggtacaactctctgatctaatcccatatttgaattatctttaagatgagatattaaagatttcatggatcagaacagaccaggagtttgctaaggatg

SEQ ID NO: 25568 - DNA, 1116 bp, DROSOPHILA
atggcatttaccagcagctcatcgcccgcttgggattatcgaagctccccggaagcgttgggtgtcgtcccgttcctgtggcagcaccagaacgccacggaaacgccaacggaaataaccctccaggcgaccagtttcggtgccggccatctgctgtggctagccatcaatgccttcttgtttgtccttatcctgggcggcaatattctgaccattgtggcggtgcgcacctgccgccacctgcgatcggtcatctccaatctgttcatcctgtcgctggccgtctccgacttctgtgtgggactggcactgccctatcatctggtattttacatgggctcggacattggcgccatgagaggtccctgcctgctgcgcttcttcctgctcatctgcgcctgctgcgtgtccatgttgactctgatctcgattgcggtggatcggtatatagcagtcgtctatgctctgcactatagaagatacatgacccgtcgagtggcatatagcatcatcatattcaattggtgcttgggtgcattggtggctctgctgccagtgttctggaatcgatggccggatgcacaggcgtgcgaattcgacgaagttctcgcgcctggttacattgccggagtgataacgccgggttttgtgatcatctggatctgtatgttcctcgtctactggcgcatcatgcgcgaggcatccaagcaggcgctgcgattgcgacagtcggtggtctacaacacggacgaggccaccaccatgcgaaatctgctgctccatccagactggaagagcgtccagattgtggtcttcatcatgggctgcttcacgctctgttggctaccgtacttctgtgtggccattgcccagctatttagcatctgccagagcagctcgatgatctacaagacgacgttctctctggccattgccaactctgctctcaatccgattatctactcgtggaagaactctggctttcggcgagcctttgtccaaacattatgctgccgaacggcgaggcagtgcgaggatcaattgccggcggacagcaagcaccgcatggaggccacatcctcatctcaggagatcaaaccgaaggccactcagtga

SEQ ID NO: 25569 - protein, 371 aa, DROSOPHILA
MAFTSSSSPAWDYRSSPEALGVVPFLWQHQNATETPTEITLQATSFGAGHLLWLAINAFLFVLILGGNILTIVAVRTCRHLRSVISNLFILSLAVSDFCVGLALPYHLVFYMGSDIGAMRGPCLLRFFLLICACCVSMLTLISIAVDRYIAVVYALHYRRYMTRRVAYSIIIFNWCLGALVALLPVFWNRWPDAQACEFDEVLAPGYIAGVITPGFVIIWICMFLVYWRIMREASKQALRLRQSVVYNTDEATTMRNLLLHPDWKSVQIVVFIMGCFTLCWLPYFCVAIAQLFSICQSSSMIYKTTFSLAIANSALNPIIYSWKNSGFRRAFVQTLCCRTARQCEDQLPADSKHRMEATSSSQEIKPKATQ

SEQ ID NO: 25570 - DNA, 12059 bp, DROSOPHILA
attgaagtgagacttttgtttatatgtgaacgttcgttctcaagtttataatttcggttactcgttcttgaacttatgtgtttgcttttaagttttttttttttttatcgttcgttcctaatttaatatcgaaacttaatttttctctcagtgtcttaataaaaattattattatttattgtatttgggcgacttcttaaattctgcacatgccggtgttttatgttattaaggtttaagttgaagtctagacaaaatgattcaataaaacaaagtacaaatagtaagtacatacttttatatctttttatctttagcatatcatttaaggtttttttgaaccagactggtattcaacataaagccattatcttcaaaaaatataaccgaaatctaatctgggttatctccggcgaatttagcaccgagagctaatcatgttgctcacactcagtacctttaagatcttttctacgcgcggacgtattgctgtttagttgaatttctggcattgcaatttaataaattagttcgttggaaagcatgttatacgttgaaaagtgcaagtgacttcaagcctagaaggtataaatatttttgatcattcgatccgactatgtctgtccatataagcgtcgagatctcggaaacctacgtcaacaaattacaaaaagctttagattcttggtaacgacttctttgcagaagaccaaaaatgctggtcattatattatagtagaagttcaagattttaaagtgccagtgacgttgaaggcgtgtggaataaattttacctgagtagcaggtatctgatagtcgggtagctcgacaatcgtattctgtcccattttagacaagctgtttaatggctaattacttattgattagaaaatcattaattcaaatttatttcttgctgtctggattgtttcacttgcataatatttgttatgtagcgaaacataacgtagtaatcgtaataaaatgcagtcctttaagaatgaagatctcccggagaatcctcgagaacgatcgaatattttttctgcgttatccttttggtaagatagtgcaaacgtgcgacgccaacatatttttcaagtgtgaacaattttttcaaataattcaggtataccattcccacttttattaaggggcaaaaggtcacattgggtgcaaaggacctttacagggccttgaaagagcatagggccggtaagtgtttttggtgtatatataataatattttcatatatacatcctcatatctctattttgtgcaaagagtcgctcggcaacaaattatgctcttcctgggcgaatgaactggagaccaacaagaagaacgccagtttgctcagagtactctttcgtgtttttggtcggtacttcgtcttcctcggattggttctcttctgcctggaggttatactcacggtgcagcccatgtttctcatgaagcttatatccagcttttccaatcctagcccaacatccaatggagtggcatatgcctacgcgggcggagtgattttaggctctgcactcaaagtgatccttatgaacccgtactcattcgccgtgactcacctgggtgtgttccttacttattgatgttgctcaaagcgttttgtaaattagttttctaatccgtaaactgcaggccttaagattcgagtgggtgtgagcagcatgatctaccggaaatgccttcgattgaccaaaacagacctgggcgaaatatctaccggacatataatcaatttaatttccaatgaccttggcagaatggacacctttattcagtttacccactatctttggttggccccactgcaagcgctaatggtaacctatttgatgtaccaagaggtggggtccgagaaattcatatgggatatgtaaaaaccttagtttgtttaatagattggaatcgctgccgtgtttggcatgacctttatactgctcttcataccccttcaaatgtatttgggcaaaaagatctctgggctgcgactgaagacagctatccggtcggacaaacggatgcggataatgaccgagatcatcgctggcattcaggtgattaaaatgtacgcttgggagctgccgtttgagaaaatggtggcccatgcccgccacaaggagatcaactccatccggcacgtggcctatgcgaaatgcctcatttggtccttcaacagattcctgactccagtatccatattcctgagtttggtaggatttgtgctaatgggcaggttccttacagcggaagtggcctttctcatcacagcctattacaatgttgtacgcaccaacatgacagcatatttttcagtgggtgtgacgcaaactgcagaaaccctcgtgtccattaagcgggttcagaagcttttgctatccggcgaggtagtggcgaaggatgaaaatgtagtttccaacggggctgaggaagatcttcaggaggccagggaaaaactcttagtgactcccacaccaatgcgtgctcccgagaagcctccacacaattcggaagattgcgtatccataagtgaactaaaagccaagtggaccacgaactcgcccgattacacgctaagtggggtaaatctgcaggtccacgctggtgcattggtcgccattgtgggtcacaccggctccggaaaatccagtctgatacaagccattttgggtgaactgcgtgtcgagtcgggagagatcgaggttactggatcgatgtcatatgcctcgcaagagccgtggcttttctccggcaccgtgcgtcagaatattctttttggtcagccaatggatcgtcggcgatacgatttagtggtgaggaaatgcgcgttggaacgagattttgagctacttcccttgaaggataaaaccatattgggagatcgcggagcatcgctctcgggtggccaaaaggcgagaatcagcttggcaagatctgtttatcgggatgcgtccatctatctgctggatgatcctctgagtgccgtagactccagcgtggcccgtcgactcttcgaagagtgcttgcgtggccatctgcgagataagattgtcatcctggtcacccatcagttgcagttcctgcagcaggccgaccagattgtgatcatggaaatgggcaaggtaaaggctgtgggaacgtatgagtcgcttcacaaatcgggtttagactttggcatcgtgctggatgatcctgtcaatgacaatgaggcggcggaggaccgatcaagaacctccagtatcacggaccaacggcgcagcagtgtgaaatctgtactctcccatgcggaatcctgtccagaggatgtaggggaggaacaaaagattaacctacagcggcagcaactgggtcgcaacggcttaggagtgtacgtcgattattttagggcaggaggcggattcctctccttttctgtggtaatgacctttttcgtgtgctcccagggcctagcctctcttggagattactttctgtccccatggtaaggtgtcgtttactttgtcactttcgaaatcatttaaaattcgtaatccctatgcttttagggtctcaagaaatgagaaaatggtagctcataactacacaacagatgctaaggatgcggacttcgaaatgcacgctgcgtacatatatatgttgattacagtgctatccattatggtgaccataaaacgatcctttctgttcttcaacttggcaatgagggcctctatccagttgcataactcaatgtttcgagggatctccagagcttccatgtactttttcaacaagaaccctgcgggaagtatccttaatcggttctctaaggacatgggtcaagtggatgagatgctgcccaccataataatgaccgtcatccaagactttctcctgtttggcggcaatattattgtcatagccattgtcaatcccctctttctcataccagcactggcttttggaatagttatatactacctgcgttccttttatctcaaaacttcgctggatgtaaaacgcttggaggccagtagtaagtgcctaatgaccaactaattaccacttggctaaaactttcttaacttttgacagctcgatctccggtttactcacatttcgctgcttctcttaatggcctttccaccattcgtgcatttggggccggaagcattctggaggcggaattcgatggctaccaagatatgcacagttccgcctcctacatgttcattagcacctcgcgagccttcgcctattggatggatatattctgtgtgctctttatagcgatgatcacgctgtccttcttcatctttccaccatctagtgcagccgatgttggcctggctataacacaggtatacgaccggaagcacattcacatatgtctgatttttaatataatttccatttattcaaggccatgggcttgacgggcacggttcagtggactgtccgccagtcggcagagttggaaaacacaatgatttccgtggagcggatgattgaatacgaggaaatagagccagagggaccactggaagccacggctgacaaaaaaccacatgaatcttggccagagcaaggaaaaatagaatttgtagagctgagtctgcgttacgagccgtatctgaaatcggaaagcgttctaaagtccctcagttttgtaataaagcccaaggaaaaggttggcatcgtgggacgaaccggagccggcaaatcctcgctgattaacgctctattccgcctgtcctacaacgatggatctgtgcgcatagacgataaggataccaatgatatgggtctacatgacctgcgcagcaagatctcaatcataccccaggaaccagttctgttctccggcacagtgcgacacaacttggatcccttcgacgagtatagcgatgacaggctgtggtgcgcgctggaggaggtggaactcaaggatgtggtggccagtgtggccactggcctggagaccaaaatcacagagggtggctccaactttagcgtgggccagcgccaattggtgtgcctggcacgagctattctgcgcgacaacagaatacttgtgatggacgaggcgacggccaatgtggatccccagacggacgctctgatccaagccacaattcgaaacaagttcagggagtgcaccgtccttaccgtggcccatagattgcacaccatcatggactcggaccgtgtactggtgatggatgctggaagagttgtggaattcgggacgccctatgagcttttaactgccgatgatactaatgccttccaagacctggtcaagcagacgggtcaggcaacatacgacactctcctgaagatttctcaacgggtaagagtaggcatctgtaaacgaattcatacatatatttataaaatttccttttttaggaattcgaaaaatctgaaaaaccgagccttatgcttccctcttgacgagccgaaatcgctaatgaataattaatatctccccaatattactccattgaagctttcacactttcagttcggaaattgattttttgcacattaaatatatataaaaaccctattgttttgatcatagctgcaatattggaatacgttatagaaattatatttattagatgtgtacatgagtacgtgttatcacagctgacaggcgcgataaggacaagagtagtacttgtagacttaatgaggttttcctcatttagtgatatgatgaataagatatctatggaatttccatttgtggtggggcaagcttagaaagccaatcatttaaattgaaaataatttattgcactaaacttcaagagaataggtaaaaatgtattgctgatacacctggaaggtgcaaccgttgtcaatataatattaataaaatttctagatagtagaatgtgatatctaaattgaagtcgatacataaaaagataaataaacaaagtaattacactttattacatgactaatgacatatcggtccgaactccaccctaatgtttcaaaaaggtgcctaaaattaaattttttttaatttagcaaacatgaattacattagtataaataatatgtaatactatatttttatttaaaatataatacattttcaacacaataaatacaatagcataggacagtgtaaaaagggctacgataggatgggaaataaattagaaagccgttatcttatctttgagtggtccactctaatgctctgaaggctgaagtgaccatgtaagtaaacatacatacctgtgtgtgtgtatctaaatcggcgcgcttttgcacacacacacgcacggcccttgcgtcagccggtcgaacagctgattcggcgctcaacgggcattcgatttggcatcgaagcgcttgccattcgctaccattgaacagaatgattggaaaagcggggcgtcgtggacggctcaagtgatttgttgtgttttgcgattcgtccgaatggaaagttttccgttgtcagttgttatcatattgcgaaattgagattcagcatctgtcgatagttgatgaaattcgcgtcttatgttgctgcctacatacagtgcacgcttatgagtgatgaattgctgataaataagaactgaattccgcgtcttttgtttatgagaacttgtgaaattgcctgcacatttacataaccatgcaggccagtaaacttccacccaatccccgcgagtcggcaggtatcctatcctcgctcatgttctggtacgctcacgtttcatcctaccgctaagaagtgtttcctttgagcacatgcgtacatacatatgtactcacctatgaatgttcttttcaactgccgctgagaagtgacatccgaagacaaccgttatcggataccacatattgttcgtagcataattcaaagctagccacagttgcgaaaacaatttacacaattactttcctattccagctttgccctgcccattctgttcaagggtcgcaaacagacgcttcagcccacggatctgtacaaaacgctgaatgagcatgaagcagcgagcctgggcgatgagttcttccagggatgggaggacgaggtggctcggtgccgccgaaaaggtgattccggccgtaaaccaagtgtcctgcgggtcatcggacgcgtcttcggctggaggctcattatgtccggtataacaattgccgccttggaactgggaaccaggtaagagtcgtggactttatcagtcaatgtgtcacttataatttattcggattaatttgatttatttcagggccactgtgccgcttcttctggccggactcatatcggagttcagcgagcatggaaacggccatagctacaatgcccaaatttacgctgtgctccttatagcctgtatcttggccagcgttcttctaacccacccatacatgatgggaatgatggtaagttcagtaacttaatactgaagtcaacttgaatgtaattgtgttctctctaaattcttgcagcacttggccatgaaaatgcgggtggcagtaagtagcgctatataccgaaaagccctgcggctcagtcgcacttcgctgggaggcaccacaaccggacaggtggttaacttgctctccaacgatcttaaccgcttcgatcgatgtcttatccattttcactttctgtggctggggccattggagctgctgattgcctcctacttcctgtacgaacagattggaatggcttccttctacggaatcagcatcctagtactctatctaccactgcaaacctacttaagccgcgtaacatcaaagctgcggctgcagacggcactcaggacggatcagcgagtacgcatgatgaacgaaatcatctcgggcatccaggttatcaagatgtacacctgggagcgtccatttggtaaacttatagggcagatgcggcgcagcgagatgagctccattcgccagatgaaccttttgcgcggcatcctgctctccttcgagataaccctgggtcgcatagccatctttgtgagccttctgggattcgtcctgggcggaggcgaactgacggcagagcgcgccttctgcgtcaccgccttctacaacatccttaggcgtactgtgagcaagttctttccgagtggaatgtcgcagttcgctgaactgttggtctcaatgcgtcgtataactaattttatgatgcgggaggaggcaaatgtaatagatatgtcggagcgaagggacgaaaaagccgaagaggagcaacatttactgaaagaagtggagaagaggtcttatcccgttggcattggcaaggaaccagataccttagtggaaatcaaagccttgagagcacgctggggccaggagcaacacgatcttgtcttaaacaacgtcaatatgtcgctgcggcgcggccaattggtagctgtgattggacccgtgggatcgggcaaatcaagcctcattcaggctattctaggagagctgccgcctgaatctggatcggtacaagtctcgggaaagtattcctacgcctcccaggagccctggcttttcaatgcatctgttcgcgacaacattctatttggcttgcccatggacaagcagcgctatcgaactgtgctcaagcggtgtgccctggagcgggatttggagttgttgcacggtgatgggacaatcgtgggcgagcgcggagcttcactgtccggtggacagcgagcgagaatatgtttggccagagctgtttaccgcagggcggatgtataccttttggacgatcctctcagcgcagtggacactcatgtgggtaggcacctgttcgatgaatgcatgcgcggcttcctgggcaaacagctggtgatacttgtcacccatcagctgcagtttctggaggacgccgatctaattgttatcatggacaagggtcacgtctcggcgtgcgggacttacgaggagatgctcaagagcgggcaggactttgcccagctcttggtggaaagtacccagaacagcgggggaggggatgagatcataacgtcgccgaacctttcccgccagagtagcgctttaagcactaaaagttccaatggaagctcatcctcgctagaatccatggtggaaaaggagaaaccaaagcccagtgcggtgtcgtcgcaggagtcgcgcagtggtggtcaaattggcttgtccatgtacaagaaatactttggcgcaggctgcggcgtcctggtttttgttgtcctgataatgctgtgtattggcactcagattctggcgtctggcggggactattttctttcctactggtaagtgtttgaaaaatctgaaaatatttatatttctaaatggaactcttttttaatagggttaagaacacagcttcttcatcaacgctggatatctactacttcactgccattaatgtgggcctggtcatttgtgctttgctccgaactctgcttttcttcaacatcaccatgcactcctccactgagctgcacaacaccatgttccagggcttatcacgcacggctttgtacttttttcacaccaatccctccggtcggatcctcaatcgattcgccaatgacctgggtcaggtggatgaggtgatgcccgccgttatgttggattgtatacagatcttcctcaccctgacgggcatcatctgcgtgctgtgcgtgaccaacccgtggtacttgatcaacacctttgcaatgatgttagcattttactattggcgcgatttttacctgaagacgtcgagagatgtgaagcgcttggaggccgtggctcggtcgccgatgtactcgcacttcagtgccactcttgttggacttcccacaatccgggcgatgggcgcccagcaaactctgatcggccagtatgacaactaccaggatctgcacagctccggctactacacctttgtttctaccagtcgtgccttcggctattacctagatcttttctgtgtggcgtacgtgatatcggtgatactgcacaacttcttcaatcctcctctgcacaatgctggccagataggtctggcaattacccaagcactgggtatgacaggaatggtgcagtggggcatgcgtcagtctgcggagctggagaacgcaatgacctcagtggagcgagtcttagaatacaaagatctggatcctgaaggggattttaattcgcctgcggaaaagcaacctccgaagagttggcccaaagaaggaaaattggtgaccaaggacttgagcctgagatatgagcccgataccaattcgccttgtgtgctgaagggactgagcttcacgattcagcccatggagaaagtgggcatcgtaggacgcacaggtgcgggaaagtcgtcccttatcaatgcacttttcagactatcctacaacgatggagcaatactcatcgacagtctggacacaaatgatatcggtctgcacgatttacgtagcaagatatccattattccacaggaacccgttctgttctccggcacaatgcgatacaacttggatcccttcgagcaatatcccgatgataagctttggaaggccctcgaggacgtccacctcaaggaggaaatttcggagttgccttcgggtctgcagagcatcatatctgagggcgggaccaactttagcgtaggccaacgccagttagtctgcttggcaagggccattctgcgcgagaatagaatcctagttatggacgaggcaacggcaaatgtggatcctcagacggacgccctgattcaggccaccattcgaaacaaattcaaggactgcacagtactcacgatagctcatcgtctaaacaccattatggactccgacaaagttttggtgatggatgctggtcacgtcgtcgagttcggttctccatatgagctgttgaccgcgtcaaaggctaaagtgttccatggaatggttatgcagacgggaaaggccagctttgatcatctactgaaagttgcagagaatgtaagtactaaagtcgaaaatttcattaataaactaacttttccttctattttagaccaaacaaaaccatatttgaagctaacatttttatcatattaatgtgtttgtctacgtaatgtatattgggcccaattgtaatggaaagggaatttcgtggtcatagattcagttttatagaatacaaaacgtttgtacttaagggagtaaagcaaaatgacaatgttttcttttaaataaaatgctacttaaacaacaagaatcacgtgccaaatcttttgatgataatcccaacattgctttcactgaatttaccaaaacaatagtgtttttattttaaactttatctctgctcatacaaaactttattgtgtcgtcttgttcgattaaaaataaatgtttaggccgtctccagcgagcggatgatgtccgaatctccaggatcggtgatggacagggtgcacacgcggaagtatttaccacaggcggtgcccagctcgatgttggtgccgctgtagtgctggacttcagtcttggccagcatagcgtagtactcgatctcggacttcctgcaatgtgaagagcacatgttagtaccgatataaaggcgcttggaacagatgagccattggttcgagcgtcagaaagagtctctagtataaaaaggattcgtcaaggcattcggaatcaataggatcatcattatgggcagtagactacagctaggtgtttatatgccggcttcttaccccaagtgatgtgcatgcccgttgttggaggaaccatttggaagcgccgtagactaaagcgaaccagtcccgaagcttgagattgattgattgcactgctccactactcggaatcatacttctcagtcagctttaagggcagactccatatggttccatcaaaaacgtggtcacttgggcacagtggaaacctactgcttagcagcagacgcatgggcatctcacctcagggcgggcgtgttgctggcgatgagcaccagtttggccttgccctggcgcagggtcttcaaggtctgcttgtagcccaggcagtatttgccggacttcatc

SEQ ID NO: 25571 - DNA, 7743 bp, DROSOPHILA
atgaagatctcccggagaatcctcgagaacgatcgaatattttttctgcgttatccttttgagtcgctcggcaacaaattatgctcttcctgggcgaatgaactggagaccaacaagaagaacgccagtttgctcagagtactctttcgtgtttttggtcggtacttcgtcttcctcggattggttctcttctgcctggaggttatactcacggtgcagcccatgtttctcatgaagcttatatccagcttttccaatcctagcccaacatccaatggagtggcatatgcctacgcgggcggagtgattttaggctctgcactcaaagtgatccttatgaacccgtactcattcgccgtgactcacctgggccttaagattcgagtgggtgtgagcagcatgatctaccggaaatgccttcgattgaccaaaacagacctgggcgaaatatctaccggacatataatcaatttaatttccaatgaccttggcagaatggacacctttattcagtttacccactatctttggttggccccactgcaagcgctaatggtaacctatttgatgtaccaagagattggaatcgctgccgtgtttggcatgacctttatactgctcttcataccccttcaaatgtatttgggcaaaaagatctctgggctgcgactgaagacagctatccggtcggacaaacggatgcggataatgaccgagatcatcgctggcattcaggtgattaaaatgtacgcttgggagctgccgtttgagaaaatggtggcccatgcccgccacaaggagatcaactccatccggcacgtggcctatgcgaaatgcctcatttggtccttcaacagattcctgactccagtatccatattcctgagtttggtaggatttgtgctaatgggcaggttccttacagcggaagtggcctttctcatcacagcctattacaatgttgtacgcaccaacatgacagcatatttttcagtgggtgtgacgcaaactgcagaaaccctcgtgtccattaagcgggttcagaagcttttgctatccggcgaggtagtggcgaaggatgaaaatgtagtttccaacggggctgaggaagatcttcaggaggccagggaaaaactcttagtgactcccacaccaatgcgtgctcccgagaagcctccacacaattcggaagattgcgtatccataagtgaactaaaagccaagtggaccacgaactcgcccgattacacgctaagtggggtaaatctgcaggtccacgctggtgcattggtcgccattgtgggtcacaccggctccggaaaatccagtctgatacaagccattttgggtgaactgcgtgtcgagtcgggagagatcgaggttactggatcgatgtcatatgcctcgcaagagccgtggcttttctccggcaccgtgcgtcagaatattctttttggtcagccaatggatcgtcggcgatacgatttagtggtgaggaaatgcgcgttggaacgagattttgagctacttcccttgaaggataaaaccatattgggagatcgcggagcatcgctctcgggtggccaaaaggcgagaatcagcttggcaagatctgtttatcgggatgcgtccatctatctgctggatgatcctctgagtgccgtagactccagcgtggcccgtcgactcttcgaagagtgcttgcgtggccatctgcgagataagattgtcatcctggtcacccatcagttgcagttcctgcagcaggccgaccagattgtgatcatggaaatgggcaaggtaaaggctgtgggaacgtatgagtcgcttcacaaatcgggtttagactttggcatcgtgctggatgatcctgtcaatgacaatgaggcggcggaggaccgatcaagaacctccagtatcacggaccaacggcgcagcagtgtgaaatctgtactctcccatgcggaatcctgtccagaggatgtaggggaggaacaaaagattaacctacagcggcagcaactgggtcgcaacggcttaggagtgtacgtcgattattttagggcaggaggcggattcctctccttttctgtggtaatgacctttttcgtgtgctcccagggcctagcctctcttggagattactttctgtccccatgggtctcaagaaatgagaaaatggtagctcataactacacaacagatgctaaggatgcggacttcgaaatgcacgctgcgtacatatatatgttgattacagtgctatccattatggtgaccataaaacgatcctttctgttcttcaacttggcaatgagggcctctatccagttgcataactcaatgtttcgagggatctccagagcttccatgtactttttcaacaagaaccctgcgggaagtatccttaatcggttctctaaggacatgggtcaagtggatgagatgctgcccaccataataatgaccgtcatccaagactttctcctgtttggcggcaatattattgtcatagccattgtcaatcccctctttctcataccagcactggcttttggaatagttatatactacctgcgttccttttatctcaaaacttcgctggatgtaaaacgcttggaggccagtactcgatctccggtttactcacatttcgctgcttctcttaatggcctttccaccattcgtgcatttggggccggaagcattctggaggcggaattcgatggctaccaagatatgcacagttccgcctcctacatgttcattagcacctcgcgagccttcgcctattggatggatatattctgtgtgctctttatagcgatgatcacgctgtccttcttcatctttccaccatctagtgcagccgatgttggcctggctataacacaggccatgggcttgacgggcacggttcagtggactgtccgccagtcggcagagttggaaaacacaatgatttccgtggagcggatgattgaatacgaggaaatagagccagagggaccactggaagccacggctgacaaaaaaccacatgaatcttggccagagcaaggaaaaatagaatttgtagagctgagtctgcgttacgagccgtatctgaaatcggaaagcgttctaaagtccctcagttttgtaataaagcccaaggaaaaggttggcatcgtgggacgaaccggagccggcaaatcctcgctgattaacgctctattccgcctgtcctacaacgatggatctgtgcgcatagacgataaggataccaatgatatgggtctacatgacctgcgcagcaagatctcaatcataccccaggaaccagttctgttctccggcacagtgcgacacaacttggatcccttcgacgagtatagcgatgacaggctgtggtgcgcgctggaggaggtggaactcaaggatgtggtggccagtgtggccactggcctggagaccaaaatcacagagggtggctccaactttagcgtgggccagcgccaattggtgtgcctggcacgagctattctgcgcgacaacagaatacttgtgatggacgaggcgacggccaatgtggatccccagacggacgctctgatccaagccacaattcgaaacaagttcagggagtgcaccgtccttaccgtggcccatagattgcacaccatcatggactcggaccgtgtactggtgatggatgctggaagagttgtggaattcgggacgccctatgagcttttaactgccgatgatactaatgccttccaagacctggtcaagcagacgggtcaggcaacatacgacactctcctgaagatttctcaacgggccagtaaacttccacccaatccccgcgagtcggcaggtatcctatcctcgctcatgttctgctttgccctgcccattctgttcaagggtcgcaaacagacgcttcagcccacggatctgtacaaaacgctgaatgagcatgaagcagcgagcctgggcgatgagttcttccagggatgggaggacgaggtggctcggtgccgccgaaaaggtgattccggccgtaaaccaagtgtcctgcgggtcatcggacgcgtcttcggctggaggctcattatgtccggtataacaattgccgccttggaactgggaaccagggccactgtgccgcttcttctggccggactcatatcggagttcagcgagcatggaaacggccatagctacaatgcccaaatttacgctgtgctccttatagcctgtatcttggccagcgttcttctaacccacccatacatgatgggaatgatgcacttggccatgaaaatgcgggtggcagtaagtagcgctatataccgaaaagccctgcggctcagtcgcacttcgctgggaggcaccacaaccggacaggtggttaacttgctctccaacgatcttaaccgcttcgatcgatgtcttatccattttcactttctgtggctggggccattggagctgctgattgcctcctacttcctgtacgaacagattggaatggcttccttctacggaatcagcatcctagtactctatctaccactgcaaacctacttaagccgcgtaacatcaaagctgcggctgcagacggcactcaggacggatcagcgagtacgcatgatgaacgaaatcatctcgggcatccaggttatcaagatgtacacctgggagcgtccatttggtaaacttatagggcagatgcggcgcagcgagatgagctccattcgccagatgaaccttttgcgcggcatcctgctctccttcgagataaccctgggtcgcatagccatctttgtgagccttctgggattcgtcctgggcggaggcgaactgacggcagagcgcgccttctgcgtcaccgccttctacaacatccttaggcgtactgtgagcaagttctttccgagtggaatgtcgcagttcgctgaactgttggtctcaatgcgtcgtataactaattttatgatgcgggaggaggcaaatgtaatagatatgtcggagcgaagggacgaaaaagccgaagaggagcaacatttactgaaagaagtggagaagaggtcttatcccgttggcattggcaaggaaccagataccttagtggaaatcaaagccttgagagcacgctggggccaggagcaacacgatcttgtcttaaacaacgtcaatatgtcgctgcggcgcggccaattggtagctgtgattggacccgtgggatcgggcaaatcaagcctcattcaggctattctaggagagctgccgcctgaatctggatcggtacaagtctcgggaaagtattcctacgcctcccaggagccctggcttttcaatgcatctgttcgcgacaacattctatttggcttgcccatggacaagcagcgctatcgaactgtgctcaagcggtgtgccctggagcgggatttggagttgttgcacggtgatgggacaatcgtgggcgagcgcggagcttcactgtccggtggacagcgagcgagaatatgtttggccagagctgtttaccgcagggcggatgtataccttttggacgatcctctcagcgcagtggacactcatgtgggtaggcacctgttcgatgaatgcatgcgcggcttcctgggcaaacagctggtgatacttgtcacccatcagctgcagtttctggaggacgccgatctaattgttatcatggacaagggtcacgtctcggcgtgcgggacttacgaggagatgctcaagagcgggcaggactttgcccagctcttggtggaaagtacccagaacagcgggggaggggatgagatcataacgtcgccgaacctttcccgccagagtagcgctttaagcactaaaagttccaatggaagctcatcctcgctagaatccatggtggaaaaggagaaaccaaagcccagtgcggtgtcgtcgcaggagtcgcgcagtggtggtcaaattggcttgtccatgtacaagaaatactttggcgcaggctgcggcgtcctggtttttgttgtcctgataatgctgtgtattggcactcagattctggcgtctggcggggactattttctttcctactgggttaagaacacagcttcttcatcaacgctggatatctactacttcactgccattaatgtgggcctggtcatttgtgctttgctccgaactctgcttttcttcaacatcaccatgcactcctccactgagctgcacaacaccatgttccagggcttatcacgcacggctttgtacttttttcacaccaatccctccggtcggatcctcaatcgattcgccaatgacctgggtcaggtggatgaggtgatgcccgccgttatgttggattgtatacagatcttcctcaccctgacgggcatcatctgcgtgctgtgcgtgaccaacccgtggtacttgatcaacacctttgcaatgatgttagcattttactattggcgcgatttttacctgaagacgtcgagagatgtgaagcgcttggaggccgtggctcggtcgccgatgtactcgcacttcagtgccactcttgttggacttcccacaatccgggcgatgggcgcccagcaaactctgatcggccagtatgacaactaccaggatctgcacagctccggctactacacctttgtttctaccagtcgtgccttcggctattacctagatcttttctgtgtggcgtacgtgatatcggtgatactgcacaacttcttcaatcctcctctgcacaatgctggccagataggtctggcaattacccaagcactgggtatgacaggaatggtgcagtggggcatgcgtcagtctgcggagctggagaacgcaatgacctcagtggagcgagtcttagaatacaaagatctggatcctgaaggggattttaattcgcctgcggaaaagcaacctccgaagagttggcccaaagaaggaaaattggtgaccaaggacttgagcctgagatatgagcccgataccaattcgccttgtgtgctgaagggactgagcttcacgattcagcccatggagaaagtgggcatcgtaggacgcacaggtgcgggaaagtcgtcccttatcaatgcacttttcagactatcctacaacgatggagcaatactcatcgacagtctggacacaaatgatatcggtctgcacgatttacgtagcaagatatccattattccacaggaacccgttctgttctccggcacaatgcgatacaacttggatcccttcgagcaatatcccgatgataagctttggaaggccctcgaggacgtccacctcaaggaggaaatttcggagttgccttcgggtctgcagagcatcatatctgagggcgggaccaactttagcgtaggccaacgccagttagtctgcttggcaagggccattctgcgcgagaatagaatcctagttatggacgaggcaacggcaaatgtggatcctcagacggacgccctgattcaggccaccattcgaaacaaattcaaggactgcacagtactcacgatagctcatcgtctaaacaccattatggactccgacaaagttttggtgatggatgctggtcacgtcgtcgagttcggttctccatatgagctgttgaccgcgtcaaaggctaaagtgttccatggaatggttatgcagacgggaaaggccagctttgatcatctactgaaagttgcagagaataccaaacaaaaccatatttga

SEQ ID NO: 25572 - protein, 2580 aa, DROSOPHILA
MKISRRILENDRIFFLRYPFESLGNKLCSSWANELETNKKNASLLRVLFRVFGRYFVFLGLVLFCLEVILTVQPMFLMKLISSFSNPSPTSNGVAYAYAGGVILGSALKVILMNPYSFAVTHLGLKIRVGVSSMIYRKCLRLTKTDLGEISTGHIINLISNDLGRMDTFIQFTHYLWLAPLQALMVTYLMYQEIGIAAVFGMTFILLFIPLQMYLGKKISGLRLKTAIRSDKRMRIMTEIIAGIQVIKMYAWELPFEKMVAHARHKEINSIRHVAYAKCLIWSFNRFLTPVSIFLSLVGFVLMGRFLTAEVAFLITAYYNVVRTNMTAYFSVGVTQTAETLVSIKRVQKLLLSGEVVAKDENVVSNGAEEDLQEAREKLLVTPTPMRAPEKPPHNSEDCVSISELKAKWTTNSPDYTLSGVNLQVHAGALVAIVGHTGSGKSSLIQAILGELRVESGEIEVTGSMSYASQEPWLFSGTVRQNILFGQPMDRRRYDLVVRKCALERDFELLPLKDKTILGDRGASLSGGQKARISLARSVYRDASIYLLDDPLSAVDSSVARRLFEECLRGHLRDKIVILVTHQLQFLQQADQIVIMEMGKVKAVGTYESLHKSGLDFGIVLDDPVNDNEAAEDRSRTSSITDQRRSSVKSVLSHAESCPEDVGEEQKINLQRQQLGRNGLGVYVDYFRAGGGFLSFSVVMTFFVCSQGLASLGDYFLSPWVSRNEKMVAHNYTTDAKDADFEMHAAYIYMLITVLSIMVTIKRSFLFFNLAMRASIQLHNSMFRGISRASMYFFNKNPAGSILNRFSKDMGQVDEMLPTIIMTVIQDFLLFGGNIIVIAIVNPLFLIPALAFGIVIYYLRSFYLKTSLDVKRLEASTRSPVYSHFAASLNGLSTIRAFGAGSILEAEFDGYQDMHSSASYMFISTSRAFAYWMDIFCVLFIAMITLSFFIFPPSSAADVGLAITQAMGLTGTVQWTVRQSAELENTMISVERMIEYEEIEPEGPLEATADKKPHESWPEQGKIEFVELSLRYEPYLKSESVLKSLSFVIKPKEKVGIVGRTGAGKSSLINALFRLSYNDGSVRIDDKDTNDMGLHDLRSKISIIPQEPVLFSGTVRHNLDPFDEYSDDRLWCALEEVELKDVVASVATGLETKITEGGSNFSVGQRQLVCLARAILRDNRILVMDEATANVDPQTDALIQATIRNKFRECTVLTVAHRLHTIMDSDRVLVMDAGRVVEFGTPYELLTADDTNAFQDLVKQTGQATYDTLLKISQRASKLPPNPRESAGILSSLMFCFALPILFKGRKQTLQPTDLYKTLNEHEAASLGDEFFQGWEDEVARCRRKGDSGRKPSVLRVIGRVFGWRLIMSGITIAALELGTRATVPLLLAGLISEFSEHGNGHSYNAQIYAVLLIACILASVLLTHPYMMGMMHLAMKMRVAVSSAIYRKALRLSRTSLGGTTTGQVVNLLSNDLNRFDRCLIHFHFLWLGPLELLIASYFLYEQIGMASFYGISILVLYLPLQTYLSRVTSKLRLQTALRTDQRVRMMNEIISGIQVIKMYTWERPFGKLIGQMRRSEMSSIRQMNLLRGILLSFEITLGRIAIFVSLLGFVLGGGELTAERAFCVTAFYNILRRTVSKFFPSGMSQFAELLVSMRRITNFMMREEANVIDMSERRDEKAEEEQHLLKEVEKRSYPVGIGKEPDTLVEIKALRARWGQEQHDLVLNNVNMSLRRGQLVAVIGPVGSGKSSLIQAILGELPPESGSVQVSGKYSYASQEPWLFNASVRDNILFGLPMDKQRYRTVLKRCALERDLELLHGDGTIVGERGASLSGGQRARICLARAVYRRADVYLLDDPLSAVDTHVGRHLFDECMRGFLGKQLVILVTHQLQFLEDADLIVIMDKGHVSACGTYEEMLKSGQDFAQLLVESTQNSGGGDEIITSPNLSRQSSALSTKSSNGSSSSLESMVEKEKPKPSAVSSQESRSGGQIGLSMYKKYFGAGCGVLVFVVLIMLCIGTQILASGGDYFLSYWVKNTASSSTLDIYYFTAINVGLVICALLRTLLFFNITMHSSTELHNTMFQGLSRTALYFFHTNPSGRILNRFANDLGQVDEVMPAVMLDCIQIFLTLTGIICVLCVTNPWYLINTFAMMLAFYYWRDFYLKTSRDVKRLEAVARSPMYSHFSATLVGLPTIRAMGAQQTLIGQYDNYQDLHSSGYYTFVSTSRAFGYYLDLFCVAYVISVILHNFFNPPLHNAGQIGLAITQALGMTGMVQWGMRQSAELENAMTSVERVLEYKDLDPEGDFNSPAEKQPPKSWPKEGKLVTKDLSLRYEPDTNSPCVLKGLSFTIQPMEKVGIVGRTGAGKSSLINALFRLSYNDGAILIDSLDTNDIGLHDLRSKISIIPQEPVLFSGTMRYNLDPFEQYPDDKLWKALEDVHLKEEISELPSGLQSIISEGGTNFSVGQRQLVCLARAILRENRILVMDEATANVDPQTDALIQATIRNKFKDCTVLTIAHRLNTIMDSDKVLVMDAGHVVEFGSPYELLTASKAKVFHGMVMQTGKASFDHLLKVAENTKQNHI

SEQ ID NO: 25573 - DNA, 4750 bp, DROSOPHILA
aggcttggggtaactccaaagtttttgtggttacgacatcggttttcgggggcggtgcgagcgaggatgcttgagacaagccttggaactgggtggttcttggaggagtgaggcgaactgtcagtctcgagtcggtctcgagctgtggcccgacaacttagtctaatgagaattcaaattcgaaacccaactacgcaatcgtgctgaagaaattaaaagaaattgcacatgatgtgtatgtggttgttcctatttattgaaccgtatgatatatatgttcaaacatgaaagcctgtaggtaagaaatcaaatatttgtttcactttctggcaataaactacagaatattggttcaaactcaagctgaagacttgaaaacaaaacagtacaaggccagctgcagcttttacggtcgaaaagggtcttatgttaattaacttatttataaataaagaaagtacattttgctctaaagatgaaggagatcgggcacaggttaccaaataactttcgaaaaataagacaactttaaatttggtcatatttagaaaacggttccacacgaaactcttgtttccaaaaatttcacaatttattttctggatccaactacccctataccccagagatcgagtaaattaatgttaattaagacttagagtccattcacgtttaaagtgaaaaagaaggaagcctcaatctcgatggccatccacacggaacacagcttcatttgtgctgccattaccagttccaatccccaatctcagaaccccaacgccacggccccaccttaggagtgtccttcaaccacaaaacccaaagagtgcggaggaaaaatgcttgtgtgccggacgcccaacgtcttgggcgaaatgtttcattagagccgtgttggccgcaaaggggcaggacaggattcaaacccgacccaggcccgccaagccgactaatttccagtgcaggagaaggcggacagtgaaaaaaggcagccccaagaatggactgccacaaaaaaaaaaggagcagattgagggtgaactggacctgccctgaagatgaaagtcggtaaaactttcccctagaagcccggtctggggttttgggacgctttctttgacgtttcgttcttttttgcattctttaaaatggtcgaacgaacttccaactggttctacttctaatcattgggatttggcatatcgaactgagtcctgaaagtttgtgcggtctctaataagttcgctcacagatttcttggaaaatctgcaaaattgaaagcaggcggtagtgaaaatgtactatcgagaatgtacttttgtttaaccaaaaaacgtatttgaatatttgccaaacgattgctgaaaattttatttaaaaattttgttgcatactataaccaaatctttaaggcaagattttaacgagtttaaattatggttatacaaatgaacaatatagaaatgtttaataaattgttgtatcaattggagattatatgctcatctagaatttttccacatttctacctttcaggaaaccattccggcaacaccggtcgtgagcaccgacacagccagcgtggttggtgtgggcgttggaggtggaggaggggcggcagctggcgcaggaggcggagcaggtggcgctggcggactcctgggcgatgtggtcagtggactgggcggcggcctcgtcaacgagtccgaggcctacgccggcctgatgaaggacgcggataagctgaagctaatgctactagcctggaactaccagaactcgacggcggtgcgaaatggaaccgagggtcccgatctgagtgtggtgggtggtctgtgggcgcagtaccagaacgctctggcccaaaacgcggcagctgcggcggcggccagtggcaagatggacagttcgctgtcgccggtgccgcgacaagatgcccactcgcccatggagacgcaggacgagactaactcctccggccagaaggaggaggacgaggtatccgaggatgactccgatgacaagctggacgagaaactggccaccacacacgatcccgagcggctcaaagccttcaatgtgagtaaagctgtgtgagctgtgagtgagcggcgaatgtaaagccaagcgttgccaaagattcgccagacatctggtcacgtcagccaaacggatttctataacgtccactccttcctttcagatgtttgtgcggctgtttgttgatgagaatctcgatcgcatcattcccatctcgaagcagcccaaggagaagattcaggccattatcgattcatgcgcccggcagttcccggagtttagcgatcgatcccgcaaacgcatccgcacctatctgaaatcgtgtcggcgcaacaagaagacccgcgatggatgggagaatacggtaagttctaacatagaaaaggtcatttaccagtgttcttatagtcatcataattttgatacagaatagaggtcacaaactaaactcaattccaacttttccagactcgacccactcccgctcatctgacatccgtgcaggcggagcaaatcctggccattgcctgcgagaacgaatctatgaacgccaaacgaatgcgcatcggcctggagcccatcacgcacgcagttcccgctcctggaagtgcggtggccgctgctgcagccgcggctgcggccgcagcggtggtcgctgccacaagttccagtgccggcggcaccagcaccacggctgccggcaatgccacagctacctgcggcatgggcggtgtgggggatgccaccggactgaccagcgcggcagccgcagcccttccgttcgtcagcgccgtcggcttcgcccgctccacgcccaattcggagcacgcggatgtcctgcccttcggaggggcgggcactgcaggtggcagcgggggcggtggagccggaggcggaggcgggggtggtatgagctcggcgcgcagctctcccttggccctcagctcgaatgccagcgttagtggtggcgccagcgtcaccggattgaccctcgccaatggagcaggcgcctccaacggagctggtctgccggccagcagtccgtacaccacggactttagctccccctcgacggcctcaccatttgtcgcagcagctgcagccgtggccgccggcagagcccccagctatcccggatacttccccgcagtggctggcctgggaaatggtaagtaaaccatgcgacaaattttcaaatatagttaggcgaaagtgggttgcattacgttctaccatgttttaaaaattatatgcttaatcatagtactgtcttgcttttcagttacgcccaccgatctctcgatgaaaccgaccagcggccttggcggcaacatggtcagcaacaacaacagcaacagttccgtgaccggcaacattaactcgcagctaagcgccgccaatttggccagcctgagcaatgcgagcaacaacaacgcattggtgaccgccacccagcagttgcagcagctgcagcagcaacaacagcagcaacaacagcaacagcaacaacagcagcaacaacaactgctggtggccggcggcggcgggatggacggccaatccgttcgagcgccgcccatcctgccgcacaaactgagcgccaacgaggtgacggccgcccggcaggtgatatccgcttaccgcgagagtgccgccttcctgctccgcaccgccgaccaggtggagcagctgctcgtccagcagcagtaggcgttgcccgtggtggggatggggttgttcctattttaaattaaatttaaaataaattacacacactgcaaacaaaagagacacacacataagccaaactaagcgaaaatagtcaaaccatatagcgcaaaactgagacgactaacactttctcacaggatgcaaggcagaaccatatgtagctaaagaagttcgttcaaacaaaacattttaagtgttttttcctccaactacgtacagcatatttaaaatagaacttaacgataaacaaaaaccaaaagaaatattgcaaatatcacaacagtaaaatagtagagctgcttggtactgagctcaattcgagattttaaccacattcaacttcggtttccatagacattagaagatattcactctagggatggtttcaatacattctattcaactttcttccgaatttccttcaatttccttaaacgaattccttaaatacgacttagattagatgcaattcagataccaaggcggctctaataaaagtaaagccaagcagcagttcaacgtactacagtgtctactaaaagtaaacctacaatagccatacacaaacactcgcattcattttgttcaacttttattaacgcatttttttggactctcaatcctttggatagccgcagattctgggccggtttttaaggtgcgcgatttgttaaaaaatttaaatatgataaataagttaaagtattgttgtaaattttaagaaaacggaaaacagaagaaaaaaacaaaaaaaaatcgtaaaactatgagaaaacacagggtgatactttgagaaattattacaatgcataagataaaaattaattaaagaaaatgtaaaaaaaatttatggaaatgaggtaaggcatagatgttggtaaatgtgtatttaaagtttagaaattacaattacaatttgtatactgttcaggatttattgttctcgattaccatcatctgagtttttatcttatttcat

SEQ ID NO: 25574 - DNA, 1908 bp, DROSOPHILA
atggactgccacaaaaaaaaaaggagcagattgagggaaaccattccggcaacaccggtcgtgagcaccgacacagccagcgtggttggtgtgggcgttggaggtggaggaggggcggcagctggcgcaggaggcggagcaggtggcgctggcggactcctgggcgatgtggtcagtggactgggcggcggcctcgtcaacgagtccgaggcctacgccggcctgatgaaggacgcggataagctgaagctaatgctactagcctggaactaccagaactcgacggcggtgcgaaatggaaccgagggtcccgatctgagtgtggtgggtggtctgtgggcgcagtaccagaacgctctggcccaaaacgcggcagctgcggcggcggccagtggcaagatggacagttcgctgtcgccggtgccgcgacaagatgcccactcgcccatggagacgcaggacgagactaactcctccggccagaaggaggaggacgaggtatccgaggatgactccgatgacaagctggacgagaaactggccaccacacacgatcccgagcggctcaaagccttcaatatgtttgtgcggctgtttgttgatgagaatctcgatcgcatcattcccatctcgaagcagcccaaggagaagattcaggccattatcgattcatgcgcccggcagttcccggagtttagcgatcgatcccgcaaacgcatccgcacctatctgaaatcgtgtcggcgcaacaagaagacccgcgatggatgggagaatacgactcgacccactcccgctcatctgacatccgtgcaggcggagcaaatcctggccattgcctgcgagaacgaatctatgaacgccaaacgaatgcgcatcggcctggagcccatcacgcacgcagttcccgctcctggaagtgcggtggccgctgctgcagccgcggctgcggccgcagcggtggtcgctgccacaagttccagtgccggcggcaccagcaccacggctgccggcaatgccacagctacctgcggcatgggcggtgtgggggatgccaccggactgaccagcgcggcagccgcagcccttccgttcgtcagcgccgtcggcttcgcccgctccacgcccaattcggagcacgcggatgtcctgcccttcggaggggcgggcactgcaggtggcagcgggggcggtggagccggaggcggaggcgggggtggtatgagctcggcgcgcagctctcccttggccctcagctcgaatgccagcgttagtggtggcgccagcgtcaccggattgaccctcgccaatggagcaggcgcctccaacggagctggtctgccggccagcagtccgtacaccacggactttagctccccctcgacggcctcaccatttgtcgcagcagctgcagccgtggccgccggcagagcccccagctatcccggatacttccccgcagtggctggcctgggaaatgttacgcccaccgatctctcgatgaaaccgaccagcggccttggcggcaacatggtcagcaacaacaacagcaacagttccgtgaccggcaacattaactcgcagctaagcgccgccaatttggccagcctgagcaatgcgagcaacaacaacgcattggtgaccgccacccagcagttgcagcagctgcagcagcaacaacagcagcaacaacagcaacagcaacaacagcagcaacaacaactgctggtggccggcggcggcgggatggacggccaatccgttcgagcgccgcccatcctgccgcacaaactgagcgccaacgaggtgacggccgcccggcaggtgatatccgcttaccgcgagagtgccgccttcctgctccgcaccgccgaccaggtggagcagctgctcgtccagcagcagtag

SEQ ID NO: 25575 - protein, 635 aa, DROSOPHILA
MDCHKKKRSRLRETIPATPVVSTDTASVVGVGVGGGGGAAAGAGGGAGGAGGLLGDVVSGLGGGLVNESEAYAGLMKDADKLKLMLLAWNYQNSTAVRNGTEGPDLSVVGGLWAQYQNALAQNAAAAAAASGKMDSSLSPVPRQDAHSPMETQDETNSSGQKEEDEVSEDDSDDKLDEKLATTHDPERLKAFNMFVRLFVDENLDRIIPISKQPKEKIQAIIDSCARQFPEFSDRSRKRIRTYLKSCRRNKKTRDGWENTTRPTPAHLTSVQAEQILAIACENESMNAKRMRIGLEPITHAVPAPGSAVAAAAAAAAAAAVVAATSSSAGGTSTTAAGNATATCGMGGVGDATGLTSAAAAALPFVSAVGFARSTPNSEHADVLPFGGAGTAGGSGGGGAGGGGGGGMSSARSSPLALSSNASVSGGASVTGLTLANGAGASNGAGLPASSPYTTDFSSPSTASPFVAAAAAVAAGRAPSYPGYFPAVAGLGNVTPTDLSMKPTSGLGGNMVSNNNSNSSVTGNINSQLSAANLASLSNASNNNALVTATQQLQQLQQQQQQQQQQQQQQQQQQLLVAGGGGMDGQSVRAPPILPHKLSANEVTAARQVISAYRESAAFLLRTADQVEQLLVQQQ

SEQ ID NO: 25576 - DNA, 3050 bp, DROSOPHILA
ccgtgttgatcagcagcctgggcatggcctccagcaggtacgtctgatcctcctcccacaacaaagtctcatagcagtcgaggcactgcgtcagcaactcctgttgcatggcccccgcctgggcggcaaacaaattggcgccgtaacaatagcgcgtcagcgtaatggccacacccatttggcgacccagcagctccacgggtatttgtccgatcttcagaaaggtgaagccaagaagttcgccgaacaccaaattgaagccttgctcacactgcaggctggagtaggcattatcgaactggcactgcattattcgctgagatccaacgatggggctgaaaatctgcagcagtatgttgctgtccagggagccgccggactggagcaggccctgggtggtggccacactccggatcttctgcgccagcggctcgttaagcttctggtatacaacatcgttggcgctgttaaacacaatcagtccgttcattttcttatcagcattggcaaaacaccaaatacacaacaaaactttcaccagtgtcactggtgctgggtaacggaattcggtgtgtgttctgataagaaaaggtgaagacttcaagtcagcatttaacaacactagagcgattcagctctgagcaattcaacgcttttcaagccagaattatatattaaaagcctagtatacgttcgactttttttatccgaattgccaattgaaattgcttttagttgagttactaagtattgaactgtaataagtttcctgatcaaattaatttataatttataatatatgaattttcaaatttattgcatttttttattattgcaaagcaatatcgctttgcttagatatgaagaacacaattttaaaatttaattttatcccgatttacaaattaagctagatgaacgacttctgccgacgtttgaccacactgacgacagctgactttcttcttcttgcgacatgcgcttatgttatcattatttggacagacagtgatttgtccactaatacagcacttgaccatcaatgggacgtttaattctggaacacacgctgcagggccacaaggggcgcatctggggagtggcatggcatcctaagggcaacgtattcgcctcgtgcggcgaggacaaagccatccgcatttggtcgctgaccgggaacacttggagcacaaagaccatcctatccgatggccacaagcgcactattcgcgagatccgatggtctccatgcggtcagtacttggcctcggccagctttgatgccaccacggcgatctggtcgaaatcctcgggagaattcgaatgcaacgcaacattggagggtcacgaaaacgaggtgaagagcgttagctggtcgcgatccggcggactactggccacctgttcgcgggacaagtccgtgtggatctgggaggttgccggcgatgatgagttcgagtgcgccgccgttttgaacccgcacacacaggacgtgaagagagtggtgtggcatccaaccaaggacattttggcctccgcctcgtacgacaataccataaaaatgttcgcagaggagcccatagacaacgactgggattgcacagccactcttacttcacacacaagcacggtttggggcattgacttcgatgctgatggcgagcgcctggtttcctgtagcgatgacaccacaataaagatttggagggcctaccatcccggaaatacagccggagtggctacgcccgaccagcaaaccgtgtggaagtgcgtgtgcacagtgtccgggcagcactcgcgggctatctacgacgtgtcctggtgcaagcttacaggtctgatagcgactgcctgtggcgacgacggcattcgtatctttaaggagagcagcgactccaagccagacgaacccacgttcgagcagataaccgcggaggaaggcgctcacgatcaggacgtaaactcggtgcagtggaatcctgtggtggccgggcaactgatatcatgcagcgatgatggcaccattaaaatttggaaagtgaccgagtaacataaggattattgtttgatatatttaagtgggtaattctggaacttaatttttgtacagtgtctgcgtaataaaaaattaaagtattcaaatgatggatgaagtgtgtcatacacgattatgggatgcattacacctaatatggattgctatttgctgaggaacggttcctgcaacgttttgtacagcttcttggccttccggggacccagtcccatcacctgggagagtcgctcctcgctggcattgattatgttgcccaggttgccaaaggtgtgcagcaaggcggcagcatcagtcttgttcaccggcttgatgttggtgagagcagcgagtagctatggacattgggatattgcattacagtggcgatactggcaatgtaaacatgcgtaccttctggtgtggattagactccactcgctccatgatcaaatctggcggacgcttctcgaactgtttgtacgtctcaatgattttgcccgcctcctcagcgttccaggccaacatcattgtcaggtcggctaacagtgatatcctggtcaagctcttgagggcattgtttggctctggtgtgtccacctggaccagtagcacccgcagctcatacatcttgcccagagccttcaaacgctggcaaatgtagtcgggattgagattatggtactttagcgagaggtacagcacgcaggatgttcgaccgaccacataatcgggcacgatgtcgtcgcggaattccagcgggacattaagtatggatttcaggatggggttaccgcgctgtttgctgtgaacaaggacgcagtgcggatttgaagccggcttgccgggtgcgggtctgccggatccactaggttccgtactattgctaggagcaggattcactgctgtggccgctggggcatctactttcggttgctttgcagccgttggcatttccatggcgcccagaacatcgttaaaggaatcatcgtcgaagtcttccatttcggtatttaaa

SEQ ID NO: 25577 - DNA, 1050 bp, DROSOPHILA
gacagacagtgatttgtccactaatacagcacttgaccatcaatgggacgtttaattctggaacacacgctgcagggccacaaggggcgcatctggggagtggcatggcatcctaagggcaacgtattcgcctcgtgcggcgaggacaaagccatccgcatttggtcgctgaccgggaacacttggagcacaaagaccatcctatccgatggccacaagcgcactattcgcgagatccgatggtctccatgcggtcagtacttggcctcggccagctttgatgccaccacggcgatctggtcgaaatcctcgggagaattcgaatgcaacgcaacattggagggtcacgaaaacgaggtgaagagcgttagctggtcgcgatccggcggactactggccacctgttcgcgggacaagtccgtgtggatctgggaggttgccggcgatgatgagttcgagtgcgccgccgttttgaacccgcacacacaggacgtgaagagagtggtgtggcatccaaccaaggacattttggcctccgcctcgtacgacaataccataaaaatgttcgcagaggagcccatagacaacgactgggattgcacagccactcttacttcacacacaagcacggtttggggcattgacttcgatgctgatggcgagcgcctggtttcctgtagcgatgacaccacaataaagatttggagggcctaccatcccggaaatacagccggagtggctacgcccgaccagcaaaccgtgtggaagtgcgtgtgcacagtgtccgggcagcactcgcgggctatctacgacgtgtcctggtgcaagcttacaggtctgatagcgactgcctgtggcgacgacggcattcgtatctttaaggagagcagcgactccaagccagacgaacccacgttcgagcagataaccgcggaggaaggcgctcacgatcaggacgtaaactcggtgcagtggaatcctgtggtggccgggcaactgatatcatgcagcgatgatggcaccattaaaatttggaaagtgaccgagtaa

SEQ ID NO: 25578 - protein, 335 aa, DROSOPHILA
MGRLILEHTLQGHKGRIWGVAWHPKGNVFASCGEDKAIRIWSLTGNTWSTKTILSDGHKRTIREIRWSPCGQYLASASFDATTAIWSKSSGEFECNATLEGHENEVKSVSWSRSGGLLATCSRDKSVWIWEVAGDDEFECAAVLNPHTQDVKRVVWHPTKDILASASYDNTIKMFAEEPIDNDWDCTATLTSHTSTVWGIDFDADGERLVSCSDDTTIKIWRAYHPGNTAGVATPDQQTVWKCVCTVSGQHSRAIYDVSWCKLTGLIATACGDDGIRIFKESSDSKPDEPTFEQITAEEGAHDQDVNSVQWNPVVAGQLISCSDDGTIKIWKVTE

SEQ ID NO: 25579 - DNA, 3292 bp, DROSOPHILA
tagttgggaaattccaattgtcacccactcttcgtcttcaaagtccgatgtgggatcgtcatacgctggcttctccacgcttctgggttccatttccagcttcaccgtttcaatcatggtcagtgggtccaccgactttttgctctccatgtccgtttcgtccggttccggtagttcggaacaagtgatagtaacatcattttcgccacagtcctcatcctcagtctccagcttgacttccacatgctgctcagcacacagctccatcggcgcctcctgcagacagtcggttgacgttggagcagcaccgttctttagatgcttcattagaagttcgttggcggccatcgcctgcttcacatagcaataggcacccattaattttttggtgcatccactgcacaagcattgcggaaatttctgactaccagttgcatccagctgaaaggtaaatgtttcattttagtttgcatttttcgtagatttcgcttcttagaactttgtttacattgatttcggttagctcgcataaaatctccgaaagcaacttgtccggatactttttcgagggcgtggccagcttcagaaggttgtcggtgtccgtggagtcgcacgtgcgacaaatcaccggcagcttcatggcgaacaaatttgttttggccaattgaaagcttttttaattttaaatcaacaatcagaaaatcaacattattgatggtatgaccttgatgcgagagatggaaaataccgttcggtcattaaaaaaataccacgttgttaaaaaatacagcaattaattgggtgcgttcagcagagtccgctaattattttcaaagggaaatattacacaaatatttttaaaataaactgaagaaattgttaaattatgaaaaatataaatcaatatccaccagacaaacaattaatacaaatattacagaaccattagaaactgtgattaaaaaatcacgacttaaaatttactgctgacggtgaccaattgttgaatgtgaaatcaatagtgcacttttattacaataaatctacaatagagcgacgataatttgttatttaatctaaattggagcttaaattagtttgtggcgtgtgcacgtttagcatacgcgaaatccggcaaaccgaaacagagcctcgacccgattagatccaatcctctagtatttcttgatcgttttccgtatgagggcaaggcgctgtttgtgcgcctccgtgacagctgcccgcttgtagggacgcagttcgtccgtaccgaagccgggtatccacatgttgtacttccgctcaaagtgcagctgcacgtcgcgcacctcgatcttgttagactttcggtgcttggcgaaggcgctcgtcgacttgacggtgtcctcgacaaagtcgtcgatgatctgaagcagaagctcctcaacatcctcgtccagctgcgtggtggtatccacctctcggacgagctctgtgagacgcggtttggtaagcatctgtaattcggaagagagttaaactagaccctggcgtattccgtgtgcactccataaggcacgcatcttacgggagtgttctcggaaccggcggcggatgatgtgtgattggatgacttgctaccaccagatatggggcccgttcccgtacccaaaccggaaaccggtccgccgttctgcgaggatgagttgctgttgttggtcatcggactgtgctgggagggcgaggccatgggtgggtcgtggagcagtccgctggcggacgatgtggagttgtggttgtggtgcaggtggtgctcggcgacgccgttgctatcgaaagtggtaaagagatccgacattgcttttgggtttcttcagagtcaaatcaagtgggtggtaggtcggttggttggaagtgtttggggaaagtacagtaagttgggcggatttttggggagtgggtaagagtgcagaaccaaagccaaaagcgttagtgtacttgttgttgttgctgcttatgttgtgtgtcctcctgctttctcaactgcagtcggtgattgtgtgtgcgtgggtgtttggttgcaaagcgaaatgtaagtaaaagaatagagtggtcaatttcacgcgtgcggtcttaagaatccgtcgctttgtgtgtttactaaaactaaagtgttacttagcagttgctcttagcgcatgcaacacttacaattattgcggttttaacactttgatcttaaactattactttcctaaattactaaacaaaataaaaataagcggagcaactacagccaaatcaacagtatggccagttgcaggcgactctgaaatgcccgctggtgctataaagcaatttggtatatttacgtttaatttcagtatattttagttagacagccacactggcgtggagttcaaaacaaaacaaagacggcgtattttgcaaatatcacgtagataaggaatatattttactttgtaattgggaacaatagctgcgcaaaagaaacatgtcagcgagcgaagaaacaatagcggacagtcaggtctccgagaatgtggaggatgtggaattcgtagacatggcgttcacaaaggagttgcgtaaagccacaaaagatgtgcataatcttactgatgttctagtgaatgcaaagatcgcacttggttcgttaattacacgatattattagaagttattagatattcctcttcttccatagccctttctgatgacgaggtctggtatgatggactcctggccttctacgaactgtacaaattctttgagacccatctgccggagcgcctgctgcccaaagaattccacagaacagcggcatttgaaagggattttgcctatttctacggttccgattggaggaaggactacgaaattcgcccggcggtccagaaatatctcgagcatctggaaaagattgccgcacagaacgaactcttgctgttcgcctactcctatcagatgtacatggctttgatgtccggcggacaaatgttgcagaagaagcgtatgatcgctcgtaaaatgtggatcttttcaaagaacgatgacgaggagcagcagaagcaggccgacaaggaggcagagttggccaccgccagagctgccgatggctctgtagacaaagacgacttggaggccaggccaatgcctgcccaggttaccatttgcccgccgggatgtgaggccacatattttcctgagaaggtgcgtagctttttactttgttccttatatctattgtctttatatccactttcagatctctgtcttaaaggccaaacta

SEQ ID NO: 25580 - DNA, 1053 bp, DROSOPHILA
ccatactgttgatttggctgtagttgctccgcttatttttattttgtttagtaatttaggaaagtaatagtttaagatcaaagtgttaaaaccgcaataattttgagaaagcaggaggacacacaacataagcagcaacaacaacaagtacactaacgcttttggctttggttctgcactcttacccactccccaaaaatccgcccaacttactgtactttccccaaacacttccaaccaaccgacctaccacccacttgatttgactctgaagaaacccaaaagcaatgtcggatctctttaccactttcgatagcaacggcgtcgccgagcaccacctgcaccacaaccacaactccacatcgtccgccagcggactgctccacgacccacccatggcctcgccctcccagcacagtccgatgaccaacaacagcaactcatcctcgcagaacggcggaccggtttccggtttgggtacgggaacgggccccatatctggtggtagcaagtcatccaatcacacatcatccgccgccggttccgagaacactcccatgcttaccaaaccgcgtctcacagagctcgtccgagaggtggataccaccacgcagctggacgaggatgttgaggagcttctgcttcagatcatcgacgactttgtcgaggacaccgtcaagtcgacgagcgccttcgccaagcaccgaaagtctaacaagatcgaggtgcgcgacgtgcagctgcactttgagcggaagtacaacatgtggatacccggcttcggtacggacgaactgcgtccctacaagcgggcagctgtcacggaggcgcacaaacagcgccttgccctcatacggaaaacgatcaagaaatactagaggattggatctaatcgggtcgaggctctgtttcggtttgccggatttcgcgtatgctaaacgtgcacacgccacaaactaatttaagctccaatttagattaaataacaaattatcgtcgctctattgtagatttattgtaataaaagtgcactattgatttcacattcaacaa

SEQ ID NO: 25581 - protein, 196 aa, DROSOPHILA; identical to SEQ ID NO: 14943

SEQ ID NO: 25582 - DNA, 2255 bp, DROSOPHILA
acggtcggacgccagcccaaaaacactctaaggacacgctagacatcccagccatgtctcaggtgcgccaatccctgcagatccccctgatagtcaacggcaatgtggagagctatagggatgcttgcgatatgcatgaacagacgggagcagctggtgtaatggctgctcgaggcttgcttgctaatccggctctcttcaatagcaactatccagatggtaaaacaacgccactgtcctgtgtacaacagtggctagatatagcctctgctgccggggataacctgcttttccagtgctttcaccaccacctcacctttatgtatagcgctcaaatgaagcgagatcttcgagtgcaattcaacagtttgggttccaaagaacaggtcgtggacttcctgaaggagcactacaatctggaatatagtgaggttgaccctccatcggctgactacacggattgcacgtacacccacttcacaccgcccaagcacgcccggcacatcgccgccgagtcggatgagcaggcctggagttcgaaaagcgacggaaaattctttacggtattcagagcacaccagttgaccggaactggcggagaagatttggaactgggaggactctttggtgacgaggagtaaattgttttgtaaatagatctttagtttggtggggtatagattttgtacaagacaaataggttgatatctaatatatgtaaacattgtatagtgaagaaaaaatcggcgacaaagttttgtatattttatttcccaaaaaaaataatacttaggtacataaattatttcaaagataaaattattttaatttaaaaaaatcccctcatgttaataatggtaaagtggtactaatgttatcgatatgttgactaacgtatgtcacccctggcgagctactgcatccgataacttatatgcttaatcgatatcgagatatacagattgtatacttcctccccaaaagaaaacatcccggaaaaatgcgacgccgcgaactgcagaccatccagctgaagctgtccgatctcaaggagtacgagcaggctaagatggagcgcctgaggaaccgccaacaattgcttactccccggacgcctacacccccttccgacagcgaagtcctgccggcgacctccagcagcgttccagctgttctcctggccagcggcaagaacctggacgatgacgccgacaagtcagagcccacaaccaagcccagcacatcctccacctagggtctatacttgagcaagcaatgtaagttttcacatacaaatgtatattatcgtttacatgggataatcgtccgcctggctgttgttgttgttttgaaatcgaactgtctcaaaaccgtcgacaaggatttcgcgatcctcggtttgttgtcggtcccgaagccactgctcccgcactggcacatatcgccggagtcccggcaactttctccaacatcgccgcttgtaaagaacccaaaccagcgatacactgcacccaaacaggaagcagatcaggaatatgctaatgccgcggccgtgtgacgctgtggctggcaagtctgtgatttctggcgaaagatccttggcctccctgctgtgaaacgcctgtaggcggtcctcgtcgctgcacaggctgattggcatgtagggcgtcatcacatcgccggccagggagtggacccgcacagcgcactcggtgaaagtgatgtttatctgcttcacgtacatgtagccggcactctggtgatccatccgcgttacacacccgacgtgggtttgcgagaagttgttgcgaaagtggattacgtagttggtcaccaggccattgggcttcttaggctcctcgaagcgcataatgtacttgtccatttccggaatatggcaggcatacagttgggtgagaagatcggcacccattgtatagttcgttcgtccgtagagcgttgtgtggctgctgcatcccagtggattgcaggcttgcagctgaagcgcgtacaggcgatagcgatgcagcgccttaagctcgtactccgtggtgtttcccggcagccgaagctgtggaagcgagacctcggtatgtgccagtcgtcggcactgctcgcgatcatcaagggtgcagcgatattgttccctcatgtccgcaatgaaacgagagtcctcaaactgctcggccttctgggcacaacagtcgtcgtagtcctcgtacgccatccacctggggccgtccatgtcctgccac

SEQ ID NO: 25583 - DNA, 255 bp, DROSOPHILA
atgcgacgccgcgaactgcagaccatccagctgaagctgtccgatctcaaggagtacgagcaggctaagatggagcgcctgaggaaccgccaacaattgcttactccccggacgcctacacccccttccgacagcgaagtcctgccggcgacctccagcagcgttccagctgttctcctggccagcggcaagaacctggacgatgacgccgacaagtcagagcccacaaccaagcccagcacatcctccacctag

SEQ ID NO: 25584 - protein, 84 aa, DROSOPHILA
MRRRELQTIQLKLSDLKEYEQAKMERLRNRQQLLTPRTPTPPSDSEVLPATSSSVPAVLLASGKNLDDDADKSEPTTKPSTSST

SEQ ID NO: 25585 - DNA, 2657 bp, DROSOPHILA
gtaaaatgtattacttcatacttatactaagacttttgtatcatcatcatttacagcttgcctgtaatatatattggatactattacacagaagctaaactataaactgtataaactatattacatatttcctttattaaacattcagcattttcttattgggctttcgttacgcgtgcggaacaacacgaaaacacggcatacccttgaacccaactagtaccgattataaaaaaatatagggtaagagcataaaaatgcagcgtgaccctgaaactgaaactgatcgtgaatggaaatggaaatggaaatggctgatgaaaccgatgcactcaatccaacgcgatcccaatctatggcatcccaggcggagcttcacttccgcggttaccaaatcgactttgactttcaaattttccaacgcttttgtcgcagacgtctgtctaatggagccgttaatggttagacacatgaagtattttgccaaatgggctcgacttgggacggttaattgctgatgatgtgatgatatggaaccggatcggcagtgggttttgggggggatggcggagatttagtaagcagcagtgctagtgtttggataacacattttaatagacaattaacaagcagtttgtttaaattttcttcaccgacatttttaacttttgtccggcgatcttgttttcgctattgtgtcttttggtagttacataaacataaatctcggcaatgggccagtcagaaagacaaaaaacttgctgccactgcacattttcacacatagccggatttttgttaacgttgttggagttcccccccaaactttttattggagggtctcgagattcggagctcattgagacttggttaaagcgcagccagctcatttgtagattcgaatgtcagcggtgaacaagtgcggaaccagcggagcggctaaatacccaaattcccccccaaagtaaatcgcgcctttttttttggattaaccaggatcatggactttgatgagttccgtgaatttggccatgcctccatcgagttccttatcaactatctgagcggcatacgtgagaggtgtgtgtctggacttttatccttggagcgatgcctctaaattctgtgtttcttccaacagggatgtcctgcccagcacggctccatatgcggtgatcaatcagctgcccaaggagattcccgagcagcccgatcattggcgcgaggtcctcaaggatctggagaacatcatcctgccgggtctgacccactggcaatcgccctacttcaatgccttctatccgtcatcctcgtcggcgggctccatcatcggtgagctgctgatcgcgggcatcggagtccttggattcagttgggtaagctatatacatatgtaaatggtgaaaaaatccagcagattctcctttttttaaatgaatattcatattaaatacgtgcgtgaatgtgaatgaattaatgtggaagaacaatcataagcaactttcttcattgtgttttcttagaaaaatgatataaaaaaaaaggtcagttaaaacttaaatttcatataattacttaaaaaaactaattgtatctgaaaagtgttgccatgataattaaattcggataaatatagcgaatatacacgtttgattagcttatgatcgttatatattaaaaactattaatactgaacttttttactttttattgtgataaagagacaaatttgaaagagtttcattttaagagccttaaattattcacacgtgaatttacaattattgttcattagagtcaacaacaataacaaccaacaataatcaattggttttaaaactataatttctgtcatcaatttgcctaagagagaggggctaagagagcgccaaccgaccaacaaaaaagtgggaacagtttgtgacccaaagtgatttcccaccagctattgttcgagtgtcgttggtaacaaaatcttttggccaaatcaacgcaacacttgagaaatccttatcgattcaaagaactatgcgataaatatgctcaggagataggcactcaacgattaagaaaattgccaagtaattgtttttctataaatatatggcacgaaatatacgaacccaactataatcccggtgaccgattcgttccctaatctcgcagattggacacgcttcacaaatcactgtgcagagcaatcggatataggtattttcgaaattaatagctaaattgaaaaaaaaagtatttgaatggcactctcgtataaaagaataaacctattactatatacccctttgtgtaagtagtataaaatagtacacactcctttctataaactttcaacagtattttaatgttttgattatgttaattgaacaaacttcgcatttgaattttaaagtatcaacgaatcaaagctaaattagttagatcaaaagaataaaacaagtcagttgcgccggtttttaatgatttctcaaaactagccagattggctgaaccgacagctctggaggctgtccagagaagtcggagtataaaaggcagccgtcaccggcgatcggtttcagagtgaacctcaggcaacttggaggagcatcaacggatcgggaactgaaatcgagttgggcaaacaaatcaaaaacgaaaac

SEQ ID NO: 25586 - DNA, 336 bp, DROSOPHILA
atggactttgatgagttccgtgaatttggccatgcctccatcgagttccttatcaactatctgagcggcatacgtgagagggatgtcctgcccagcacggctccatatgcggtgatcaatcagctgcccaaggagattcccgagcagcccgatcattggcgcgaggtcctcaaggatctggagaacatcatcctgccgggtctgacccactggcaatcgccctacttcaatgccttctatccgtcatcctcgtcggcgggctccatcatcggtgagctgctgatcgcgggcatcggagtccttggattcagttggcgaatatacacgtttgattag

SEQ ID NO: 25587 - protein, 111 aa, DROSOPHILA
MDFDEFREFGHASIEFLINYLSGIRERDVLPSTAPYAVINQLPKEIPEQPDHWREVLKDLENIILPGLTHWQSPYFNAFYPSSSSAGSIIGELLIAGIGVLGFSWRIYTFD

SEQ ID NO: 25588 - DNA, 3262 bp, DROSOPHILA
tagttgggaaattccaattgtcacccactcttcgtcttcaaagtccgatgtgggatcgtcatacgctggcttctccacgcttctgggttccatttccagcttcaccgtttcaatcatggtcagtgggtccaccgactttttgctctccatgtccgtttcgtccggttccggtagttcggaacaagtgatagtaacatcattttcgccacagtcctcatcctcagtctccagcttgacttccacatgctgctcagcacacagctccatcggcgcctcctgcagacagtcggttgacgttggagcagcaccgttctttagatgcttcattagaagttcgttggcggccatcgcctgcttcacatagcaataggcacccattaattttttggtgcatccactgcacaagcattgcggaaatttctgactaccagttgcatccagctgaaaggtaaatgtttcattttagtttgcatttttcgtagatttcgcttcttagaactttgtttacattgatttcggttagctcgcataaaatctccgaaagcaacttgtccggatactttttcgagggcgtggccagcttcagaaggttgtcggtgtccgtggagtcgcacgtgcgacaaatcaccggcagcttcatggcgaacaaatttgttttggccaattgaaagcttttttaattttaaatcaacaatcagaaaatcaacattattgatggtatgaccttgatgcgagagatggaaaataccgttcggtcattaaaaaaataccacgttgttaaaaaatacagcaattaattgggtgcgttcagcagagtccgctaattattttcaaagggaaatattacacaaatatttttaaaataaactgaagaaattgttaaattatgaaaaatataaatcaatatccaccagacaaacaattaatacaaatattacagaaccattagaaactgtgattaaaaaatcacgacttaaaatttactgctgacggtgaccaattgttgaatgtgaaatcaatagtgcacttttattacaataaatctacaatagagcgacgataatttgttatttaatctaaattggagcttaaattagtttgtggcgtgtgcacgtttagcatacgcgaaatccggcaaaccgaaacagagcctcgacccgattagatccaatcctctagtatttcttgatcgttttccgtatgagggcaaggcgctgtttgtgcgcctccgtgacagctgcccgcttgtagggacgcagttcgtccgtaccgaagccgggtatccacatgttgtacttccgctcaaagtgcagctgcacgtcgcgcacctcgatcttgttagactttcggtgcttggcgaaggcgctcgtcgacttgacggtgtcctcgacaaagtcgtcgatgatctgaagcagaagctcctcaacatcctcgtccagctgcgtggtggtatccacctctcggacgagctctgtgagacgcggtttggtaagcatctgtaattcggaagagagttaaactagaccctggcgtattccgtgtgcactccataaggcacgcatcttacgggagtgttctcggaaccggcggcggatgatgtgtgattggatgacttgctaccaccagatatggggcccgttcccgtacccaaaccggaaaccggtccgccgttctgcgaggatgagttgctgttgttggtcatcggactgtgctgggagggcgaggccatgggtgggtcgtggagcagtccgctggcggacgatgtggagttgtggttgtggtgcaggtggtgctcggcgacgccgttgctatcgaaagtggtaaagagatccgacattgcttttgggtttcttcagagtcaaatcaagtgggtggtaggtcggttggttggaagtgtttggggaaagtacagtaagttgggcggatttttggggagtgggtaagagtgcagaaccaaagccaaaagcgttagtgtacttgttgttgttgctgcttatgttgtgtgtcctcctgctttctcaactgcagtcggtgattgtgtgtgcgtgggtgtttggttgcaaagcgaaatgtaagtaaaagaatagagtggtcaatttcacgcgtgcggtcttaagaatccgtcgctttgtgtgtttactaaaactaaagtgttacttagcagttgctcttagcgcatgcaacacttacaattattgcggttttaacactttgatcttaaactattactttcctaaattactaaacaaaataaaaataagcggagcaactacagccaaatcaacagtatggccagttgcaggcgactctgaaatgcccgctggtgctataaagcaatttggtatatttacgtttaatttcagtatattttagttagacagccacactggcgtggagttcaaaacaaaacaaagacggcgtattttgcaaatatcacgtagataaggaatatattttactttgtaattgggaacaatagctgcgcaaaagaaacatgtcagcgagcgaagaaacaatagcggacagtcaggtctccgagaatgtggaggatgtggaattcgtagacatggcgttcacaaaggagttgcgtaaagccacaaaagatgtgcataatcttactgatgttctagtgaatgcaaagatcgcacttggttcgttaattacacgatattattagaagttattagatattcctcttcttccatagccctttctgatgacgaggtctggtatgatggactcctggccttctacgaactgtacaaattctttgagacccatctgccggagcgcctgctgcccaaagaattccacagaacagcggcatttgaaagggattttgcctatttctacggttccgattggaggaaggactacgaaattcgcccggcggtccagaaatatctcgagcatctggaaaagattgccgcacagaacgaactcttgctgttcgcctactcctatcagatgtacatggctttgatgtccggcggacaaatgttgcagaagaagcgtatgatcgctcgtaaaatgtggatcttttcaaagaacgatgacgaggagcagcagaagcaggccgacaaggaggcagagttggccaccgccagagctgccgatggctctgtagacaaagacgacttggaggccaggccaatgcctgcccaggttaccatttgcccgccgggatgtgaggccacatattttcctgagaaggtgcgtagctttttactttgttccttatatctattgtctttatatccac

SEQ ID NO: 25589 - DNA, 1191 bp, DROSOPHILA
gcttatttttattttgtttagtaatttaggaaagtaatagtttaagatcaaagtgttaaaaccgcaataattgtaagtgttgcatgcgctaagagcaactgctaagtaacactttagttttagtaaacacacaaagcgacggattcttaagaccgcacgcgtgaaattgaccactctattcttttacttacatttcgctttgcaaccaaacacccacgcacacacaatcaccgactgcagttgagaaagcaggaggacacacaacataagcagcaacaacaacaagtacactaacgcttttggctttggttctgcactcttacccactccccaaaaatccgcccaacttactgtactttccccaaacacttccaaccaaccgacctaccacccacttgatttgactctgaagaaacccaaaagcaatgtcggatctctttaccactttcgatagcaacggcgtcgccgagcaccacctgcaccacaaccacaactccacatcgtccgccagcggactgctccacgacccacccatggcctcgccctcccagcacagtccgatgaccaacaacagcaactcatcctcgcagaacggcggaccggtttccggtttgggtacgggaacgggccccatatctggtggtagcaagtcatccaatcacacatcatccgccgccggttccgagaacactcccatgcttaccaaaccgcgtctcacagagctcgtccgagaggtggataccaccacgcagctggacgaggatgttgaggagcttctgcttcagatcatcgacgactttgtcgaggacaccgtcaagtcgacgagcgccttcgccaagcaccgaaagtctaacaagatcgaggtgcgcgacgtgcagctgcactttgagcggaagtacaacatgtggatacccggcttcggtacggacgaactgcgtccctacaagcgggcagctgtcacggaggcgcacaaacagcgccttgccctcatacggaaaacgatcaagaaatactagaggattggatctaatcgggtcgaggctctgtttcggtttgccggatttcgcgtatgctaaacgtgcacacgccacaaactaatttaagctccaatttagattaaataacaaattatcgtcgctctattgtagatttattgtaataaaagtgcactattgatttcacattcaacaa

SEQ ID NO: 25590 - protein, 196 aa, DROSOPHILA; identical to SEQ ID NO: 14943

SEQ ID NO: 25591 - DNA, 5993 bp, DROSOPHILA
cacgctgctcctcctcgcttccgcacacccacttccggcccacttgagccggagcttttgacattggccatcagtagtagccttgtcataagcccactgtgctgcagtctagatagatacagataagattcctttgcgcagagggtggccagttttcccagttagtcctcctccaggggagggggggggggtgtggtgttcttggccagctcccattgtctctgcattgcgcccactttaatttaagccgcttaaattgcagcaaagctaagcagcttgccattttcaacctaaggtatccagtcgagcatcgctttgattaccgaaattaagccgaatagaaaaaacagtggaggtccaagcaattggccaaaactttggctttcccgaccgtttttctctcttttgtttaagccaaagaaagttttgtttggtgtgctctccgccggtgggtgtattttacaccctcaaaaccactggcgtcaaccaaatttttaacttcatttagaactcattaaaaactttggcataattgcataaatttgcaaagtcaatggcaaacttgtccagcgcttttaagtgttggggaatttgggtgattcctatgcagagtcgatagggagagctcctgaattaccaattagtattgaggaagtttctaagcagtggacaaatccttggactgacattatttttagtatatattttcaatttagttctcataacagaatttaaaagaattaaaaatttaagtctttcataagaaatggaaaagtaaccactgttagtaaaagctttcgataagtcaaacagggtaactaaaaagcttttagttctctaaataacaatgtctaaaaattatgaaattcatgctgctccattcattttaaatggttttcagaatatatccaccttgttgaaaaacaaaattaataattcaattaaaattgaatttcattcaaactacccgcaattgaaataagcatgtatgaatttatttaacatgatttggtgtgtagtttattcatcgtttaaatgttctatagtttatacatatacatgaactagtttctttaaatacatattatgtcaacacttattgtttcggcttctgttcatggttgttaagttaagttgtcgttgctgaaatgattgggccatattatagaggacttccccattcactcttgtgaccagagacaacaaacaatatatattaatttatgcaactttatgtaatattcattaatttagagacgaaaaacaaacagtatttttttttatagatttttatactttttgcagatttccgcatttaaaacattatttgcattaaagcattgttttttgcacttaatattccattgtttagttgagttgctgtacaaattgttcacaaggtttcggtgcagggacggggggcagtacggaaaacagggggcggggattgtttaatacttgtgcgaactggtgaaacgcctaacgaaagaaaaccaggggagcagacgaaagtaacacaaggtaggcaattgttaatttttgttggaatgctacgattctttatgcgaaaatgattagacaaaaatataaacaattcaaagagcatacacacttaaaacctaacaaaaatagtaaactttaacaagtgaaattacagtgtgttggcgggagttacgacaatcattaggcaattcaatttatgtacattgcaagacgggacttcaatactaaaacacacactttagagtaggtttgctcgcttggacgatatttaactagttattgttttggctacgctgggtggctccgagatacacgcatccaggctctcaacgtagattagatattttgtggtttaattgtggtttatgtatatatagacgcatacacagcggatattgcaggaggtggagacgcgccgcacgttgcgccgccgccagcttaaattatgaatgaaacaaaattttggacaaaaatcaaaaacaaaacaataaacaggatctaatggcgcgagtccctagggtagaattcggccaggatggaggccgggatacgcttgagcatctccttggggaagatacgcagcagctgccagccaatgtccagggattcgaagacagtgcggttctcatagttgccctgcaggtacagaggaaagttttgtaacaaacccacttaatatcaagcgcgttcaactcacctgcgagatgaagttcttctcgaacttggtcaagaactccagatacagcagatcgtcgggcgtcagggcctcctcacccaccacagccttcatggcctgcacgtccttgccgatggcgtagcaagcgtacagctggttggacacgtcagagtggtccttacgggtcatgccctcgccgatggcagacttcatcaaacgcgacagcgatggcagcacgttgactggtgggtagatctgtctgttgtgcagctgacgatcgacgtagatctggccctcggtaatgtaaccggtcaaatcgggaatgggatgggtaatatcatcgttaggcatggtcagaatggggatctgggtgatggatccgttgcgtccctccacacgaccggcacgctcgtagatggtggccaaatcggtgtacatgtaaccggggaaaccacgacgaccgggcacctcctcacgggcagcagacacctcacgcagagcctcggcgtacgaggacatgtcggtaaggatgaccagcacgtgcttctcgcactggtaggccaagaactcggcggcagtcaaagccaggcggggagtgatgatacgctcgatggtcggatcgttggccaagttcaagaacagacacacgttctccatggaaccgttctcctcgaagtcctgcttgaagaatcgggcagtctccatgttcacacccatagcggcgaacacgatggcgaagttgtcggtgtggtcatccagcacggacttgcccggcagcttgacgagaccggcctgacgacagatctgggcggcgatttcgttgtggggcagaccggcggcggagaagatggggatcttctggccacgggcaatcgagttcatcacatcgatggccgagataccggtctggatcatctcctcggggtagatacgcgaccaggggttgatgggctggccctggatgtccaggaaatcctcagccagaattgggggtcccttgtcgatgggcttgccggaaccgttgaacacacggcccaacatatcctccgacacgggcgtgcgcagaatgtcgccggtgaactcgcaaagcgtgttcttggcatcgatgcccgaggtgccctcgaacacctggaccacggccttggagccgctcacctcgagcacctgtccggagcgcacagtaccgtcagccagacgcagctgcacgatctcggcgaacttggggaacttgacctcatcgagaatgaccaggggaccgttcacaccagacacagtcttgtaagctgtggaagaagacgagttaaatgattagttttaggtttaaactatagaaaacaacagatatgcggatcctttctttatcagctcatcgatatcagaaaacttaaagctcagaaaagttgcttcattagtttatattatattcatgtcttattaaattaatattgtcaaacccaaaactacttcttaattgttgcaatgtccatgaggtcattaattaaatcactgaagtgaccataaaaattgggatctttttttaaaaaaaattacaattaagttgtttttatagatgtcattggaaataatatactaaaagggcagctcaatatttgtttctcttttaatcacttttttttcaataaaaacgaagttttaataattttactttgtagcacattgctttcttcgtcttccaattagataaagttccaacaaaaacacgagtcgcgcaatgctcacatgaaagtcggaatctgataagaaagcaaacgtcaaaagaaaagtgtaggcgcgaggggggtgttgactgggaggctaaattatgtcagctgactgtccaactggtttttagcccttgccacgagctgcagttggaatcttatgggaattagataggaaaaagggattgaaatatgcagcgaagataaatatataaattgcattaaaagacaagcctacactgactggctgcataaaacaatgcaactatatttttatctacaatggctactaatttgacacatgaatacagccaacataaaaaacattgaaattctctctatcgaccgaaccgatcaatcgtcagttatgccacccaccccgttcgcagtcaggtgcctttaagtgtgtgcgttcagctttgaatggcaaacgcaaacagctgagcagcgaacggtcatgtgacggcgaaaattttcaataagcgttaaccatgattatgggctgctccccattacgatctgatcagcgtagaacatttaaagctctatatgaaatattattctataggtttcattctgttacgttgttaattgtgtgtttttgtgggtgtcgcaagaatttattgattttttctctacttcgcctcacaccagattcgtgcaaactgtcatggcggactttcttggcattttcttattgggttttttttttcggtcacttgattgggttgcgaatgcatttcttgatatttcacttatttgcaaattccgtggattactcactcaagcggggctgggagataaagtcccgggagacggcgaggacatgttcccgctgggcttgttgggcgttcatcttggatagactttttctgcgcctctaccttgaaagtgcactgcaaatttcgagctgcaattagatacgattttagcttttagccactattcggacgtggtcttttacaagcacatacaatttttcagctacgaaacagtactgagcgacacacacgcaaaattttggcctgcgaagtcgttgcgagtacgatgaaaaattgccctggaactgaaagtattgctgaatgtgaatctgctgtgacgtcacgtgccgtcacatgacccgtcacgcgttaggaactttccgtttcgcgcgctttacaacactaattgttagtgttgccatttagtggagttccacaccgcagcagggctgccacattgccatatggtatcaaatgaaccggtgacgaaatcggtatggcagctacgcactcacaagtctgtttacctacactggagttagcagtgtttttcacccacagagagctgccatatcgccgtatgttatcgataaatttggaagcattgatttgtaccacccctactgttaactcacacagcacagttctgttaattattggaaagttttttaatggaacaaatttaattaaattacaaaagttgtttacccgctgcggcacttggacacccagaaagtaaaacaaagcagtgctcggggacagcaattgaatagtaccagaatccgggacatcggaggcagcgagccgcgacaaagaagtgcacaaagagagatagccagtgcaaaacccgtttcttccaaccgataaaaggggcgtctatagctctgccgatccggagcccctggcattgcaccactatgatggttgagtccgatggaaccgccgacgccacccgccgcctaaacgtgaagaagcaaacactggacgatgcgtacgccgtgcccgccaacttcctggagatcgacgtggtcaatccgctgaccaccatggcggcgggcaagaagcgctacacggactacgaggtccggatgcgggtgagtgatcgtagtacatgtacatgggggcaccacctatgcaccttccaaaattcaccgaaaaaaccattgataatcgctggaattcgctcacacacttgtgtgcatgtgttcgtgcgactttgtctcgctgtgcatgtgtgtgtgcgtgcgtgtgtgtgtgtgtgtgtgtgtgtgagtgcgggtgatacgcctataaagcgagccggccgataaacattagtcacaagtgcagagc

SEQ ID NO: 25592 - DNA, 2647 bp, DROSOPHILA
cagattcacattcagcaatactttcagttccagggcaatttttcatcgtactcgcaacgacttcgcaggccaaaattttgcgtgtgtgtcgctcagtactgtttcgtagctgaaaaattctcgaaatttgcagtgcactttcaaggtagaggcgcagaaaaagtctatccaagatgaacgcccaacaagcccagcgggaacatgtcctcgccgtctcccgggactttatctcccagccccgcttgacttacaagactgtgtctggtgtgaacggtcccctggtcattctcgatgaggtcaagttccccaagttcgccgagatcgtgcagctgcgtctggctgacggtactgtgcgctccggacaggtgctcgaggtgagcggctccaaggccgtggtccaggtgttcgagggcacctcgggcatcgatgccaagaacacgctttgcgagttcaccggcgacattctgcgcacgcccgtgtcggaggatatgttgggccgtgtgttcaacggttccggcaagcccatcgacaagggacccccaattctggctgaggatttcctggacatccagggccagcccatcaacccctggtcgcgtatctaccccgaggagatgatccagaccggtatctcggccatcgatgtgatgaactcgattgcccgtggccagaagatccccatcttctccgccgccggtctgccccacaacgaaatcgccgcccagatctgtcgtcaggccggtctcgtcaagctgccgggcaagtccgtgctggatgaccacaccgacaacttcgccatcgtgttcgccgctatgggtgtgaacatggagactgcccgattcttcaagcaggacttcgaggagaacggttccatggagaacgtgtgtctgttcttgaacttggccaacgatccgaccatcgagcgtatcatcactccccgcctggctttgactgccgccgagttcttggcctaccagtgcgagaagcacgtgctggtcatccttaccgacatgtcctcgtacgccgaggctctgcgtgaggtgtctgctgcccgtgaggaggtgcccggtcgtcgtggtttccccggttacatgtacaccgatttggccaccatctacgagcgtgccggtcgtgtggagggacgcaacggatccatcacccagatccccattctgaccatgcctaacgatgatattacccatcccattcccgatttgaccggttacattaccgagggccagatctacgtcgatcgtcagctgcacaacagacagatctacccaccagtcaacgtgctgccatcgctgtcgcgtttgatgaagtctgccatcggcgagggcatgacccgtaaggaccactctgacgtgtccaaccagctgtacgcttgctacgccatcggcaaggacgtgcaggccatgaaggctgtggtgggtgaggaggccctgacgcccgacgatctgctgtatctggagttcttgaccaagttcgagaagaacttcatctcgcagggcaactatgagaaccgcactgtcttcgaatccctggacattggctggcagctgctgcgtatcttccccaaggagatgctcaagcgtatcccggcctccatcctggccgaattctaccctagggactcgcgccattagatcctgtttattgttttgtttttgatttttgtccaaaattttgtttcattcataatttaagctggcggcggcgcaacgtgcggcgcgtctccacctcctgcaatatccgctgtgtatgcgtctatatatacataaaccacaattaaaccacaaaatatctaatctacgttgagagcctggatgcgtgtatctcggagccacccagcgtagccaaaacaataactagttaaatatcgtccaagcgagcaaacctactctaaagtgtgtgttttagtattgaagtcccgtcttgcaatgtacataaattgaattgcctaatgattgtcgtaactcccgccaacacactgtaatttcacttgttaaagtttactatttttgttaggttttaagtgtgtatgctctttgaattgtttatatttttgtctaatcattttcgcataaagaatcgtagcattccaacaaaaattaacaattgcctaccttgtgttactttcgtctgctcccctggttttctttcgttaggcgtttcaccagttcgcacaagtattaaacaatccccgccccctgttttccgtactgccccccgtccctgcaccgaaaccttgtgaacaatttgtacagcaactcaactaaacaatggaatattaagtgcaaaaaacaatgctttaatgcaaataatgttttaaatgcggaaatctgcaaaaagtataaaaatctataaaaaaaaatactgtttgtttttcgtctctaaattaatgaatattacataaagttgcataaattaatatatattgtttgttgtctctggtcacaagagtgaatggggaagtcctctataatatggcccaatcatttcagcaacgacaacttaacttaacaaccatgaacagaagccgaaacaataagtgttgacataatatgtatttaaagaaactagttcatgtatatgtataaactatagaacatttaaacgatgaataaactacacaccaaatcatgtt

SEQ ID NO: 25593 - protein, 490 aa, DROSOPHILA
MNAQQAQREHVLAVSRDFISQPRLTYKTVSGVNGPLVILDEVKFPKFAEIVQLRLADGTVRSGQVLEVSGSKAVVQVFEGTSGIDAKNTLCEFTGDILRTPVSEDMLGRVFNGSGKPIDKGPPILAEDFLDIQGQPINPWSRIYPEEMIQTGISAIDVMNSIARGQKIPIFSAAGLPHNEIAAQICRQAGLVKLPGKSVLDDHTDNFAIVFAAMGVNMETARFFKQDFEENGSMENVCLFLNLANDPTIERIITPRLALTAAEFLAYQCEKHVLVILTDMSSYAEALREVSAAREEVPGRRGFPGYMYTDLATIYERAGRVEGRNGSITQIPILTMPNDDITHPIPDLTGYITEGQIYVDRQLHNRQIYPPVNVLPSLSRLMKSAIGEGMTRKDHSDVSNQLYACYAIGKDVQAMKAVVGEEALTPDDLLYLEFLTKFEKNFISQGNYENRTVFESLDIGWQLLRIFPKEMLKRIPASILAEFYPRDSRH

SEQ ID NO: 25594 - DNA, 6736 bp, DROSOPHILA
aaaagcaaaaaccgagtaattatagtttttagcctaagcggaaaggttttatatattcacatatatatatacttcatacgagagttcattcaaattggctttaatgtctccaatcatgcagataactagcgagtagaacaaaggtcaagcgaaatattagttactaactaataggcattactaataactctgtaaaccatagcgaaaagactagcaagaagacagtttgagattcgaatttcaatcatacatcatccactcgaaatctgttccgggcagtacgttctgtaaatacttaagttatgtgtaataataacaaaccaccatgcaacaaataatagttagtaagctcgccttcatacacatttaatcgagatccgtttccgtttcacacgctcatttccgtccttcgattttttcgttttgtcacccaatgtttcccacacatcttcacaaccataatgatgttttgccaaaatgcatgtgttcgttgcaaacaataaatcaattaataatgctagacgacaactgttgcactgcgtgtgtttcacaaaattaagtttcaagaattttaattatttactattaacgcagctaaaaataaataaatactgtatgcatatggaaacgatagttacatattaattttaagtaaatgcaatttcgaaacgtatagaaacaataaaaatgtgagatttaaaacaacattgcctataagcgttttttacaaaaattggaagcatgtacgctttttgtaatgtagtaggtagatcttttttgaaaccttacatttaaatgttggcgccaaaatattcctaagtttcccaccattttgcttaccaaagtttacaaccttgcggtaatcgggttttctgtggcgagcggtcacaacttagcgggtaaattcatgttagcgagtacacacctccatttagcggggttacgttccagaaagaacatcgatacaacaaatatcgatagatatatactatgcatatcgattttcgtccggctctaattttcacggtcgaggttttttcgttttaaatcgcaaaaaacacaaacaaatcagtgataaataatattgcaaccagacggtagctcaagcggaactggcaaccaatgattacgaattaacaacaaacaagtgtatgtgcacttcagttattgactaactcgccacttccttttgctcgcaacaacaaaacaacgcaaaagaatattttgagcggatgtgcgtgtgtttgtgtgtgtgtgcgtgtgagcgagatatcatgcactttgtgtagaaaaataaaagcataaaaaagatgccgagcatttagataatacttaaaccgcaaagtgagttatttacatgtgtcgagtggcaaattcaatagtatttttgattatattataagcgtgttccacgcgcatattgcgatgtgacgtaggcgtggaaattcctgtgggaaatttttcaccaccgcgccgctgtgtgggtgtgtgtgtctgccctcgcatttgtgtgagtgggtgtgtgtgggctacgccgcaagtttgttttcgtttacttttaattgccgagaaaaaggattaattgtggcactgaaaatgcgtgttacttaatgtaatgtgcaaacatgcgtaaatattcattacataaatgcaaaattcttcagtgtacattgttatgaacaaaaatatgtgcttaagtctgggcgcttatcattatatacattgcatacccgtgttttaagaaaatataccattttgcgccatcaataagtcaggctgttaaataactcaataaacaggcttgtaaaatcaatattgtgtttaaatagcaagcaaagctaactttttattgttttgttttggtcagcacttaattcttatcaagttttctagaattaaagttgccaaaattcccccaactcgttgaaaaccttaatcctgtgagtcagagaatagaaatagatcgttgcacatcggcccaatatataatacatataacaactaaactataaatgcttttgtattcttcaaagcgatcagcaatgatcgctgtttttgcgaagtaactcgactaaaccgcgatcgcattgtttgtctaacatttcagcgcttttgaaacggactccagctgggtaactcgtgtggcaaactgaaccggaaccggcagaggcagcggcagcaggagcaggaggaggacctggaccagcggaactggcaaccacctggccaaatgggtggcaatagcacaggagcgaatacgagcgccttcagcgctggcggttacattgggcccacgtcggccagcagtcatcacagcctgggaacttcatcggcggcagcggcagcagcagcaggaagtgacctgatacccgcaccaattggcacgggcaacgccatgggagtgtcttcgtatgcatacggtggaaccagttgggaggagttctgcgaacgacacgccagagtggctgcctcggatttcgccaaggcgtgcatcacgtacattaatggcaatctgccgccggaggaggcgaggaacatccagcatcgcagctttgctcagaaatttgtggaatccttttcggcgcactacgacacggagttcttcaagcggaggagcactcttaaatcaggtgcgggctcgctggacttcgaggaggagcacgaggtgccaaaactgctctcaaagtctctattaagacgactatcattcaaaggactgcgcaagggcaaggtgagttgatgctcttctcaaatcctctcgaaatcattgaatagattgatttttgattatttcgaggccacacttgatgcttatactttttttttagacatgattgttgttttctgtccgataatacccattaagaaggtcacgaatcacgaactaaaagtatgcagataaaagcattcactttagcattctttgcattctgtccataagtccgattagacctcactgaagtggtattattatcttctatttgatttgttgaatacgtcatgattatcagaacatgctgtcaattatgcaagtctttctttcaattttgcagatcatgaagtatttcacattgattaaaaagcttttcagtgccaggatgttttatagtcggaaactccggctatattgtcaccacttgttttaactgtcaaagatctctttgctgcaggccttcttccacaagaactcggatgacttggatggcagcggtggcagcggcaagcagagcaagacgaagctggccaagatcgttgtggagtgccggaaggagggcacagtgaacaacctgacgccggaaagtctggatcaaccgacgggctcccaaaagtgggagaagtgtcgacttgtactggtcaaggccgtgggtggctacatgctagagttttacacgccgcacaaggcgactaagccgcgcagtggagtcttttgtttcctcatctcggaggctcgcgaaacaacggcacttgagatgccggacaggctgaacacattcgtcctcaaggcagacaacaacatggagtatgtgattgaggcggagagcgcggaggagatgcggagttggctagccacaatacggtactgcatgcgaacgccacccactcagcagccaacgatcgagtcggatggtgttatggcgtccgccatgcaaacatcgccgacacttccgagtcccaatcccattggtgggattcagaatccgcagtaccagcagcagcgcggctcgaatggcaatctggtgggaggtggagctccgctcacctcatcgctgtctgcagacagtgctttgggccagggaggagccacttctgccagcgaactaaatgtcatcaacgaattgggcacctcaccgacctccgggccacctgacatacctgtaagaccccatcgaggtgaacagcgcctgtccgcctcaagcaacttcgatggcatcgagggcacggaaaatgatgcagatgtggcggatctgacggctgagatgagcgtgtttccctggttccacggcacactgacgcgatcagaagctgccagaatggtactccattcggatgcagccggacatggatactttttggtgcgacagagcgaaacgcgccgcggcgagttcgttctgacctttaacttccaaggacgagccaagcatttgcggctcaccatttcggagaagggtcagtgtcgggtgcagcacctgtggtttccctcgatccaggaaatgctcgaacacttccgccacaacccgataccactggaatcgggcggcacttcggatgtgactcttaccgaatgggtgcactcacacagcagactgaatgacccgacgacggcagcaaatcatgactcaggacaactcaacgatctttcgacaaatgggaatggcaatgggaacggcaatggctacgataatggtcagggttcatcgacggcatcgaatgcggcgggaggaactgcatcgggagctgctggcggtggccatccgtcgccgagacatgtgagatagccaaaattttggagtcaattcagtgtcagtgatggttttttattttactttgatttcaattaagttgttatcatttcatatcaactgggatggggcttgaactgtgaactgatgaatctagagcttagtaactaacttacattttgttttaaaaatccaaagattgattccaatagtaactttaatcaatcaatgaagctaaaattctaaattataacttgcatatttcaaaaccggataaatgaattttggaaccctttgtttcaagtaaatatgttgtattttagttagttcgtgtttagtttgatttgattgtcgcatgcttcatgtttcaccacacaccccagaccgccccgaaaaagtctccagactaactaaactttattttaaatactcttccaacagtgcaacgaagtgattaccatgaatttgagtgttcgcctaaagacaaatgaaatcgaactgccacaggagccaacacacgtctattttccggagcaagtctatttccatttggatcccacaacgctaacagtgcacggatcaccgccaccggcccagaatttcctggaccagccacatctgcgggcttcgaacgcctcccttcaggcagctgcccaccatcaggcgggttcctccggcaaccggcatcccagcgatggcggcagcaacagcggcggagcaggaggcggatcgggatccagtggaggagccgagtgcaccggacgggccgtcgataatcagtacagcttcacctaagtccgcgcgatcgatcatcaactgcatttcgcggcttaaccagcggaactttacttttgtgccattttaatcattgtcctaaaggagaggaaaattgtgttttttttcgcatcaatgtgcgttctttgctttcttgattcacttgtttctattttagttagtacctcttttggaagacatgaagtaactgaacattattatgtatacattatatagctaaatgtgtgtgttcattttaagtacatcaatgttgtatgtatagaaaagaagaacctaaaaaaaaaaaaacgcaaaagaaaattgtacgatttttgtgggcaccaaaggtgcgactcatgcgaatcctaaaacttcctgctttacaaaacaaaaatacatacatatataccatacttataaatataaattatatatacataaatatatattgaaattggtaaactacaataaatgaagttatgtaaaagtaaaccaacgtcggtcttctttcatttgggctttgggttttaaagtggttattttaattacttttaccaagtctttatattatatataaattcgtttgaaataaggtaacgaaaaatgtttttcaaaatatttgcatggtatgtgcccgtgctaacctcgcagcgctattttgacaagttggcaggttggctttggaaaagtttttgatatttccgacccacaaagcaatggtcacattgccacgccggtgagaggcaaaaagttgacaattcgaggaaaagctgaaactctcgaaggatatggaagatctggaactgtatttggtggattccctgaaggcgctgtccttccaagggcactgccaaaagcaggaaaatctgagtcgtgccctggacgcgggtattgaaagtccagacatgcaagaggtggttctttggctcgcccacgaattgcacattttgcggaaaaccgatgagcgggtgaatcagggcaaagcccttaacaaagacttttccttcgagctgtctctgctactcacggaacttggctgcccgtaccgcgagctggtgcagggacccatagagcagcgattcaagagccgtatggcactggtgcagctgctggagtacctcacatccgaactgatgaccaccaaaatggttctgaaggcccagcccgtgggtccaccctgcaaacgatcgaaggtggacacgaatgtccaacaggttgtcgaaaacttagccaaggatcttcagctgggcgaagtgcctaagaacatcaataccaagatgcttttcgagaagataactccccgcttggagcaggccattaaaaaaaccaatccccaagtgctcagcgaaccgctgttgaagcttaagaagcccttgactgatgcacaatggcaattgttggagaccctgcaccgagaactggaggcggagtacaatttgcgcaggcagatgatgtccacgcgtctggaggccactgtacaaagctttcagtggtcggagtct

SEQ ID NO: 25595 - DNA, 2925 bp, DROSOPHILA
attttcgtccggctctaattttcacggtcgaggttttttcgttttaaatcgcaaaaaacacaaacaaatcagtgataaataatattgcaaccagacggtagctcaagcggaactggcaaccaatgattacgaattaacaacaaacaagtcgcttttgaaacggactccagctgggtaactcgtgtggcaaactgaaccggaaccggcagaggcagcggcagcaggagcaggaggaggacctggaccagcggaactggcaaccacctggccaaatgggtggcaatagcacaggagcgaatacgagcgccttcagcgctggcggttacattgggcccacgtcggccagcagtcatcacagcctgggaacttcatcggcggcagcggcagcagcagcaggaagtgacctgatacccgcaccaattggcacgggcaacgccatgggagtgtcttcgtatgcatacggtggaaccagttgggaggagttctgcgaacgacacgccagagtggctgcctcggatttcgccaaggcgtgcatcacgtacattaatggcaatctgccgccggaggaggcgaggaacatccagcatcgcagctttgctcagaaatttgtggaatccttttcggcgcactacgacacggagttcttcaagcggaggagcactcttaaatcaggtgcgggctcgctggacttcgaggaggagcacgaggtgccaaaactgctctcaaagtctctattaagacgactatcattcaaaggactgcgcaagggcaaggccttcttccacaagaactcggatgacttggatggcagcggtggcagcggcaagcagagcaagacgaagctggccaagatcgttgtggagtgccggaaggagggcacagtgaacaacctgacgccggaaagtctggatcaaccgacgggctcccaaaagtgggagaagtgtcgacttgtactggtcaaggccgtgggtggctacatgctagagttttacacgccgcacaaggcgactaagccgcgcagtggagtcttttgtttcctcatctcggaggctcgcgaaacaacggcacttgagatgccggacaggctgaacacattcgtcctcaaggcagacaacaacatggagtatgtgattgaggcggagagcgcggaggagatgcggagttggctagccacaatacggtactgcatgcgaacgccacccactcagcagccaacgatcgagtcggatggtgttatggcgtccgccatgcaaacatcgccgacacttccgagtcccaatcccattggtgggattcagaatccgcagtaccagcagcagcgcggctcgaatggcaatctggtgggaggtggagctccgctcacctcatcgctgtctgcagacagtgctttgggccagggaggagccacttctgccagcgaactaaatgtcatcaacgaattgggcacctcaccgacctccgggccacctgacatacctgtaagaccccatcgaggtgaacagcgcctgtccgcctcaagcaacttcgatggcatcgagggcacggaaaatgatgcagatgtggcggatctgacggctgagatgagcgtgtttccctggttccacggcacactgacgcgatcagaagctgccagaatggtactccattcggatgcagccggacatggatactttttggtgcgacagagcgaaacgcgccgcggcgagttcgttctgacctttaacttccaaggacgagccaagcatttgcggctcaccatttcggagaagggtcagtgtcgggtgcagcacctgtggtttccctcgatccaggaaatgctcgaacacttccgccacaacccgataccactggaatcgggcggcacttcggatgtgactcttaccgaatgggtgcactcacacagcagactgaatgacccgacgacggcagcaaatcatgactcaggacaactcaacgatctttcgacaaatgggaatggcaatgggaacggcaatggctacgataatggtcagggttcatcgacggcatcgaatgcggcgggaggaactgcatcgggagctgctggcggtggccatccgtcgccgagacattgcaacgaagtgattaccatgaatttgagtgttcgcctaaagacaaatgaaatcgaactgccacaggagccaacacacgtctattttccggagcaagtctatttccatttggatcccacaacgctaacagtgcacggatcaccgccaccggcccagaatttcctggaccagccacatctgcgggcttcgaacgcctcccttcaggcagctgcccaccatcaggcgggttcctccggcaaccggcatcccagcgatggcggcagcaacagcggcggagcaggaggcggatcgggatccagtggaggagccgagtgcaccggacgggccgtcgataatcagtacagcttcacctaagtccgcgcgatcgatcatcaactgcatttcgcggcttaaccagcggaactttacttttgtgccattttaatcattgtcctaaaggagaggaaaattgtgttttttttcgcatcaatgtgcgttctttgctttcttgattcacttgtttctattttagttagtacctcttttggaagacatgaagtaactgaacattattatgtatacattatatagctaaatgtgtgtgttcattttaagtacatcaatgttgtatgtatagaaaagaagaacctaaaaaaaaaaaaacgcaaaagaaaattgtacgatttttgtgggcaccaaaggtgcgactcatgcgaatcctaaaacttcctgctttacaaaacaaaaatacatacatatataccatacttataaatataaattatatatacataaatatatattgaaattggtaaactacaataaatgaagttatgtaaaagtaaaccaacgtcgg

SEQ ID NO: 25596 - protein, 723 aa, DROSOPHILA; identical to SEQ ID NO: 12528

SEQ ID NO: 25597 - DNA, 9704 bp, DROSOPHILA
actgtattaatccgcttgagtaatgtagatttcagtttgttttagttttataaattctatattaagtaattaattttctgcacaatgtgtgtgtgtccgtctctcacggactgatttcttactgctcatcagtgtgatcggtctgagagagagaagcattgtctctctcgttgctaggctgacagctctctcgcaccgtttcccacacgtggtatgaagctcaaagaatacgctccgtaggaagaatgaggcttttagcattttgaactgctttgccctaatttggtttccaggtggaattgaggttaggttcgacttcgtagactgttctcgtggtgctctgaaactaaatcatacaaaaatcctttgagaccgggattttggccgttagctgccacctaatactaccagacttgttagatttgctcactctgatcaatcgtcacacttcttgtgatagtgatatcgatctctaatttctccccagttccttaaattggaattttccttatatgtcctttgttggccttgtctctaccagtgcgcaattcccattcccgcgttctttgtgatagttacaatttcctcagtattgtcttgttttacagattatcttaagtttttaaatttcctttcctgtaataacgtgtaatttgtaaccatattatgtgatatctccaaaaagctaaatatacgttttcacatgtctgcgggtaatatagaatattgtgataactcagtgtctagtatttcttgttgaagcatcgcgcctataaaagtttcttaaatgtaattaaaatttacaaaaaaatcgaacccacaaaaaaaaaatggccgaaccaatcatgttgactataaagctgttagtggtcatgagtgaaatataataaagtaagcttgtttacagatgaaatttatttgttacattataagtataagtaagttacataaataaataattgaaatcaagtggaacagctgaaagttatataattacttattatactactgaaaccggcttgtcatttcttatatattcttcaaaatgtttatcttccagaagtactggatcaaaatcatcaattatctgacttaacgatggattatctaacatagttgtatgatttccttctattactttcagtgttaccaccccagatgtaagtaacgaaatgcagtagtcctcatcaatatcttgcaatgaagcctcagccggcctgactaaagtaattggtgatttaatttttattataccatctaaatcaaatgatgctgccatttttactctattgaacatggcttttaccattgtcgaagagtattttttgctgtacatattttgtttttcaacatagttcataaaaagagacattttatctgagagacagtcaacttggtgaaagactgtggacatagattccttagatgcttctggaaatatatgattaacaatactagaaaaaagaagatcataaaggtcgttatcagaaaattgttcgcccaaatgcagattggtaagtcgttttaaaaaatgtggtgccccatctaatagcattaaatgtccacggaacccagaattttcgagcatctcagcaagcagtaaagctacaaaggttccataggagtatgcaattatataaaagggttccgtttgctttaaaatgagtttaatttgctgtaaaatataaaaaaataattaataagatgtacataacatttagaatatattatttacatcaaagctttgctgtgccacatctttaagattttccaagtgtgcaaactgatgaagctgtaaaacaatagctgggctttgcagctttgatcctaattggtaccatgcacgacctgctgtaccctctaatccaggaataataatgtttggttgaaggttctgttttgagggagctgcagatgtctggagggggataattatttgatcacagttcgcttcatcgcctaagttgcgaatcaatagctccattcccaagagcttattgtcggaagcaaatattatttgtataccatctgtattctctttttccttagcgtcaatgaactcttggagcttttgaaaagtaagatgtcgtaaatcttgcggagtcaaaattaactcgaaatcacgttctaaagtttgcttaatctcaacagccattaaagagtccatacccatttctgaaagggttgtacttaacgaaactgattttaagtctcgtatacccattatattcatgacggcgtcaataacatttccctgaccagaccgcatagtgcgtttttcggcgacgaccatgcttgaaacgattgatgcatcagcgcaaagtaaatggtccagttcctgaatgcatgatgaaattcgttgttgaagggtaccgcctatttccatgtcaattttgtcctctgccatatctgctaccaagcccacttcaccgattgcaccccattgaatagctttacctggaaagccctctctattacggtgctcaattatacgttccataactgaattagccatcccataatttgattggcctgcatttccccgaccacaagacacactggaaaaaactacgaagtgttccaactcgggacaataaattcgagataggtcgtctaggtatgtcgttgcgatagcttttggtgcaaagcattctaaaaattggtttacattttggtttgaaaaaatgcaatcctttaacacaactgcaagattgaaaattcctcccactgggcccataccattagcttcagacagtagttgggcgcatcccttttttgatgttatatctgcggtgctgatagcgacttcgcagccataggttttccaaagcctaatttgaaaatgcctctaaagatattttaatatacaaaatcaaatagtgagatgacttacgcaattctatataactgataatcttttgtaattccgcggctagagctaagcaaaagttttcgagctccacgtatcgccatccaatcagccaattccattccaaaacctcctaggccaccaggaatgacataagtatgattatgcttaaaataaacttgattaagaacgcggacaggtaaagttgatggatcgtggggctgttcacgaacttgaataacaacttttcctatgtgttttccacctatcaaatgtctaaaagcctgttcaatttcatgagccaggaacactttaacgggtaatggttgaataattccattagaaatgtccatgtcaattagggatttcaaatgctattaaacaagatataagtttgagggattagatttatgtgttttttaattagtcttttacccaaatatcttcatcaggtgccacaagaagactatcagccaggaccgcgtggaaagtaatttcttttaaaaagcaacccaatccaatcttgttatcgttggccatatcatattttccaatttccaagaaatgtcctgactttccaagacagcgcaatgatgccagcagcttttcttcggataatgagttcaaaacaaagtccaccccttttccgttcgtctcacggtgcaccataagctcaaatgatgtatttcgtgaatttccaatgtgggactctaacatttttaaaaaaaagtttattttatattaaaattaaccgatctcggagtcaagtatcagcttagatattgcttcatttagtcagcgatgaaagtgagtatccatgcgcttaacagtggaaaactgactttggttacttccgtagccctttttcgggggtttttttctaatctaagctaaaacttgccttcgagctatgaaaaactgttttaacaaaataggacaattttctttatattacctttaagtttcggaaatgtttttaatagaaattcctttttattggcagtactacacgttgtaaaaacctccaaattataagctaatgccactctgatcgcggctaaaccaatgcctccagtaccagcatgtataagaatgcttttacctttgcggatatcagttgccataaagaacgcataatataccgttatatacaccactggcactgtagcggcctcttctaacgaccagtcgtcgggaatatcccaaataagttttgatggcttttctacataggaagctacaccaccttttacgaccatgctcattattcgacgtccagttaacatgttaatgccagagtactcaaaccccaaaacacagttttgatctattcggcttgaaccatataattcaactgctagccgaccagttgcaagcattacatctcgaaaatttaaggaagagaaagctattttaatgtggcagttttgtgaattaaaaggcccttttagccattgcaagctcgacaaatctcctcgttgaatgacgtttccgtaaatgtgatctagtctcttcgatggctgatcatttttgagcaattgcaaatgcctatagcttccccaagaacccttataaaaagatatttatatattttaggtaaaatgatatatataatatgaaaatcggacttacattgcgatagatgttaaatgccaaacccaacgaatactgggtcgaataaaacgggtgagataagtcaaaatctggtgcactgtcatcatcaataaagaagcaccttatcaaattaccatcaggttcttttcgcaaacagtttacaagaccaatctgtccgttcaacttctcgttaaaagaatacacaacaactggggcttttgtgataattgcagactgcaactctaaaatccactcaaatgttttatcgtgttgagatacttttactaaaactgggggcactgtaagttttttagatattttctgcaataggaccaaattttcttcagtattattaatcggaatttttgaaatggtacgaaatttttccgctattttacaagacacatttttcgcacacttttgtcggaaaacaatatacccattgtcgactagtacattataagcggacgtaattttctcatgtacttcgtcttcttcgtagccacctattataataatatgacaatttgtttgagtagacaaactaccattttcgatatgaactccaggtaaatcttccagattttgagatgttaagaggatataatcaccagttataacaggtaagtcttgaattgcttcaataaattcagttaacatgtgatttttaccatcagctccaacctctaccaactttaattttagggtgggattattctcaatagcgatttgaacgcaaacacgggccgcattttttaaggaaagaatagatgacgaaaaaaatgggagaaatacatattcctccagaactggaattccaggaggtcttcgtctttgcacaagacttgcatgtagcccgaaaatttctattccacccgctatgatccgatcatacatggggtccacatacacatcaaaaactcgattttcaggatccattttggtcattaaatcaaaatgatgcacaccgtttatcttaagtttccgaattttggtgggtaataaaagatttcgtgaatcagttcctagtatttgaatttgaagcattgcgtccataaaggtaacccaattataattccactggacacgtccaaacaaaccatctgaacgggccaaattaacggcttgaaatgcgccattataatgataaccacgcagttttagctccttgtagaaatccttcttggcaatcatgggaaatttcgatttactttggaaattataaacctcgggaatagatgggttttcagtctcacggataataccggtaactaccaagctgcccatttctgttatctaaaaatttatattatatataatataaataaaatgtcaatattcaatagaattgtacatacctcaaaatggccagtgccatagtgaatcataactgttaagtccactttaccatcaactggcatactggttgctcttatgaaacgtatatcctcgaattcaacgggtacatccatataactcggcccatggtacataagtgaaaatgtttcccagacatactgaagatagcatgtagctggtacaagaatttttccatctataatatgtccactcaaaaactcttcgttatcgctcgctaaattaactgaaaacacacgttctccgctggactttgttttcatattctcgtactttgttacgaaccagtcctcactatgatcccagcgaataagcgagcttacactgggcgttgttcgagaaacagggaactgtattctttcatataagtttgcagccggtagtaaaactccatttaaatatattctacaagatataattagttatactttgttatagtttccaataataaattatacttacttcccaagcgccgacaagaaaaatgatgcattattttggttacccctgttcgttagaggaatatgtacaccactaggcattgaccttttaagaattgctcctaaaagtccgtgaggcgccacttcaatagtcaacgaatttttaggtattaacgaaaatgtttcatcaaaaagtacactatttaagaggttattcgtatgatattctgcagaacaaaactttgctttatccttattccagtcgattttagggacacttgtactcagccatttcttagttctaggtttagggtgtgggattatttcattcatataattaagtaatggcggccccatatgcgaaatatattttgagtgatatgcaatatttgagcagggcacttcctttgcaaaaatgccctttgtttttaaatcagctacaaattgggcaacatcatcaactggaccagatattgtgcacgaatccgggccattatgacaagccgtttcaatggacttcggcagcatgtggagaacagttttatagccaagaccgactgctgccattgaacctcttattttttcgaggtccacactaactcttcctctatagtaggctgccaatatcatttgttgagcagtcagaccaccatccgcatatgcgcaccctaattcacctacagagtgaccaataatgtagtctggctgaatgtttagagaacgtaagacgtctgttaacccgatctgtacagcggcaattcccacgaacgaattcaaaatattttggtatacttccggatcatttgatgttaatatatgtataagattaaggccttttgccaataatatttggtgacaaatttcgactgattcccggaagcgaggtattatcatcaacgaatttcccatttggttccattgtgatcccattccgctataaacccagacaattgggcgctgaaggccagtgtaatgctgcacatcttttgccaataacttgcatggtccagtaccttgcttggcaaaaattgcatacccccggaataccataccagacacatcttcctcttgtatattttgaagcaatccaataaactcggcatccaacggatttttctctactgcattaaaaatctcttcaacagcttcctctgtccttcctgcccatgtaagtagccgcggcacatcatctgctggtattccaaaattattttttgactttgggtaaccttttaaaagtgcatgtgcattagctccgccaaacccgaaggagtttatcccaatatagggttttggtagaggtactacgtcttttactacaatcaacctaccctctgccaagggtgcaataatttgttttacctccgtaaagtttatatttggagcaattaagccagtttcaaaagcaaagcaagcttttactaaggaacagattccagaagctgcttcggaatgaccaacatttgacttcacagagccaactaacaatggctcttccctttgactacataaaacattatcaatggctttgcattcttctgggtcaccgactactgttcctgtactgtgagcctccaagtagcctaagtcacttggtttatgatctatatccttgtaaaactggtcaagcaacttctcttgcacaatacctgacggatatgtgataccctcaggcttgtatccatcacagttggttttagaataaacaatgcttgcataaactcgtttagcatgtttttttttttgtaagaataagcaattaattgtctccgatcgagtataaccactcgcattcttatcaaagggacgacaaaacccatctggcgccaaaacgccaaggctaaaatattaatttaaaaatataatattttaaagcatattttctggcttaccgtgcaaattgaagagtcacaaatgggtgaagtagtaaattagatccacctataattgccgcgtcaatttcgccatttcgaatagcgctgaatgcattgtctaaagcgtacatagaactagaacaagctgtgtcaagtaaaaatgaaggaccttctagtcctaagcaatacgaaattctattagccatcatagctctactacagccagtgattccgaacccgccagaagaaaccttttcataaaaccaagttttttcagattcagatatacaggagcctatgtacactccagttttcgatccacggagactttttggattaactccagaatctataacagcttcataagctgtctcaattagaatacgggtttgcgggtccattgtgtgcgcttgcttaaaatgaactccaaagaaggttgcatcaaacttttcaagatcacaaatttttccagatctttttggtatctccggattaaaatgacgccatcggcgttcatcatcgtcaaccatgtcaatctgaaatattaaaaatgttaaatatttgtatttatattaaaacataaaaaaatattttcctaaaccaaaacttatagttcaattcttcggcttataaaatatttggtttttcgggttttgtaattttttggtgttagagtgggtgtcgtattatgtctagtggatatctaacgaacatggcaagacaattaatgaaaaggatttttgaatagtatgggtgtgaatgatttccggaggtaatggcaaagtgtttgtagcatgcaaataacatcaccacttgagctctttatttacactagtattgcccgcggtgaatattatgaatgcctagctctttacattcaccaactcttcaaacttaactcgtagttatataaagtcgcttgccgcaatatgttaatgcgtgcgacttctggccgttgtattgaggtataattatatacagtggaaaatctttaatttaaaaaaaaaaacaaatatccatatgttttggacctgattttataaatacactatgtaaatgtagcaatgtagcaaaggagatgaaccagtaaatattttaatacaatttgcttgcacgcgagtctaaataaaaatgtgaattactgtttttttgttaaagattactattttgattaatttatactggcggcagaaacgttatttaaaaatgttaaatttaaaattcttttgaaatattatgaagaactagcaaaataaataaaaacaaaaaaaaaattaactatgatgttccgcaatcggcattggttttaataaagccaaacaaccatcactcaatgcaattcctagctgttgagttttatgcagtttcacgaaacattgtgatattaccgacatagtaaacggatcacgcgaatatttaattatctatatataatatttattttaaaaattgttatttaacatttaaataattatattaatcttattttataaataatttgtgatgctaaatggtggttgaagctaaatg

SEQ ID NO: 25598 - DNA, 6531 bp, DROSOPHILA
atggttgacgatgatgaacgccgatggcgtcattttaatccggagataccaaaaagatctggaaaaatttgtgatcttgaaaagtttgatgcaaccttctttggagttcattttaagcaagcgcacacaatggacccgcaaacccgtattctaattgagacagcttatgaagctgttatagattctggagttaatccaaaaagtctccgtggatcgaaaactggagtgtacataggctcctgtatatctgaatctgaaaaaacttggttttatgaaaaggtttcttctggcgggttcggaatcactggctgtagtagagctatgatggctaatagaatttcgtattgcttaggactagaaggtccttcatttttacttgacacagcttgttctagttctatgtacgctttagacaatgcattcagcgctattcgaaatggcgaaattgacgcggcaattatagatgggttttgtcgtccctttgataagaatgcgagtggttatactcgatcggagacaattaattgcttattcttacaaaaaaaaaaacatgctaaacgagtttatgcaagcattgtttattctaaaaccaactgtgatggatacaagcctgagggtatcacatatccgtcaggtattgtgcaagagaagttgcttgaccagttttacaaggatatagatcataaaccaagtgacttaggctacttggaggctcacagtacaggaacagtagtcggtgacccagaagaatgcaaagccattgataatgttttatgtagtcaaagggaagagccattgttagttggctctgtgaagtcaaatgttggtcattccgaagcagcttctggaatctgttccttagtaaaagcttgctttgcttttgaaactggcttaattgctccaaatataaactttacggaggtaaaacaaattattgcacccttggcagagggtaggttgattgtagtaaaagacgtagtacctctaccaaaaccctatattgggataaactccttcgggtttggcggagctaatgcacatgcacttttaaaaggttacccaaagtcaaaaaataattttggaataccagcagatgatgtgccgcggctacttacatgggcaggaaggacagaggaagctgttgaagagatttttaatgcagtagagaaaaatccgttggatgccgagtttattggattgcttcaaaatatacaagaggaagatgtgtctggtatggtattccgggggtatgcaatttttgccaagcaaggtactggaccatgcaagttattggcaaaagatgtgcagcattacactggccttcagcgcccaattgtctgggtttatagcggaatgggatcacaatggaaccaaatgggaaattcgttgatgataatacctcgcttccgggaatcagtcgaaatttgtcaccaaatattattggcaaaaggccttaatcttatacatatattaacatcaaatgatccggaagtataccaaaatattttgaattcgttcgtgggaattgccgctgtacagatcgggttaacagacgtcttacgttctctaaacattcagccagactacattattggtcactctgtaggtgaattagggtgcgcatatgcggatggtggtctgactgctcaacaaatgatattggcagcctactatagaggaagagttagtgtggacctcgaaaaaataagaggttcaatggcagcagtcggtcttggctataaaactgttctccacatgctgccgaagtccattgaaacggcttgtcataatggcccggattcgtgcacaatatctggtccagttgatgatgttgcccaatttgtagctgatttaaaaacaaagggcatttttgcaaaggaagtgccctgctcaaatattgcatatcactcaaaatatatttcgcatatggggccgccattacttaattatatgaatgaaataatcccacaccctaaacctagaactaagaaatggctgagtacaagtgtccctaaaatcgactggaataaggataaagcaaagttttgttctgcagaatatcatacgaataacctcttaaatagtgtactttttgatgaaacattttcgttaatacctaaaaattcgttgactattgaagtggcgcctcacggacttttaggagcaattcttaaaaggtcaatgcctagtggtgtacatattcctctaacgaacaggggtaaccaaaataatgcatcatttttcttgtcggcgcttgggaaaatatatttaaatggagttttactaccggctgcaaacttatatgaaagaatacagttccctgtttctcgaacaacgcccagtgtaagctcgcttattcgctgggatcatagtgaggactggttcgtaacaaagtacgagaatatgaaaacaaagtccagcggagaacgtgtgttttcagttaatttagcgagcgataacgaagagtttttgagtggacatattatagatggaaaaattcttgtaccagctacatgctatcttcagtatgtctgggaaacattttcacttatgtaccatgggccgagttatatggatgtacccgttgaattcgaggatatacgtttcataagagcaaccagtatgccagttgatggtaaagtggacttaacagttatgattcactatggcactggccattttgaggtttataatttccaaagtaaatcgaaatttcccatgattgccaagaaggatttctacaaggagctaaaactgcgtggttatcattataatggcgcatttcaagccgttaatttggcccgttcagatggtttgtttggacgtgtccagtggaattataattgggttacctttatggacgcaatgcttcaaattcaaatactaggaactgattcacgaaatcttttattacccaccaaaattcggaaacttaagataaacggtgtgcatcattttgatttaatgaccaaaatggatcctgaaaatcgagtttttgatgtgtatgtggaccccatgtatgatcggatcatagcgggtggaatagaaattttcgggctacatgcaagtcttgtgcaaagacgaagacctcctggaattccagttctggaggaatatgtatttctcccatttttttcgtcatctattctttccttaaaaaatgcggcccgtgtttgcgttcaaatcgctattgagaataatcccaccctaaaattaaagttggtagaggttggagctgatggtaaaaatcacatgttaactgaatttattgaagcaattcaagacttacctgttataactggtgattatatcctcttaacatctcaaaatctggaagatttacctggagttcatatcgaaaatggtagtttgtctactcaaacaaattgtcatattattataataggtggctacgaagaagacgaagtacatgagaaaattacgtccgcttataatgtactagtcgacaatgggtatattgttttccgacaaaagtgtgcgaaaaatgtgtcttgtaaaatagcggaaaaatttcgtaccatttcaaaaattccgattaataatactgaagaaaatttggtcctattgcagaaaatatctaaaaaacttacagtgcccccagttttagtaaaagtatctcaacacgataaaacatttgagtggattttagagttgcagtctgcaattatcacaaaagccccagttgttgtgtattcttttaacgagaagttgaacggacagattggtcttgtaaactgtttgcgaaaagaacctgatggtaatttgataaggtgcttctttattgatgatgacagtgcaccagattttgacttatctcacccgttttattcgacccagtattcgttgggtttggcatttaacatctatcgcaatccatcgaagagactagatcacatttacggaaacgtcattcaacgaggagatttgtcgagcttgcaatggctaaaagggccttttaattcacaaaactgccacattaaaatagctttctcttccttaaattttcgagatgtaatgcttgcaactggtcggctagcagttgaattatatggttcaagccgaatagatcaaaactgtgttttggggtttgagtactctggcattaacatgttaactggacgtcgaataatgagcatggtcgtaaaaggtggtgtagcttcctatgtagaaaagccatcaaaacttatttgggatattcccgacgactggtcgttagaagaggccgctacagtgccagtggtgtatataacggtatattatgcgttctttatggcaactgatatccgcaaaggtaaaagcattcttatacatgctggtactggaggcattggtttagccgcgatcagagtggcattagcttataatttggaggtttttacaacgtgtagtactgccaataaaaaggaatttctattaaaaacatttccgaaacttaaagagtcccacattggaaattcacgaaatacatcatttgagcttatggtgcaccgtgagacgaacggaaaaggggtggactttgttttgaactcattatccgaagaaaagctgctggcatcattgcgctgtcttggaaagtcaggacatttcttggaaattggaaaatatgatatggccaacgataacaagattggattgggttgctttttaaaagaaattactttccacgcggtcctggctgatagtcttcttgtggcacctgatgaagatatttggcatttgaaatccctaattgacatggacatttctaatggaattattcaaccattacccgttaaagtgttcctggctcatgaaattgaacaggcttttagacatttgataggtggaaaacacataggaaaagttgttattcaagttcgtgaacagccccacgatccatcaactttacctgtccgcgttcttaatcaagtttattttaagcataatcatacttatgtcattcctggtggcctaggaggttttggaatggaattggctgattggatggcgatacgtggagctcgaaaacttttgcttagctctagccgcggaattacaaaagattatcagttatatagaattgcgctttggaaaacctatggctgcgaagtcgctatcagcaccgcagatataacatcaaaaaagggatgcgcccaactactgtctgaagctaatggtatgggcccagtgggaggaattttcaatcttgcagttgtgttaaaggattgcattttttcaaaccaaaatgtaaaccaatttttagaatgctttgcaccaaaagctatcgcaacgacatacctagacgacctatctcgaatttattgtcccgagttggaacacttcgtagttttttccagtgtgtcttgtggtcggggaaatgcaggccaatcaaattatgggatggctaattcagttatggaacgtataattgagcaccgtaatagagagggctttccaggtaaagctattcaatggggtgcaatcggtgaagtgggcttggtagcagatatggcagaggacaaaattgacatggaaataggcggtacccttcaacaacgaatttcatcatgcattcaggaactggaccatttactttgcgctgatgcatcaatcgtttcaagcatggtcgtcgccgaaaaacgcactatgcggtctggtcagggaaatgttattgacgccgtcatgaatataatgggtatacgagacttaaaatcagtttcgttaagtacaaccctttcagaaatgggtatggactctttaatggctgttgagattaagcaaactttagaacgtgatttcgagttaattttgactccgcaagatttacgacatcttacttttcaaaagctccaagagttcattgacgctaaggaaaaagagaatacagatggtatacaaataatatttgcttccgacaataagctcttgggaatggagctattgattcgcaacttaggcgatgaagcgaactgtgatcaaataattatccccctccagacatctgcagctccctcaaaacagaaccttcaaccaaacattattattcctggattagagggtacagcaggtcgtgcatgtattgttaatcatatatttccagaagcatctaaggaatctatgtccacagtctttcaccaagttgactgtctctcagataaaatgtctctttttatgaactatgttgaaaaacaaaatatgtacagcaaaaaatactcttcgacaatggtaaaagccatgttcaatagagtaaaaatggcagcatcatttgatttagatggtataataaaaattaaatcaccaattactttagtcaggccggctgaggcttcattgcaagatattgatgaggactactgcatttcgttacttacatctggggtggtaacactgaaagtaatagaaggaaatcatacaactatgttagataatccatcgttaagtcagataattgatgattttgatccagtacttctggaagataaacattttgaagaatatataagaaatgacaagccggtttcagtagtataa

SEQ ID NO: 25599 - protein, 2176 aa, DROSOPHILA
MVDDDERRWRHFNPEIPKRSGKICDLEKFDATFFGVHFKQAHTMDPQTRILIETAYEAVIDSGVNPKSLRGSKTGVYIGSCISESEKTWFYEKVSSGGFGITGCSRAMMANRISYCLGLEGPSFLLDTACSSSMYALDNAFSAIRNGEIDAAIIDGFCRPFDKNASGYTRSETINCLFLQKKKHAKRVYASIVYSKTNCDGYKPEGITYPSGIVQEKLLDQFYKDIDHKPSDLGYLEAHSTGTVVGDPEECKAIDNVLCSQREEPLLVGSVKSNVGHSEAASGICSLVKACFAFETGLIAPNINFTEVKQIIAPLAEGRLIVVKDVVPLPKPYIGINSFGFGGANAHALLKGYPKSKNNFGIPADDVPRLLTWAGRTEEAVEEIFNAVEKNPLDAEFIGLLQNIQEEDVSGMVFRGYAIFAKQGTGPCKLLAKDVQHYTGLQRPIVWVYSGMGSQWNQMGNSLMIIPRFRESVEICHQILLAKGLNLIHILTSNDPEVYQNILNSFVGIAAVQIGLTDVLRSLNIQPDYIIGHSVGELGCAYADGGLTAQQMILAAYYRGRVSVDLEKIRGSMAAVGLGYKTVLHMLPKSIETACHNGPDSCTISGPVDDVAQFVADLKTKGIFAKEVPCSNIAYHSKYISHMGPPLLNYMNEIIPHPKPRTKKWLSTSVPKIDWNKDKAKFCSAEYHTNNLLNSVLFDETFSLIPKNSLTIEVAPHGLLGAILKRSMPSGVHIPLTNRGNQNNASFFLSALGKIYLNGVLLPAANLYERIQFPVSRTTPSVSSLIRWDHSEDWFVTKYENMKTKSSGERVFSVNLASDNEEFLSGHIIDGKILVPATCYLQYVWETFSLMYHGPSYMDVPVEFEDIRFIRATSMPVDGKVDLTVMIHYGTGHFEVYNFQSKSKFPMIAKKDFYKELKLRGYHYNGAFQAVNLARSDGLFGRVQWNYNWVTFMDAMLQIQILGTDSRNLLLPTKIRKLKINGVHHFDLMTKMDPENRVFDVYVDPMYDRIIAGGIEIFGLHASLVQRRRPPGIPVLEEYVFLPFFSSSILSLKNAARVCVQIAIENNPTLKLKLVEVGADGKNHMLTEFIEAIQDLPVITGDYILLTSQNLEDLPGVHIENGSLSTQTNCHIIIIGGYEEDEVHEKITSAYNVLVDNGYIVFRQKCAKNVSCKIAEKFRTISKIPINNTEENLVLLQKISKKLTVPPVLVKVSQHDKTFEWILELQSAIITKAPVVVYSFNEKLNGQIGLVNCLRKEPDGNLIRCFFIDDDSAPDFDLSHPFYSTQYSLGLAFNIYRNPSKRLDHIYGNVIQRGDLSSLQWLKGPFNSQNCHIKIAFSSLNFRDVMLATGRLAVELYGSSRIDQNCVLGFEYSGINMLTGRRIMSMVVKGGVASYVEKPSKLIWDIPDDWSLEEAATVPVVYITVYYAFFMATDIRKGKSILIHAGTGGIGLAAIRVALAYNLEVFTTCSTANKKEFLLKTFPKLKESHIGNSRNTSFELMVHRETNGKGVDFVLNSLSEEKLLASLRCLGKSGHFLEIGKYDMANDNKIGLGCFLKEITFHAVLADSLLVAPDEDIWHLKSLIDMDISNGIIQPLPVKVFLAHEIEQAFRHLIGGKHIGKVVIQVREQPHDPSTLPVRVLNQVYFKHNHTYVIPGGLGGFGMELADWMAIRGARKLLLSSSRGITKDYQLYRIALWKTYGCEVAISTADITSKKGCAQLLSEANGMGPVGGIFNLAVVLKDCIFSNQNVNQFLECFAPKAIATTYLDDLSRIYCPELEHFVVFSSVSCGRGNAGQSNYGMANSVMERIIEHRNREGFPGKAIQWGAIGEVGLVADMAEDKIDMEIGGTLQQRISSCIQELDHLLCADASIVSSMVVAEKRTMRSGQGNVIDAVMNIMGIRDLKSVSLSTTLSEMGMDSLMAVEIKQTLERDFELILTPQDLRHLTFQKLQEFIDAKEKENTDGIQIIFASDNKLLGMELLIRNLGDEANCDQIIIPLQTSAAPSKQNLQPNIIIPGLEGTAGRACIVNHIFPEASKESMSTVFHQVDCLSDKMSLFMNYVEKQNMYSKKYSSTMVKAMFNRVKMAASFDLDGIIKIKSPITLVRPAEASLQDIDEDYCISLLTSGVVTLKVIEGNHTTMLDNPSLSQIIDDFDPVLLEDKHFEEYIRNDKPVSVV

SEQ ID NO: 25600 - DNA, 7551 bp, DROSOPHILA; identical to SEQ ID NO: 12499

SEQ ID NO: 25601 - DNA, 2071 bp, DROSOPHILA
aaagcgtgaaatgtttaattcgttgttgtttctcctccgcaatagttactaatagaaacaaatgcaaaatggctgtctaacgtttaagtgcagcgaccgccgaagatcgtggaaatatgcatgaaaagcggctcgcaggcaaatgaaaggcgcgtgaaaatgtagcagacacctttttatcgcgaaaacgaacatcggtgcaaagggaaaaacaaaaaccaaggaaaatacagccaaacgcgaatgtgaatgtgaaggcaaaagtgtgtatggcgttctaatttgctttcattacctaattcgtgaggcgcgtgaaagttgaccccaaggtttccgcgctcgacttaaggcgacatcgtggaaaataaaccttgggagtgagtgtgtgctccgaatagcctaatcgcagttgtccaaataacctgaagaaggtaaaaaagtatacggggttacgtgcgataagtttggattgaagcggtgcagctgacataagaacgcgataaatccagcgcaggacgaccgataagcgaagaagccagccgactggcgactacaagtgatatctgaaactatatctgcgatatagattgaagtcgcatccggaggaaccggagcgagcatgtcgcacggtggagccggtggcggtctgggagctcaaactgttggagccggccaacttggaggcggtgcagcggcagctggcggtggagaataccgcgaactccactggacggtctcaagcgtaatggactcgtctcgggtctctacctgcctcatatcgatgctgctgatagtctacggcagctttcgctccttaaacatcgagcaggaggcccgcgagcgggagcagaagaagcgaaatgaatcgatgaccaatcttcttaccggcgagcccgtcgagaaggaaccaacggataaattcgccactctggacacgatgcatgccctctgtttgcccctcggagcttccatctcactgctcatcatgttcttcttcttcgactcgatgcagctgctcttcgccgtctgcacagcgattatagccaccgtggcgctggcctttctgctgctgcccatgtgccagtacatcatcaggccatgcacagatggaaagcgattctccttcggattctgcggtcgcttcacagccgcggagctcttcagctttacgctttcggtatcgattgtgtgcatatgggtgctcactggccactggctgctaatggatgcaatgggcatgggcctgtgtgtggcattcatagcgtttgtgcgtctgcccagcttgaaggtgtccacgctgctgttgaccggcctgctcatctacgacgtcttctgggtattcctctcctcgtacatcttcagcaccaacgtgatggtcaaggtggcgacgcgacccgccgataatcccgtgggcatcgtggccagaaagttgcatctgggtggcattgtgcgggacacaccaaagctgaatctgcccggaaagcttgtttttcccagcctgcacaataccggtcacttctctatgctgggcctgggtgatgtggtgatgccgggcctgttgctgtgcttcgtcttgcggtatgatgcgtacaagaaggcgcagggcgtcacatcggatcccacattgtcaccacccagaggagttggctcccggttgacatactttcattgttccttattgggttatttcttgggcctgctaacggcgacggtcagctccgaggtctttaaggcggcccagccggcgctgctgtatctagtgccctttacgttattgccgctcttgctgatggcgtatctgaagggcgacctgcggcgcatgtggagcgagccgtttatcgcgcaacaaccatcaaaacaactggaagtctgagtgtactctatctaaaagcaaagaaaaacaaaaaaccaacagcatacaatgtgaagaacacacacacataagatctaatactaacgtttgtctcttaaataacgtattgagtatgtattttttaactcaacttaactaagtttcgttttaagttaggtgatcctcgttttcatagtgaaataaaagcaaaaaccgagt

SEQ ID NO: 25602 - protein, 417 aa, DROSOPHILA; identical to SEQ ID NO: 12501

SEQ ID NO: 25603 - DNA, 2874 bp, DROSOPHILA
ttgatattatattatatttgatattatattcctgaaagtcatcttttcaaaatctattatttttgacgaaaataaagggaaaactataggcacaacctcgccagctatgcaattttcaggggttcgactttcatttaaaaaaaaagagtgaaaaacctaatatggcattatataaatttcttctataaagggtaatttttcatgttcatcaacggtaagacaaatgcaattgttttgaagatatctatatatcagtatatccacaacttaaatgtcaatgtgctactcatagtcaaacagtaaatttgaaaattataaaagtgcctgaagaatatttcgtaagtcaaattgtacatggccgtaaatatacgatgctaactatatattttttccattctgcaggctcgagcacatttatcaattcaggatgacgggccctcagacaattgtggtttatggcttgattgccattctggtcatcattattgtgattatatctattattttgctcgttggattatatattcacgatccaaatcgtataacaacgaatgagacgacaactgaagaagccttgaccactttatgggcgtagagaagaaagtcctgtctgtacagtagttgttgtacccaataaaatttgtttaaattgttactaaaagttcttcattcgagcctattgaagaaatatagaaatccacaatatatatttttggatcaaaaaatttaaccgaccgatataatttctagttttcgtcgccctttagtttatataagcatagtgatagaataaaccacatgccccagtggcctaatggataaggcatcggcctcctaagccggggattgtgggttcgagtcccatctggggtaagagttgtatcctttttttttatttcttaaactttgaagcctagaaatctgcatccgaaaaaaggtgcatccgaacgagtttccagccaaaacccgttacattccctcgctaattaaaaaggagtggttcgatttcttatatttattaatatttaaagcctaaaaatctgcatattggtgatagatgcatccgatcgagttgctaaccaaaacgtgttacacaacatggtccaacggttctcagttccgccgcttatatgggtcgtccgtagtaacagagccgcttagaagccacctgagggagaaaattagaataagaggtacatgtactaaaacatttacttacaaatgtgtggagtggaaaggattaggaccagagtcggtggctaaacctagcaacagcattttggcggagtgttgtagcagtgggctttgcacggagcacaccacacgcaaggcgcgttatccttgttaacaaggtaacgcctggggcaaggagctttgggagaaggacgaatagtcacactgatcgcaaggaccagactctccgctgctgtggcacacacaatccattgccttcccgtgcctctcaaggttcgaaaacggacggacggacagaatttgtgggttcgtatggtggagtgggagcatttagctcggaagcggacttacatggataagttgggggcgtgttgtagtagttccagacacggggatcgggaatgccgccctcgggcagagggggacagcacatgcccggagcaggagagcacgggatgggagacggggctccgcatggcggactgtgggggccacagcagggtgtttcattacagggtccacagcatccacatccgttgcacatgttgagtttgtctaacgctgcgggcgaaaagttaagatgttatactttttgaacaaatacttaacactcacttttttggttgagttattatcgaaaaagtaaatttggaatttagaaaaaaatttagaagtcgaagcgactggtccgagagtcagatatcgaatgaggttagctgttcccttggcccagcacatccagttcaagtttcggttcgggttggcttaaaagtcatggccaactttatgaaatttcatggcctacttcgacttagcaaagattatgaaatcgccacagatctacataattatatatctatatttgccttattcactaaaacaaaatatttgacccgcgaattgtttaggtcaactaactcactaagattggaacatggctctcccagctcgaaaaaatgggtttaaaacaaagtactatcagcaaagttcaacttttaattaattaaatcttaaatgccacggaaacccaccctaataaaattgatattaattaatataaatatcagaatatctgtgggacatatgaacgtaaatttttatggccttggcataaggtttcaaccttaatttacaattctaatgccaggcttaaaatataaatattcgaagcataagtgcagccataaaataaacgcaacctttaacaccccccataatacacagaatataatttcaatttgtttatttgtaatttaatgccaaatagattccagataccaacatatgattttgtgtttaaatcaagaccgtctgacgaattgcacatgggttcccaaatagcttcgagcccttctagtaatgggtattccgcagctggctaaatcttgatttaagccaacttcaattttttatcaaccaaaactacgtcacaaaacgacaacatgtcccgccaaggaagtggcccatatcaggatccgatcgaaacacttgccaggaaatacttataagccacctgtgggatgagaaaggtaaaaccagtgaatgcagaaggtatcgcagttacttacacgcgacaggatgcggatggaggtcaaagggtcatgaaggatttggggcctggcaacagcatttggtccatggatcctacctctacgctcacaaagcccaggacatgctatc

SEQ ID NO: 25604 - DNA, 434 bp, DROSOPHILA
cttcgacttctaaatttttttctaaattccaaatttactttttcgataataactcaaccaaaaaacgttagacaaactcaacatgtgcaacggatgtggatgctgtggaccctctccttgccccaggcgttaccttgttaacaaggataacgcgccttgcgtgtggtgtgctccgtgcaaagcccactgctacaacactccgccaaaatgctgttgctaggtttagccaccgactctggtcctaatcctttccactccacacatttgtggcttctaagcggctctgttactacggacgacccatataagcggcggaactgagaaccgttggaccatgttgtgtaacacgttttggttagcaactcgatcggatgcatctatcaccaatatgcagatttttaggctttaaatattaataaatataagaaatcgaa

SEQ ID NO: 25605 - protein, 45 aa, DROSOPHILA
MCNGCGCCGPSPCPRRYLVNKDNAPCVWCAPCKAHCYNTPPKCCC

SEQ ID NO: 25606 - DNA, 3401 bp, DROSOPHILA
attgccttcccgtgcctctcaaggttcgaaaacggacggacggacagaatttgtgggttcgtatggtggagtgggagcatttagctcggaagcggacttacatggataagttgggggcgtgttgtagtagttccagacacggggatcgggaatgccgccctcgggcagagggggacagcacatgcccggagcaggagagcacgggatgggagacggggctccgcatggcggactgtgggggccacagcagggtgtttcattacagggtccacagcatccacatccgttgcacatgttgagtttgtctaacgctgcgggcgaaaagttaagatgttatactttttgaacaaatacttaacactcacttttttggttgagttattatcgaaaaagtaaatttggaatttagaaaaaaatttagaagtcgaagcgactggtccgagagtcagatatcgaatgaggttagctgttcccttggcccagcacatccagttcaagtttcggttcgggttggcttaaaagtcatggccaactttatgaaatttcatggcctacttcgacttagcaaagattatgaaatcgccacagatctacataattatatatctatatttgccttattcactaaaacaaaatatttgacccgcgaattgtttaggtcaactaactcactaagattggaacatggctctcccagctcgaaaaaatgggtttaaaacaaagtactatcagcaaagttcaacttttaattaattaaatcttaaatgccacggaaacccaccctaataaaattgatattaattaatataaatatcagaatatctgtgggacatatgaacgtaaatttttatggccttggcataaggtttcaaccttaatttacaattctaatgccaggcttaaaatataaatattcgaagcataagtgcagccataaaataaacgcaacctttaacaccccccataatacacagaatataatttcaatttgtttatttgtaatttaatgccaaatagattccagataccaacatatgattttgtgtttaaatcaagaccgtctgacgaattgcacatgggttcccaaatagcttcgagcccttctagtaatgggtattccgcagctggctaaatcttgatttaagccaacttcaattttttatcaaccaaaactacgtcacaaaacgacaacatgtcccgccaaggaagtggcccatatcaggatccgatcgaaacacttgccaggaaatacttataagccacctgtgggatgagaaaggtaaaaccagtgaatgcagaaggtatcgcagttacttacacgcgacaggatgcggatggaggtcaaagggtcatgaaggatttggggcctggcaacagcatttggtccatggatcctacctctacgctcacaaagcccaggacatgctatcattgttgacggatcagcgtagtgggcataaagctcctgcaaaaggacatgaagcgtcaccacaagcacatgttccagatgctgtgacctgcaaagtccttgggcatgcctcgtgctcctccgctccatggtttttacgttctacggacgcccagcgccgtgacagatggacaagcagacggacagacaggcggacaggtggacggacctggaccggacttacatgggtacgtcacaggtgcgttatagtagttccagacacgcggatcgggaatgccgccttcaggcagcggagggcagcacatgcccggagcagaggagcaaggaatgggcgacggagctccgcatggaggactgtgcgggccacagcatggaagactgtgcgagccacagcatggaggactgtgcgggccacagcagggcgatacattacagcagcagggaccgcatccacagcagccgccggcaacgcgtccaccgcatccggcaccgccatttggtgctccagtggcggcacagcgcatacgcttattgttcacgcccatcatcatgttagcgtagcgcagcgggaatgccgccggaccgcaggtggggaaggggaagcacaggcaggccggtcggccctggcaggcggaccgcgggcacttgtcctgcagaccgttccgcttcacgcagtcgcaagtggtgtacatgatgccgcatcgtaactcccgactgcggcatccgcgcggctggaaaggatgcatacatagtggtcacaagtggtcagtggtgtgttgcatatggttactcacctccaacgatccacatccgtcacacatcttgagcccgtcgagcgctacaggacaaaggatttaaaaatatactatggtcttcccgggataaacttactctatttggtcaaattaatttggaagaaaaatttggaatttggaaaatttagaagctggccgaaacgaaaggtccgagagtttggtatcgaatgaggaatgatcaacacatcccaacacacatattcggttccgtttgagatgaaatgcaaggccaacttgttggaattatagcctactagattttaagaaagagttaatattagattcaaaatgcaaaaagctttttcgctctttttaaaagctctgttatcagctaattgtattatgcgatttgcttacaattctgataagcgatcctcttttcagttcattccaagttcccaagctgatcggattggagcaatgcctaacattgcagttatcggtgccggggttaatggtgttgccagtgccattaagatactggaacactatgtgaacgatggaaagacacccataaaggtgacgatcatatcggaggacttcacgcctaacacaactggagatggttcggctggtctctggggtccgtaccttctgggcggcacttcgcaggcgaaagtctagtaagttttactagtcactatattatattcttacttataactttttttccatcagcaagtggtcgaagagcatgcaccaatttttggagaagatctggctgagcgaggatgccggagaggctggcgtttgtctgctaccctgcattcggctgagcacctcaacggtggacacggtcgaagatttttggcgtgacattgtctatggagcagtggatctgtccaaggaacagctggctgcctacaataaaggtcgcagcgttaagttcacgtaagaatattcatagatatccatagatttatacttgctgaaatatgaacatatctaaaccatatctaggtctggtttatcctttgttacctacacctcggagcccattaagctactgccgtatttgatgaagcgtttcacccgaaatggaggtgttgttgtccggaaaaggattacagacctggatgcatttgtagccgattccgagtacgatgtgatagtcaattgctccggattgggctctaagaccctactaaacgacgatc

SEQ ID NO: 25607 - DNA, 833 bp, DROSOPHILA
actctcggacctttcgtttcggccagcttctaaattttccaaattccaaatttttcttccaaattaatttgaccaaatagacgctcgacgggctcaagatgtgtgacggatgtggatcgttggagccgcgcggatgccgcagtcgggagttacgatgcggcatcatgtacaccacttgcgactgcgtgaagcggaacggtctgcaggacaagtgcccgcggtccgcctgccagggccgaccggcctgcctgtgcttccccttccccacctgcggtccggcggcattcccgctgcgctacgctaacatgatgatgggcgtgaacaataagcgtatgcgctgtgccgccactggagcaccaaatggcggtgccggatgcggtggacgcgttgccggcggctgctgtggatgcggtccctgctgctgagctttatgcccactacgctgatccgtcaacaatgatagcatgtcctgggctttgtgagcgtagaggtaggatccatggaccaaatgctgttgccaggccccaaatccttcatgaccctttgacctccatccgcatcctgtcgcgtgtggcttataagtatttcctggcaagtgtttcgatcggatcctgatatgggccacttccttggcgggacatgttgtcgttttgtgacgtagttttggttgataaaaaattgaagttggcttaaatcaagatttagccagctgcggaatacccattactagaagggctcgaagctatttgggaacccatgtgcaattcgtcagacggtcttgatttaaacacaaaatcatatgttggtatctggaatctatttggcattaaatt

SEQ ID NO: 25608 - protein, 84 aa, DROSOPHILA
MAVPDAVDALPAAAVDAVPAAELYAHYADPSTMIACPGLCERRGRIHGPNAVARPQILHDPLTSIRILSRVAYKYFLASVSIGS

SEQ ID NO: 25609 - DNA, 2210 bp, DROSOPHILA
ccgcgaagcaatgcttcacggccataccgcggggggtactggatttgccctccttactgttacattgttaatcagttattcttaatcttaaatgttcaataaacgaattgataaaaagtgatggttcctcacacgttttaaaatattaaatataaatttttttagcctgatttgttattattatttttataattacattaaaaaacgtaaaagatcaacaaatgcatttaattttttattttcaaatattctttgtgtgtgaaatggtgttcataaaaaagaaaacacaaaaacacgacctttttctttggtgttccctttcacccttaattaattaattttaagacaataattttttagacaatctgtcttcaacccatacaaattgtatgaatacaaaaaattacctgcgggcgatcaatgcgtgtgcgtcagttcactagaagcgttattgcacagcaggcactcgggtattcttttgcaagtaacagaaaacacccgtaatgtaaacgacagggcagtagaagtaagatttttatcgcaagagcttactcttaagctgagattaaaagaataaagacgtgaacaatatttcaacgatttttttattcttagcattgtcgttatgaactgaattgagtaagttcgattcgctaaaacataaagattttactttataagtacaaaacattcttgtgtataatctgttggagcacgtatatatgtgcatgtttaatcataacttaatatccaggataaagagtgtcgagaacttattactcaggattagtttaagctaagtttgacgtcagatagtgccccaaattttgtattatattatcccttacccactgcagtgggtcataaaatcatataaatatttatataaatagtaaaataatttactatatgaaagtttcaaaatacgataagacaagcagcaaataaaatgagtcattagtcaattattcctaaggacgaagggcacaagacatgaacgttatttgtatcgcattttgaaacaatgattcacacatttctttggaaaaactatctttttaaaatgttttatgtttatctggcacaactgctcgaaaacagagtcccatttacgacaagggaaattaccagtcgctacctccatcaaagtgatgcccaatgaccaagcatcgcttcgtatatcgttacccatggtacgttctggatcgatactaaataaatttactaaatcatataaaactgtccgagttcagcgaccagaccacagatgagcccgaaacagtcgcaatactggagacattagacggggagtacggaaggagaccgaacgtttgaccgagaggtcaaagtcatcggcgttgaaggtctggtgaggaacctcgactacaccagcatggaggaggccagcggaagcatccgaaaggcagggattcgaacaggaaagtcgggaaggcagtcgcaaaagataagagaggcgggaatcttgccgtggccagtgggcgactacaagggcagcaccgcaggattacgcaaattgggcgaagcaggtgcggaaatgacatttcgttacgagaggaacgagaagccattggaattcctggaacaggtggaatggtcagcaatgacgtatcgactggacatcaactagatcccaagagcaatgccggatattctgaagggcacggtcttgaagtggtttattgtcaacaacatcttttgggaaaggtgggccgagtttatacagagcttcaaggaattcttcgtgtcctgaggccccttgacaaagctgaccaggtcaggcagaggagtggacttgcagaccctaatgcgacccttagggatgtcgcattgagtcatgccattggcattgggcgagagcagacttgttttgtgctgctttccaactaatatataatcaactaataaataaatgacaaaatcagtgaaattaaaatgcaaaacgaaattcgtgagcaacgtcagcgtgaacaagacgatcgtgggtctcttcaatcaaaaacaacgcgtatttctcgttcgtttctacggaaacctccaagccctccaaagaccagagagcgcactcgtgctttccgtcgttgccaagcacagttccaaaatctttaagtgaagagtgcgcttccccaacgccgcaaccaaaagcaaattacacacacactccgttaaccattaacttccagcacagctgc

SEQ ID NO: 25610 - DNA, 210 bp, DROSOPHILA
atcgatccagaacgtaccatgggtaacgatatacgaagcgatgcttggtcattgggcatcactttgatggaggtagcgactggtaatttcccttgtcgtaaatgggactctgttttcgagcagttgtgccagataaacataaaacattttaaaaagatagtttttccaaagaaatgtgtgaatcattgtttcaaaatgcgatacaaataa

SEQ ID NO: 25611 - protein, 63 aa, DROSOPHILA
MGNDIRSDAWSLGITLMEVATGNFPCRKWDSVFEQLCQINIKHFKKIVFPKKCVNHCFKMRYK

SEQ ID NO: 25612 - DNA, 2390 bp, DROSOPHILA
taatagcagatatcgaatgactaataaatgaacacaactatgagctgaaaggaacttaacacccaattgagtcttctttaaaaaaccaaatgactatgtgggcggttttagttttcgtatttattgaaaacggtgagaaaacgtcttcatcacaggaggaaatggcgctactagtgggatcgttagtcggtttagtagcctttcaaaatgaccacaagactgattgtaacattttcatggcataaccaatattacgtgccaaaaagctttaggcgatcaacgagacttgtaaattgaaagtacttaccccagttcagttaataaggatgtataaattaagccacatatgtatattattttattactataatatagatgtcaacttaatggcactgtaatgtgatgacaaaaaactctcaggcgacgttaaataaatcaaaagatggtcgtgacacctcttctcccgtgggtgcagttaatggcagttgaaagcacaatatataagttggaagtggaccaactattcccacattcaaaatgggtcagttgcacctactgttagtcgccttggttctccttagtcctggcggggatagcttctatcatagtttaattcatcatttgaatcgtgaacttaaaattgaatatgttctgcttttgggcaacttcgatacgacttggttagatattttgtggcaacttcctgtttccgtacttcaaattaaagagcactctagggaaacctatagcttgcttgaaaatccgtcacataatgtccttacaatagcttttgttaacgattcaccggaagacatactggaaattttataccgcaatctacgtatgctaaacacacaaccagtgctgttggttataaggaaatcgacaattcgagtaaattcgttgttggaatggtgttggcaccatcagctacttaaggtcgtggccattgctcaagattttatggtaagttgtaaatcattacttaattaataacctcttaatatgagagtgtagtgttttctcttttcgtggtcattaccgaaccttcttctgacatcgtgccatctgttatttgttgttcatttttgtcagtataaacaataaggtattcgtcttcatcagctaaagcattacatagaagtatgcattcctttttagtttgaaaacgattcgggtttccgccacaaccaccgtagataaattctacgcatacattgttatccatgtcataggcaaacatttcaaaatttcccttgcaagggccaggatttgcgatgaaagagcatctctcttaaaataaagatttactacgtaggactccttgagctataaaaataacttaccatgtctgagtgccgtagaagtcccggggactattaagaaaatcaaaaagtagtgaagcgaattcatgtctgtgaaataatttattgtttgtttttgatgtgttgaaacatacaaatgtcattatgaaatattaatcatacgccctgtgggatttgtcctatattttcaggagtctttgattgtctacagctacaaccctttccccgtcttgcagtttatcgagaggcgtttggacaacagcaccgtaatattcgaaaaacgattggaaaatcttcatggctatgaggtaccgattgccttgggtggatcttcaccccgactgattgtctatcgtgacttggagggaaaactgattttctcaggacctgttggtaatttcatgaagagctttgaacagcgttataattgcagattggttcaaccatatccttttgatgagtctgccatttctccggctcgtgatttaattgcttccgtgcaaaatggtagtgtccaaattgctctgggtgcgatttatccccaagttccatatacaggatattcgtatcccatcgaactaatgagctggtgcctgatgatgccagtgccagaggaggtacctcacagtcagctctacagcatggtattcagtcccatggcatttgggatcactattgttgccatggtgttgatttcattgactttatctatggctctgcgtcttcacggatatagagtcagctttagtgagtactttcttcatgacagctgtctgagaggagtcctgtctcaatccttctacgaggtccttcgagctccagccttgataaaggccatgtatctggtgatctgtttgctgggactgctgatcacctcatggtataactcgtacttctccacttttgtgaccagtgcccccagatttccacaactcaccagctatgagagcattaggcattctaatatcaagatagtgatttggaagccggaatacgaaatgcttctgttcttttcggaaaacatggagaaatactcgtcgatctttcagctgcaagaggactaca

SEQ ID NO: 25613 - DNA, 337 bp, DROSOPHILA
gattttcttaatagtccccgggacttctacggcactcagacatgagagatgctctttcatcgcaaatcctggcccttgcaagggaaattttgaaatgtttgcctatgacatggataacaatgtatgcgtagaatttatctacggtggttgtggcggaaacccgaatcgttttcaaactaaaaaggaatgcatacttctatgtaatgctttagctgatgaagacgaataccttattgtttatactgacaaaaatgaacaacaaataacagatggcacgatgtcagaagaaggttcggtaatgaccacgaaaagagaaaacactacactctcatattaa

SEQ ID NO: 25614 - protein, 80 aa, DROSOPHILA
MFAYDMDNNVCVEFIYGGCGGNPNRFQTKKECILLCNALADEDEYLIVYTDKNEQQITDGTMSEEGSVMTTKRENTTLSY

SEQ ID NO: 25615 - DNA, 14341 bp, DROSOPHILA
gcactcttgccgccgatgcacctgctcgccaaccaaatgtaaacccaactggccaccgaatgtgggccgccctaatggagttgtccccgggcccaaggttcgcaacttttaccagcctgctctgggcgatcattagctgacagaaggcctcactcgacggacaacattttttgggctttaagtcttagttaaaacttcttttttgggcttctaggggatcttctatgcattcggaaggatacaattgctgatgttgggatatgtacctatagtaagtcagcaatgaatttgctttcataaatatacattaaatcttttaaagtgtatcctttacgcagaactttccatatctaaatatgtctcttaaatttaaaaatatattataaattattctagaagtatcctaaaaaaatctattaggtgaggcttttgaaatccttcaaaatcagtggctgcatccttatttagacagtctctttctcgtatgacataacatccccctgttctacgacattccagaagccttgttagggaaacctttggtcctttctgggagagtatcaagcgattcggcgcagagagcgaacaaagatcgaggtaccctttatttttcgagagtaagagagttcatacgagttgctaaggatatagctatgcatcttattctgcatttaaatttaaaccaatacactatgaaaatccttaaacaaaagtataatttatacacatatgtatgtatacttaagttgttatattttatgtctagctaacgtcagactccacgacttgaagtgttactttatacattctatgccccttaaaaggcaggtagtaggtatctaaaagttgccacccctgcgagctgcgttcctttttgcagccgctgcttctgccggcgtcggcagagaaattcgagtctgagttctgaagtcgttttcgttgaggcgacgagctgagtcgccgctgtggaggaaattcaattgcgcgcaatccatcggcggcgacggttgtgtctcaaaagagccttccaactcctgactactactgatcaaaagaaataaaagtaaaaagtgaccaagttactgcggatcgaggaagttaaagccttgagcctccggcacgacgatggtgtgttaaacatttttgtgcgcttgtgtttgtttgtcggtgagttgagtgcgcgcgctacttttatttgttaacttcaccaaacagaaccgttagtcccaagtgccctcacaaaaaaaaaaaaatagaaaaacaccaactaaaggaaaagaaacatcataaaccgacgaaatatcccccaaagaatctgtgtaaaagtgcaaagagacaaggcggagaatgcgcccgaaaaaatcaaggaaaaaataacagaaaaaacatttggctgggtgcggtgatcttgaacccgggctcaactccgcgtaacggtgcatcggcaagtgcaggaagaaatgggtgaagatggaatagaggaggaaggaggagaagaaggatgaggagcgcgatgaggccgttgcatttcttttgattgcttgtgtatcatcttcggggatctctgagcgcccactctttttgcgggcattttccgctcatttttggcgcagcctcccaaaaggtaatctccccaagttcccaagaccagcgttataaaactgccgttagtttttttatgtttaaccgtttttgggcgcagccgcgaggagtgactctctcctgcagataattacggcaaaaaggtgaagaatttatgctgaccatcaaaatagctaatagttggaagttaaactaaagcgctctgctaaaaagtctttttgcgcccaaatgattgtgcatataggcggggaaaatggcgattttcctgtcgccttttgatttatttacatgtgcttttgcagaagcacaaagaaataagaagccattctttgtgcagaagtcaaacaaacattctgactcattctcttcgcgctcttttttgttgaacttttatttgttttttaacatgagccccagtgcgggagaaagagcaagtaaagttaaagtaacggacaaggaacataagcatcgtcatcgcccccagttcttctccttatccctaccatcatcacgtgtcgccaactctgttcttcgcctacacagacataaaatgtgaggatcttaatttaaattagaatggcagttgtagtttttaaaaagtatttaaactaaatattaaaccaggataacttatttatttttcaaaatcttcacactttcttcaagaaaccgattgattgaataatcattttgacgaactttgatgatgattcgtataagctatttctctcagtgcacgctttttgctctggccatcagccatgtcagcgccttcattataataatttttattgcttttgcataaatcaaaaatcatggaaaaagaaacaactggcaatcgtaaaatgtgaagagaggctacaaaacataaaaggtgcgtttttcgactgtctgcactaatttcacaaaatgttgttcgttggacccgcgttttccttttttttcttaatcctcgcatttccgttactgttgcttttgtttttgtgccaaatcattgcggtctctgcatacaaattcattagtgacggcccctattctttgctcttcttgctcctttggaagaattctccatcttcaccttctccacctcccacacactctcgtttctgggaattgccatttttgtttttgttgttgttggagcacctttcttgcagcggattctgcaggaactcacacggcgccctctcttctcatccccattttttacaaagcctccttgtttctcgcttttctacagaattatgcacaaggcctaggggcaactttctttttgtgtgtttttagttcacagttgataggcaaaacttctggaccttttcaactcaaatgtagataataggaaatcaaggaaaatgctgcagtaaaactactttcttgatgtgaaatattatttatacactcatttctttcctatactattaattataacaattcatgggtcatgtaagcatttatcgtagtccatatcaatcagtcccaatctgtcttttgccacattagtttcccatggagtgaacataaccttctaacgcaacaaagctccacattccctaaataaatttcaacactttgttttgtagctctttcggagtctacaaaaccgaagcgcacaaaaaattaagatcaaatttttaccagctgcttagtttcaatttctttttgctcgattctgtcctgattactgtaaccaaaaatgtgacccacaccccctcccaaaagcccacactttgacaatttggtcactaattttagggccctatactccgatgtctgagcgaaatacagttgtcggtaaaattttattgatcttcgttttttctgcacaaaaatataaaattgtttcatggtcgaggctcgtcgttgctgttgttgccgacgaaatcgaaatctcgccaagaagcaaacggcaatcagcaaatcgaattcaaaacgcgtgtgtggagggaggaagtcccagatcccagaagaagatcccttaagagagcccaaagagacgactccagacttgagacgcgccacgacaataacaacaacaaagccgcaatcagcaaatacttggtttaggcgggccaatacaccggaaacaatcaagactaatattgacatgacataccttaactaaaatcactttgataggtgcaaagatagtttcaaggttccagtctattcaatttatatgtaattatttattcaaatttggcgaggttattaattatcttatttgaccgttatgactgggtaatatttggcagtgtagccactgtcccatcgaagagccacaaagggccgcccgaaaaaatatttttatcttgatatttctgtttttttgccgctgtttgttgttgttgctgttctaaatacgccaaaagttgctttcagggcataaatatatgtctttagtgtggcatgtctggttgcgtttttggaacttggtaaatgggaacgaatacagacggacctgaccaaaaaatctggacccgggatcccaaagtcgggcagaattcatggaattagttaacgattaatgattggatattgatttcgcttttgtggcctctgagtggttggatcgagtgactctctttggcaacttggcccgtccgtttcgcttttactactcattaatttcctttaactatcttgaggggcattaaaaaacactgctgagcaaaatgaagttcctgcggcaacatcttattcgcattggcttctttctccattgaagaagccactttacatagtttatttgcgttgttgccaactttctttttgagagattctcttccttatagcgtcgctaacagctttacgatctgagcagacataaaactcgcagccaaggaagataacactctactgccagtgccagaagaatggaatggggattctacgctgttcaggtagtattcttcgtttctgggaaacttaatttgtgctcctggccgccatatcaaattggcgctatcgaatacctaacagggggcaaacatatacccgtttgtttacacatatacacatacatacatatgaacacatgcatgtataggcaatgccccatataactatgaagcaccagcttaaaatttgcttagctcggtctcccctctgcgaaatttgaggcttaaattcttctcgatgagatgccattcggaacatcccatgccgcaacccataccctacacatttgcgtagaagcggcccgaaaataaaaagagaatagcaattttaatttgtgtgagaacttggccccattcggtcttcgggatttcgttcactttaaagatgctgatgatcagggtacgacggggggattaagatggcgcatatttaccgccgatcattagctattagaccgaagactccttggcaacaagcccgattcttcagcgcccagattgtgagccactgaagacgcggagtaattgagccgttgtagctgtagcctcgtccaggcccagtcttccgactctagtcttcagacgccaatctgcctgccattgctaacgagatacgccaaactatttggcaattagcggataataacatttggttacacatttgcgaaataatgagaaattttatgtggagatgccatgaaaagattacgcactatgcgtcctgtaaaaggtgtatgattttatgacacgactctggcattcttctataatgtaaagtgaaagacagcgctgtcgagctttacttggttatcacgaaaggttcagttttatgtatatttatgtataatagttgaatgcggaattgcaagtacgccttcaacttttaactgccatgtttcggttaaatcccaattctctaaggacagttccctagaggaaattgcattataagtgtacaataagtgaatcattttttaaagaaatcatattctcgatatgaatgaaaatacaaatagagatttcatagttcttggaaaaagtcagaggaaaaagctgagaaaaaacactcatttggagaagcaggatatcgcacttaaccagcaaaaagataacgatagttggctgtgagaatttggttggcaaatcctgtccagtagcaaatgaaatgagataattattatttagcaattcagcgtaatggaatcaagtcaatattccagttgagtgcggttatttgccttgagacactggctttttgcttgcttttaaagtttgatgccattaaacagagactagcactcgaaaccacgttttcccaatgaacaataatttctggtcatcctcgtgcgtctggcgaagattcttttggagctcagcctgcacagatgtgggcaatcaattggagaactcgcggagcgaaccccaataaacgatgcgctgatggccgaccatttcgactgatgactgcacacgtccagggagaagtggcccatattacgccataacgatatcaacgaaatgaatgtgcttcgacttacaagagaagccttttacattgagggaaaatttaaaaaattattcagggtattttcaggaaactaatttgttcaagattttgaaaaatcaagttcgctctccatttgcatggtttttaaaacagattgtaacgttcgctgttccggtctctcatttgcgtctttttttcccctaattctttagtcagactctacaattacaattattttcactacagtttataccaagcgtaacttccgaatcaatttctttgagatagttggtttctgcaagttaaattagactttttcccagtgcaaggatggaatatagaaaaggggttggatcaccggagacatgcccacttgtggcgcagtctctcttagtgcgccaactcatattaaaccaccgttatgcatatcagccacacaattccacagaactgtattctgacagtagagcggtgaagaaagcagggggggacgcaaacagatcgccacatatcgaatgaagattggcgtggccgtggcgtaaccctttaattatgccacatacgaataccaacagagtgagtctacaatccaccgagatcgttctaagccgcatttcgggatcgggctcacctctccacgtcaacgcctttcgaatggcactatgggttggtcttgatcttggtcttggctttggctttggtctggactctcgggtataactcctctgctactttctaaaaatctgtccgggaatataaattgcagccacgttctcgctcctttggtgagtgcgagtcaaaaattctgcagcactctgaagccgcatcttaattgcatttcgattacgctgctcttgctgttgctgcagcggcggctgctgcaaaaacaaaccaaccaaaaaatggcttggcaaatctagaagaattggaagcaagagcaaatcaaatctgtgagtgtttgccgaggcaacaaatgttgctggcaacatgttgcacttgcgaacaggcccccagcaattggtagaagttggagcctgccaaatagacaacagatgagacagccaggcacggcccagtccgcatctctggaacgccttttgcgcgatctgctgctgggcccctccgaccccaaaacaggttccttcgaccatggccaaaacgatggccaagtctggcgacccgacagcctcggctgctggagcctagaaattgtaacagccaagagcggaggttcggttctcaggcagcagacctttctcactggtcctgggcccatttaatacagttatttctattcgcggccctcgctcgatctacagtggaaactctatgggaggaaattttctcatcagtaatttttattttttgacatatgatgaaaaaaaaaattagacagaaatattggcctgcaataaaaagcataaatattatcttcttgagctgactttacgatcattttctcaaatcatcaacaggtatttcttttttatttcctgtactaaactctatttgctgttaaactgtagactataaaatgattagtttgtttttaatagcccacagttggtttatttgcatattttatacatgtaaaccattgcacattctttcgcaaatctctagagatttaaatgcctcatgaattaattgaaattgcgaacattacttggataatgttgagatttttaggtgtttgatcaattctaagttgcgtccactgtatctctgtctctcgaagaagcaacaagtacatcaacaatgggaaatgcaaacggtttttgtctggaagtcatggccatccatgaccattcccgttcacttatccctggctgccatcgaaggctttgatgctttcctaagtttggtttggtttggcttggtttggcactgcggctcctgctctcgagtcattaaaaacgattctactcgaactagaacagaccaacgggcaacgaaaaagcttacaagtctttcgcagaggcggagaaatagccatcataaatgtgcaggagaaaggccagcgaaacgaactctgaatgcccttaatgagcgcagatgtgcaagaagaaaaccgtagaaaagacaaatgggcattttaaataaatgttagaaaaggagacgatacacacacgtaatgaatagccatgaaaaattacgctatattagttgaattcaaatccaaaatccaaatggaaacctctgcaattaatttaccttgtgcgagatcaaggagaattgcaaactggctattatgtctgtctattgccagcccccaccgtatattttcgaaaggcctcctctttctaaaaccgagcgccttcaattcctgcggtgattttcgatcgcgatatcgagaaaagtgtgtgctattgctgacttgtcagctgttggcttgagcaaatattattacttgatccccaccgccgagccactccagtttttcccccattccctccctgccagctttttcaatgaattattagttatttcaaatttatgtgccgtgctgtttctgttttatgcttattctactgcctcgtctcgtatttttttttttttttgttatcgtgcgtctatttgcgtttccgctctccgatctccaagactcggacttggggtctcttctgggcctttcctttcgtttgctgaatggagaaggctagggcagaagcgcccgaggactgaagagagtcttcgaaccgttgggggcgtatttgcctaacaaaaataaataaatatgaatttattgcagctcttgctcagtgcggaatttgttgctgtgtcgcagggaacaacattaaaacctaatgccatcttgggccacgaaaagcgccgccagcagcgatcaaataaacaaataccgagcaaagctccgcttctccactccccccagaagatattattagtatttttatatgctggttttcatttggggcagataagcgaaataagctgaggctctcaaacagttggagcagtaaataatctttggaaaagcctggaaaaagggggtagcacgggtgtgtttttgtagacttctttttttttgctgccctggcaattcttccgctcagcagatttgttcattttttctgcccgcctccgagtggttctggtttctacgaatttgtcacgctttggatttcaaattttgttgatgttagccaactgttaatggaccccgcagcatactttcacatatgtacatacatacatacaagcttcctcttgcaaaatgatgtgaggcgtaagtaaaaggcatttaacgcttgattttgtgcagggtttagttttacctgctcccgatcctatgcgatcagaaactcccactcctcgaggacccaggactattgttgggcatttcgcagacccgcacaaaggacactcaagtaggggcggaaatttaatatgaactgctgcttattttttgtttctctgcttttgaaattcgagatttttgggctttggtcgatgctcctattgttcgcctacctgcctacctgttgatggtattatttgtgaatgtttatcaagatgttccatgtacttgctgaaactcaatattcgtgatctgattttcagccgaatataaatatgaatttcccgtaggacgggaaggtgtcaacgttttgcatttcgaataaacattgcacttgtcccggcctatgggcggtttgtaataaacaactaaaatctataaaatttatttattattactaaagtcatgtctcgtatttttgcttatgaaatattttctgttgtttcagatctcgaattcgcaatatcagaacatctgtgttattttaattatataaaagtatatatacaggtgagtttgcttcttgtttattctatgttcttatgtgtactcaatcgctttcaattcgtgttcatattatcccacacttcccagttacatttgatatttaaacatttcccaagcgcgcgcgctattctggtacttttcatcccttttccgttattaaaatgcccgaccgtggttgccacttgtatttgagtcgaaaacgctgccacctggttggctgtgtgctagagatgtgcaattgaatggtctgtgcaatgaataaaaagtgtcccaatggtgcaatgcagtttaaaatgattaaaaacgaaaagttaatactataaactacaataaaacaacccaaacgtagcagaagttagagtggtgctaactgggttgactgcatgttcaaagtcgggcgtctcgcgcgaaagaaatcgcctcacggtcgcatctctactacatggggttcggcgcctgtgtgagcgagagggttggtgcgcgcgtggtcgtgcggttgtgtgtctgtgtgagtgcctgtccctgtgtgagtgccgctctcttgcggcttgcctcgtccgtaattcgtaaaatataaaaataaaaaattttttcagtttcagtttaaaaaatattctcacagcgactagttgtgcgtgcaggcaaaaagacagagcatcgcgagcgaaagagagcggcgaacatcgcactggcggagcgtcgtgtgttgcgcaggcaatcttaattaatttatttacgtctatattgattttttaaagtaacagccacagctacagttagccataatagccagctagaaagcagaggcaagcccaagcgcaacgcagagcaaagagcgcgcgttttaataggtataaaaataaaaatacacactaaaaccaacctgaggcgaatctaaattgtatttctcgaggtgagtaaatctataaaaataaattaagatatttgttaattcgatattgccagccagccaaaaataataccagtttctcaattactcggtaatgtctgctttctttttattttagttttattatttctcttcagttttttttttatttatttattccgttcgcacagcgtaaattagtggtagtctgcaattgtttatttaaagtttataaggcgactctttatgtttatctgtgtgagcagagcagcgcagctggcgtcgcttaaaattaatatcaagcagttgcgagcgcgtttctgtacttttttttttaggtagtttgatatttttacggtattcgctggctttgtttttattgcgctgctggcgtcgacgccgacagtgcgcgtcgttcgcttagcaccaaaactgagcgatagagagagacagagagcactgaagatgcagttttgttttatatacacacctacgcacgcgtatatatacatgtaaacggctgcggctgtgtaaaatgcatgtacgccgttaaagcggatgcagattagggatggaaagcatagatttatcggtcggttatcgttaaatttaattactatctagccttgattttgtgagcagtaatacctgtccgaagtccaattactttgttgcttagctattatgccgcttaattctgctttgggagcacctaatttactttgtatttaatcgatccgtatccctaaaagatcaccgatttatcgaagtgataatatgcaggatacgatccatccagcatcaaaacctcaagcagttttacgaacattcagtagttctcacacgccaatgcttcgtttaatagtcttcttctgctcgaccagactttgttttttaattgtttatgctcccttttgttgaaaaaccggtaactaagtaagtgtgtatgtatatcctcaaaagtattccttctttcttgtgttcttttctttcgctggatcgattctttttttagacctttgagcggcattaattatgttttagaaaaagagcggttataaagtaaaaaaatatgaacattcaagttttcatgtattatgtatttttaattttttagttttttaagtcagttcgctttgaataactttttagttaaaaaaaaagagaaaactgaaaaatcaaaactttaacaaatcacaaaataacatttaaatggaaaataataattctttcattgttgaaaataaccatggcagggctggaggaggaatggagaacctgtcgcacttgtatccaccgcagttgccaaaggggcgtggtcggcctcgagcgacatacgcccaaacgggcgagtttgatctgggtctgatccgggaataccgatcgcacccagtgctgtacgataggtcaaacaagcggttcaaggacaagctgtatgtggcccatatatgggaacagatagcccacaaactgggctacgatggtgagcaaggggattaaaccagtttgagatgacaggaaataattctaggcatattcccatcttaattcgtagccaccagtataagggaacggatgaccacgttaaggaatcgatataacatcgagaagcgacgcgtcgagaatggcctttccacacagtcttcacaatggcctctattcgaaagcctccagtttctgggggatcacatacggcccaggcgcagctttaagaacatgagcgtaaaggaggaggatgaggagacctacgaggtggacgattgccggagcgacagcaacgggcatatgaacagcatcaaggacgaactggaggacgactccgagatcttcgattgcgagcaggcactccccgtgaccacagtgttagggtaagtccatgatccattgctgcctaacgtaacatttgctaataacaagacatcatttctttttaggattcccctgaataactctgacgaagccaacaagagccagcgctcgacgaatggagaaatgcccaatggcaagggctacaatcactttgcggaaagctatcaccgacgacaccaaaaccagccggagtacatcatcagtagtccaattgttaatcccatgaggagcaataagcgtggatcacagcacttggacgatcatccgtcgaaacgccgagtcgacgacagtctgtcgatatccggatactatccaacacaacctctagcccccttgccaccggcgtacgccaaattccggggatttggcgagttcatgtgccactccctgtgcgatatgccagcggccactgccttgcgcttggtgcagaagttcacccgcgaattggtccagtcctcgcttcgcaacgaggacagcggcagcaaagaaaagacggatgaggtcgatccggtagatcagagcagcgagtcgcaggaggaggacgagtagatttaagttacacttttaaattgagggtagggatattggcacgcgtgtctacatctatgcgtatagcataaaagctgcattgatgacaaattcgattaattcatttatgatttaattatactcttttaagtcttctagcctcgcagtaaccggggtggaagatccaagcatttcatttattaacataatggaaaaatacacttatttgctttgttttaaaggcaggggaacgggtcgactaatccaaattgattaattttcagattcggcaagagcataatactctatctgtaagatgcacatctgtaatggtatagaatcctataaatcctacataaaggaccatacatattttaaacaataattcacttcatggtttcattaaggcgtcaactgaaatgcaaatatacattatgtatataagtctgtgggatcagacgcaattatgacttcgccacgaatgtgagcgtctttcagtcagcgttccccttgcgcaactcggacctctataagggccatcattatcttacacaatagtaatctgcccctttaaggggcatatacatatttccatttcccttggcagacttaaagcaaacaaaaaggtccttaagttttattactttctgtatgcgagaaccaaccctaaagcttctgaaagcttccaccttcggcccttgaagctaaactttgattactatcccaaggaaatagtttcactgaggaagagctattcaagccagttgaactgtaggccatgaataatgcaatggatagctgaccatgctaataaactatctaccacctaattttacgcccgtcttaaaggccacccagaatcactggaggtgtttccacgtagattgctgatcgatgttgtgggacgtccaacgcaccatcattcccatcccgggatatggcgagaaaatatgtgccgggaaaactggaacctgcagtcggaattgccggcacagccgaatgcctaatgccaaatgaagtctgagtaggcacatctccatttgaccaaactgggtggggcctccaggccatttctatgtgcgttgcccccttgtttactcctttttctttaataatgcgtctatatttcttaattaaattacagcttctcgcatttgggagtgagtgtgtgtatgtgtgtgtaattacagtgtttatgtggcactcggacattcctggct

SEQ ID NO: 25616 - DNA, 1769 bp, DROSOPHILA
gcgacggttgtgtctcaaaagagccttccaactcctgactactactgatcaaaagaaataaaagtaaaaagtgaccaagttactgcggatcgaggaagttaaagccttgagcctccggcacgacgatggtgtgttaaacatttttgtgcgcttgtgtttgtttgtcgatctcgaattcgcaatatcagaacatctgtgttattttaattatataaaagtatatatacagtttcagtttaaaaaatattctcacagcgactagttgtgcgtgcaggcaaaaagacagagcatcgcgagcgaaagagagcggcgaacatcgcactggcggagcgtcgtgtgttgcgcaggcaatcttaattaatttatttacgtctatattgattttttaaagtaacagccacagctacagttagccataatagccagctagaaagcagaggcaagcccaagcgcaacgcagagcaaagagcgcgcgttttaataggtataaaaataaaaatacacactaaaaccaacctgaggcgaatctaaattgtatttctcgagggctggaggaggaatggagaacctgtcgcacttgtatccaccgcagttgccaaaggggcgtggtcggcctcgagcgacatacgcccaaacgggcgagtttgatctgggtctgatccgggaataccgatcgcacccagtgctgtacgataggtcaaacaagcggttcaaggacaagctgtatgtggcccatatatgggaacagatagcccacaaactgggctacgatgccaccagtataagggaacggatgaccacgttaaggaatcgatataacatcgagaagcgacgcgtcgagaatggcctttccacacagtcttcacaatggcctctattcgaaagcctccagtttctgggggatcacatacggcccaggcgcagctttaagaacatgagcgtaaaggaggaggatgaggagacctacgaggtggacgattgccggagcgacagcaacgggcatatgaacagcatcaaggacgaactggaggacgactccgagatcttcgattgcgagcaggcactccccgtgaccacagtgttagggattcccctgaataactctgacgaagccaacaagagccagcgctcgacgaatggagaaatgcccaatggcaagggctacaatcactttgcggaaagctatcaccgacgacaccaaaaccagccggagtacatcatcagtagtccaattgttaatcccatgaggagcaataagcgtggatcacagcacttggacgatcatccgtcgaaacgccgagtcgacgacagtctgtcgatatccggatactatccaacacaacctctagcccccttgccaccggcgtacgccaaattccggggatttggcgagttcatgtgccactccctgtgcgatatgccagcggccactgccttgcgcttggtgcagaagttcacccgcgaattggtccagtcctcgcttcgcaacgaggacagcggcagcaaagaaaagacggatgaggtcgatccggtagatcagagcagcgagtcgcaggaggaggacgagtagatttaagttacacttttaaattgagggtagggatattggcacgcgtgtctacatctatgcgtatagcataaaagctgcattgatgacaaattcgattaattcatttatgatttaattatactcttttaagtcttctagcctcgcagtaaccggggtggaagatccaagcatttcatttattaacataatggaaaaatac

SEQ ID NO: 25617 - protein, 336 aa, DROSOPHILA; identical to SEQ ID NO: 10488

SEQ ID NO: 25618 - DNA, 2633 bp, DROSOPHILA
aacactagaacatctgggacagtttcaccagatccaagagggaataaaatggcttctgtttggaatctcgctcgtgactcttaaccggaatgtcctgaagtaaatttggttccctgctcgcccgacatttgtccagcacccgttcaaactccgccagtgcgaaatcttgagtggatgacgctctcttcggatcaatagtctccagtatggcctcccactgggcccgctgcggcttgatgactatccctgcacctttgtcggctgcattaatggtggccactgctgcaccggctccttcaatcatggccagcaccagacagcccaccagagcactgttggccatggcccgaatgccattacgggctgccaatatcccaccagtggccgctccactgagtatcgagttccaggcatcctccctctggcgatagtggaccagggcgcaatccactgtgctgaaagtggcaccccaaacggcaaagctgccggcaatggacggcgttctcatcttcaccaaatcaatgccaccataaagtctgcgctgcaatccggtaggagcgttacggaaacccttgaggaactcgaacagcgaaccaccgatggtgcccatcatgaaggcacatccgcaatcctccacaatcctaatgggacacggctggcgattgtactccatggccttgacttactatatcaaaacctttgggtatactaatattcttcaagtggcttcaaatcaaaaacttgtgttttggaaatagacttttgagtaaacataatacgaagtgtttgggatgctgacgtttgcgtcctttctagatgtttacaattttatgatattaaatttgtatttcaaaaaacggattaaactttaaaagtgaattttttttatttaactattgaaatgtctatcgaaatccagcccagtcttaatctttaaatatatagttttttcttgataaccgaataataggtgttttatcagtatttcgggttcatatattcagttatcgaagtatttgcggaactcctggcaaccagcccagttttcctcccaaccgggagtcagtttcttggcattctcgtaccaacgtgccacattggcataccgcttgaaatcgaagccagccacatcgaaagtggaaacggtggccagaaaggcaatatccgccaagctataatcccctccagcgctgtaggtctgcccctccaggaatgtgtttaggaattcgaaggccacttcgatcttcttgtagttctcctcattggcgggcttctttaggaaaatctgcggataatagtactcggagaagctcttatacagcgtacccatgtcgaagtacaggcgctgattgatcaacgcctgcttttgcacatccttggggaagagcttgtcgtccttgccgtacttctccaccagataaaccataatcgcccgcgactcccacaaagcaaatccatggtcgtgcagcgtggggatcgtgtgctgcggattgattttcaggtattccggcgtgaattgctccctagctcgggtgttgataatggtcttcttatcgaactccacacccagtgccttggctgtcatcagaacagagcggcagggagcagatccgggtctatagtataaatccatcttacgctatctcactttctgaagggatctctggaaactgaataaaaaaaaaaacgaacagctaatcactttctcatttcgttcgctgaacctggttacgcaatctctataataaattcatcaaaaacaacaaaagtatacatacctacgtggtaatcaaatatactcggctgctctgctggagtcaaaacgcgacaaacgactgaaaaattctctgcggtttagtcgtgttttataagaaatagaagataaccacaaaaaatactcgtagaatgtttcggggctgatggatcaattaggtataggtgataatagtcagcaatttttgggctagcactggacacaagagaaacttctggaagagcagagtgcagctgtattaccaatttcatttcgtttagcttcccgttgaactaaactttacgtaaatcatgaattagtacaggtgtttgtccaaaattaccatttgaatttaattgttttggctatcgctaaaatcacggcaggtggcatttcagcaaaccgacacgtagcaatatcttatcgctatcagaatgtttggagcagaggatcctctgccttatcgctgtacaaaagccaacaactcttcgtttattatactcattgtcatttcacaatgtctcactctttattcaaacaggtcgatacagattagattatttattacagacccgtcattgtttgttcaaaatcgcacccagatacaatttcttgtagtactcgcagccctcccagttctcctcccagccgggtatcactttcttggcattgtcgtaccacctaaccacttccggatatttaccaaaatcatattccgatatttcaaaagtggaaacggtggccagaagcgcaaaatcggccagagtcaacttgttgagggcggcgtactgctgacccttcaacagagtattgaacatagcgaaagcatcatcgatcttcttgaggttatcgggatcagctggcttcttcacatcctcga

SEQ ID NO: 25619 - DNA, 633 bp, DROSOPHILA
atggatttatactatagacccggatctgctccctgccgctctgttctgatgacagccaaggcactgggtgtggagttcgataagaagaccattatcaacacccgagctagggagcaattcacgccggaatacctgaaaatcaatccgcagcacacgatccccacgctgcacgaccatggatttgctttgtgggagtcgcgggcgattatggtttatctggtggagaagtacggcaaggacgacaagctcttccccaaggatgtgcaaaagcaggcgttgatcaatcagcgcctgtacttcgacatgggtacgctgtataagagcttctccgagtactattatccgcagattttcctaaagaagcccgccaatgaggagaactacaagaagatcgaagtggccttcgaattcctaaacacattcctggaggggcagacctacagcgctggaggggattatagcttggcggatattgcctttctggccaccgtttccactttcgatgtggctggcttcgatttcaagcggtatgccaatgtggcacgttggtacgagaatgccaagaaactgactcccggttgggaggaaaactgggctggttgccaggagttccgcaaatacttcgataactga

SEQ ID NO: 25620 - protein, 210 aa, DROSOPHILA
MDLYYRPGSAPCRSVLMTAKALGVEFDKKTIINTRAREQFTPEYLKINPQHTIPTLHDHGFALWESRAIMVYLVEKYGKDDKLFPKDVQKQALINQRLYFDMGTLYKSFSEYYYPQIFLKKPANEENYKKIEVAFEFLNTFLEGQTYSAGGDYSLADIAFLATVSTFDVAGFDFKRYANVARWYENAKKLTPGWEENWAGCQEFRKYFDN

SEQ ID NO: 25621 - DNA, 5865 bp, DROSOPHILA
attatgaatttctggcgtatttctgatccacttacgtcgcagggacctcgcggtcctttcaaatgcatcgcacagatgtcaagcggtttgaggaaaacgaagcgatggctttgctggcactcatcgttctccatggtcaagaagggcatctcctggagttttcttatcttgccgacgccaacccgaccccagccaaccagcgaggcctgggtgccactatccctttgaggctttccagcaaagttaatgctacgaaatcgcacatcgtcgagcgggaatttggggtaaatcctcaacacggcaatgtcgttgccgccgagcaccctaaactggggatgccatcttctttccacgacgaagaagcgggtctgcttccggctgttcagcgaatcggcgccaccagccacgtacagttgtttggttggattcgtttggatgcagtgggctgcactgagcacgaactcattcgaaagtataacgcccacgcaaaggtgcttgtagtatcctttaaggttctctcctatggagacgatgtatggataacgagggcggaaacttatcaccttcgtggtcgacacagttgtggctaacaaaggtgtgctattctgcggggtgtcggaaagcgtctcctgggctgccgacatcgcggcgaaccaagctatggagcaaagagattgccaacaacacataactgcgaccaagtcacgaatacaaagacgtcacaaagacgtcttgtagtcaggttttatcatcaagcatcttaactttataattgggcatgaaattataattttctgtattctcacatggttaactttaaaagaatatacatttaaattccattatattatcaaactttataaagtatagcaatattttttttgaagagaaaaagcttgtacggttactatctacacgtctgcaaaattatggaaacagttcgaaaatagcttaaaagaaaatcctcattagacccctataaccgtgatcaatagaaatgctacttgctagtggcagaatctctgagggtctgcttcatattggccacctggttgagcttggcaaggcgcttcatggtttcgagctccttaataaacgtggccagcgcctcttttgtggtcgagatgtcagcgtcctttaagtcatccaacgtgtcctccttttcaagttctaaaagaaattcaaaaatatatatagattcatatatactcgtgacaaaaattagttttggatactaaccgtccatttcggcttctatgtcattcagccgatcgagaaccaaggattgctgcaccttgatatgctcgatcaaacggtactggcactcctccggatcgatggcagcttccggttgcggaacgttcggaaggtcgggggcctccaattttgcacgcttaaccggtgtcaacgcagtagagtccagattgtcttcgtcccactttttggcccatagataaagcttcggatgacagcggttgcgtgcgatgttaatcttcaccagcagcgagtgcatcgatcgcttggcatctagcaaattgccggtcagcgtgtgcgagcgcttcaagagctcgaattgtttggtggcctgtggatttgcagtgtgatacgcggccaccggcaacttgccttcgaatagccagtcctggtcgtgcttaaatctcatagaatcccgacccctctgcggattgcgacaaatgtagcacacatacttgtccggtacatctgcctctttgacaattccgttgcatgcaccgtgttgccagcataggcacaattcacattggatcattaggccgtcctcttcgccatactcgcagatgcagttaatgatctcctcctgccgcatgcgcacaattcgaattagttcaccattttccttgatgtactgtggtgctttgcttaacgtttcagctggtggtggggcaagggctgcatttatgtcggtctggtcattagatgatggcgtggacaccgaatctcccatggctggtgagtcaatggaactgatgggagttgttgccgcaccactgcggcgttttttcgagtcgatgcgcgtatccggagtgggggtgttaaaagattgccgtgtctcctcaacatcttgttcggttaagccatgaccagccgggttatctgacaaaatgggacgacgctgagagcgctggcggttactctttcgcgagccagatggccgcttcgacggcgacaagcgtgcacgcttgcaggaacgactcaatgaaggattaaacgactgagttggaccagcatccagagaaacatcttcttgtttaatgccactttcaacagttggcgacacacttggtggctccatcttaggagataacagggccttagtaggcgttatgtcagatggcgttgaagatgtggccgtagctgatacactctgtcgtttaaacgatcgtgactgctgcaaatcctgctggtgcattttggcaaagaattgctggttgggtatttggttttttggcaccgcctcaacttgatcgatggatgaggggtgcgtacgtttgaccgctagttcctgcatctttggacagtggctgacgtgtctgtagatttaaagtaagttaggtgtcatgagttttgaatgaatattactcactctgcaaactccttgtgataatggcgaatgtggattagcagaaagtcttctttgcgataggtcttggcgcaatcttcgcgcgggcatacataaagattgtcttggattttgacttttaggcccccaatgaaagctgaaatatggaattataatttattttaatatagcacatgttatttcaaattgcatatacttaccaaagccattttccaccacatgaggatctgctaacataagctgagaggtacctccctcactggcttccagtatttctgcttctatcttgggctttgtctcatcggcaggctgcgtctgcggcgacattaactcagctggtggcataagcgaggccaccggtgcttccatgtactggctttctttcaccggcatcggagtagaaggtaaagaatgttgcgacgtgatgctctggtccagcgtggagttcatcgacacatccatgggcctgggcttgggcggtggctgcggattgtagccgtgtgtgtagacgtaagcattgatgtctttggcacgacgtcgatggatgctaaagtcgtacacatccgggttgtagaccagattctgggactcaaggaacaacttcaagtcggacttggagcggaaacgtttgccgctgggcgagaccagaataacatcccacttgccgaggacgttggaccgctggtacatgtgcttgatccagccaggaggcagacgccaatcctgcacgataacagtgggtttctggtgctcgcccacaatcagaaaaccctcggttccaataggctggtcatttacccaatgacaagtccactcgccgtcatgcggtatttctgggagtccaagggatgctgttggttacgaaagtcaaacatgaaagttaagtttaaggcaaaactaacattctcctttcggtgctcttacctatatccaaactggccatgtccagcaacggccaatccctgcgctgaggtgcacatttgctcttcttgctgcccgaagagccactggatccgccaaggctgcctgtgctcgcccgcttcggagccacaggtgcagagcttactggagttccaacaggagtgggtgactttgaggcaccctcttccgctacctgaacagggggcaactgcttgggcatcttgttcatgtgcacggcgcgcacgttcttaacgtaaccatcgtcgaagagaacctcgtaggtatcgttgcccagcaacttgcgtatggttcctggaaacttacgcggccccgaccagcgggccatgcacttctcgtccagctcaaagacgggcagcacacggttgctgaggcgctgcctcagccgctccgacttgatggccatccactcctgaaagctgccgctggtcgaaggtgacacctttagcttgtgattgcgctcaaagcgcacgagtagcgtctgctccgtctcgttaacttccacgatgcgggcgggcaaccagttgccttccacactgagcgcctccaaacgggcgccaatagtcaggttatgtgggttgctgtacttgggcggtgtgccgggcaaaggtgagttcgaactggaagcggatccaggagctgggactgtggcttcgctgcttgcggctaccggagtccctgagggttcctttgcagctgccttgtttgcatcttctccactttcgggagtatttttaacgtcatccgccgccttgcctgttttaccttcctccgtggccttgcgttctgcagattccgacaggatttgcgcaactatttggtctaccgtagctttgatcacatcgtcattggtcgatgactgagcatttcccggggtttcagtcgttccctccacgctggcgtgctgaagtgcccgttggtctgcttcgatctccgcggtatccatcttgccccatggaaaaacggtgggaaagacgcgcggcttgagcagatacttcccattgcggatagtgttgaagtccaaacggcggaagtggcgtgagcagaccagcacgctcttggtgatctggcgctccaggctgatgcgagagtttttgatccatatggcgcggatgatgggatctagggggaaggagtggtaagtcacgccgttgtgctccaacagacgcgacgtcgacgggcagttggccacgcagcaccggcggcccatggcgatgaagttcacccaattctctattttgtttgcctatgtgcaaacgcacactttgctaagtgatgaaataatccaggaaacgacgcgaaaattatccagaaaaatacagcgcaataaattagtgataccaaattggggtacagtaaaaacgtgtgcgtcggcaaactatcgatagttagatattgccaccttgttggaaaagttcaaaactatttaacgatattttttgaattttataaaaaataaattttaaatgactttattgcatagatctttattgtggtgataaataaatactactttcgataaataaataaatattactttagagcctgagtaggttgaatttaattactttttatttctgactatctcaattttcatgaaactttacatcaatcttcctgccataaattaactattaaagttggtaaatacccgctgcacaattaatattaatcggtgcgttaatgcattttagcgaagtgagggtgccataaatttcctcagctcggcggaaaaaggatcacgtgccgatacgccaccgttcccaaggccaccgaaagcctatttgaaatgcaattaatgtacgcttttgggcttacatgtcaccacgttcgccaaaaggcagacaccttgcaaaaagctaaccaaatacgatattatccattcgacaaatgcttctggaaatatgtatttcaacactgggtttcaaagtttgaggagcagctatttacgcatactgctaaaataaacactcattgtagtttttaattacaatatttcacccggtcattagcatgcaagaaacaactgacaaatttaaatgtggcgcctgctgcttgatcggttgattgagccgccaaaaaaatcgattgaagtatggagctttggccttcaaatcgaaatatgtgaggaaaatgtgatggcacattttgaaagaataaaatattaagattctctatattgtgtcaatatcttatgtatatatgtggcttgacccctcgaattccgtaactaaacagtttagttccattacaaatattgttttagaatgatagccggaaactcacggtcgaagagcttcctgttt

SEQ ID NO: 25622 - DNA, 3466 bp, DROSOPHILA
aattttcgcgtcgtttcctggattatttcatcacttagcaaagtatcccatcatccgcgccatatggatcaaaaactctcgcatcagcctggagcgccagatcaccaagagcgtgctggtctgctcacgccacttccgccgtttggacttcaacactatccgcaatgggaagtatctgctcaagccgcgcgtctttcccaccgtttttccatggggcaagatggataccgcggagatcgaagcagaccaacgggcacttcagcacgccagcgtggagggaacgactgaaaccccgggaaatgctcagtcatcgaccaatgacgatgtgatcaaagctacggtagaccaaatagttgcgcaaatcctgtcggaatctgcagaacgcaaggccacggaggaaggtaaaacaggcaaggcggcggatgacgttaaaaatactcccgaaagtggagaagatgcaaacaaggcagctgcaaaggaaccctcagggactccggtagccgcaagcagcgaagccacagtcccagctcctggatccgcttccagttcgaactcacctttgcccggcacaccgcccaagtacagcaacccacataacctgactattggcgcccgtttggaggcgctcagtgtggaaggcaactggttgcccgcccgcatcgtggaagttaacgagacggagcagacgctactcgtgcgctttgagcgcaatcacaagctaaaggtgtcaccttcgaccagcggcagctttcaggagtggatggccatcaagtcggagcggctgaggcagcgcctcagcaaccgtgtgctgcccgtctttgagctggacgagaagtgcatggcccgctggtcggggccgcgtaagtttccaggaaccatacgcaagttgctgggcaacgatacctacgaggttctcttcgacgatggttacgttaagaacgtgcgcgccgtgcacatgaacaagatgcccaagcagttgccccctgttcaggtagcggaagagggtgcctcaaagtcacccactcctgttggaactccagtaagctctgcacctgtggctccgaagcgggcgagcacaggcagccttggcggatccagtggctcttcgggcagcaagaagagcaaatgtgcacctcagcgcagggattggccgttgctggacatggccagtttggatatagcatcccttggactcccagaaataccgcatgacggcgagtggacttgtcattgggtaaatgaccagcctattggaaccgagggttttctgattgtgggcgagcaccagaaacccactgttatcgtgcaggattggcgtctgcctcctggctggatcaagcacatgtaccagcggtccaacgtcctcggcaagtgggatgttattctggtctcgcccagcggcaaacgtttccgctccaagtccgacttgaagttgttccttgagtcccagaatctggtctacaacccggatgtgtacgactttagcatccatcgacgtcgtgccaaagacatcaatgcttacgtctacacacacggctacaatccgcagccaccgcccaagcccaggcccatggatgtgtcgatgaactccacgctggaccagagcatcacgtcgcaacattctttaccttctactccgatgccggtgaaagaaagccagtacatggaagcaccggtggcctcgcttatgccaccagctgagttaatgtcgccgcagacgcagcctgccgatgagacaaagcccaagatagaagcagaaatactggaagccagtgagggaggtacctctcagcttatgttagcagatcctcatgtggtggaaaatggctttgctttcattgggggcctaaaagtcaaaatccaagacaatctttatgtatgcccgcgcgaagattgcgccaagacctatcgcaaagaagactttctgctaatccacattcgccattatcacaaggagtttgcagaacacgtcagccactgtccaaagatgcaggaactagcggtcaaacgtacgcacccctcatccatcgatcaagttgaggcggtgccaaaaaaccaaatacccaaccagcaattctttgccaaaatgcaccagcaggatttgcagcagtcacgatcgtttaaacgacagagtgtatcagctacggccacatcttcaacgccatctgacataacgcctactaaggccctgttatctcctaagatggagccaccaagtgtgtcgccaactgttgaaagtggcattaaacaagaagatgtttctctggatgctggtccaactcagtcgtttaatccttcattgagtcgttcctgcaagcgtgcacgcttgtcgccgtcgaagcggccatctggctcgcgaaagagtaaccgccagcgctctcagcgtcgtcccattttgtcagataacccggctggtcatggcttaaccgaacaagatgttgaggagacacggcaatcttttaacacccccactccggatacgcgcatcgactcgaaaaaacgccgcagtggtgcggcaacaactcccatcagttccattgactcaccagccatgggagattcggtgtccacgccatcatctaatgaccagaccgacataaatgcagcccttgccccaccaccagctgaaacgttaagcaaagcaccacagtacatcaaggaaaatggtgaactaattcgaattgtgcgcatgcggcaggaggagatcattaactgcatctgcgagtatggcgaagaggacggcctaatgatccaatgtgaattgtgcctatgctggcaacacggtgcatgcaacggaattgtcaaagaggcagatgtaccggacaagtatgtgtgctacatttgtcgcaatccgcagaggggtcgggattctatgagatttaagcacgaccaggactggctattcgaaggcaagttgccggtggccgcgtatcacactgcaaatccacaggccaccaaacaattcgagctcttgaagcgctcgcacacgctgaccggcaatttgctagatgccaagcgatcgatgcactcgctgctggtgaagattaacatcgcacgcaaccgctgtcatccgaagctttatctatgggccaaaaagtgggacgaagacaatctggactctactgcgttgacaccggttaagcgtgcaaaattggaggcccccgaccttccgaacgttccgcaaccggaagctgccatcgatccggaggagtgccagtaccgtttgatcgagcatatcaaggtgcagcaatccttggttctcgatcggctgaatgacatagaagccgaaatggacgaacttgaaaaggaggacacgttggatgacttaaaggacgctgacatctcgaccacaaaagaggcgctggccacgtttattaaggagctcgaaaccatgaagcgccttgccaagctcaaccaggtggccaatatgaagcagaccctcagagattctgccactagcaagtag

SEQ ID NO: 25623 - protein, 1081 aa, DROSOPHILA
MDTAEIEADQRALQHASVEGTTETPGNAQSSTNDDVIKATVDQIVAQILSESAERKATEEGKTGKAADDVKNTPESGEDANKAAAKEPSGTPVAASSEATVPAPGSASSSNSPLPGTPPKYSNPHNLTIGARLEALSVEGNWLPARIVEVNETEQTLLVRFERNHKLKVSPSTSGSFQEWMAIKSERLRQRLSNRVLPVFELDEKCMARWSGPRKFPGTIRKLLGNDTYEVLFDDGYVKNVRAVHMNKMPKQLPPVQVAEEGASKSPTPVGTPVSSAPVAPKRASTGSLGGSSGSSGSKKSKCAPQRRDWPLLDMASLDIASLGLPEIPHDGEWTCHWVNDQPIGTEGFLIVGEHQKPTVIVQDWRLPPGWIKHMYQRSNVLGKWDVILVSPSGKRFRSKSDLKLFLESQNLVYNPDVYDFSIHRRRAKDINAYVYTHGYNPQPPPKPRPMDVSMNSTLDQSITSQHSLPSTPMPVKESQYMEAPVASLMPPAELMSPQTQPADETKPKIEAEILEASEGGTSQLMLADPHVVENGFAFIGGLKVKIQDNLYVCPREDCAKTYRKEDFLLIHIRHYHKEFAEHVSHCPKMQELAVKRTHPSSIDQVEAVPKNQIPNQQFFAKMHQQDLQQSRSFKRQSVSATATSSTPSDITPTKALLSPKMEPPSVSPTVESGIKQEDVSLDAGPTQSFNPSLSRSCKRARLSPSKRPSGSRKSNRQRSQRRPILSDNPAGHGLTEQDVEETRQSFNTPTPDTRIDSKKRRSGAATTPISSIDSPAMGDSVSTPSSNDQTDINAALAPPPAETLSKAPQYIKENGELIRIVRMRQEEIINCICEYGEEDGLMIQCELCLCWQHGACNGIVKEADVPDKYVCYICRNPQRGRDSMRFKHDQDWLFEGKLPVAAYHTANPQATKQFELLKRSHTLTGNLLDAKRSMHSLLVKINIARNRCHPKLYLWAKKWDEDNLDSTALTPVKRAKLEAPDLPNVPQPEAAIDPEECQYRLIEHIKVQQSLVLDRLNDIEAEMDELEKEDTLDDLKDADISTTKEALATFIKELETMKRLAKLNQVANMKQTLRDSATSK

SEQ ID NO: 25624 - DNA, 3159 bp, DROSOPHILA
aaggctctcgttcaaggctcacgcaaggtatgccagcaaaaaagcggcaatgacagcagcagccttggcgagaatcatgcccaacgtgggaggacccagactgccggctaggagactgttagtggcggtttcaaaggcaacactgctttatgctgcgcctatctggagctgcgtttccacaaagaaaacctatctagatagtgcccgcgcagtatcacggacaatggctctcaggctaatcagaggctttagaaccatatcggacgacgcaggcgcacgctctgtcaggcattacaccccattgacctggacataaagggcaaataccttgcgagtgagggatactctcaattagagatcagagagtggatttgaggagtatggcagaccaggtggcaagagtcacaacgggtacgctggacttacaaactcatcccggaactaacggagtgggcttattgcgagcacaaaacggtggactaccacatgacccagttcctcacggaccatggctgttttcgagggtacctatttaggttccgccacgaggatacagcccagtgcctttattgcacagacgcagtggaaaccgcagagcacatcctactgcactgctccaggttcgccgaggagagggcgcaactagtggcgctcgctgggtcacctctcagcccgagaggcttggttgctgctatgcacaaagtaagacggagcgttgaagaaaggagttcgggagtgagaacgcgcggataagtcggaaaagaataaaaagtgaaagcgtcgggcagcaagaggcccgcaggacacggaaggacgagtactgcaagtgaagagtgatcctgggaatggaggagaaggacctggcgtgctcgaaagggacagcggagtcagtggtcgccaaatttggtcccaggccgaggtttgcctcaaaccgtggacgataaaacctgccccataacatcctaatcccgctcgagccagcacgtggtccgttgtcaaggaagcacgggacaacgaaggcaaggcgttgctggaaaaacgccgcaggagcagcgaaatgactttcccgccatagcaagtgcactcagaatcaagatggaaggtttggtcgaggagatgcggaagactttgtccgagttcatcgaccagaccacagatgagccagaatcagtcggaattctgaaagctctagaaaaggattacggaaggagaccggccgtagaagtcaaagtcaccggtggagaagccctggtgaggagcctcgacttcgctagcatggcggaggccagcggaagcaggtccgaaaggcaggaaatcggacaggaacgccgaaacggcagccgtgaaagaagggagcggcgggaagccagccgtgataggcgggagaccgcaagggcagcgccgcaggactacgcaaaggtggcaaagcaggtgcgagaatggagtaacgatttgatctagaccggactcacagggcccgccaccagcgggacttcccaaggggagaacagaacgcggtgtgcaggaggtgccaggacgacaccgcaggcccgtcgaggaacaacaacgacaggcgagacacaagcaggcacaagcctgccacagatgccgtggccagggccattggtctcaggagtgcagtgtccggccgataaatttttgctggacctgcgggagaatcggtctaactgtccgccacagtgttcatagatggagtgcagattaaggtcatggtggacactggagccacggctagctttattagcgaggagctggcggacaggttgcagacggcatgggaggacttacctatgaggagagaagtaagaatgggagagaagtatgaagaagtcacatcgctggtcgaagtcaacataggactcggagagaggaccgttcggatgcaactgctgatcttacacaatataatcgacgctctggtattgggttgggatttcctaacgacagtggaagcacgaatggaatgcgctggaatgagcgtaacaataccagttgactcagcggggcaaagcagtccacgggagaaagtgtcagctacggacttctcggatgaattcctgaggtcggagttgaccagtttaggaagagtacaaggaacatcagccagtcaagcagcggtactgcccgaagaaccctaaaatgcaggtggagatcaacaccaaggtcgacgagctattacaaaaaggatgtatcgagctgtctagaagcccgtacagtttaccaaaagtgatggtgaataataaaatcaattcgttacaaacattaagaaaagaaagactgaaaatcagtatctttacattttgtacaaagtctggactttaaatttcatagatgtctggcgatattctgaaaagacgactaaatgcaagagcatgtaataaaaacagaaacgggatcaaaagctgatatcggaaaaatagttctttgcgcatatgaattctacgtaaaaggattcactgaaaactacctccctttacgtaagagtagacctaaccgcaattaagactccacctcaatgtctggagggacgattatgcctgtatattgtatatacctgggacagagttatgtatctccggctttagcagaatctctctgtctctctcttgctacgcaagcctcttgcaatttagtaggggatagtgggcttaaatgttagtttttggaagcagaacaggagaacgtataagtagaagagaaggatggtgctgtagtgtggccacattagggaactgttatttccccgaagcttttttgtcctatttttgagcttatgcgggaaaaaagagtaagaaaatttaaattgtttcacttgtatgttattggcttttctttgcaattgtatacatataaggtggaaccacccacaggtggcttggcactgaagattctgtatctgaagggccaaatttcgccggtagtctggactcaatatttctttgtagtggtaaactaatcaagacagttggaatcacatgttgtgaaatcagtgcagatatatctcaagctggactccctcctcatccgattgatcggattgctccgaatccttttagctgccgatcttagcaacatttgaggattgtctgtgatgcataatctcgttcgctaagccaaataaaatcttatccttcgaaa

SEQ ID NO: 25625 - DNA, 902 bp, DROSOPHILA
gaagcacgggacaacgaaggcaaggcgttgctggaaaaacgccgcaggagcagcgaaatgactttcccgccatagcaagtgcactcagaatcaagatggaaggtttggtcgaggagatgcggaagactttgtccgagttcatcgaccagaccacagatgagccagaatcagtcggaattctgaaagctctagaaaaggattacggaaggagaccggccgtagaagtcaaagtcaccggtggagaagccctggtgaggagcctcgacttcgctagcatggcggaggccagcggaagcaggtccgaaaggcaggaaatcggacaggaacgccgaaacggcagccgtgaaagaagggagcggcgggaagccagccgtgataggcgggagaccgcaagggcagcgccgcaggactacgcaaaggtggcaaagcaggtgcgagaatggatgttcatagatggagtgcagattaaggtcatggtggacactggagccacggctagctttattagcgaggagctggcggacaggttgcagacggcatgggaggacttacctatgaggagagaagtaagaatgggagagaagtatgaagaagtcacatcgctggtcgaagtcaacataggactcggagagaggaccgttcggatgcaactgctgatcttacacaatataatcgacgctctggtattgggttgggatttcctaacgacagtggaagcacgaatggaatgcgctggaatgagcgtaacaataccagttgactcagcggggcaaagcagtccacgggagaaagtgtcagctacggacttctcggatgaattcctgaggtcggagttgaccagtttaggaagagtacaaggaacatcagccagtcaagcagcggtactgcccgaagaaccctaa

SEQ ID NO: 25626 - protein, 268 aa, DROSOPHILA
MEGLVEEMRKTLSEFIDQTTDEPESVGILKALEKDYGRRPAVEVKVTGGEALVRSLDFASMAEASGSRSERQEIGQERRNGSRERRERREASRDRRETARAAPQDYAKVAKQVREWMFIDGVQIKVMVDTGATASFISEELADRLQTAWEDLPMRREVRMGEKYEEVTSLVEVNIGLGERTVRMQLLILHNIIDALVLGWDFLTTVEARMECAGMSVTIPVDSAGQSSPREKVSATDFSDEFLRSELTSLGRVQGTSASQAAVLPEEP

SEQ ID NO: 25627 - DNA, 2864 bp, DROSOPHILA
ctgtaaataagacataaaatcaatcgataaataaatgcttatatattataaaaatcaccaacggtcattgtatgttgatattatgttgattatgttatgttgatattaaaaatgttaatcaaaatttgaactggctaatcaaacttaattccatataattttttgtttttcagaattattaactctgtagtaaaatggcggatcggcttacacaattgcaagacaccgttaatcaggtaagtgacttcgtattaagaaataaccagttttttatgtaaaataatcattgcagcaagcggagcacttctgcaatgctattggtgtaattcaacaaacgtcccttccaagtaaatttgttaattttgaacgcattggaccccaaacgccaatcccatgtccgccgcaagaagactatgcccaattatttgcacagttaattgcacgatgtgctaaagacatcgacaccttaatcgagtctcttccaaatgaagacagctccattgaactccaaaattctagccttaagaggctcgagatcgaaaaccagggaactgcaagagacctagaggaagtagtgcaaaaaggcgaacttttgctagaaaaaatgcagtattctttggaatgcattgctcaggctcaattagatatgcaaataacactcaaacatgatttacaatagctgcttaacacatttttgtataaaggcaaattatttttaaatttaagataatgtatttattgcattttcgttcgtgtttacagatcaaatgggttttagtatatacatattgtttttataagtaaagtattttagcttaatttagacctaaaccattttgaacagcacctctgacctcgttgatataatttttataataattaattatagttttaagttataaaaaaaactatatatacttacacgtaccccactttggattttatgaacaaattaaatttatgtgctctaaaatatttaattcattgttgtaaataagtattagttaagtgtaccccgacatccttgggcgccgcatagacaaggtattttttcgtcttctagtggaaatttatagtcgtaagttatttcctcgttgataccaatgggttgctttgaatatattactatcttcttttcagattcaatagttataaccttagcgtagcaattcggctgaaaaacaaaattttatgttggtaacataatgtcagaacatccagcttacttacattgcaactgtgatttataaaccgagctaagtttccacatttagttgcgtcaattatagtttccatgtcaattcgaaacaaataggaactcccaatcccaattgcttcatactttgtttctcttagatcagcaactacaggtcgaatcatctgaccaacatattcaataaccatttcgtctgcagctatgggctccattgcaaataatccccaatcatgtatcgcagattttgcaaacttaagctgtttcttccgaaactttagctgattaaattttaaaagctcagactcacccatagaaccaaaggctgttaaaagtcttctctggtttgagcgagcttcgcgggaaattccttgcattttagaaattaatttattgtgatgatgatttgtaagtgctgtaggttcatcgctccgatcttcattaaaggaatcttctgtattggctttagcataatggtacttatgcttagccttttctcgaacatctaatttgtaaaatccttcagttcgcgcacatccagtcttatgtcggatcagttcgtcgtcttttcttcgcttttttgatggcggtggccaaaaagctcggtcagttgtgcagtgatccacccagtgagtattatttaaaaacatactagaaaacaaatgtcaataaaataaaaacaagagagaatgatttagtcgagttaaccgactatcaaatacccgttactcagctagtgtgaatgcgaacgcgatatttcataatttttctggatattgatattggggaataaaatgagaaaaaatctagaaattgttcaaaagtgtggaccggtttgacggctttagggcgttagagtgggcgtggcaacatgggtcaacaaacttgcgccgcgtcttagtctctagattctgttcgctgaatctcaacctttcagcttttataattcctgagatctcgacgttcgtatggacagacggacatcactatcctgatcaaaaatatatatactttgtatggtcggagacggtgccttcgaagaatctagtatacccttttactctatgagtgacgggtataataatatataataacataactaataacactcacgcgtacggttccttatgcaaatggtccaaataactcatttttataaagtttatatcttcggcatcaatgccttttgttaaaaaagtgtacaaaataaccatttcttcattctgatcacgagttttatacatatcacacggaacaaaatgtacatttttgtgtgccaaatcgggccattcatctccgtttggtgtcattttagactttacatttgacattctgggggccaaatctctctttttcttttgaatacatattgggtccttgcgaggtcggccgggacctgtcctcgtcatttggctaacaattgcaatgttctctgcttctcgttttaaaatgtttttagtttcattcaccttaccagatggataatcgcccaaagaaactgagtgtggcggcaacgaataacaatgctctagcgcaacctgactcgcctgagaagcttggctggaaccgccctcagaatacactggcgattgagttcttttggttttaccctttgaatttgtatacattttgttacaaccgtttgtaagaa

SEQ ID NO: 25628 - DNA, 808 bp, DROSOPHILA
tatgtttttaaataatactcactgggtggatcactgcacaactgaccgagctttttggccaccgccatcaaaaaagcgaagaaaagacgacgaactgatccgacataagactggatgtgcgcgaactgaaggattttacaaattagatgttcgagaaaaggctaagcataagtaccattatgctaaagccaatacagaagattcctttaatgaagatcggagcgatgaacctacagcacttacaaatcatcatcacaataaattaatttctaaaatgcaaggaatttcccgcgaagctcgctcaaaccagagaagacttttaacagcctttggttctatgggtgagtctgagcttttaaaatttaatcagctaaagtttcggaagaaacagcttaagtttgcaaaatctgcgatacatgattggggattatttgcaatggagcccatagctgcagacgaaatggttattgaatatgttggtcagatgattcgacctgtagttgctgatctaagagaaacaaagtatgaagcaattgggattgggagttcctatttgtttcgaattgacatggaaactataattgacgcaactaaatgtggaaacttagctcggtttataaatcacagttgcaatccgaattgctacgctaaggttataactattgaatctgaaaagaagatagtaatatattcaaagcaacccattggtatcaacgaggaaataacttacgactataaatttccactagaagacgaaaaaataccttgtctatgcggcgcccaaggatgtcggggtacacttaactaa

SEQ ID NO: 25629 - protein, 177 aa, DROSOPHILA
MQGISREARSNQRRLLTAFGSMGESELLKFNQLKFRKKQLKFAKSAIHDWGLFAMEPIAADEMVIEYVGQMIRPVVADLRETKYEAIGIGSSYLFRIDMETIIDATKCGNLARFINHSCNPNCYAKVITIESEKKIVIYSKQPIGINEEITYDYKFPLEDEKIPCLCGAQGCRGTLN

SEQ ID NO: 25630 - DNA, 2703 bp, DROSOPHILA
gccaagctattgttccaaaacatacataagctactgaagtcgcaataagatgcaaggaaccttcactggctcatgctcgctctccacttagcgtggagttcaaagctctcctatacaactccgtcttaaaaccaatctggacttatggctccgacctgtggggcatccattcagcgagaacagccaacaattctgagaattctgactagagcgtgataccttcggaacgaagacatacacagagagaaaaaaatcaaattatttatcgaaataataactgagaagaaaattaaaatacctagtaaaactgaccacccattcaaatcccctcacaagaaaactaatcggaggcacaaagtgttcgtatcataaaatctttgttgcttttaaaaacctttaaaaaacaagagaggtagctttaaaatttttcatatgacatctttaagatatggtgaaccgatttagatatgttaaaaattaaaagaataattatcgtgaaaaagggtacggctgttcttactgatatttatacccacttaattggactgaaatgcttttttcacttcgttgcaagcttataactgaaatcgatataccctcctcaaggatataccaagattgtgtgagagaggttgcagactacttggagaccaactgcttccttgttataaccgaaattgtgatgattttgaacaagacaagagggatcgatgtgcaacgtgtggtcatatattatggagattccactgtttccgacaatcttatggtagtttatatcgttggaatgaagacattattatggcacagtgtgaacaagaataattcgtctcattgaaagaaatcacgttttagtgtggaactcatattaatagcatttctttttttaagagaatagtcgctgctgtgaggtatctgtaaataagacataaaatcaatcgataaataaatgcttatatattataaaaatcaccaacggtcattgtatgttgatattatgttgattatgttatgttgatattaaaaatgttaatcaaaatttgaactggctaatcaaacttaattccatataattttttgtttttcagaattattaactctgtagtaaaatggcggatcggcttacacaattgcaagacaccgttaatcaggtaagtgacttcgtattaagaaataaccagttttttatgtaaaataatcattgcagcaagcggagcacttctgcaatgctattggtgtaattcaacaaacgtcccttccaagtaaatttgttaattttgaacgcattggaccccaaacgccaatcccatgtccgccgcaagaagactatgcccaattatttgcacagttaattgcacgatgtgctaaagacatcgacaccttaatcgagtctcttccaaatgaagacagctccattgaactccaaaattctagccttaagaggctcgagatcgaaaaccagggaactgcaagagacctagaggaagtagtgcaaaaaggcgaacttttgctagaaaaaatgcagtattctttggaatgcattgctcaggctcaattagatatgcaaataacactcaaacatgatttacaatagctgcttaacacatttttgtataaaggcaaattatttttaaatttaagataatgtatttattgcattttcgttcgtgtttacagatcaaatgggttttagtatatacatattgtttttataagtaaagtattttagcttaatttagacctaaaccattttgaacagcacctctgacctcgttgatataatttttataataattaattatagttttaagttataaaaaaaactatatatacttacacgtaccccactttggattttatgaacaaattaaatttatgtgctctaaaatatttaattcattgttgtaaataagtattagttaagtgtaccccgacatccttgggcgccgcatagacaaggtattttttcgtcttctagtggaaatttatagtcgtaagttatttcctcgttgataccaatgggttgctttgaatatattactatcttcttttcagattcaatagttataaccttagcgtagcaattcggctgaaaaacaaaattttatgttggtaacataatgtcagaacatccagcttacttacattgcaactgtgatttataaaccgagctaagtttccacatttagttgcgtcaattatagtttccatgtcaattcgaaacaaataggaactcccaatcccaattgcttcatactttgtttctcttagatcagcaactacaggtcgaatcatctgaccaacatattcaataaccatttcgtctgcagctatgggctccattgcaaataatccccaatcatgtatcgcagattttgcaaacttaagctgtttcttccgaaactttagctgattaaattttaaaagctcagactcacccatagaaccaaaggctgttaaaagtcttctctggtttgagcgagcttcgcgggaaattccttgcattttagaaattaatttattgtgatgatgatttgtaagtgctgtaggttcatcgctccgatcttcattaaaggaatcttctgtattggctttagcataatggtacttatgcttagccttttctcgaacatctaatttgtaaaatccttcagttcgcgcacatccagtcttatgtcggatcagttcgtcgtcttttcttcgctt

SEQ ID NO: 25631 - DNA, 647 bp, DROSOPHILA
attatgttatgttgatattaaaaatgttaatcaaaatttgaactggctaatcaaacttaattccatataattttttgtttttcagaattattaactctgtagtaaaatggcggatcggcttacacaattgcaagacaccgttaatcagcaagcggagcacttctgcaatgctattggtgtaattcaacaaacgtcccttccaagtaaatttgttaattttgaacgcattggaccccaaacgccaatcccatgtccgccgcaagaagactatgcccaattatttgcacagttaattgcacgatgtgctaaagacatcgacaccttaatcgagtctcttccaaatgaagacagctccattgaactccaaaattctagccttaagaggctcgagatcgaaaaccagggaactgcaagagacctagaggaagtagtgcaaaaaggcgaacttttgctagaaaaaatgcagtattctttggaatgcattgctcaggctcaattagatatgcaaataacactcaaacatgatttacaatagctgcttaacacatttttgtataaaggcaaattatttttaaatttaagataatgtatttattgcattttcgttcgtgtttacagatcaaatgggttttagtatatacatattg

SEQ ID NO: 25632 - protein, 142 aa, DROSOPHILA
MADRLTQLQDTVNQQAEHFCNAIGVIQQTSLPSKFVNFERIGPQTPIPCPPQEDYAQLFAQLIARCAKDIDTLIESLPNEDSSIELQNSSLKRLEIENQGTARDLEEVVQKGELLLEKMQYSLECIAQAQLDMQITLKHDLQ

SEQ ID NO: 25633 - DNA, 1899 bp, DROSOPHILA
gaccgaattgacagtgaagttgtattcatagatagctctatcgagaagttcttcggaacttctatgtgtttcatctcctttcaaacaactcattatttcagagagtgtggagtgaaatctttatacctgtccatttaccgtactcttgtacggaggtgctttatataactcaatgcccagctgctctgtcaacaagaatttgatagaggctgagttaagggacttttcgttgtccattactattggtttggacactccataatagaatacgatatctcttaaggggtttctaatgtcctccacagctttcgatttaatgactcttcccagagccagcttggagaatttgtcgattgatttctgtcgagtagatgtcaacatgaataatctgtcctgggtattctggcaagggagtttctctgatttccggatgtgtgggatggtcttatacaccaaacacttactcacgatagccgaaacttttttcctcattttaggaaaatacgctctttcggacaactgagcattatttttcacagcgtttctgtatgttctgttgtgtgtcctaagtatttcttcctcctgttcggcttcggtaacaaggtctttgacctcagtccgagttaatcttatcttgaaacccttaaaatgaaaggggtagaggaattgtgttttccccacacttcggtgacagcgttttctttgcctggtttatagaaaatttcataatcatattcctcaaggtatgacttccatattttgatcctcgcatttccattccagctgctgagggaatgggtcagaggctgatggtcagtaaagattttcaccttttctttaccgtaaaggtaaattttgagcttttttagagcccagataatggctagcatttctttctcatttgtggcgtagttttcctcagccttcgagagtgttcttgataaaaataagatggctctgttctcttgtgaaagaacgaccgttgttaggtgaaattattttttaaaaactgggtagaggagtatcacgtctggggaaatcaaactgctctacaatttcttgaaggcttccattgcttcggttactaagggagactgatttttttgacgacaatggcttggaaattcgtccatcctttcctctcaaaagcgagctaagtggttttgccaacttagcgtagttgcgaataaatttcctgtaatatccggataatcccaagaatgatctcagttctttgagtgtttttggaattgggaattctgaaattgcctgtactttgattggattggtttctatgcccttggcggacacgacgaattccaggaattctaccttcctcttcataaactcggattggtccaactgacatttcatattggcttgttgcaaggtcttaaaaattatgtccaggtttttgtaattggtttcatcatctttgctaaagatgatgatatcgtcaatatagatgaaacatatttagccaatatgctcatgaaggatatcgtcgagctagcgttggaatattgattgtgcgtttttcagaccgaatgggagtcgagtgaactcgtaatttccatgatttatggagaaggaggtcttttcgatatcggagtcctttagtgggatctggtgaaacccacttttaaggtcgagcaccgagaaaactttgttgtcaccaagttgggctaaaacctcgttaatatctgccactgttaccatattgagttttcggtaatcggatcacgactctgtatttcttttttttttgttgtccgtcaagtcgtttatcctgtaggtcagagctaaaaggtcatcgtgatcccgttttttattttactagaggagtccagttttttttggcacaatccacactggtgaattgtagggtgaccttgatgg

SEQ ID NO: 25634 - DNA, 218 bp, DROSOPHILA
gagaaagaaatgctagccattatctgggctctaaaaaagctcaaaatttacctttacggtaaagaaaaggtgaaaatctttactgaccatcagcctctgacccattccctcagcagctggaatggaaatgcgaggatcaaaatatggaagtcataccttgaggaatatgattatgaaattttctataaaccaggcaaagaaaacgctgtcaccgaagt

SEQ ID NO: 25635 - protein, 69 aa, DROSOPHILA
MLAIIWALKKLKIYLYGKEKVKIFTDHQPLTHSLSSWNGNARIKIWKSYLEEYDYEIFYKPGKENAVTE

SEQ ID NO: 25636 - DNA, 5346 bp, DROSOPHILA
atatactgtattgagttgtcagtgccactagacgtgaggatattggctgcatttggaaaatccgaatctggaaaatctggccatagatcgcaaataaatttcaaagttcgcaacatacgtaaaccacgatcttgattttgatagacacgatttatggaggcttgcagctgctgcagctttttacagactccttaattgttcgactcaaacggcaattatttatgggacagtttcaacagtgtaattaattagccacctctcttttcccgttttcgggcagcttttccgcggaaatactttttggtttgtggaaaatcgcttaaagaccaaccgaaccgctttgcacgagctccgtttgaaaaatgaaactgaaaccggcagccggcaactccaaagccgcagagcccacaaaatcgtaacgaaaacttgactaacgaagccgcttcgtgtattttacccgaatgtatgaattttccacgatgacggcacgtcagcacaccctcgcagagttttccattttccgctgcactgctgggatacccctcctccaaacaacataattccaccgactaatggcgtttatgagataatcagatgtgcatgttccaaggctgggtagcatatttacccttggaaacatgatctcatatcaagcacactttcctcgacagcttcttttcactgggtttggggaaaatatttactcaaaattgggaaagggcttgcgttctagtttatctcgcagtaatcagtatgttgttgtgggtgttgttggtcttaggcaaatcttaacgataaaagggtttacctggccaccccaatacagagactttacatatttatttttatttagtgtgtgcgtgtgcgaaatgttaagtgtggtcaaatgtgtgggtctgatttctttcatgcctctaggcttcataagcatcgggaactatttcaacattagtgtaagaaaggaactaaacaatttggagtaagatcatgggtccgggacgatgttagcaattgcaggcggggcacacgggcttgtccccgtcgatggtaaaagtctgcgaggttataggattctcgcatttgttgcactggaagcaattgcgatgccacttcacgttcatggcgagcaccgctgagtccgttataggcttctcgcacttggcgcacctggcagcaaagaggttctcgtaatcctgtttgcaatagggcttgccgtcgcgctcatagaacgtttgactggcgagcggcttcttgcaggcaccgccgcagcaaaagcaagcttcgtgccacctctcccccatggcgcagatggttttttcaaggatcggcttcttgcagccggcacaggtgtaggtgtaccgctccacgaagcacttgttgcacactggttctccgctctgaacattgaaggtggcatccaggatctgctcatcgcagtggtggcacaggaagtgctccgggtgccacgtcttgcccagggcggtgatcatacgcttggtgatggcctcctggcacttgtgacacacaatgctctcagtcattttggcttctcgattggtaactgctaataaaaaatgatttttaatgcgcattaccaagggattgttcaattactcttttttgattgaattgctcgtatatatcgtaaattgaggttaaaatacaaaatgtacaaaacagggcagctatcgattattttattgaaagaaacaacggaagatggctatggaacgataaacactgggcaacgcaaatattaatgagacaaattataattctgtacttattttaagattgggtgtatttcttactgggtttgtcgcctgtttcactacttcctcttttcgcagtgtgtttttcctagttcgtaattgtactgttctcatatatcaaaacagttgtcacagggccaccgttgttactttactttctattagatgtttcacacaaaatgggagcacaacaacaagcaataacgggtataataagggtatactagattcgttaaaaagtatgtaacaggcagaaggaagcgtttccgaacatacaaagtatatatattcttgatcaggatcaattgccgagtcgatctagccatgcccgtctgttcgtatgagattcagcatacaaattctagagacaacgatgcagcgcaagtttgttggcccatgctgccacgcccacaagccgcaaaaaacggccactcccacacttttaaaaaagtcttgatatttttttacatttcattttttatcaatttgcaaaaaaactttttgccacgtctactctaacgccgtaaaaccgcccataactgctacgctaacattttagaaattttgaaaattatttcttcataattccataactttttgccacgccctaaaaccgcactaaattgctacgcctacacttttgaaaactgttgatatttttattagtcttggaaattcctatcgatttgccaaaaaaaactttctgccacgcccactcaaacgccctaaagccaaaaactgccacgcacttttgaaaaatgtttagatttttcttcgttttattgtttgtcttggcaatttttatatgtataccaaaagcactgtggacacgccactcctttcaccttaaaaactcccaaaacagtaacgcccacatttttaaacaatttttactcatttttttctatcgatatcccagaaaaattattaaatttcgcttttgcattcacaccagctgagtaaccgttatctgatagtcggggaactcgtatgtaaaattctatcttgttcttaatttttttgtattaattccatatttatctagattacacatctgcgtaaccgattcgtgactacgccaagagacggccaccacttcatatcgagaagaatcgataaggcagttgtactgcgatcttaacggaaagattttttaaagctcttcaatttttgtttttaaaattaaataattcattatttaaagtgctgccaaaagcttgttatttaacgaaaggctgcaacatattggaaagggcttgctcgaccttatctcacagtaatcagaatgttattttgggtgaccaacaccactaaggcaaatcttagggtatacctgtctaccccaatacagagacttaacatatttgttttttatttttatttagtgtttgtgtgtgtattaagtttgtgtgttaaatgtgtaagtctgttttcttgcatgcctctaggcttactaagcttcgggaactatttcaacattattgtaagcaagcaaatgaacaatttggaggaagagcaaggatgcaccatggttatccgggacgatgttagcaattgcaggcggggcacacgggcttgtccccgtcgatggtgaaagtctgcgaggttataggattctcgcacttgttgcaccggaagcaatcgcgatgccacttcacgttcatggcgagcaccgctgagtccgttataggcttctcgcacttggcgcacctggcagcaaagaggtcctcgtaatcctttttgcaatagggcttgccgtcgcgctcatagaacgtttgattggcgagcggctttttgcaggcaccgccgcagcaaaagcaatcttcgtgccagctctcccccatggcgcagatggttttttcaaggatcggcttcttgcagccggcacaggtgtaggtgtaccgctccacgaagcacttgttgcacactggttctccgctctgaacattgaaggtggcatccaggatctgctcatcgcagtggtggcacaggaagtgctccgggtgccacgtcttgcccagggcggtgatcatacgcttggtgatggcctcctggcacttgtgacacacaatgctctcagtcattttggcttctcgattggtaactgcaaaaaaaaaatgtgtttgttaatacgcatgtacaaaacagggttgctattgattatcgatttattgaaagaaacaatgaaagctggataggcaacgcaaatatcaatgagagaaattataattctgtactaatttcaagatgggatgtatttcttactgggtttggcgcctgtttcactacttcctctttcttttcgcaatgtttttttctgaattcgttatcgtactcttctcatatatcaaaacaattttcacagggccaccgtttttactttactttcttctagatggttcacacaaaatgggagaacaaaaagaagcaatacggacttggacaaaattttgatactgtttttttttttttttgaaaaattttgatgtttttattcaaataactatagaaaacgaaacgaatgaaaacgtatgaatttagcaagactcaaaaactgaatgagatattcgatggaaacgctgggggtatgttttgacatctagaaaatgtacaagcatcgcctactggactgtaaagtatttgattttcctttctaggctttctatgttactgtgactactgtttaaatttgtatcaaaaggttaattgcctaaatagatggcaatatgcttgtgatttctttaacataattttatctccttaccgaaagttataaacatactttagtcacttatacatattcgagtataagaattagtcacaccaaaaaccattaataaatgggtaaaaggataataataagggaggtcttccactttcaagggtgatttctccaagcaaaggggcggcatttccttgaaggcgctgctagaatgtttcccaatttattatacaaaatttaattaaagcaaaaatcctgcgaaacttccgcatagccggcaattaacaagggctggggtggtggctactcctttaaaggactcatccacccaaacgactcgccagaagggtcgtcgttgcctctttcatcgtggatcatgcacttcgaaaaaatgaattcgctgaaagaaatattactaaaacatccaattattaaaaaaacaagagaaacaagttgtttggcaagtcgaaatatgaaaatattatatcgaaaggtttctcaaaaatgtgggcgtggcaaaaagtttttatgcaaattgatagaaaataaaaatataaaaaatgaaaaaatatcaacacgtttttcaaaagtgtgggagtgacagttttgtgcggtatgtaggcgttagaatgggcgtggcaacatgggccaaaaacttgtctcttaaatctgtgtgctgaatctcatccttctatcatttatagttcctgagatctcgacgttcatacgtacagacggacatggctacatcgactccactattgattttgatcaagaatatatatactttgtaaggttggaaacgcttccttctgcctgttacatacttttcaacgagtctagtataccctt

SEQ ID NO: 25637 - DNA, 1320 bp, DROSOPHILA
ccatcgaatatctcattcagtttttgagtcttgctaaattcatacgttttcattcgtttcgttttctatagttatttgaataaaaacatcaaaatttttcaaaaaaaaaaaaaaacagtatcaaaattttgtccaagtccgtattgcttctttttgttctcccattttgtgtgaaccatctagaagaaagtaaagtaaaaacggtggccctgtgaaaattgttttgatatatgagaagagtacgataacgaattcagaaaaaaacattgcgaaaagaaagaggaagtagtgaaacaggcgccaaacccattaccaatcgagaagccaaaatgactgagagcattgtgtgtcacaagtgccaggaggccatcaccaagcgtatgatcaccgccctgggcaagacgtggcacccggagcacttcctgtgccaccactgcgatgagcagatcctggatgccaccttcaatgttcagagcggagaaccagtgtgcaacaagtgcttcgtggagcggtacacctacacctgtgccggctgcaagaagccgatccttgaaaaaaccatctgcgccatgggggagagctggcacgaagattgcttttgctgcggcggtgcctgcaaaaagccgctcgccaatcaaacgttctatgagcgcgacggcaagccctattgcaaaaaggattacgaggacctctttgctgccaggtgcgccaagtgcgagaagcctataacggactcagcggtgctcgccatgaacgtgaagtggcatcgcgattgcttccggtgcaacaacattgtgtgtcacaagtgccaggaggccatcaccaagcgtatgatcaccgccctgggcaagacgtggcacccggagcacttcctgtgccaccactgcgatgagcagatcctggatgccaccttcaatgttcagagcggagaaccagtgtgcaacaagtgcttcgtggagcggtacacctacacctgtgccggctgcaagaagccgatccttgaaaaaaccatctgcgccatgggggagaggtggcacgaagcttgcttttgctgcggcggtgcctgcaagaagccgctcgccagtcaaacgttctatgagcgcgacggcaagccctattgcaaacaggattacgagaacctctttgctgccaggtgcgccaagtgcgagaagcctataacggactcagcggtgctcgccatgaacgtgaagtggcatcgcaattgcttccagtgcaacaaatgcgagaatcctataacctcgcagacttttaccatcgacggggacaagcccgtgtgccccgcctgcaattgctaacatc

SEQ ID NO: 25638 - protein, 328 aa, DROSOPHILA
MTESIVCHKCQEAITKRMITALGKTWHPEHFLCHHCDEQILDATFNVQSGEPVCNKCFVERYTYTCAGCKKPILEKTICAMGESWHEDCFCCGGACKKPLANQTFYERDGKPYCKKDYEDLFAARCAKCEKPITDSAVLAMNVKWHRDCFRCNNIVCHKCQEAITKRMITALGKTWHPEHFLCHHCDEQILDATFNVQSGEPVCNKCFVERYTYTCAGCKKPILEKTICAMGERWHEACFCCGGACKKPLASQTFYERDGKPYCKQDYENLFAARCAKCEKPITDSAVLAMNVKWHRNCFQCNKCENPITSQTFTIDGDKPVCPACNC

SEQ ID NO: 25639 - DNA, 3245 bp, DROSOPHILA
gttctcttacagcaacgattctatattattcctagcctactgacgcatctgtttacgatcttcgtccaactcatgtatcaaatactggtgcacctgttttgaactgtcaaccactcgcaagtcaacacctgttaatagtttgaacgataacatttttgtgctctgggctcgatattgtttatcaacatcgttcctggtaaaaacatctttccgatctgtcctaaggaacatcgtagtggtgattgtcgagatcaacacgggggttacatatttggagccctggccgatttcgtatcataatgatgaaataaaatttaaaaaaaaaattcacgtcgtgactattataattttaaagttttttaatattcgtttgttaaaatcgccgctcgaattagctaccgtttacatatttatatttatgttaataattaattatatataatatatataacaatcggtacccagggaacaccacggggaggccattgcaattgtaatggggtcctatatttatatgaccttcgagtttttttttcactatttatcgcaattactatttgcgcttatatttccgtactttactattgccacaaagcgacataatacagaagaaattatcttgaggcacgaagtccggacacaagcactcaacaatcattgccttattaatttttcacacgtcgcaagctgaatactgacatataatcacaaatattctaatataaagtcatttttgaaatttattttgtgatattatgtacacagattaggcaactgccatttctcagctatttttaaaaatgaatagagataatgtagagctcttcgatctatcgttcttgaacaaaaattcgagagaacatggagcctcttttacagccacgccaaaaaagatggtgtgcaaaaaaaatcgtattgcgttgcacatcttgttattctaggtacacctgtagcgagcaataaaggctgaatctgctgtttttcgcaatattgaacaactgaacaactatgatgtgaaagctgcaccacggtctgatacaatcctgaattggataccgaaatttaccgcctgtctctataagcagttaagtacctcctctatctcagtactccgtgtcagatacgaccaaacgtacgacgattggtttgtcacccttatcaattggattgagatatccctcctgctacctgcactccacacaacttttagcccgtatctttcagctgtggctttttccaccagatcctgtgttttcttcgctgaaaaatgaccttgcttatgagcaatatgaatgatttcagtttccatttgatgtggaaagacgattagttctctgcatggattcttgaacaatatccttacaactaaacttctgactgccatcaattggattgagataaccctcctgctacctgcactccacacaacttttagcccgtatctttcagctgtgtctttttccaccagaacctgtgttttcttcgccgaaaaattaccttgtttatgagcattatgaatgatttcagtttccatttgatgcggaatgacgattagttttctgcatggattcttaaacaatatcctttcaactaaacttctgactgccttgatccgctttctgtcaaaacaaaacattccactcgactgagagcgtcgatgcctcatctttgttcccgatcgatgttcgatttcgtagtcatagtcttgtaaaaacattgcccacctatcttctcgcaacggaacttctttcttcttcatcgtcattgcaaacgcattacaatttaacgcatgacgatttaaaactattttccctgaacatacacacgccattttgtcagtgctgcaatgactgctagacttccaattcgtatgagtcatattttttaccacacggcttcgtctttcgactcatgtacatgacgggatgtaaatgactgtctcctctatccttttacaacagaactgcaccgaacccaaactttgaggcgtccgtatgttgatccactttgggtcatacagtttcaaacccggtttactttttaaagatgttttcaactgttcaaatgaaacattctgctactctctaaattaaaatttcacttcttttctcaaaaggtctgacaaaggtttggctatgaccgcgtatccctcaacaaattttcgaaaatatgatgttaagccgaaaaataattgtatagcctttcgatcagacggtacgggaaatttgatacagctggtgaatttgatgtgccaaagggcacgtacaaaaactcatgttagcctctacgggaacatggaactacccgttggttaagtccaatgttgtgaaagttgtccccccttataatttctcaattacgttatccatcttaactattagtcgataaaaaagctttgccgctccgttattaattgatttgcatatatgagcacctgcagctgactctattccaccgtaagtgcacactcttcaggttcttggatccactgattaatgtctggttccttccttcaacatcctacaatgaccttcccgaattaaaaatttcaacctggcgatcctccccaccgtacaggatttcacctaagctcaccacttcgaccagtctgcacattatcagatgttactgatgcaaatgacccacctaaatcctgatcatcattcacttcgatttcttcattatctgaattcaagccatagtgagcaaaacagtctgttttgtaattcatgtttccttccatctctgcttagtgccaattctgttaatttttctcataactctgcaaccaacagtgccaaaatctctttcctgttcattttcaaaccaaactatagttttagagattacttcagaatagtatatgaaatatcaaggtaatgcttatcaaatataaattttaaatcaaatatgccagtgggccaaataaataatacagtttaactccatgaaatgttaatttaaaataataatacgcctaaaactacgtaaaattgaactcttggtaatgcaacagcacaattacgtaatactcatccgttagcatggtatcatccagttccatcttctttttgtgccgtctttcaatcttcaatcttgacaatcgcctaccgccactcgttaagttttctgccaatcgccaatgctgcaactggcttagtgtctcgccaattcaccaatacaaattcggtcccgctgtctcaccaatacttcgcccaatatgacgagttcgtttttttccagac

SEQ ID NO: 25640 - DNA, 1245 bp, DROSOPHILA
aaattcaccagctgtatcaaatttcccgtaccgtctgatcgaaaggctatacaattatttttcggcttaacatcatattttcgaaaatttgttgagggatacgcggtcatagccaaacctttgtcagaccttttgagaaaagaagtgaaattttaatttagagagtagcagaatgtttcatttgaacagttgaaaacatctttaaaaagtaaaccgggtttgaaactgtatgacccaaagtggatcaacatacggacgcctcaaagtttgggttcggtgcagttctgttgtaaaaggatagaggagacagtcatttacatcccgtcatgtacatgagtcgaaagacgaagccgtgtggtaaaaaatatgactcatacgaattggaagtctagcagtcattgcagcactgacaaaatggcgtgtgtatgttcagggaaaatagttttaaatcgtcatgcgttaaattgtaatgcgtttgcaatgacgatgaagaagaaagaagttccgttgcgagaagataggtgggcaatgtttttacaagactatgactacgaaatcgaacatcgatcgggaacaaagatgaggcatcgacgctctcagtcgagtggaatgttttgttttgacagaaagcggatcaaggcagtcagaagtttagttgaaaggatattgtttaagaatccatgcagaaaactaatcgtcattccgcatcaaatggaaactgaaatcattcataatgctcataaacaaggtaatttttcggcgaagaaaacacaggttctggtggaaaaagacacagctgaaagatacgggctaaaagttgtgtggagtgcaggtagcaggagggttatctcaatccaattgatggcagtcagaagtttagttgtaaggatattgttcaagaatccatgcagagaactaatcgtctttccacatcaaatggaaactgaaatcattcatattgctcataagcaaggtcatttttcagcgaagaaaacacaggatctggtggaaaaagccacagctgaaagatacgggctaaaagttgtgtggagtgcaggtagcaggagggatatctcaatccaattgataagggtgacaaaccaatcgtcgtacgtttggtcgtatctgacacggagtactgagatagaggaggtacttaactgcttatagagacaggcggtaaatttcggtatccaattcaggattgtatcagaccgtggtgcagctttcacatcatagttgttc

SEQ ID NO: 25641 - protein, 267 aa, DROSOPHILA
MTHTNWKSSSHCSTDKMACVCSGKIVLNRHALNCNAFAMTMKKKEVPLREDRWAMFLQDYDYEIEHRSGTKMRHRRSQSSGMFCFDRKRIKAVRSLVERILFKNPCRKLIVIPHQMETEIIHNAHKQGNFSAKKTQVLVEKDTAERYGLKVVWSAGSRRVISIQLMAVRSLVVRILFKNPCRELIVFPHQMETEIIHIAHKQGHFSAKKTQDLVEKATAERYGLKVVWSAGSRRDISIQLIRVTNQSSYVWSYLTRSTEIEEVLNCL

SEQ ID NO: 25642 - DNA, 2828 bp, DROSOPHILA
ctactctaccagtacttccgggacagggaactgaagcgtatcaacgaggccatgcgcaaccaggcagccatcacgatccaggcggcttggcgaggatactgggttcgcctccagttcccgcaagaagtttgcgtttgtgtctgcgcagcggtaagtgaatctacttctaaaagtctgcccctaaacttggttatgacttaaatccaacaggaaaaagaggacgacggggaggaaaagcgcagggaacaggcagcgagcgttcttcagagattcttccgcaaggttatgttggtatgtaacaagagttaaaaactattttacattatatatatttatattttaaactgtttttcttaattttttacgccaaatttgcagcgcgtggttaccaagccaatcgtagacccctgtgccgaaccaacggaaccaactgaagtggatgctagctcttcaccggatacagcaaaggatggctatgacgacgtaaatctctcgacagtaccgacaactgctgcgataacagccggaccaacaccattaccaactgctcccggaactgtgccgccatctgccccaggcactgctccggccacggccagaacttcggccactgctatagcagagccagaagctcatgaagaggctgcggaagctcagccagcggaggaagctcctgcagcagaggcgcctgctgatgaagcagcaccagctccggctgaggaggctgccccaccgccagcagaagaggctgcaccggaagccgccgaagagccggcacctccaccaccaccagaagaagcagcggcaccgccaccgcccgctgaggagcccgctccgacagagggagcagctcctcccgctgaagaagctcccgcagaagaagctcccgcagctgagtagatgaaaccatgctgtgtttattaattttcccttagttgttaaattgatgttatctgcaagtgaataaactgatcgaaaagtgctggaatcctcttctccttcaggattttgtttgatttcctatccagtcactgaaggtagacactctggtgtagacatccggagagatgtatagaccacacaccaccagcccgtaggatactatgcccacttgctgtaatccatttttggattccattaccaaaggaccgccagagtcgccctggaaacaagatcaatctatgatctagctagtgtattatcatccaactcaccgaacaggctcccctaaaaggtcctctggcgcagatctccgtatccgtaacgctctccatgcccgcattcctgcactcactgttcgagatggtgtggtaactcatgcgctgaagaacattgggatagttcacattatccaagaagggaaagggcactggtaagcggaggccccatcccgtcaaggttactggaactcctccaccaacgaagtctttcccctgcgatcgatactcaattgcactaatggtcgagttatttaacttcagcggaggtttgatggacagcacggcaagatcgctggtaaccagttcctgatacttgggatggatgctgtaggatagcacctgggagcgggaacccttctcgttcagtcctcgaattccggccacaacagacatgcgactggcgttgagaccctgacaacagtgagctgcagtaaggatgcgattgggagcgatgatggatccaccgcagaagtgcatctgaccaccgcgtgttctgtactgcagcgaaacctggtagggcacatgttcgcctggtgggatgtcagcgcctccaacaatacgatgtggagtatacccactgggttgacgagctttaacaatatacacgtctgttaccaggggattctgagttactgattccaattcaaactcacaattcagtctcccgaagactcctcccaaagctacaactccgatcagcagtagttgttcagttagacccatcgttgtttggctaatgccactggctttgcacctgccacacttcttaaataagagcttagcccacattggcgaaagaatttgcatatgtatcgcaaaatatctgggtcaccttggctacttggttatgccattatatttgatcttgaaattgaaattataatgagagcttctgctggtaacgcagcccagatacctggtatgcaaatatctaattacgaatttgcaagacatatttacggacaacgataatgccacatttgactgacttggtaaagtagagtttatcagaatatatttgaataactcgcgatcgatattccaatatttgttttgacaatttgtacattgtgatattgctttagaccattctttccttaatccaaccgtcaaacatggacactctggtatagacatcaggattgttcgaggcacagaatgcagttccataggagacgacgcccacctgtttataggactcaccactcttcatcaccaaaggaccgccagaatcgcccttaaaaagtatttcaaaattagctaacattatttcgatttccacttgaatatactactcacattacaggcacccttgccaaacctttccaaggcacagatctctgtgtccgtcagctgggtcatcgtctccttgcacttggaattgctcagtgtcttgtagtcgagtttctggagtacagtgggatatttggcgaaaggacctgtgccaaagtggaagacagaaccccatccggtgaggagaacctcctgatcggcacctaccatgtccgatccactgacgtcgatggtggacacacgcttctcgtccagctcaaagggcggatcgatcttgaggatggcaatgtcactagtcaccagctcctggtagtt

SEQ ID NO: 25643 - DNA, 776 bp, DROSOPHILA
acgtgtatattgttaaagctcgtcaacccagtgggtatactccacatcgtattgttggaggcgctgacatcccaccaggcgaacatgtgccctaccaggtttcgctgcagtacagaacacgcggtggtcagatgcacttctgcggtggatccatcatcgctcccaatcgcatccttactgcagctcactgttgtcagggtctcaacgccagtcgcatgtctgttgtggccggaattcgaggactgaacgagaagggttcccgctcccaggtgctatcctacagcatccatcccaagtatcaggaactggttaccagcgatcttgccgtgctgtccatcaaacctccgctgaagttaaataactcgaccattagtgcaattgagtatcgatcgcaggggaaagacttcgttggtggaggagttccagtaaccttgacgggatggggcctccgcttaccagtgccctttcccttcttggataatgtgaactatcccaatgttcttcagcgcatgagttaccacaccatctcgaacagtgagtgcaggaatgcgggcatggagagcgttacggatacggagatctgcgccagaggaccttttaggggagcctgttcgggcgactctggcggtcctttggtaatggaatccaaaaatggattacagcaagtgggcatagtatcctacgggctggtggtgtgtggtctatacatctctccggatgtctacaccagagtgtctaccttcagtgactggataggaaatcaaacaaaatcctga

SEQ ID NO: 25644 - protein, 214 aa, DROSOPHILA
MHFCGGSIIAPNRILTAAHCCQGLNASRMSVVAGIRGLNEKGSRSQVLSYSIHPKYQELVTSDLAVLSIKPPLKLNNSTISAIEYRSQGKDFVGGGVPVTLTGWGLRLPVPFPFLDNVNYPNVLQRMSYHTISNSECRNAGMESVTDTEICARGPFRGACSGDSGGPLVMESKNGLQQVGIVSYGLVVCGLYISPDVYTRVSTFSDWIGNQTKS

SEQ ID NO: 25645 - DNA, 2180 bp, DROSOPHILA
attatttttgttcaattggcaccatgccaaaaattattgttttgcattgccttaacgttattattatttaaataaagcttagaaatagtaatagccgaatcataatatcacaaaataaatttcaaaaatgactttatattagaagtaagctccaagaggttagcggttattgatctgcgtttcataaaaccgtgctgacacggtgatatgattgatcgacaaaagtgctcaaaaagaggagtgatttcaaaaaatcaaaactttttggaatagccgataatttagagattcctctgtaattgataaaactgtttcggatcctgtgcgaactggaacttacctgcgaagtcttcggagttatgtatctccggcttcaaccaagtctatttaaacacaattatatgggtgaaaagaagaggttatcagaatacaatttagttagtttgctacgcaagctgccagcattttgatagaatatattaggactagatgttatttttttgaagaaaaggatgaagctaaataggcggaatgggccacgtgagggatgtttaattcccctgggccccttgtacttatttttaatcttaggttcgaactcttttaccaccatactatccgaccaaaaatcaccagaacatatggcagaaaatagctcatcattatcttgaaagattaaatgtccttagcgttagaaaagctaaatgtttcctcttttatgttatcggcttctgttaaatcttgtttataagacagattttatttgtgaagacccaactcgtgccgatagttcggactcaactttcactcgtggtggtaaactaatctggataggtggaatcactggttgagaaactagtgcagataaatcgaaatctttggtaatcccaagctgataggattgctccgaatcttttgtagctgctgatctaaacaacatttaagcatttgctgcgaattacaattgtacagctgtggagtcctgtagatcatttgccggtgactacggggcgctccctttaggcatgttaccaccagcggcttttctgcgctttagagattcctctaatagcttaaggctattaaactgtgaattaagcgcgtaaagaacgtcatcggctttacgagaactatctccactatcagtcacctctggttgatcagtcatttcaatccacatttagcgacccagccattggtcaaaagagacatatagttgacttagattctccacatttcaaatccacggaaaacttggacttaatagagaaaatatctaacagtcggtcaaatttcccgacctacaaatgaggcataaaaagaaaattttggataccttcagttttattatacattgacctccgcacgagaaagggtcacataggtttgctcattgtcattgaccataacattcgttttcacttatggtgtccagaggtttaccactcataaaatcttttattacttgaagtgggctatattctatacatttggcgttcaagaagtaatactttctgagccggtttaggtcaagccatttataaggttatcttactagctcttaccgcaaaaattacagccatacatcctccgcaggcttacgcgagtgaaagacttatgagatcagtattagccgctgtaagatctaatttaggggaagatcacacaaattggaatgataacttattcgctattagcggatctttaatatcctcgatacaccgaagcacatgttaatcacctaactttctgaccgttggtcaactatatagtctcttgcgtagtctaaatctgttagctgacaacaaccggttatctaacccggaggcaaactgaactgaacctaaactaaacctatatggaagacgcgatagataaaacctacgcactcgacagatagaaatttaaaaacggagaactcgttcactataaaaactttacaaaaaaaattctgtagtaaattgtcacccgtatttattccagttagagtttataggaaacgtagctcgcactactatgaaattggggggagaggaaagaaattaggagtatgctatttaaaggatatacaagaaaggaaacaagaagttttctcagataaggcttttttaaaatagtctaggaatgacttagaccgactccgccaacaagcacatcagctcaccccatgaacccaaggt

SEQ ID NO: 25646 - DNA, 180 bp, DROSOPHILA
atgtggattgaaatgactgatcaaccagaggtgactgatagtggagatagttctcgtaaagccgatgacgttctttacgcgcttaattcacagtttaatagccttaagctattagaggaatctctaaagcgcagaaaagccgctggtggtaacatgcctaaagggagcgccccgtagtca

SEQ ID NO: 25647 - protein, 54 aa, DROSOPHILA
MTDQPEVTDSGDSSRKADDVLYALNSQFNSLKLLEESLKRRKAAGGNMPKGSAP

SEQ ID NO: 25648 - DNA, 7659 bp, DROSOPHILA
gcctaaacgataagattagaaaatggaaatggaaatgaagacagccacctgacgcaatctcacatgccagaaatttgtcgtttgccatccaaggccccgatttccgaaatcgaaaatccttgatatccaactggacatgaccagtttccggaggaatgcactccagttacacaactggcacaaacatttgtttgctgttttctgaccaaaaacaagccacacttatgctggcacttttttgttgacagaaatatgcaagcagacacaagtaaatatttatttgattatttattttaaagaaatgtgcaagctcaccgaataaatattatattttaaaatcaataagtagaaacctaaacaaatacaagctggtgaagcgattgctctgcaaattccacatatttaaactattaatttacaaaaataaatgtggcggtcaatttccagctgaacagttctcaacaattaatgaaaataattgccactgataataatagttttttttattattcgattacatactttaaatatttttttagtttcccaattagaaaacttttttttaacaaaatatttaatattccgtaacagtatttatgcttaattaccagatgacagtttttatttcttttgactatacttacattattttgaaaaaatagcaattatttttagacttctgccacgaatgcctttaattaatagctgatgcaatcgcttaaactcaattaagttacacacgcaacccacatcttctgtgtaaaaaaaaatcaatgtattcgaccataaataattccgctgcaatcagtgcaacagtattcagtcctggaactttaatagcgccaagctgttggaaaaccaattaaattccctttcaaatggagcgtaaaacgcaaaatacttacgtatgatgggggcgccacacactcgcacacgcatttatgagctcggcaaaacccatttgattgactaacgaaacttatttgccactttatttcagcggacgcagtgcagcagttccacgacgaccatgagcgaccagattggcaaccccaatgcaacattcagtggcagtggcagtggcagtggcaccaacgtcgcctccatcgccgaaagtgtggcggagagcggaccggacttcgatgcacttcgggccgcctgcgaaacgcggctaaatgccagcggtcaactggcgggtgagtcgtgcactgcgagaaaatatatcacacagcacataactattaaagtttatgcagttattttatttgatgcagttgtaaaacgctcaccagtaaatttcatttaaattttagatgtttttataaacataaatcaaaataaatttttttgcactgttttacttacattccctttctttatgccagttatttgtctttacttaagcgaaagaaaaaattcactctgaaattgtagcactagggaaatataacagtttttggtatttcactacatatttttgcccgtgcttctggctctggccaactgcaatttcggcgtccattatgcacgagtaactttaaattgctgacctaaccactcccctttccttttggccccttggcaaacaggctccggaggaccaggcgcagaagcaggaacccactgtgccggcacctttgatggctggctttgttggccggatacggctgtcggcacttccgcctacgaactctgcccggacttcatcacgggattcgatccagcaagtaagtgcgccggggcaggagctgaattgtttattaaattccacaaagctacatccgtttcggggtcagctggggatctgcatatgacacgaaaaaatatatatatatacatacatatatcacatgtatgtatgttacatataggttaaatagcatgccaaagggaaatgtgtttgcacgaggcaatgcggttggataagttggttgggttgtttggtaggtggagtgtgccagtctaccctctaattgggctcatccccgagctcatcgttatatacacataaatggaacagaaaatacgctccaagccaggccaaatcaattggaaacttgttatgtttatgctttgatttcgtgtcgtatggaaacatcaagtattcacaaaaccacacgggctaaaggcaaagctccttggagctccctgggccactaaattatccaaaagagctcgacaaaatgctaaaatgtttcgcctgatttggcacaatttgccagagtctaaccgaaatcaaatgtaaggcagaaaacacggccaaattgattgaggctgctgggcagagtagaagtcaaatatgtgtgtgggtatttaaagatgctggagcacgaagaaaggggatttaaattttatcatgtttgtgaatttcatatttttttaatcattaatcagtgttcttggcaaggtgttgatgacggtcataataacataactgaagaagaaaaccctttgaatagtttcaccaactcattgtcgtatcattaacatatcataaataaaaatatcaaaggtgacttgaattatttctcaactttctgccacactgcgtgtatttcattcaattataaatatatatatatataaatataaatataaattaatcaactgattggccaaacgcacaaagaaaactaattaattatgcttggcattaaagcaaacgtttaaaaacaaagcgcacgctctagaaaatcgtcataaatgtggataaatatttgaaccaatttatggcataaatcatgcgctgcatgataatttgcattaatggtatacaatatgtagccagccaacttaaacctcaacctcgttttggccatgaccagggcaacgaaaatagcgagagttgaatgactttttttgttatgacagagcggagaaaaacaaggcgagcgtcaagaaagtgctacttttgctacatttagcttgtggttagcatggcgccaccccctttttcatcctttttgcatttttttttttgccttacggggtcgccgccagcttgtacaagattatgtgctttggcactgcgccgccattaacttttatggcacttccggtcgccggatgtcgatgtggtgagctgtggtcgagaactccctcaccccccggctacttatctgccacacagcgcgtatacgtgattttctcggtctgcgtgccaaacggcgataaatggattcttggccaaagatcatcggtcgaaaaaaaaaagaaaacggaagagccggaaaaacgaacgacctgataaaactcaccttcgaagttcctaacaaaaattctccagtaatttttctacaagtgccactcggtaaattgcattgcaaacttggtaatctacaatcgaatcgaatggaaagtttttgtcacgaacttcgaattgattcgacttaaacacacacatgacccaaacaacagaatgattatgcaattttcaaattgatatgcttgcaattcgaatgcgaaccgcaattcttttgcggttaacttggtggcagatgcaataaataatggttaattcaattgaatgctcgggccgaccgcaaaatgtaaatatgagccggaatatttatgcagtagtcaatcatgaaatcacacatatttagcaagtgtaaatatttgtgtggtgcacaggatgtgaaaatgtttgctagaaaaaacggtaaagaattaatcgtatatacaatatttattgaggagctgtaataagcagagtaaacagcatggttaattattttttatttatcgcaaactgacattgctttaattatgcaggatatgcccacaaggaatgcggtctcgatggcgagtggttcaagcatccgctgaccaataaaacatggtccaactacacaacctgcgtaaatctcgaagacctcaacgtaagccgatcccatacataaatatcctatatatcctttatgtaattaattaatcgcaacactatatatccagtggaggcacacagtgaatctgatctccgaggttggctacggcacctcactgctggccattctgctgtcgttggccatattgggttatttcaagtgagtatggccaagggctttgcactccttcatcttggccacaagttgacagcttcgttgggagatggcaaaaacacttaggggtaatgaggcacgctggtgacttatattgcgacttatattatgacgactggcgccataagtgaaatttactgatggcaaacaaatgcgacagtggcttaatcaactgccaacctggatgctggatgcccaaatgctcattgcactcattgctcatttaatgcggcacaattgacgccggaaatgggaaaatacattgtgtccccatctcctggtgactcgaagcaggatatcgattaatttcccagtgcctgcagaccaattagtgctctgggtttgtttatcgcacattcgaatggaactggggctcaaggataaaggataatggatgtgcggactgaggggcgagatcccatagacggttcggccaactgacagaactgttttaaattgtgtgccaaaggcaaataaaatgggtccagatacgtgtgggaatttggtctgccctaaaaaagtgaataattaaaagtttaatgacagagcaatgggcaacaccagccccggaaaaacgcattcctcaaacagctgtaatgaaaataccagagttttcattcaaataaaatataagagtataaaggaaattgagtcgttgtgagcggccaaaaataaataaagaagtattattataaaatataccatcagtatattctcagtcaataattgtattgcttaaagaaagtttagaagtgaaaagtagtatataaaataatttatttagacagaagtaaattaagtaaagtagagaagggattaacgaaaacaatctaacctattgaattaaattgctgaaaagaaatcaaactagattcagtttggccagatgtcagcaatcaatgcaattgagcaaaggagaaacggaaaatgggaaaatggacaaatgaactttgtccttttggtcgcaggactttttctgcctctttcggccctatccaagctgcctcacatgcccctggccccgaatgcaaatgaagccatagacaaacttgcaaatttggccataaaaacttgccacaaattgccggccaaagtaattcgattcgcatatttgtctttcgattgaacagatccctgaagtgcgcccgcatcacgctgcacatgaatctgttcgcctcgttcgctgccaataactcgttgtggctggtctggtacctgctggtcatgccgaattcggagctactgcatcagagtccggtaagtgtgcacacctggcgaatgcgtaatggtgaatcaacctcggcttccgatttccatattccatactccgtgcgaacacccagatgcgctgcgttgccctgcacataacgctacactacttcctcctgtccaattactcctggatgctctgcgagggattctatctgcacaccgtcctcgtcgccgcattcatttccgagaagaggctggtcaaatggctcatcgcattcggctggggctccccggccatcgtcatattcgtctatagcatggctcgcggtctgggcggcacgcccgaggacaatcgtcagtaagtgaataatgaatgggtacagcttacaccgaaagaaaatgaggaatgccaatagttatcaaaagtgaccgacaacagacaaggtgtaaccatattgtgttgtctagaagtatcctagtttaatgaaatcccacagacttgagtatcacagattgatatcaagatatttctgtgtagctaagatattcagtctgtcgagctcttgaccaaatgctaatcaaatcaatcagcaattcacccactgactcatctcgcattccttcgccaacttgcagctgctggatgaaccaaaccaactaccaaaacattcttatggtgcctgtgtgtatctccatgttcctgaacctcctgttcctgtgcaacattgtgcgagtggtccttttgaaactgaatgccccggccagtattcagggcagctgcggtccatcgcgaacggttttgcaagcatttcggtaagttttcccgtccaaaacaaaagaaaaaaaaaagaactgttgggggggagattgaaacacttataagcgaagcagagaactctcaactggcccacggggcgaatgcgtaattatattttgtttcccttgtatttagactctttcccatcggccatcaggtcttttattgtttattcgctctgcactctggaagttgggctcattttacattttgaattacgcatacgccgcgttgacttgcatgttaatacacagctgaaaaacgaaaacaaggcattataattcaccctctcatcctgttttagggcaacgctgcttttggttcctctgctcggcctccagtacatccttacgccctttcgtcctgcacccaaacatccctgggagaatacatacgaaatcatctcggcgtttacggcctcatttcaagtaagtaaaatgttttcgtttcgtttctgttctcgtttcgtttttttttcgttttttttttttgcttttttctttccggcttttgttttgcacgctctcataaaatcactttacgactccgagctggctaaaaagttatgatgttagttcgcctcatggtgccatccaccactgggaatgcaaataagccagcattactggaataccgaataccaaataccaggactagcagctcattagatcggggctcttttcaaatcaataatgaaaatacacgccatgtgaaatacccaccattggcatttcacttgatctcagtttattaaattgctggccgagattggagcgaagttcccccgttggaaaaatgtagcaagttgagcatgaaatgcactctcgcacacaggaactcgtaaaagcaactcgagcttgtccctcggccaactcagtctcgatagaccagcatttacacatggttaacacacatacatatatttcttggccgcaacttaaagacaacgacggcaaacttcatccagctacgttgccttcttgtttgttgaatacccaaagaatctttcagttcatgtttgcagtacacagataaaataatttgcatatattttcgtgtttttgtgcacgaaatggtttttcattacagactgttgatataacagttgccatggaggtagaggtgcctaaaagtatgttgcagcttagatggctttcctttacaaaatttcaaaagtaatttctaaggcaccccctagctgttattcgaaaatcttttagttcgatctaaaacccaactcaatcggttcaaaaaggtagcccattgaattcataaacagccctaaaacaacaggaaaatccattatcttgcgagtagacataaaatcatcttgggtgccactaagctgcagttgagctcttgactattttctataacttggcaaactgaacattgtcacctcggtctgagccttttttcatcattgccaatcgataggtgaaatcttttattcgactgctaaaagtttaaagccagtcgacgggtacttttcctttgcattttcctcttgtcgtatttattcacttttttttatgtcgctgttttccgttggcttatttgctgcaaaga

SEQ ID NO: 25649 - DNA, 1365 bp, DROSOPHILA
cggacgcagtgcagcagttccacgacgaccatgagcgaccagattggcaaccccaatgcaacattcagtggcagtggcagtggcagtggcaccaacgtcgcctccatcgccgaaagtgtggcggagagcggaccggacttcgatgcacttcgggccgcctgcgaaacgcggctaaatgccagcggtcaactggcgggctccggaggaccaggcgcagaagcaggaacccactgtgccggcacctttgatggctggctttgttggccggatacggctgtcggcacttccgcctacgaactctgcccggacttcatcacgggattcgatccagcaagatatgcccacaaggaatgcggtctcgatggcgagtggttcaagcatccgctgaccaataaaacatggtccaactacacaacctgcgtaaatctcgaagacctcaactggaggcacacagtgaatctgatctccgaggttggctacggcacctcactgctggccattctgctgtcgttggccatattgggttatttcaataattcgattcgcatatttgtctttcgattgaacagatccctgaagtgcgcccgcatcacgctgcacatgaatctgttcgcctcgttcgctgccaataactcgttgtggctggtctggtacctgctggtcatgccgaattcggagctactgcatcagagtccgatgcgctgcgttgccctgcacataacgctacactacttcctcctgtccaattactcctggatgctctgcgagggattctatctgcacaccgtcctcgtcgccgcattcatttccgagaagaggctggtcaaatggctcatcgcattcggctggggctccccggccatcgtcatattcgtctatagcatggctcgcggtctgggcggcacgcccgaggacaatcgtcactgctggatgaaccaaaccaactaccaaaacattcttatggtgcctgtgtgtatctccatgttcctgaacctcctgttcctgtgcaacattgtgcgagtggtccttttgaaactgaatgccccggccagtattcagggcagctgcggtccatcgcgaacggttttgcaagcatttcgggcaacgctgcttttggttcctctgctcggcctccagtacatccttacgccctttcgtcctgcacccaaacatccctgggagaatacatacgaaatcatctcggcgtttacggcctcatttcaagtaagtaaaatgttttcgtttcgtttctgttctcgtttcgtttttttttcgttttttttttttgcttttttctttccggcttttgttttgcacgctctcataaaatcactttacgactccgagctggctaaaaagttatga

SEQ ID NO: 25650 - protein, 444 aa, DROSOPHILA
MSDQIGNPNATFSGSGSGSGTNVASIAESVAESGPDFDALRAACETRLNASGQLAGSGGPGAEAGTHCAGTFDGWLCWPDTAVGTSAYELCPDFITGFDPARYAHKECGLDGEWFKHPLTNKTWSNYTTCVNLEDLNWRHTVNLISEVGYGTSLLAILLSLAILGYFNNSIRIFVFRLNRSLKCARITLHMNLFASFAANNSLWLVWYLLVMPNSELLHQSPMRCVALHITLHYFLLSNYSWMLCEGFYLHTVLVAAFISEKRLVKWLIAFGWGSPAIVIFVYSMARGLGGTPEDNRHCWMNQTNYQNILMVPVCISMFLNLLFLCNIVRVVLLKLNAPASIQGSCGPSRTVLQAFRATLLLVPLLGLQYILTPFRPAPKHPWENTYEIISAFTASFQVSKMFSFRFCSRFVFFSFFFFAFFFPAFVLHALIKSLYDSELAKKL

SEQ ID NO: 25651 - DNA, 1367 bp, DROSOPHILA
tgcactatctaggttatgtgatgaaatgtgaagtggtgaaatttacactgatccagaaaaaatatcacgtgtaatgaacttgttcacacccaaagaattgatacaagtgatagtttccacggctttggcacaggcgatttataaaagactttgcgaaaacaatgaattcgcttggttgacgtctctaatatggatcttcaggttgaggtgctactctggacagaaacacactttccggacttgttacaagacatacaacaatcgaacaagagcttttcgaatataataaacttgcgacacaataagtcgagcaagccggcaataaagtcatgatgctctataaggaaagggatattcgatttttcttctggggaccatattgtgcccggtatattaaagtcacctgaattaccaattgtttccacatagacaatcaatttgtggcggggggatagcggacagatgatttagatatacttggaattcagaagacggcggtttgtaagagcacgtaatatacacagatctaacggaaaatgacagctttacgaatatgaatcttaacagtagctcctttcacgtgagggtaagcctaaccgcaatcaagactcctcctccccgtctggagggacgatcgtacctgtatattgtgtatataccaggaagacttcagagttaagtgtctccggttttaaccaagtctctgtaaaaataatttaatggaatgcaaagaagaggttatcaaaatacaaattagttagtttgctaatcaagcctttagcattttgataggaactagtaagatcttagtttttttttaataaaaagaggcggaagtttatttccctcaggcccctttttcttatttttatacccgccagaaggccgcaaagttctgactgaaagtgggagcagacagcacttgcgagctttcgctttgctctcctcgtttgccgctctccctcctctccctcccgccaagtggcgcaccccaaagcctggcatagccgtggacaacgtcgttcttgttaaggacgagaatctacccccaatgagatggcctttggcgagagtcatgcagttgattcctggcagagacggcgtcgctcgagttgcagaattgaggaccgcgtctggagtaataaggcgggcagtgaacaagctgtgtctgcttccccttgaggactctgttggaagccaagcttccagcggggggaggattttgggtcatgcagccgccaaaagcagtagactaatctcatactctttaatattgtaatccgaagtagtcacgtggtagcagttgcgatgcccatagtgcaaaccgctgttctcgcacgcatttatctgtacggagctcattcctt

SEQ ID NO: 25652 - DNA, 217 bp, DROSOPHILA
ggcatagccgtggacaacgtcgttcttgttaaggacgagaatctacccccaatgagatggcctttggcgagagtcatgcagttgattcctggcagagacggcgtcgctcgagttgcagaattgaggaccgcgtctggagtaataaggcgggcagtgaacaagctgtgtctgcttccccttgaggactctgttggaagccaagcttccagcgggggga

SEQ ID NO: 25653 - protein, 41 aa, DROSOPHILA
MAFGESHAVDSWQRRRRSSCRIEDRVWSNKAGSEQAVSASP

SEQ ID NO: 25654 - DNA, 2360 bp, DROSOPHILA
tccaggtggataaaaatgataatgaaagtctaagtgcaacagttagttggcgcacgaatcaggactacaaggaaagcgacaaaattaataagtgtccaggtaactaaaatctaaatatttgtctgaatgtagaagtgaattttatctgacttgagtttttaatctaatcaaaaagcataataataataaataatcagaggaggaggaaatatacaacgccacataaaatacaacaaattaacatttttcgaaaatgtgggagaagccgtaatttggcaaataatcaataacgtatctcctatatatttggttttcaccgtgcacctactttttgggtgccgacaaaaaatgcgatgtctgtaaattataccattgcttaaaacccaaaccacaaaaaatactgtatgcgggcttacttatgcgagaacacgattttcaagctggaaatattttatttaaaaaaaaatcataattaacttgtattattctattaataaaattcgagttgcacaaaattattcaaatagttggtattttcatatataatacttaatattagtaatgtgcacttcagatacatatgtattgtatataatgtgtgttctccatattaaatttttgatatgctacaggcagcataatttccttctttcagaactcaatataaactattgtgggcatcggaaaataattatttatttttataatttaggtaaatgtaaatgtagttccaaagtttttatttatatttttttgaagatgaaatctgataggtgacgtcccccattctccatacattgcgtaaaccgatttctggcgtttgtcgtgactcttgttagcatagcaggtgttatgatgatgatggttttcaactcttttagcgttcttggacggttcacataaacacgttgtgaaattcctgcactatcgccatctcataccgatggaatttaaggtcatcataaagaattcttctcccagaacgatcggatagtcatagtcaaaggtcagacgcgtgtttgagcgcagaacgctgtggagatcgcaatattggcgctctcactgcttcaatgttctcaggtgatctaacgggtcgagggactccagttcttcgttttgtcgcgcttgcagtttgcctgaatgtagtgacccatgtaacaattgatttgcgttcagggacaggagccaacagtgctaaattaaagcgataccgaaatgcacgctgtgttttaataaccgaacatccgcttgaaaagtaggccacaacggcaaaggcgcgctcctcactattccaacgcaagatggcgactgaaccgtgtcgggacaaagctttgcagtagcccctcttgaacggggccattagtgctccgctatgacatcaactaactgaatggcgcgcatttaaaaaaggaagttttgctgccgcaccctgtatatacaatatgtatgcacgggtgcggtctaaataatactaaagccggtcaagcaaaaagttatttctcattattttctccattcctttacttaattaattaaattttttcactttagtaacttagcagttattgaccaaaaggtgagatcgttgcttaggaggacaatctaggattccgactttcgggtctgtttcttcgaaaaatgtaagtttattagtaattagaagacgactcgatccagatcctcatttcaagaggccaaaaaaaaaaagcggcattactcagaaaaaaacatgaagcctaatgatttaggtttgcgtgagatcgcttgaattggtgcagaggagtaaaatcttggggtcggttaaggcgaaaatatttttgttttgacggcagtgactcaagttagtattttaggtgacttataggatcaaaaccatcactgatcgttatctatacgtcgaaacatttaagaaggtgatgctcccatatgcattagaggacgttttaacaatacaatgaccaaaaatatacaagtacacttcccaaatagtgcttcgtagctaatccagtctatgtcatggagtggcctaatgtgttgcgctgggagaagtctcggtcataaaagcaagtgataacttttaaattttgcaagatgtaaatctggagcccggatgtaatggagctgtgcgaccttaaataaaaactaaggatatggaacaaaatactacaataaccataaatatgcccttatttaatcattcattcagtcctgaaactatattctggctgtaataatttttaaaatattaactactattatttactattactttatgaccgggtaatttttttttcctatttcacatttatatttttaatcatttttctttaaataagcaaatgaactatcctaaccgtttt

SEQ ID NO: 25655 - DNA, 360 bp, DROSOPHILA
atggccccgttcaagaggggctactgcaaagctttgtcccgacacggttcagtcgccatcttgcgttggaatagtgaggagcgcgcctttgccgttgtggcctacttttcaagcggatgttcggttattaaaacacagcgtgcatttcggtatcgctttaatttagcactgttggctcctgtccctgaacgcaaatcaattgttacatgggtcactacattcaggcaaactgcaagcgcgacaaaacgaagaactggagtccctcgacccgttagatcacctgagaacattgaagcagtgagagcgccaatattgcgatctccacagcgttctgcgctcaaacacgcgtctgacctttga

SEQ ID NO: 25656 - protein, 119 aa, DROSOPHILA
MAPFKRGYCKALSRHGSVAILRWNSEERAFAVVAYFSSGCSVIKTQRAFRYRFNLALLAPVPERKSIVTWVTTFRQTASATKRRTGVPRPVRSPENIEAVRAPILRSPQRSALKHASDL

SEQ ID NO: 25657 - DNA, 2726 bp, DROSOPHILA
atctcaacgttcatacggacggacaaacagatggacagacggacagggttagaccgactctgctattgatcctgatcaagaatatatatactttactttctatggtcggaagcgcttccttttacctgttaaatacttgtccttggtgctgtaggatatcacttgctctttcctagcagtgcaggtaagctaaggatatggagatttgtgggacagagagaaaaatgtctcgctacttgacatctacataagagttaacccggtgcacttgcttccctctcctaaccccgctcgctacacccactgcagctgcagtcattgttctgcacgtggcgtcagcgtatccttgacgaagttgtctgcagcggaatgcgatgataccgtggggttttgctaagcgttgggccgctaagcttacgagcggtcggcgaaacgctgggcactcagtcgaattaaggcagctgagcggagctaatattaaaatcaaaaatttgtatttaattatagataatgaaactaattaagcatccaagcaaatcaaaccgttaaagataccatatgaagtggacctaccatatgaaaacttcaggtacctacacagtgaccaatggtaaacgagagaaattatagcacgcatttcgatgcttggttaaagcaaatgcgatatacaacttatatgaaaggcagcatcttataatgtgttcttcttcgtcatatttactaacccactcttcgcgtcgagtaccttttcagaccactgcctgctattatttagcatcgactggcaaggcctcaaaacaaaccccaatgcaaaaaaatgaaaccaattatttaggaaagtcagtcggaattgttttccttccgaataagctaatccgaacgttgtcacgccaaagaaatcggttggcttcagcaattttaaaataccttacgcacacaaaaggaattcttattggtcgttgtatttttgagaatatttcaatgatttaatgatgtattcttactgaaaagtacttacggagtttccatatttttgaatgcaaagagaaacgacgtcttctcttaagagtctaacagcagcatggagaggatgttttgtcttggttttaagcatttcaaacaacaagggtccggacatatgttgaaaatcgtcagttgttaggtcatcccagtgtgttgatattatgctggagcaatattctaacagtgtggacgcaccaacttcttcggcaacgcaataaaatcttatacaagatcttacacctactgaagttactagtgcccgctcacatattcctagaagagatggtaaaccaaatcgatgtgcggcttttagtagatccaatgctagcccgtcattctgcaaatcaatcagatcagtgtaaatccaacgcaagagcgacagcaccacatcctcatttaaatcactccagtccagctgttgtatgttgcttaaaagatcatttccccacttttcagagcgagcgtgaagtacgattttatgtgcaggaaatactctcgtctgcgatcggatgtaaatatcagcataagtatttttatcaaataatgaagcaacagtcaatgacagtcgtgataaaaaacttgagagtccactttcttcgttttcagaggaagctatattttcgttgtacttgcgttgtaattccacataacatcgttgtagtttagtatattcatcactttgcaccgccaagattttttccatttttagtacggagaacgtctcattactacctttaaatatacatttaaaaaaagttctgtaataaacagctttaacataagtatttatacccgttactcgtagactaaaagggtatagtagattcgtgggaaagtatgtaacaggcagaaggatgcgtttccgaccatataaactaaatatactcttgatcaggatcaatagtcgagtgtacatctttgtgtcagaatctattaaagctagaaggttgagattaagcatacagactctagagacatagacgcagtgcaagtttgttgacccatgttgccacaccaactctaccgcccacaaaccgtgcaagctgcaacgaccgaacttttgcaaaatttgttatattttttcacatttttattagtattgtaagtttctatcgatttgccaaaaaaatgttaccacgtccacacttttgaaaacgccctaaacactcataaacaaacataaacattaaattaatttaattggtcttgtaaatttctatcgatttgtaaaaaaaactttttgccacgcccactctaacgccctaaaacagcccaaaactgcgacgcccactaattttgaaaaatcgtttgatgttttttgatgaatttcgcgttcgcattcacactaactgagtgacgagtgtgtgatagtcggggaactcgactatagcaatctctcttgtttgaatctgaatatggaatttgaacatttcagtaacactatagaatttgtttcacacttttgaaagaagatgtatatgtgtttcatattattttcatttttctcaagctttttcgccattttaatgttcacaatgtgcaataaggcttgacggacagaacggacgtgtctaatccaatcacagacctttgaaaaatgttttatttttttcattttgtatatgtccactcaagaccaaaaaaaggttgtcacacaattttcctaggtacttgaaaaaaatgttgttccccaacaaatatta

SEQ ID NO: 25658 - DNA, 726 bp, DROSOPHILA
atggaaaaaatcttggcggtgcaaagtgatgaatatactaaactacaacgatgttatgtggaattacaacgcaagtacaacgaaaatatagcttcctctgaaaacgaagaaagtggactctcaagttttttatcacgactgtcattgactgttgcttcattatttgataaaaatacttatgctgatatttacatccgatcgcagacgagagtatttcctgcacataaaatcgtacttcacgctcgctctgaaaagtggggaaatgatcttttaagcaacatacaacagctggactggagtgatttaaatgaggatgtggtgctgtcgctcttgcgttggatttacactgatctgattgatttgcagaatgacgggctagcattggatctactaaaagccgcacatcgatttggtttaccatctcttctaggaatatgtgagcgggcactagtaacttcagtaggtgtaagatcttgtataagattttattgcgttgccgaagaagttggtgcgtccacactgttagaatattgctccagcataatatcaacacactgggatgacctaacaactgacgattttcaacatatgtccggacccttgttgtttgaaatgcttaaaaccaagacaaaacatcctctccatgctgctgttagactcttaagagaagacgtcgtttctctttgcattcaaaaatatggaaactccgtaagtacttttcagtaa

SEQ ID NO: 25659 - protein, 241 aa, DROSOPHILA
MEKILAVQSDEYTKLQRCYVELQRKYNENIASSENEESGLSSFLSRLSLTVASLFDKNTYADIYIRSQTRVFPAHKIVLHARSEKWGNDLLSNIQQLDWSDLNEDVVLSLLRWIYTDLIDLQNDGLALDLLKAAHRFGLPSLLGICERALVTSVGVRSCIRFYCVAEEVGASTLLEYCSSIISTHWDDLTTDDFQHMSGPLLFEMLKTKTKHPLHAAVRLLREDVVSLCIQKYGNSVSTFQ

SEQ ID NO: 25660 - DNA, 5310 bp, DROSOPHILA
tcttacattccgccgtcttccgaatttccaaaatatctaaatcatttgtctgttaaccaaaccgcctcaaatatactgtctgataaggaccaagaagttctaggtgacttcaatatacctggaacataccagaagaaaaatagaatatccttccccccatagcaaaacatgactttattgagggcttgctagacttattgttgtcgcaagtaattatataagaaactcccatggtcgattgtccataaacctgaaaatccataccgtcctacttccgaggtgaaaatcgacataataaacgagaaatcagataagtcgaccaagcgtattcattgcttttgtaaggcaagctttctgaggctaagttattttagagctcgctttccgacgtactatccgtcaatccctaacaaacctcattgtattaataaagagttggcacacctaagaaatttaaagtctagattttatacaaaatttaaaaataccggttctcagtccatcctttctaaatattgaagtgctcggttaaattttaccgtgctcaacgcttaaaagagctattaacacctttgtaaggtacagttcgcacaggatccgaagcagttttataatttctttaacactaagcgcaaatacacgcgacatacactctaagtgggtgctgctctttggacaaaacaacacggttcggtgatcacggtgttcttgacactaaaataaagatttcagaccatatttcgactattgccaggcctgggcttggttttataagatggtcaaagaaatttgatgctccttacactaccaaaaaccttattaaccttattcgctagtgcgtccgattcatgagtgtggataacctgtttggagtcctcgcgtagtccacgcgaagcgctttgaaccgtttcaaaaccggttccttgcgacgcctaaattgggatgcaaactttatattaactccttattccagtagacttcttttaattaattcacctttcctagctaaccgtataacaatgcttgaaacagtctttatttgtaagcttattactggtaaagttgatagccccgcctttgttagtcggctaaacttctctgtttcaagctagaagctactagaagctacatacccctaatcttaaatcatcgtagactggcatgacccttatacagtaataatagactctatctaatctttattatctgtaatcttgactctctaccgcttctaaataaattccgtcggcaattatttagtcaatctatcatattatgctcggctcttaataagaagtaagatgtaactactttacgaaattggagttacgaattttcggagttggttttattgcttaaagccacaagtttcaaacgaaaaattaatgtgaagaaaacgaaaaaagttggaaaggtgcatctcagtctagatagtcgcaaggttaatgcatgggcgaaaaaggatcatatcctctgccggagatcgatggtaatttatcatgactcctcacggcaatgtttatatcaagtttggatctgaaagaagcctattggaagatgcccttgaactaaatttcgcgtgataaggcggctttcactattcactattaatatacacaattattcacttcacatattattcactattccgggaaaacccctgtgacgccatttgggttgaccaatccttcacaaactatgacgagaatagaaagcttattccagccgatctgaggaagaggatgatctgttggtggtgtcgagtagttttgaaacctatctgagaatgttaggtctagttgctgaacaagttaagaaggcagggttgactccgaatgtattgtagtatgcggtcagtgaattatttgggtcatataattggagaaggtgctactgatccagaaaagatatcagcaatggcagacttcacacttccgaaggttcctcgaaatggtagggacgtaccgaaagtttataagcaatttagcttcggtagctgttccattaatagatttgctcaagacctagaaaaagttccagatgaccccacctcgtttaaatgtggttaaagatgctttgtcgagggtaaaagaggcagaacaggcaattattgatgctagtgaggcatagttgttagacatttagttaaagccgaggaagtttcttatcagatatctcacatccgtactgccatctactctccctcaggcaaggaaaagggtgaatcgatcagtaatcgctacgacttgatcttatgtgagagctgacaagaaagattgagatgagcagcagagcattatggggggaaaggtatatcttggatgcgggaagagaaaagccgcgttgagctctagttggtaatggtagtatttagggtgatgaatttcgtctgcaattatctattaggctcggcgcttaataagaagttcaagattgaactattttaggaaatttgagtggttaacgggagaattgtagctttagcaggacggggttttcaaaaaacgatacagtcaccgcgtgagtcttttttgctcagcgccgcaggagcagcaaacgtcggagtgtgttttttttcccaaaattggcaacaagtttcgagtccccagagcacaggaaagactaaattattgttttaaggcccgaaaaggtgctaactaaatacaaaaggatccaaaatatattttgtcaaatcgatagaaaattattctataacaaattattcaaaagtgtgggcatggcagttttgagcggtttatgggcgtggcaaccaactccgcttgcgctgcgtctatttctatagaatcggtatgcataatctcaaccttctaccatgtatagttcctgagatttcgacgttcacacagacggacggacagggtcagatcgacttggctattcagcatgatcaagaatataagtttataaggtcggaaacggttccttctgcctgttacatacttttcaactgatctagtttacccttttactctacgtgtaacaggtatagctcagactcttcaacaactaaatgttgtcctggtgtcctcctttagagtatacatccggtgccttcgattgcctgcgcccaagggcgtcgccagggtagagcctaattttctgcctatcacgtaactttccgttgtttatttacactatgtactgttctgattctcttagccaatctacctccaattctaccgatatgcttcaaatacataagctgtttgataggtgctttcactaagagtttccagtgttggaagatgaattctactgacccccaccccctgctgatggcctggcgacgcccttgcctgcgtcgctacttcaaccactctgttgacagcatccacagtggaccgcgctttcctgaagccgaactgggaacgtgagtggtctcccgcttctgagatagccctctctagccgaacgcacaccagtttctctaggagcttgccagttccatcgatgaggcatatcggccggaacagtaaaggctcttcagtaggcttccctggttttgggaggagcaacagtttttggatttccaagagtttgggagtttcagtcaggcacttgaccacttggctggagagagggagctagttgaagcgccctgttgggattcccgtcgggcccgggggccttaccgtccttcagtagcttcgccaactccaggacctcctcgctgctgaccgtggcgtctgcctcgacgtggccatctgtggcagcgtcggcgggacgtaacctgcccatcaatggaaacagatgctccgttacactgcggtggcctgcttgactaccaccttgtaggcacttccccatgggtcacgaggtagcatttccgcttgctctatggctagctgagtattttcctgctcgcattcacggcgagccgtctctatatcctgctttccccagaactgtgccactttgttggctacgtgtcatgcttgtttgcatgctttcgtcgcacgcgatcttcaaatgcctcctcagcgcgatagccgtcagctcttcgccctctccacgcaccgagggtaagaactggtctcggaataactgcgtgtccagggtatccgctttgtattacctattttcttcctgactaggtctgctagctgggcttgtgtggtggttgggcgtcccaaatcacacataatatacaagcgagcacagccagtgtaatcccgagtctccacctcgtgagactgaaccacagaccccagtccggcatacctgaacgtgtgagggttcacttggtttaatagagccacgtccagcgtcgcaaatgcctctaccaccatcctacctctcgcgttggtggcaactgacccaactctctgaccatgcgttggagtctgcccagtcttggcagcggctacctgtatgccccgctaagtaaggcaagattcgctcagcgttctcgcactgtctgcactagcaggacttgggtcgtcatgcagtaattcagattcaactgaattaaacacatcctagtgatgcatttagccccgttaaggccctctgcggcattgtgtccagaagacccgtatctgaagcagcactggcttttatcgacgacccttctacaataagccgctatgtggccttcctccagattgcgtaaaatatatttacgcataaagtaagcaaattgtctccaaatagtccaaatattttgcttcaaacctaacggtactttctaaaaatataattgaagttatgcacacgtcttcaagcgaaattgcttgcgaaattgcatttccaaaagtaaacctaaaaggcatcatactttcagtgaggagcttcgatttaaataatttaaaatggattttaaagtagaaggtactttgtatacaaaaactaataattaacgatttagagctctgtgtgtttccacacctatatatttttgatttacggtgcacagagaagggtacccacggagaaaaattatttgtgttgaaaaaaatgttaaacaaattgtttatttttggactcgctacaatcggaaaaaagcttccatccttaacacaatttcagtaaaatgcaaccataatatatctgagaaaattatggaaagtgatcatggtggccgtccaaaagtagatttctcgatgtcatcatcttttcgcatcaagatcaaagcgacaccgtttagctgaactggccaaaatatgtaagaccgctgtatcttctttacataatgaatttgaaaaaaaaaattattgccagcagatccgattgaaattatttcgctattaattcaggcaagcttgtctaaaaacccatatcgtttgataa

SEQ ID NO: 25661 - DNA, 658 bp, DROSOPHILA
atggtggtagaggcatttgcgacgctggacgtggctctattaaaccaagtgaaccctcacacgttcaggtatgccggactggggtctgtggttcagtctcacgaggtggagactcgggattacactggctgtgctcgcttgtatattatgtgtgatttgggacgcccaaccaccacacaagcccagctagcagacctagtcaggaagaaaataggtaatacaaagcggataccctggacacgcagttattccgagaccagttcttaccctcggttacgtcccgccgacgctgccacagatggccacgtcgaggcagacgccacggtcagcagcgaggaggtcctggagttggcgaagctactgaaggacgggaagcctactgaagagcctttactgttccggccgatatgcctcatcgatggaactggcaagctcctagagaaactggtgtgcgttcggctagagagggctatctcagaagcgggagaccactcacgttcccagttcggcttcaggaaagcgcggtccactgtggatgctgtcaacagagtggttgaagtagcgacgcaggcaagggcgtcgccaggccatcagcagggggtggggaataagcttacaaataaagactgtttcaagcattgttatacggttagctagg

SEQ ID NO: 25662 - protein, 218 aa, DROSOPHILA
MVVEAFATLDVALLNQVNPHTFRYAGLGSVVQSHEVETRDYTGCARLYIMCDLGRPTTTQAQLADLVRKKIGNTKRIPWTRSYSETSSYPRLRPADAATDGHVEADATVSSEEVLELAKLLKDGKPTEEPLLFRPICLIDGTGKLLEKLVCVRLERAISEAGDHSRSQFGFRKARSTVDAVNRVVEVATQARASPGHQQGVGNKLTNKDCFKHCYTVS

SEQ ID NO: 25663 - DNA, 4601 bp, DROSOPHILA
atagacgagtttttcgattattagatatccagtacttagctactgggactgcgaaaacaacttttttcggaacatcgatagaaatttacaatattattagaaaaaacaaaacatatcaaaattaacatttgtgatgttataagtttgatcaaagggccgaatagaccggttttcaagtgtcaccccgctaaaaaaaaacaggctaatcattttatttaacgtgtataattaattattccgaaagggaaataatctatgacaaggagccatttccacattgtagtacattaaagcaaacggtgcatactctaacaggtttatttatgccgaattttaaaatgggcacatcgttacaggaacatttagagcacaagacccgtccacaatgccggctaaaaaataaatatttaaagtatatatgtaaaagaaataatattttacatttcgcgataataactttcttaccaatgatgtttcctcatagtaattgtaaatctgtttgtacaatgctggcaatagtcagactctgcccacggtgattcctgtggcaactggtccaataaattgtgtagtaattgatccgtggccagcttaaagttaaaaatattaattccatctttattttcagtaccaaggcacgctcctgccttgacaagaattttacaaagtggtgattggcctctcataaatgaaagtaacagcggtgtattaccgtccatatcaggaatgttaattggatacttcggcatagactcaagaaataattcacaaataagtccggctgtactatcttccacaacccggcacaattcatgcaagggatttctaccctttaaattagttgcttctgcattgactctcgattcggttaaaagttcacgaacaatgaagaattgggcgcatcgcacagcaatgtgcaaagcattattgccgtcagcatcggttgcgtcatagtcagcattgttttgaattaacgcagagactgcaggaagattaccacgttctatagcaatatgcagaggcaatttttgaacagcatccctttcattcatacgggcgcctgctagaatcagatttctggtaatcatttcattttgggatgcagctgctaggtgtaatggtgacgattgattggcgtcatgtacccgcgaatttacatctacttgaatagctaataaaaataaaacgctttctaagtcatctttcaaaattgctaaatgcaaaaagtttcgaccgcgaatgtccatttgctctgctgctgttggaaatcgatccaaaatacgttgggcagcgttgtgattacggaagtccaaagcagttgcaaacggtgtgtttccagacttatcacgtaacttgaggtctatatcaggatgacaaagaagtatagatattatctcatcatattggctttcaatagctacatgaagtggtgatttgctttcagcgtcaattaaattaacattagctccatgatcaattaacgtctgaagaactttagtttggccccaatgacaacataaatgcagcggagatgccttatcttgtgcttcatctccaccctctccgttggggcctggctgacgtgaagagtctaagtcgcattggctttgaattaaaaatatagctactgactctttgttttcatcaattgcgcgatgtaaaagagtttgcctgcatccttcaggtccctcgtcccaacaatctgtgtcaattccatgtcgcacaagtatttttgctacgtcttcgtatcctttttccaaagcggaccataacggtgattctccatttttattaatacttaaggcgattccccttctgcaaagtgcatcgacaacttcagaaaggtcatgcttaatcgataagtccaacgcagaatccagattttctataaaattttttggattacactgagttacgaattaagaacattagtaaataaggttgctggtcctaaaaagtctggttgacatcaatttttcgagggcttattcccaatgaatttgttttttttttatatatatatatatattatatatatatataatatatataatatatatatatatatataatatatattataatatataatatatattatattataatataatatatatatatataatatatataatatatatattatatatatattatatatatatatatatatatatatatgtaaatatatatccttatagtgtatatatttttatatatatattgcgtgtctatatatatatatatttcctgtatatatatatattgcctgtatatatatatatatattcaatccaatataaaagctgaagatatatatatatatataggttagcttaggttatatataaatataacataactttcaaaaacaaggcagagtttttgggtccagtaaaagtaattttttggtgttacaaaattttacctgttaaagctgtaatgtctgcaccctgctccagtaaaaataatgatatatcactatcttcgttcttaattgattgatgtaaaggtgacaagttgtttttattctttccgttaacatctgagccgcctcggataagagtaggtactagagtagttctcttaagggataagcataggcttagaggagagtcaccattaatatcttggcaattaaaatcaatatcatggcttttgttttttaactcaacaaaagcttctaaggcatctatggcattagcttcaactgcaatgtgcaatgctgattttaagccacaatcaatatgttttaaattagaggaagcaccattaactatcaacttcttaactagatttggcatgttgtttaaagctgctatgtgtaatgctgttaatccacgaaaatttatatggtccaaatcggcaaaatcagccaggaaaattgctgatttttctccacgatgtctatccaacgcaaacacttgtagtaagctatctccggtctttgagtttgtacgatctgtccgtgctcccatacttagaagtattgatgctattaaaaactcgtggtcccccattgataagcttagctccaacgcacacttctcgtcataggtgcgcaaattaatatcaatattaggcactttaagcaaaagcttcaccatctctacatttcgcctagcaatcgctatatgcaagggcgtttctccttttatgttttgtatgtttatgtttaactgtctttgtaaaatcttttttacaacttccattatttccggtgtattgtccggaccataattacaaataatgtgcaatgcagtatctgatgatggtctacaaaaataaattattttttgtttgataagctatataaaatattatttactttgatggaaggtctagaaggcagttttggtccaacagaaagtttgcagaaaaggcatcaccgttttttaaagcagatttcagcagagaaaaaccctgttggaaaatatagttagcaaaatttccatttaaaattactcatacctccatattaacagcatttatgttagccattccgttgtctactaaactcttcgcaattttcgcattttttgaagataaggccatttcaaggggcaatataccattttcagaaaatgtgtttactagctagaaaaaataacaggaaaatacaatgtatttattaacgaagtcttaaataatttaaataatgaaactttttgaatgttcatactttgaaaattaaaaaccattttgtattagtgaaacccgaaatactgcaatgtagcgaatttttattccgcccgtacggaaatctgcgatagtatttttaatacgcaactgaacaacactaatttcatatttatcgcctatgtctaacttatctaatggcgaaagaaggggagaaatcgcgtgaaaggttggcctggggcacaccgacaagtgcttccacagggacaagtagcggctaaagaagcccaccgggagcatcgctaccagaaccagtgcctaagagtcgagactcttcgctaccaaagctgaacacagctaatagattcgttgaaaagtatgtaacaggcagaaggaaccgtttccgaccaaataaagtatatatattcttgatcaggatcaatagtcgagtcgatctagccatgtcagtttgtccgatctcgatctcgtcgcgatctcaagaactataactatatatagaagattgagattaagcatatagattctggagacatcgacgcagcgcaagtttgttgacccatgttgccacgtccactctaacgcccacaagccgcacaaaactgccacgcccaaacttttgaaaaatttgttgatattttttaaaatttgtatgactcttgtaaatctttatcgatttccaaaaaaaactttttcggtgacttgaaagtagtgatcaacagttttgaagtagctacagatagttttcgtcaagccgatgatctccttttcgcgctagattcgcagtctaatagctttaagctaatagagaaaccactaaagcgcaagaagggcgatgatggtaggctgcctaaaagaaacgcctgcagacactggcaagtgatcaacaggactccacagcagatcagctgtcaatcgcagcaaatcctcacacctggctt

SEQ ID NO: 25664 - DNA, 2679 bp, DROSOPHILA
gctagtaaacacattttctgaaaatggtatattgccccttgaaatggccttatcttcaaaaaatgcgaaaattgcgaagagtttagtagacaacggaatggctaacataaatgctgttaatatggaggagggtttttctctgctgaaatctgctttaaaaaacggtgatgccttttctgcaaactttctgttggaccaaaactgccttctagaccttccatcaaaaccatcatcagatactgcattgcacattatttgtaattatggtccggacaatacaccggaaataatggaagttgtaaaaaagattttacaaagacagttaaacataaacatacaaaacataaaaggagaaacgcccttgcatatagcgattgctaggcgaaatgtagagatggtgaagcttttgcttaaagtgcctaatattgatattaatttgcgcacctatgacgagaagtgtgcgttggagctaagcttatcaatgggggaccacgagtttttaatagcatcaatacttctaagtatgggagcacggacagatcgtacaaactcaaagaccggagatagcttactacaagtgtttgcgttggatagacatcgtggagaaaaatcagcaattttcctggctgattttgccgatttggaccatataaattttcgtggattaacagcattacacatagcagctttaaacaacatgccaaatctagttaagaagttgatagttaatggtgcttcctctaatttaaaacatattgattgtggcttaaaatcagcattgcacattgcagttgaagctaatgccatagatgccttagaagcttttgttgagttaaaaaacaaaagccatgatattgattttaattgccaagatattaatggtgactctcctctaagcctatgcttatcccttaagagaactactctagtacctactcttatccgaggcggctcagatgttaacggaaagaataaaaacaacttgtcacctttacatcaatcaattaagaacgaagatagtgatatatcattatttttactggagcagggtgcagacattacagctttaacagaaaatctggattctgcgttggacttatcgattaagcatgacctttctgaagttgtcgatgcactttgcagaaggggaatcgccttaagtattaataaaaatggagaatcaccgttatggtccgctttggaaaaaggatacgaagacgtagcaaaaatacttgtgcgacatggaattgacacagattgttgggacgagggacctgaaggatgcaggcaaactcttttacatcgcgcaattgatgaaaacaaagagtcagtagctatatttttaattcaaagccaatgcgacttagactcttcacgtcagccaggccccaacggagagggtggagatgaagcacaagataaggcatctccgctgcatttatgttgtcattggggccaaactaaagttcttcagacgttaattgatcatggagctaatgttaatttaattgacgctgaaagcaaatcaccacttcatgtagctattgaaagccaatatgatgagataatatctatacttctttgtcatcctgatatagacctcaagttacgtgataagtctggaaacacaccgtttgcaactgctttggacttccgtaatcacaacgctgcccaacgtattttggatcgatttccaacagcagcagagcaaatggacattcgcggtcgaaactttttgcatttagcaattttgaaagatgacttagaaagcgttttatttttattagctattcaagtagatgtaaattcgcgggtacatgacgccaatcaatcgtcaccattacacctagcagctgcatcccaaaatgaaatgattaccagaaatctgattctagcaggcgcccgtatgaatgaaagggatgctgttcaaaaattgcctctgcatattgctatagaacgtggtaatcttcctgcagtctctgcgttaattcaaaacaatgctgactatgacgcaaccgatgctgacggcaataatgctttgcacattgctgtgcgatgcgcccaattcttcattgttcgtgaacttttaaccgaatcgagagtcaatgcagaagcaactaatttaaagggtagaaatcccttgcatgaattgtgccgggttgtggaagatagtacagccggacttatttgtgaattatttcttgagtctatgccgaagtatccaattaacattcctgatatggacggtaatacaccgctgttactttcatttatgagaggccaatcaccactttgtaaaattcttgtcaaggcaggagcgtgccttggtactgaaaataaagatggaattaatatttttaactttaagctggccacggatcaattactacacaatttattggaccagttgccacaggaatcaccgtgggcagagtctgactattgccagcattgtacaaacagatttacaattactatgaggaaacatcattggtaaccggcattgtggacgggtcttgtgctctaaatgttcctgtaacgatgtgcccattttaaaattcggcataaataaacctgttagagtatgcaccgtttgctttaatgtactacaatgtggaaatggctccttgtcatagattatttccctttcggaataattaattatacacgttaaataaa

SEQ ID NO: 25665 - protein, 817 aa, DROSOPHILA
MALSSKNAKIAKSLVDNGMANINAVNMEEGFSLLKSALKNGDAFSANFLLDQNCLLDLPSKPSSDTALHIICNYGPDNTPEIMEVVKKILQRQLNINIQNIKGETPLHIAIARRNVEMVKLLLKVPNIDINLRTYDEKCALELSLSMGDHEFLIASILLSMGARTDRTNSKTGDSLLQVFALDRHRGEKSAIFLADFADLDHINFRGLTALHIAALNNMPNLVKKLIVNGASSNLKHIDCGLKSALHIAVEANAIDALEAFVELKNKSHDIDFNCQDINGDSPLSLCLSLKRTTLVPTLIRGGSDVNGKNKNNLSPLHQSIKNEDSDISLFLLEQGADITALTENLDSALDLSIKHDLSEVVDALCRRGIALSINKNGESPLWSALEKGYEDVAKILVRHGIDTDCWDEGPEGCRQTLLHRAIDENKESVAIFLIQSQCDLDSSRQPGPNGEGGDEAQDKASPLHLCCHWGQTKVLQTLIDHGANVNLIDAESKSPLHVAIESQYDEIISILLCHPDIDLKLRDKSGNTPFATALDFRNHNAAQRILDRFPTAAEQMDIRGRNFLHLAILKDDLESVLFLLAIQVDVNSRVHDANQSSPLHLAAASQNEMITRNLILAGARMNERDAVQKLPLHIAIERGNLPAVSALIQNNADYDATDADGNNALHIAVRCAQFFIVRELLTESRVNAEATNLKGRNPLHELCRVVEDSTAGLICELFLESMPKYPINIPDMDGNTPLLLSFMRGQSPLCKILVKAGACLGTENKDGINIFNFKLATDQLLHNLLDQLPQESPWAESDYCQHCTNRFTITMRKHHW

SEQ ID NO: 25666 - DNA, 3192 bp, DROSOPHILA
gtcattcatttcatagctagtgcccgcccatgcacatcgatgcttaattatcactgtattatttaaaccacataatacaaggctttttacatcatttaaaggcttatttttaaatttaaaaaaaaaatggaaaaaaatgtattaatttttttcaggtttttccaaagtagagtgaaccgaatagattaatgcgtaagcgtaagcgagcggacagagagcaatgtatggccgttacgcatcttgttattctagtgtctttggtagaaggttataccagattcgttgaaaagaatttaacaggtaataggaagcgtttacaaccatataaaatgcacatattcttgatcaggaacaatagccgagtccatctggccatgctcgtttgaacgtatgaacgtatcgattttaggaactataaagggtaaaatcttgagattaagcctgcagctttcagaaacacaataagcgcagcgcaattgtgtttccgaatgttgtcacgcttaagcttttcaaaaaacgttttaatattatttaaatacaagccgccacgcccgttcttacacctacataagtcccaaaacaaccacgccctcgcttttgaacatttttttaaatttaatattgtttcattttccaatatctttcgatatggcattttttagatatgaagcagaagagctataacaagcaaaaatacgtttgcgtgcccatcgtcgttcaaatgagattttttgctcaaccttgaggtacttttttgttagatccgctaaacgaaaaagggattatttgcatatattttaaaattttttgtaaaagaattggagtcttgccgaaaaatggtcttagtacatttttgaaaataaaaactggaagttaatgtagatgaaagaaattttatattttaaaccaaaattcctaataaaccaatatgccaaaccaaaaatgcgaaaacctgttactatatctatttttgcgtttaaaagctcttttcaaaaaatatattttttagatatgttctttgcgtgcacgaagtgctttatttaaccgataaaataaatgcttcacaatttatcgttttctgtgcatgtgctcacggttcttgcgcttccaagcagcacgcctagatccaccaattgtctgggagtatctatatcccttgccaatgccacgcgaactttttccagctgatgtaaggccacgcaattcacgatgcttgtggacatgcttgcagatccagttaatttttggatcacgacgaatagcactgtgatgagtatcaattaagattacttcaaaatatttataagaagcatcttgcgcaatccaatacgagttcaaaactcgcaagccgccaagtctacgaccaacacgttcctacaagaaaataaaattcatgatatatttcagtgttttttggtgaggacctcttaattggacaagaatatttcagacatctaaggaagttaatgtcaacatatattgtatgtcaaaaggggttgtcatcaacttgttcgaacgtgtggttagcaaatttcgttttttcttacctcagcaatggattgcaaaccacgatatggttttaactggtttacaccatgactcttcggcttgccataagtgcatcctttgggaactggacgcttgcgacctccgcggcgaacacggattctataaatcacgaacccctgtttggctctgtatcctaaacgtcttgctttatccgggcgagtaggtcttggcgaacgatgcaatttcgttagttggcggtattgccaaacgcgaatacgtagcaagtagcgcatcacatcgctctgcttcttcctataaagttcctgcatgtaccgataagcccccatctctgcaatttgatagacctagtaacaaattcattatttattttataactgtcacatcatcggtccatcaacttcttaaactgtacatattacaatctagaacagataataattcgtatcaatgttacatagcaatgtgagtacaaaaacgaacataacatccgtcagatatccataatctacactgagctcagagtggtgcatggaaaaaatcatcatacaaacttaaaaacattttaaaaggaccgaaaataatatataaacttatttccgaaatgatctcgtactaaagaaaaattattgacccgaatgcacaaccaacttacagcacggaaatattccaaaagaaggaagcaatgagttggatcacacgacaaacaagctcagagttgctttgggatatacttaccctaatgcatgaaacattgtaaaacggaattatacccctttctcacagaattgtattatttttaaaacatcccagcatgttccgttccatgttaatttatcttatcgcattcgatttgggaaaagtcttttaatttcgttattaggtgctctggttttcaaataatttttgctatagtgctatgcgttatttctatgctatttcgctttatttcgtttcttgctgctcaaacaactgacttttttctttgtcaaaatcaaacaacgtgaagatatcctttatatatttgaaatcgtttgttttgaagccagacggacgcagaaattgctgtttgcaattgtttttcatacaaaatagctaccccatttttcacagtttttatttattttttaatgaaagcattttaatatatggtataaatatttttacctgcctgtttcgttttcccgcaataacttttgacgacgtacttagcgacaccttagcaaatcgaaatttgttgttgtcgacagcaaatgtgtgcttgtcacatcggaggcgagttcctcgcctatcagatacccgttcctcagctagtgcgaaaaaattttgttgcaaataaaaaaaattataaaaataattaaaatgttaaaaataaacaacacgttcttcaaaagtgtaggcgtgccagtttttggaggtttgcgtgcgttagagtgggcgggtcaccaaacttgcgctgcgtctttgcctctagaacctgtatgctgagatctcgatgttcatatagacagacgtacatggctagatcgactcggctattgatcctgttcaataatatgttttgtatagtcgtaaacgctctttctgcttgttacataattttcaacgaatccagtaagtcttttactctacaaataacgggtattaaaaggcatttttacattt

SEQ ID NO: 25667 - DNA, 1019 bp, DROSOPHILA
tttccgtgctgtaagttggttgtgcattcgggtcaataatttttctttagtacgagatcatttcggaaataagtttatatattattttcggtccttttaaaatgtttttaagtttgtatgatgattttttccatgcaccactctgagctcagtgtagattatggatatctgacggatgttatgttcgtttttgtactcacattgctatgtaacattgatacgaattattatctgttctagattgtaatatgtacagtttaagaagttgatggaccgatgatgtgacagttataaaataaataatgaatttgttactaggtctatcaaattgcagagatgggggcttatcggtacatgcaggaactttataggaagaagcagagcgatgtgatgcgctacttgctacgtattcgcgtttggcaataccgccaactaacgaaattgcatcgttcgccaagacctactcgcccggataaagcaagacgtttaggatacagagccaaacaggggttcgtgatttatagaatccgtgttcgccgcggaggtcgcaagcgtccagttcccaaaggatgcacttatggcaagccgaagagtcatggtgtaaaccagttaaaaccatatcgtggtttgcaatccattgctgaggaacgtgttggtcgtagacttggcggcttgcgagttttgaactcgtattggattgcgcaagatgcttcttataaatattttgaagtaatcttaattgatactcatcacagtgctattcgtcgtgatccaaaaattaactggatctgcaagcatgtccacaagcatcgtgaattgcgtggccttacatcagctggaaaaagttcgcgtggcattggcaagggatatagatactcccagacaattggtggatctaggcgtgctgcttggaagcgcaagaaccgtgagcacatgcacagaaaacgataaattgtgaagcatttattttatcggttaaataaagcacttcgtgcacgcaaagaacatatctaaaaaat

SEQ ID NO: 25668 - protein, 204 aa, DROSOPHILA
MGAYRYMQELYRKKQSDVMRYLLRIRVWQYRQLTKLHRSPRPTRPDKARRLGYRAKQGFVIYRIRVRRGGRKRPVPKGCTYGKPKSHGVNQLKPYRGLQSIAEERVGRRLGGLRVLNSYWIAQDASYKYFEVILIDTHHSAIRRDPKINWICKHVHKHRELRGLTSAGKSSRGIGKGYRYSQTIGGSRRAAWKRKNREHMHRKR

SEQ ID NO: 25669 - DNA, 2495 bp, DROSOPHILA
gagcgttgcctcgaccatggatacaccctgttccataacatccttaacccatactaaccgacaggtagtcctccggagtagacgacaaggacatggcgtgttcgaaagggaagtggagtcagtgctcggcaaaggtggtcccaggcccgagcgttgcctcgacccgtggacgttacaccctgccctataacatcctagtcccggtcgggccgacacgtcgtccgtggtccaaaaagcacatgacaatgaaggcaaggcgtagcaggagcaacgccgcaggagcagcgcgttcaccggaggagtcagccgtaaaaacagtacaataaatcgactataaatctgatttttcttggtcgggcaatcacacgaatcataaatttggtggaacgaacgcacaatctttctgagctagccgttgcacttcgtaacgagccgaaatagcaaaaactgtttcttacatctggcgcccaaccctgattgtccgggcaaaaggaaaatagagcaagatggggaagtcgtgtacagcttgaagagggatgactttgccgccatagcaagtgcacgtgggatcaaactggaaggtttggtcgaggaaatgcggaagacgttgtctaaaaaaggaatatggaaggagaccgcctgtagaggtcaaagtgaccggcgtagaaggcctggtgaggagcatcgactttgctagcatggcggaggccagcgtaagcaggtccgtaaggcaggaacgtcgagacgtcgatgataggcgggagacgacaagggcagcaccgcaggactacgcaaaggtgacaaagaaggtgcgagaaggtacttttcgttacgacgggaacgagaagccgctggactcggcatcaaccagatcccaagagcgataccggaactacgaaagggcagggccttgaagtggttcattaccaacaacgaattctgggagaaatgggccgagttcataaaaagcttccaggaatttttcctgtctagaggcttcatgacgaagctggcggaccaggtcaggcagaggacacagggacatgtcaagaacttcaaggtggatatgcagaccctaatgcgaatgatgagaataaggaagcactccaaccttacgcatgttcatacgcccgtaagagtgccgacacatggatgccctgatggccctggccgacgagttcgaagagctccacacccaaagggaatgatcccggcttgccccgacttcacaaagactttcgtgctgcagacggatgccagagactatgggctgggcgcgatcctcacacagcagtccgatcaaggcgactcaagtagaacgctgaacgcagcggagaggaactactttgcaacggaaaaggaatgtttagcaatagtatgggccgtcaggaaattgagaccttacctggagggctaccacttcaaggtgatcacggagcatatggctctgatatggctgaatagcattgagagtccgtcctgccggatcgcataatgggcgctggagctgcaacaatacgacttcgaaatttcggtttggaagggccagttaaacgtcgccgcgtacgcttttttgagacaacttctgcaggagatgagccgcagagtgttaagtgctatgagctaacaattgagcagcagggatgctggtggacggaggggatgcgaagaaaagtgaagctggagccgcagaaatttccggactatttggagaaggccgaccgacggatagtggccagatacgaggcgctcacggtgatgattacgtacaacggtgtgtagttcacaagcagggcgtacaggagatttctggaggagctggggtgcgacaccacatacgcctgcggagaacgcggagaaaattaaggaaaccttcgagctggaggaacatggagtgggcggcgcaggatcaggcgcgccactataatcttcgaagactgccgtggaaacccaaggtgggggacacagtattggccaaagagcaccgtcgtcaaaggcagctgaagtcaagatttgacgggccgttcacaatctaaaggctcacatcaccagttatctgcatcctggaacacaacgcaaccaggaaagaaaagccggcacacattagcgatctaaagcaggaagtgcgggcgccggcgtgccaggagacgttgagtaataaacggtcacaaaaaaaggaaaaaaaatctcgttggttgaggaagggggaagactatacaaggtttcgagtcagaacataagtcaccaacacacacacgcacaggcccgttgaagcccgagagcgggacagggagggtacgcagccaagaaccgttaacggttgacacacagctgcgaattccgtgggaggcgagtacgcggacgggaaaggctccgttaccgatacgggcccacggaataactgcacaaggagcagaagggaaagccgaggtttcgtcgcggagagtgccgctcgagtccgtctttgcaattacgagatcatcatggcccggggg

SEQ ID NO: 25670 - DNA, 495 bp, DROSOPHILA
atgacgaagctggcggaccaggtcaggcagaggacacagggacatgtcaagaacttcaaggtggatatgcagaccctaatgcgaatgatgagaataaggaagcactccaaccttacgcatgttcatacgcccgtaagagtgccgacacatggatgccctgatggccctggccgacgagttcgaagagctccacacccaaagggaatgatcccggcttgccccgacttcacaaagactttcgtgctgcagacggatgccagagactatgggctgggcgcgatcctcacacagcagtccgatcaaggcgactcaagtagaacgctgaacgcagcggagaggaactactttgcaacggaaaaggaatgtttagcaatagtatgggccgtcaggaaattgagaccttacctggagggctaccacttcaaggtgatcacggagcatatggctctgatatggctgaatagcattgagagtccgtcctgccggatcgcataa

SEQ ID NO: 25671 - protein, 164 aa, DROSOPHILA
MTKLADQVRQRTQGHVKNFKVDMQTLMRMMRIRKHSNLTHVHTPVRVPTHGCPDGPGRRVRRAPHPKGMIPACPDFTKTFVLQTDARDYGLGAILTQQSDQGDSSRTLNAAERNYFATEKECLAIVWAVRKLRPYLEGYHFKVITEHMALIWLNSIESPSCRIA

SEQ ID NO: 25672 - DNA, 6382 bp, DROSOPHILA
gtaaaagcgttaactccacaagacaaccatgtaagcaggataaagtttaacaagacaagttgaatgaatattgaaatgcttgtgcttgaaaaacgaggacttcgaagggagtggcagtagcacagatcacgtggcgcaaagaataattagaagcagattctcgcaaaagcggacgcactactaaggtacatcgagaatctcacgcccacaggaacaaaaaactcgttgtggaaagaccacaggaacctaaaggcaccaacagacacggttgtacctctccgtaactcttccggaaactggtctcgcagtgacacggacagagcaagagtcttcgctgatcacttctaaggtgaagggcatattttgtcaaatttacaatgcatgagcatacgtgtgcacacatacagttgtctgctatcactttgtgcgttgaaaagagctgttcgctgtagcgctcttcgctctctcgctctctaacaaaaattcgagagagcctggtagccacctctagagccacggccaaaaaatcgtgtgccaaaaaatcgtatggcgttacgcatcttgttattctagggtctttgtctcgcacgctgttcagctggctgtgtataagctgctccggtcggccgaacctaaagcgcagctactccatcacggcgctgacattacctggatgaattagtagcgccttcactgtctcacgggcttcatccttcagcgcattcagtaatctttggttattctccagatccgtgcaaatgtacgctcgggtcgtctccacgaacgcacagctcagcgtgccctccaaatacaggcaagtccggaaacttccttggcccatatgctccctgggttccattcggcgtcatcccggcgtaggatccaacaagtggcgatgctgttgccacattatggacgcccggtagcacgaattcatgcgctggttgcgcggtgcttgttgcacacagtggctccacaaattggttgctagttgttagcaatggcggtccactactcgattgcggcagcgtgcaggacgcaccgctcgcaccgtcaccgttataaggcaccgacccgaccccgttatgtgatgcctctctttaaggtccaaagtgaggggttggctcctctccggcactgggcccgcagctgtgacggcagtatttccaggttgggttgatacggtagtcaccgtagtggcagggcaagaaatcgtcgccgccgtgatattcacccgcgaccgggttcctgctccactactcactggctgctgatccgctctcgttgttataggggtggcttcccctccattcagccggcactctttctgggggaatgctgcatcttccccagctttaatgtggcggcgcctgtgccgtcgatgcttggcgctccttgcgcctcgtgaccgctagctgcactcacaaatccttctcgctggccgtcattccagtgcaagttgcccttgcagtctccctcgtactgcgaataaaagatgtcgtcgctcgagtggagttgccttcaacggctactccccttggataccgaaggaaagaaaagactcttcctggcaatagtagttccgttttattctatgatcgttctttaagattattcagtacaaattatttaatcttatcttaccgcagtttggcctccaaactatcgatcgacaatgcacgctaagctcttcgcggcttacgatggcagccattagtgtgcccgcacacatttatccaccaagtcttatcactatcaggaaatactgactacgcctatcgattacactgttcgattcgcgacacccgtaaaaaccaatttaattgaatgaccgcgggaaaacacatttaagagaggtgcaactatctgaaacaaactgacccggctaccagcaacaacactttgcagttcgttgatatttatgaattcgtgcttacccatgtacttccgctgcaactcgcgattggtgtcttagggaagcgtcaccgttcccagactatggtgtacagatgccgtgctgaagctgatgcggacgtacctggatggggttgctccacgcatactgcattattgggtgatcgacccttggctagcaatggctgccgtacgcggactcaatgcatcaccggctgtaacaactaaccgatgggaaacaccaacacgtcaacccaagtcggctcattgttgactttcacggctgtaaatcccttgctgcttacgtcgctttgcgttgatcactagtattctcgttttcctccaataccctcttgacgacactcggcctgctcttttaaccgggttttcttatctctccagcctccatatccatggttttaccgtttgtgtggtccaaagtccagcttggttccattgcttccttttaatcggcatgcagttactgtttgttcttctgttctcctgttgtccgtcgaaatctagctcgccattatccttctccaaactttgttcctccagactcttgttctcaaattgatctgcaaactctctttctacaaactcttaaacgcgcttatttgttgcataactggccacagggatccccttcttagttttaactcctcacaaaggtaaaaactatttaacctatcgtgcagtttttattgaaatttcgattactatgagaatttgtcaacacagaaaccaaaacaaaaagatcataatgaatatggaaacaagaaaaaaattcattatcgataataggaatcttaaataataaaataaaaatggtttagaagtgtgggcgtggcagatttggccggttagtgcgtatgagagtggcaaattttttatttattttttttttttttttggcagatctatagaaactacaagactaataacaacataaatatacatcaaaacttatttcaaaattgtgatttgcggagggctacactattacatcttgggatttctttaacattactaaacttaaacccatgacattcgatgtgcgatgaagtccccaaattttcataaattctcttcaaagaactttgcaaccattgcattgcaatgtaagataactttacatataactttttaacaatctagtagcaatgacccggagagtgattacattcatcccttacggaaatctatagactcaatctaggccacgacttgatactagcagaaacatttataacatataaaaaagctaaaaaaataagtaaatgaaaccacgtctcaagcggcggcggtacaagagggagatactgcttttaaaaagaaaaacagaaggaacaaactgacacccagattctgaaagcacaaggtggcaagtcataacggggtaatattcacgactagtgtcgcggagcgttttggggctatcgatagttagtcaagtctcaatttaaaaccggtagaagtttttataggattcgtttgtcatgtaattcgggcacacatcccattgagagggaaaagaaactacgctacgttagatatccactgcaactgccaacttggccagctctgcaagtgtggctggtgatcgtcaggggccacagacttcgaatgaaagtggacagccgccagctgcagaccgcatcaacgtggaagcttacggactccacgaacgtgcaagaggcggccctaatggacaggatcgcacactagtctgagctggtaaaggcaagggcgagtgatggacaagaacgatcccattggaatctaggcccgcggcgtcggagtgagtgatgccgcgaataacctgccatttttcagtgaaagggtgccatgtctgagagcagcacgacggcagagttcgagtgcatgtttgccgccacaatcttaattggaaaccgttctcgatcttgtcccgaatcacactgaacttatattctttatccttatccaatcaacctcggccagaagctttttgttaggaaccgcttgaactctcaaatatgtatgtttaggataaaagcttaatgatgaaattattttactgcattgttaaattgagatttgctgagtgatgcagtttgattgacgcgcaaaaggttaatcatagcttggtctccaagcggaagttgtgtttactttaagtttgattatttatcgggtagctaacaaaaacaaagacaaaaattctgtttctaatttaaagaattaagatttttcaagaaaaaatttcatattttcttgttgtaaaatattaattatttgaattagatcggtagatcggttagattcagttgtatttgaaaagattattatattatccataaaagcatggcaagtttttccgacttccgactctttgaaatatgctaggtgcgtttgttaactcaaatggcatacgtaagacttaaaatttgtagttgttaatagagaatgctgtttttttcaatatctgactcttttattaaaattcgacaatgacaaaaacaaagacaaaggaaatgctgccgagattggaatttgaaatttgtttacaaactgggatagagtgctatgtttacgggttggataactttcacgcaggcaacggcaacttaccagtgtatgggcgtccgaagctactgatccgtatccaactggagagcgtgcgcgatgtgcaaacaattcaataggaaaccgcgaccggcaggtgggggaatgcataagttgcttgagagcaagaggttggactgggcgaaacacgcagcatcgatacagccgtatccccagtggtgcacctaagcgagaatcaaggaccaagccaagagtgttgcacgtgaattgtgctcgcgaggagaaacggtatgcagaccgccctagacgttgccttatgtgtgaattacatcacggtatcaaggactacaaggaattgatcgacgcttctacggtaacgcggatcgagtccgcgaagaagttgaggctatgtttttgtgtctggagtatggacatatgtcccggttttacaagagagacgacgaacgtctatgggtgccggatcaggcaccactacctaatccatgacccagctggacattccaatcggccaccagtcgcagatgggggccgtacgagggatcagcggagcagccaagaccggcagctgtacagagacagcatccgaatacggaaaacgaatgccacattctgtggattccaacgaggagaccctgttagctgcagttatagacgcaagtcgtgaggaggatgagaggcgatcgaaatgtgatcgccgggaattatcgcatcggaacttgagttgtgtcgattcgaattgaggtcacttgctataccggatttagctagtgacgttgtacggggataatacgcaggtcaaaaccaaagacattagaataacaagatacgtatcggcgatacattgattttgcactatgcagtcacttttttgggtgaaggccaaaatttccctctttcccctcgcttactctgagagcgtataaaaacaagaggcgagaacgcgaatatgagcgagtgttgtgctagaacacgattttcggtccgaaatcaattctgatctaagaaacgaatttacagctgtgctcataaaaatagaagtttaagataaaaaaaatcctatcatttacagttttaatgtaagtcatgtaagtcaaatcatatcataatatatatcttcaaacaactcaacaaatgtttcacttttatttcttcaatagtttcaaaaatatagattaaaacaaacagaaattctggtgacactgaaatagcagtgaacaaatagtaaaaaaatttaactagacttagaactaacttagtttttctttttaatgtgttaattagggtctaatacttggttggattgaattgttagccagcacagccttacacctatgcggcatggagtccaccaggtcctggcaacgttgggggcaacttttgcccacgcatcctgcacaacttgccaaagctgagccttagacgtcggtgagttgtagaaccttcttcgttacccttcttccaatctaaagcaggtaatggagagatgatcaacattctgatagacaccggatccaacaaaaattacatccaaccaagactagttaagaaaccaatcaaaaacaaccaagcctttttcgttaactctgtaggcgggaaaattcttataacacaccatacaatcgccaatcctttcgacctaaaaaatacttttgttaaattttttatactaccctccttaaagaccttcggtggaacacgctacagaaactcaaaagaaacatttaagaactatttgctcaaactttaaaaatctttttggagacccgtacgaaaaactgacatacacaagagtagaagcaactataaggagtacaaacgagagcccaatatactcaagacactacccgtacccagaggctcttagaccaaaagtaga

SEQ ID NO: 25673 - DNA, 1132 bp, DROSOPHILA
atggcggtccactactcgattgcggcagcgtgcaggacgcaccgctcgcaccgtcaccgttataaggcaccgacccgaccccgttatgtgatgcctctctttaaggtccaaagtgaggggttggctcctctccggcactgggcccgcagctgtgacggcagtatttccaggcaacggcaacttaccagtgtatgggcgtccgaagctactgatccgtatccaactggagagcgtgcgcgatgtgcaaacaattcaataggaaaccgcgaccggcaggtgggggaatgcataagttgcttgagagcaagaggttggactgggcgaaacacgcagcatcgatacagccgtatccccagtggtgcacctaagcgagaatcaaggaccaagccaagagtgttgcacgtgaattgtgctcgcgaggagaaacggtatgcagaccgccctagacgttgccttatgtgtgaattacatcacggtatcaaggactacaaggaattgatcgacgcttctacggtaacgcggatcgagtccgcgaagaagttgaggctatgtttttgtgtctggagtatggacatatgtcccggttttacaagagagacgacgaacgtctatgggtgccggatcaggcaccactacctaatccatgacccagctggacattccaatcggccaccagtcgcagatgggggccgtacgagggatcagcggagcagccaagaccggcagctgtacagagacagcatccgaatacggaaaacgaatgccacattctgtggattccaacgaggagaccctgttagctgcagttatagacgcaagtcgtcttcgttacccttcttccaatctaaagcaggtaatggagagatgatcaacattctgatagacaccggatccaacaaaaattacatccaaccaagactagttaagaaaccaatcaaaaacaaccaagcctttttcgttaactctgtaggcgggaaaattcttataacacaccatacaatcgccaatcctttcgacctaaaaaatacttttgttaaattttttatactaccctccttaaagaccttcggtggaacacgctacagaaactcaaaagaaacatttaagaactatttgctcaaactttaaaaat

SEQ ID NO: 25674 - protein, 375 aa, DROSOPHILA
MAVHYSIAAACRTHRSHRHRYKAPTRPRYVMPLFKVQSEGLAPLRHWARSCDGSISRQRQLTSVWASEATDPYPTGERARCANNSIGNRDRQVGECISCLRARGWTGRNTQHRYSRIPSGAPKRESRTKPRVLHVNCAREEKRYADRPRRCLMCELHHGIKDYKELIDASTVTRIESAKKLRLCFCVWSMDICPGFTRETTNVYGCRIRHHYLIHDPAGHSNRPPVADGGRTRDQRSSQDRQLYRDSIRIRKTNATFCGFQRGDPVSCSYRRKSSSLPFFQSKAGNGEMINILIDTGSNKNYIQPRLVKKPIKNNQAFFVNSVGGKILITHHTIANPFDLKNTFVKFFILPSLKTFGGTRYRNSKETFKNYLLKL

SEQ ID NO: 25675 - DNA, 2488 bp, DROSOPHILA
acaagcaccgcccattgcggggcaggttaccgaggtgggttgtagcccgtaaaggaatgctggacatttgctttaaccatttcaaaagcagtcgacgatcctagggtgatccctgcctgatgagggattgaaaaagaaatgaaggaatgttagagttactcaataattatatttatgtgtaataaaagaagaaagcatatctgaatgttttagtgagtgttcactgtcggggagattgagccgatctagtcctctggagcgataccgacgtctgggtcatgggtgattcccgcaaaaaccattcgggcatccttagtagggtggatacgcttggtcacaacaactgtaaacgccgtaacggtaagattttatcttttatttaaattatttcgtttgtttacatttttcctgcttaactgcttgttagagatatgtagagtcctgagacgttgatagttatcgatgattatgttgcgagctgtgtggtacggcgaaaactcttcctgagaaagcctgagctagcgacactgccactaagaaaggaaagcagttcgtaaaaatgacagttaatttaataaaagggaatggcatttcatgaaaccttccgtcatccaaacgttaagcatcatttgtttttcaaactataggatgttttagcgttctcggtgatcactagttattaatttaatttgtaaacctaattgcatttttttgcaaaaaatagttttttcgtcagtagacgtaaaattttaaatcagattaagttttaaatttaagtttaagttttaagattaagttaagttaatgatcgatatttatttttaacaacatatatttgtttttctacagttacgacagggcctttactataacaaattgaatgtctcgttgcagtgtagacatgcaaatttctccagatgctatatggatgtttatacacatatgtaacacttttgttttgttatcttgacattttaaatgatatcgataatttgataaaaaagcaaacagttttaggtgatgatgcgaaaggcattttatatagatacaaatatttactagtttaaaatgttctatgagcacattattttggccaagaaaggccccctagccaggatctggttggcagcacattgggacaaaaaaattacaaaggcccatgtatttgaaactaatattgaaaaatcagtggaagggattttgcaaccaaaagtaaaattagcgttgagaacgtctggacatttattgctaggtgttgttcgcatttattccagaaaagcgaagtatttattagctgattgcaatgaagcctttgtcaagattaagctgttttctggaatttcctgacgtaagctgagaaagttccaagctgtccttggcgataaaatgtgctcttacgtcaataaaaaggtgggcggctctcttgtttaaaacacgttcttcaaattgctcatcggtttcattttccatttgttcatcaccatgattctaaaaatacataatttaattttttttttaattgaaaatgtttctgaaaattaaaacaagtagctttattaatggagaccctttttgtgttgtcttactaaatactgcgtctgaccaaagactttagaataacaagatgcgtaacgccatacgattttttgacacacgattttttcgccgtggctctagaggtcgctccaggctctctcgaatttttgtttgacagcgaacaactcttttcgcattttgcgcatacagtgatagcagacaactgtatgtgtgcacacgtatgctcatgcattgtaaatgtgtcaaaatatgcccctaaacgttattattatttgaaaatagattagaaatagccaaatctatgtacgtattatcacaaaaataaatttcaaaaatgactttatataagaatatttgtcattagagtattcatcttgcggctgtgtgaaaaattataaggtaatgattgttgagtgcttgtgtccgaacttcgtgcctcaagatatgaccaaagcaaagacactagaataattctagtgtctttgatatgacttttccaataaacagttatcatatttaattatttagtatatttattaaatcatttgacctaatataatgtaacattaacattaaaagtgtttcaaaaaaaattattctcgcttttaaaaaattgtcagatgaaagacaaattagaattaaacataaatataaatgtgtaaacggtagcttattcgagcggcgattttaacaaacaaatttaaaaagctttaaaattataataagtcagggcgcgaatttttaaaaatttgtttattttataatattgctaggaaattggcaaaaaactaccctaatatgtaccatgtaaattcgtttctttgaacagaattgatttcggcccgaaaaacgtctgtgcacaacacgcacacttatacgcgttctcgtctcttgtttttactcacacaagcaagcaaattatatttttaga

SEQ ID NO: 25676 - DNA, 2159 bp, DROSOPHILA
aaagcaaacagttttaggtgatgatgcgaaaggcattttatatagatacaaatatttactagtttaaaatgttctatgagcacattattttggccaagaaaggccccctagccaggatctggttggcagcacattgggacaaaaaaattacaaaggcccatgtatttgaaactaatattgaaaaatcagtggaagggattttgcaaccaaaagtaaaattagcgttgagaacgtctggacatttattgctaggtgttgttcgcatttattccagaaaagcgaagtatttattagctgattgcaatgaagcctttgtcaagattaagatggcttttcgaccaggcatggtcgacttaccagaagggcacagagaagctaatgttaatgcaataacactcccagaagtttttcatgactttgatacagccctgcccgaattaaacgatattgatattgaggctcagttttctataaatcagtccagagctgacgagataacaatgagagaagattacggtagtttgtctctttccttacaagatgacggatttggtgatataggctttgaagcagaaacgcctgaaattatacgatgctctataccttcaaatattaatacatttttagaaccagccctttttgaagacgatctttttggtgatccttctcaaccagttgagcagattacaaaagaatctactactgttctcaacgcagatgattctgatgaagacgccattgataatattcataatgtcccttcgcctgcaacctcgctcgttaattcgattgaagatgagaaagaggaaaataatttaaatggacatgcaagtgtgtccgaaaatgtgccaatgaatgaaataacgcttgttcaaaacgaggatgagggatttgcgttagctcctttagatgtctcaatgtataaaggcgttacaaaagccaaacgcaaaagaaaacttattattgacgaaataaaaaatatttctggagaggaaatgaaggctcagttagccgacacatctgatatattaaccacacttgatttagccccaccaacaaaaagattaatgtattggaaagaaactggaggtgtcgaaaaacttttttcattaccatcgcgatccataccagctagagctttgtttggtaattacaatagacagttgttttcgcattcaacattctttgaggacttctcgagtgttgtgccaatggaaattcttgcactggaattttataccaaagagaacgagaacgcattaattatttttaataaaaaaggtcgcaaacgtaagaatgataatatgtccaatttgtttttggaccatgtccccgattcagttgttcaaagtttggaagctccggaagtcctgagagcgaatcataaatctctaggggtatctaccgtttctgtggagattgtatcaaaagagcaagaaagcatttcatgtcaaaatgaattaacattttttgataatatgcgaagtccggacctcttgtccttaaatgaaatggaacagttctcatcaataaatgagctacctttaacaccaagaaacatgaatcatgaaatgggtgacgattttaatcaaggagactcaacgccagctgggttggatcatggtcatgccactccgcagcatggaaatattggcgagatggatcacgactctgttataccgacaaaaaagactgcagtcattttaaatgaatctgtgggtacatctgtactaagtgacaatggcgtttcaaaaaggacaaataatattttaaaaggatgggacaactatgaaattcccagtttcgttggccagaatcatggtgatgaacaaatggaaaatgaaaccgatgagcaatttgaagaacgtgttttaaacaagagagccgcccacctttttattgacgtaagagcacattttatcgccaaggacagcttggaactttctcagcttacgtcaggaaattccagaaaacaggcggcacaaaaattttattccctcctcgtcttaaagaagtttaaggtgcttcacattgatcaatctgctccctatgcagatattactattactcgaggaccaacgttcgaaaacccaaaaatttaataagttgaatgtaaatctgttttaatttatattgataatttatttttaaaaaaaaaa

SEQ ID NO: 25677 - protein, 677 aa, DROSOPHILA
MFYEHIILAKKGPLARIWLAAHWDKKITKAHVFETNIEKSVEGILQPKVKLALRTSGHLLLGVVRIYSRKAKYLLADCNEAFVKIKMAFRPGMVDLPEGHREANVNAITLPEVFHDFDTALPELNDIDIEAQFSINQSRADEITMREDYGSLSLSLQDDGFGDIGFEAETPEIIRCSIPSNINTFLEPALFEDDLFGDPSQPVEQITKESTTVLNADDSDEDAIDNIHNVPSPATSLVNSIEDEKEENNLNGHASVSENVPMNEITLVQNEDEGFALAPLDVSMYKGVTKAKRKRKLIIDEIKNISGEEMKAQLADTSDILTTLDLAPPTKRLMYWKETGGVEKLFSLPSRSIPARALFGNYNRQLFSHSTFFEDFSSVVPMEILALEFYTKENENALIIFNKKGRKRKNDNMSNLFLDHVPDSVVQSLEAPEVLRANHKSLGVSTVSVEIVSKEQESISCQNELTFFDNMRSPDLLSLNEMEQFSSINELPLTPRNMNHEMGDDFNQGDSTPAGLDHGHATPQHGNIGEMDHDSVIPTKKTAVILNESVGTSVLSDNGVSKRTNNILKGWDNYEIPSFVGQNHGDEQMENETDEQFEERVLNKRAAHLFIDVRAHFIAKDSLELSQLTSGNSRKQAAQKFYSLLVLKKFKVLHIDQSAPYADITITRGPTFENPKI

SEQ ID NO: 25678 - DNA, 1801 bp, DROSOPHILA
tctgacctccatattggcgctataatttgcttctaaattgtcaccttgttggagagtgacactttacttcgcgaattaattagccagaagtgctttgaggctgctgcacgtatacgcactcttatcgcactattttgcttcgagaagtttagtctccgatccaatattacaccaagatatttggctgaactggactgtgggataagggagccatcgatgagtaaagccggtgatgttttccttttcagcgtgtagcacacattcgcagatttgtcaccattgatgccaatgttccagcgttttgcccattccgcaaatgttaatgagaagtcctggacgtcagtagcatgctgttcgcagcaggacctgtaggtgacacacaagccacacaaatgtggccaacattgacgtcgcgggtaggcctacgtctggccgaggcatgtcgtagctgtacaggcagtaaagcagcgggccaagttcacttacctgtggtactccggctgccacattatgctcatttgacagggccggatggaatcgtaccgcaaatcttctcttttcgagatacgacctcaggaggccgaaatatggtgcaggcaacgtattcttacgtacaggcaacgtattcttcgagatcgaagagaagaggccactagggcccagggttcttttcaggctttccaggtttgtgaatcatggaaataataccgagcttccactgtggaaggaagtattgcagtctcacaatagccttgaataacaacgtaatgtagaggatcacacatctcggtagtgtctttaccggtggagttgcagatagtataatgacctggagcttttttggggttttgtttggcgatgacgtcagcaatctcgctgggagtgatcggttgcatcggcaagaccatttggagcgcttgggacagctggtcgtgagtcgagtcaacatcctggggactggcgaggttcaaaggctggaataaaagctggataaaatggctaggtttcgcttgagcgggaaaggtactgcctcgagaatgatctggtttctgaagcagcttaaaggtttatctgtggtttcgtgttggtcagggagagctcgctgtgcatagtcgcagcgtctgactgaggttcgttttgtaaggcattacgattttgccttaagagggcatctgccacgaaattttcctcgccaggtttgtagacaaccttcgcattgtgttggtttccatccataggatttccacctctttattttagcgttcgtggtcctgtcggcaacagcgaaagtgagaggctggtggtcggcgaatatattgatattcctacagccgtacagaaagttctgtagtttacctagggcccatacaatggccagcaattcccttccatttgtggcacaattttgctcagcctgtttcaggatacggtccaatcaccatgatgcctaccctcttgtgatagaactgagatcaaagggatactttagtatgacatactctgatgcaagaatgttacgaagtctttgaaatgcgctgcgttgagctttattaaactcaacaccaatcttcttagacatatgcctactcaacgaaccattttcccctttcagtatgtctgttatcggacgagctatagctgcgaagtctttgatgaagactctgtagtagttggctaaaccaaggaaatatctagacactgtagacgcttttgtgttcagggtttcattcctgaatgacctttaccttttctggatcggacttagttccatccttgcttactatgaagccgaggatgttct

SEQ ID NO: 25679 - DNA, 616 bp, DROSOPHILA
taaagacactaccgagatgtgtgatcctctacattacgttgttattcaaggctattgtgagactgcaatacttccttccacagtggaagctcggtcgtatctcgaaaagagaagatttgcggtacgattccatccggccctgtcaaatgagcataatgtggcagccggagtaccacaggtaagtgaacttggcccgctgctttactgcctgtacagctacgacatgcctcggccagacgtaggcctacccgcgacgtcaatgttggccacatttcatgctactgacgtccaggacttctcattaacatttgcggaatgggcaaaacgctggaacattggcatcaatggtgacaaatctgcgaatgtgtgctacacgctgaaaaggaaaacatcaccggctttactcatcgatggctcccttatcccacagtccagttcagccaaatatcttggtgtaatattggatcggagactaaacttctcgaagcaaaatagtgcgataagagtgcgtatacgtgcagcagcctcaaagcacttctggctaattaattcgcgaagtaaagtgtcactctccaacaaggtgacaatttagaagcaaattatagcgccaatatgg

SEQ ID NO: 25680 - protein, 191 aa, DROSOPHILA
MCDPLHYVVIQGYCETAILPSTVEARSYLEKRRFAVRFHPALSNEHNVAAGVPQVSELGPLLYCLYSYDMPRPDVGLPATSMLATFHATDVQDFSLTFAEWAKRWNIGINGDKSANVCYTLKRKTSPALLIDGSLIPQSSSAKYLGVILDRRLNFSKQNSAIRVRIRAAASKHFWLINSRSKVSLSNKVTI

SEQ ID NO: 25681 - DNA, 3437 bp, DROSOPHILA
ttgtgattcggcaggcagttatgtgaattatgttaatatgtatggttgggctgggtttagtgggtctgctgtcatggaactaatattacacttaactaaaggcacacttagaattttgaatattcacattctcataccacacagacaggaatttttaaaactattgtgattaaatgaaatttgtggttcgaaatgaagaatactgactgagataccgcctccaaatcgatctaaatggcctcacctacatgaccaagtagctggacgacaagctgggcgaagactccgttagcgaggagcagctgaacatcatctgcgagctgctcctgcgtttcggcgacttggccacagaaaaggatcgcgccgtcgtcacacacgccatcaatctgctgacaaacatctccggcagctgcctgacagaactcaccctgcgttgctccaatgccgagttggagtcgcacaaggaaagagagctggacaacgagaaggaaaaagatacagaagctggagcgggagccaaaccccgtgagtgctgctcgcagtgcttcgaaaagcgcaatgttcggagtctggacgtgctactccgctacctaaggcaatctctggcccaacaggaggccgaggctagctcgcatgagttgctttccccagtgctgaccgtgctggtgaaatgtgcgcgcagcgatcgagttatgcgtcactatctacgccaggagattctgccgccgctgcgggacgttagtcaacgacctgaggttggtcaggagctgcgcaatcatcagtgccggttccttatactcaaggcaatctggcacaaaaatatggatcactgcgggtttttgtacgaaaaaacgttccgtctttataaacccaatagaagttacaatataaaatagatagaaaagatctacgacaaaaagaatcttcactcattgcattcgcgtttcaaaatatatgtatgtatattgtgtcaagattgggacaaatattctaggacatatcagttgctctccggcaaggagtccgcctcctgaatgtcgtcctccgtgggcctcatgtgatcgtagggagcatggtggttgggtttgtggtggcgatggcggcacgccttgtggtggtgaactgggagttcttcttggtcattctgtgccaacttgcggcgatatttttcctcctgcctgcgatcattcagccaaaacaacccgtatatgcggtcgtgctcccgctggagtccattcgctcgctcaagatcattccaattctgctgtggggtggtgtatttgagaaagtagtcggcatacgtggtgtagttgtcccgccccggggaatgctccgatccggaatcgcgtcccccactgtccggtgcggggttgagttctttccctatttccttatatgctgtatagtacttagctctgtaggcgtggtccaggtcgagattatcgtactcattggtctcgtcgcgggccaagaactcttgcacctggcgctggcgctccttttcttgctcctggcgaaagatctcgtagttttgggatccgggaccaccaatgccctccggcagggctcttctgtcatcctcatccttctcatcactctcctttgaccgctgcagctttttcaagtgggtgctaacgttcgcatagttaagcacatccgcattcaactcgacaaagtccaccaactcctccgtgcacttctccatctctagctccaggtgatggatccgttcgcggacgcatgtgccaaaggtgatcgaatccttctgctgatccttggacaacgattcatccgccttcttttcagtatgctcacacaccttttgttctatcaccttgatcgtcttggactcctgttcagttgtctccttcaagggttcgctctccgcctcaatgcggcggcggtagctctccttcagctggagctcccgtttcatctgtcgctggtacgccctttcctccctctgctggcgatgctccgtttctgagggaaacgtatcccttgtgatgcaggacatgctatggtgtttctttttatatttcttctcttggcacatcttgtttgagtagcgattctttggaataggcgctttagcttccgtcaggctctgggactcttgtatcatcctcggagggctatctttgatgttgtccttctgggtctgaatcgcagtttgaacatgggccttcgcttcggtatggaatttaccttgagactgtgcctgcgattgccagctgcttttcttccggcgagccacggctgccgcggccgccacggcagccaattcccgttggaccgccgcattgttgtgttggcatttggggacagatttatcaccagatttccgcggtacagcaggagcagtagcagcaggagcaggaggagctgcagcaggaggagcagaagcaatagagacttgcgtaattgcagactccatgtggttgatctccttcgactgtgccttatgtgcagagcccagcagcttaatgttcttgcgcgactgggtcacctcgacggaagatggctccttcttcctttccgccgggctcgtggtcggttgcttggcacttgttgtcctgcgggagggaattggatgagttgaacactggtgattcgccaaaatatgtgtggttgggctgggttaagtggggctgctctcatgttactaatattacacttaactaaagacacacttagaatattgaatattcacatcctcataccacacagacaggaatatgttgttaacctaataacaataatattaatattatatgtttcttaagacatatttactgctagtttattgtattttcaatttaaactattgtgataaaataaaatttgtggtttgaaatgatgaaaactgactgagatgcacataaatgtggttcacaaagaaagaggtccttggacatgaagaatttttagaggatgataactattaagcttagtattctattgactatggccctttttgaggcgcatgcgatgtgcctttcggtgcatggaacgatgcagtcgctccttcactgggcgctgaactgttatggattccacggattccttccgctccttgaatgtctcctgctgtaggtgattggatgtgctggtgactttggtgatggctcgatgcaatctgaaagaggggacgagcagctagaatagctcctccactagccatcgccccacaaacgactaaaccagccctctaccgcttccccccaacaaccgtcccagcccaagcccccaaagatccccgagagcagctcacctggcttgcttcgtgactcgcacgggttttggcaactcgtcccgattgctggatggcgtggaattgctgaccgtgcggttactgcaactcgtctcccggtcaatcagttcatacagactgttgcgatactggtccacgtcgtagcgcacatgatctttcagcg

SEQ ID NO: 25682 - DNA, 1437 bp, DROSOPHILA
atggagtctgcaattacgcaagtctctattgcttctgctcctcctgctgcagctcctcctgctcctgctgctactgctcctgctgtaccgcggaaatctggtgataaatctgtccccaaatgccaacacaacaatgcggcggtccaacgggaattggctgccgtggcggccgcggcagccgtggctcgccggaagaaaagcagctggcaatcgcaggcacagtctcaaggtaaattccataccgaagcgaaggcccatgttcaaactgcgattcagacccagaaggacaacatcaaagatagccctccgaggatgatacaagagtcccagagcctgacggaagctaaagcgcctattccaaagaatcgctactcaaacaagatgtgccaagagaagaaatataaaaagaaacaccatagcatgtcctgcatcacaagggatacgtttccctcagaaacggagcatcgccagcagagggaggaaagggcgtaccagcgacagatgaaacgggagctccagctgaaggagagctaccgccgccgcattgaggcggagagcgaacccttgaaggagacaactgaacaggagtccaagacgatcaaggtgatagaacaaaaggtgtgtgagcatactgaaaagaaggcggatgaatcgttgtccaaggatcagcagaaggattcgatcacctttggcacatgcgtccgcgaacggatccatcacctggagctagagatggagaagtgcacggaggagttggtggactttgtcgagttgaatgcggatgtgcttaactatgcgaacgttagcacccacttgaaaaagctgcagcggtcaaaggagagtgatgagaaggatgaggatgacagaagagccctgccggagggcattggtggtcccggatcccaaaactacgagatctttcgccaggagcaagaaaaggagcgccagcgccaggtgcaagagttcttggcccgcgacgagaccaatgagtacgataatctcgacctggaccacgcctacagagctaagtactatacagcatataaggaaatagggaaagaactcaaccccgcaccggacagtgggggacgcgattccggatcggagcattccccggggcgggacaactacaccacgtatgccgactactttctcaaatacaccaccccacagcagaattggaatgatcttgagcgagcgaatggactccagcgggagcacgaccgcatatacgggttgttttggctgaatgatcgcaggcaggaggaaaaatatcgccgcaagttggcacagaatgaccaagaagaactcccagttcaccaccacaaggcgtgccgccatcgccaccacaaacccaaccaccatgctccctacgatcacatgaggcccacggaggacgacattcaggaggcggactccttgccggagagcaactga

SEQ ID NO: 25683 - protein, 478 aa, DROSOPHILA
MESAITQVSIASAPPAAAPPAPAATAPAVPRKSGDKSVPKCQHNNAAVQRELAAVAAAAAVARRKKSSWQSQAQSQGKFHTEAKAHVQTAIQTQKDNIKDSPPRMIQESQSLTEAKAPIPKNRYSNKMCQEKKYKKKHHSMSCITRDTFPSETEHRQQREERAYQRQMKRELQLKESYRRRIEAESEPLKETTEQESKTIKVIEQKVCEHTEKKADESLSKDQQKDSITFGTCVRERIHHLELEMEKCTEELVDFVELNADVLNYANVSTHLKKLQRSKESDEKDEDDRRALPEGIGGPGSQNYEIFRQEQEKERQRQVQEFLARDETNEYDNLDLDHAYRAKYYTAYKEIGKELNPAPDSGGRDSGSEHSPGRDNYTTYADYFLKYTTPQQNWNDLERANGLQREHDRIYGLFWLNDRRQEEKYRRKLAQNDQEELPVHHHKACRHRHHKPNHHAPYDHMRPTEDDIQEADSLPESN

SEQ ID NO: 25684 - DNA, 8383 bp, DROSOPHILA
tgctctgtttgaatctgtttattcgaatgatcaaagtgtgctgaagttgggttcagctaacccgcacatacattgcttatatctatgtattcttacttacatttatacatatacatatgtatgcagaaggcattgaccacttgagctgcaaagtgcatgctcagcattcccacgctccgcgatcggcttatgtataagcgttagatcgtattactggggcgctggagtgcttacgtagtttttggtggtctttttgtatatttgtatatttatatttattatgacaaagtgtcacaatgtattgacgctatgttatacccaatcatctattgtattcttagggtagattagtccaatatgctacagtgcgttgagatcattagtacactcaagcttacggacttctccttactatatggttttcaggcagcgcatgatttattctggctctacgtacgctttgttgaggaatcttaacttattggatgaccgattcttaaaatttgaccgtccagactcgttcgaaatagggcggaagaaagcatgcatgttagcgaagcactacgaaaatgagaggaaatacaatctccggtccagaatcgtttcgtttgccgtatataccgtatataaattcggtcctccttttgtagaagtcagagttcgtagaaggttaggaagcacttaatacgagctaaaagatttacaaggataactactatgtaaacaccatgcggaaaatattcaccaatgacgtgtcttcagtctgcatcagtctagggtatcagtgggatgtataccctatttttttattgtatttgtattgccgactgaagagccgggcctagaaggatgctacagatcttaaaagctttaagacaatctttgagaagtacgcaccaaacattttttttgcggagctttaatgtgcgtgcaaaaaattcaagatctgcattttatgcattgtggtttaaaattaagagcaaataaactacatactagttcacagcggtgacaggaaagatctgaaagctcttgccccgaattaggaatttttcgctgctgctaagtctgaacctaaatcattcaatccttgctaaaactcttttctaaatgagattcggttgagttcacaagtattaaagttgcttttcgcatttaaaatttcaaataggtgctaaattcacgcggacaagagataaagttgtgatagaaaagtgttatagtagttaaaagctgccttcgtcagtgcgtaactctttgttgcccaggtcacggaatcaatggccagcgaaggtagcaaggtttgttttaatatgatgttctgtttccctatatatatttaacctatatatacataacctaccccaaaagtatgaatttaaacgtaatgttagccttaataagtacctttatattatatcttgtagtctaattaaataataaactcttaagtccctgtatttttactgactcggtttagttatagcttttagttttcgcagcacgctcaatttcttgtattgttataaatgatgtgtagtatgtaacaggcagaaggcagcgcttccgactatataaagtatatatattcttgttcaggatcaatagccaagtcgatatagcgatggccgtctatctgtatgaacgtcgagatctcgaaactataaaagataaaaggttgcgattcagcatacagattctagaacagattttgaacagttcttaaattttttctcattttatctcccaatatctatcgatataccaggaaataataaactttctcgttcgcattcaaactagttaagtgacgggtatctgatagtcggggaactcgactatatcattctctcttgttttagctataactacacaagtaacatatatagcgtgatagttgagtttgagaattgagaaatggtagtgtggaaacgtctgtttatgagttggcaccccagctgctcaatacttattgtcattattaacttttgaaagcttccaaaaaaaaaaatagaacgagacgtaccgtttttgctgtttattaaataaaataataatattcaatacaaatttacttccatgtctctacagaattttattatttgtgatccttacagtaagacagatgtaaatcctatttacagaattatttttttcatcattttattacagagaacaacaattgctgaacatatttgaagttattatagacacccttgaaggaaaactaaaacgcattgacagtctagataatacagttgatcttcttatgaaaaatatggaaacgctgcaaaatcgggtagtgaataacgtgttaaaaactgattttattatatctcaactgaaaaatatagaaaaaactatttctaatgaaatgcttcaaggtcaatcatcaaacttgaatgttgcttacgaaaccacaaaaattacacaaaattcttcaacgctcctaaaggaacaaatcgttaatttggatcgaaaagtatctgatattgataataagctggaatgtatgaaagtccaattagataataacttgttgcacgttgaagactttaatgccgaagctagtgagaaaaaacccgttacaataaatgtaaatgatgtcacaaaggcattgagctatgtagctatgacacaagtaacatccgaattgagtgagcttcgcgattcaactgacaacattgataaaaagttacagttttatataaatatcgcttctgaaaatatcggaaaaatgacaagcatgatgcatgagattcattgtgctgtagttcatcataacaatcaatttaaatttttgaatgtgacaacacattcaaaatcaaataatattaataagctcgttaaagaaataaggccaatgggtgtagtatctgaacaaaacgataatgtttgggacgttggagtagacacaaaatcaactgatggtcatcttctctccaagtccactgccccattgagtcagacacaacgtcaagaacgtgcaatagatgaaatccaccatgacaaaaaacccaaatcgtacttgaatattaataacttcgatatggttaaaaaacaatttgaaaaacaggaaaattttaagccccctgaagagatatcagagacaagaatcaaagaagccttggaatatgaatcaaaaaagtaaattggtattcatttttgtactatattttctaatcaattaatattttaagctacactgacacggatgaaaattcaagaacggagatcttacttttatccctctctaatattcaaccaaccatagttaataaaactataactacaccgtttacttccacacctggagatggagatgtgctcggtccgctacattcggagtcgttagactctaaccgaactcactacaacggaccagcagtcaatggattgaaatctgcaaatcgcaaagaccgaattatctttccaagcataaaaaaaaaaccagcatttctaaacacaacgatttccaatgatttttgggcgctcaaggatgtaaaagtaagtgtttaaagaccaatttaaaaattcaaccagaaacaaaaaaaaatatttaacgatgtagtctactttctcatttttatattgtattaaattggcaatataaatgcatatataaaatgcatataaaatgcataatgcatatatataaatatatataaaatataaattggcaataaataaatgcttttagaactcaatccccaatcagcaatcacctgcaatatagcacgctaatgtgagttgacggacgctttagagcggttttgtgtcatcaaggtggcatctgaagatcgtgacttattcagagaagagggttttaaacaagagagaatgctatagtctgactacaactgtagtcggggagcttgactacagttactcggtgttcagctagtggaagggcgaattggacattaaaataaacaaagttataggatcttgagagtcaaactgtttttggtgtagcaatagaaattgtcaggacaaataataaaaacgaaaaaacattgtttaaaagtgtgggcgtgacagtttgggggcattagagtgggagtgggcgttctttggcaaaccgattgaaatttacaataccaataataaatgttaaaaaatatcaaaaccggaactgccgcgtccacacttttgaataatgtttttatgtatttatttgttttaaatttcttctgaaattcctcgaacagcttaaaactgccacgcccacactattcaaaatttctttgatattttatcatactaatatcttgtaaatttctatcgatttccacgccgacttttgaaaaatgtttcggtttcactttcttttcttttttgtctccttacacctacagaacgaccaaaaattaaaattttttttttgaattccccaaatattattttgaaatcggttattacgaaatttctcgttcgcattctcactagctgagtaacgggtatctaatagtcggggaactcgacctacacattctctcttgtttgttgcgatcccaatacttgccatattcgaaatgccacggctgcttcttaatcagagtcaaaatgcttagaaagcttagaatctgtatttaaatatggagctgaccagtaagtgcagtaaaatttattaaacaaaaaaatcacatcaggtcatctttttccctgtcttgctcttcggaattctaggtctcaaatgaattccatcaaagctcgttatgctacttgatatgcagtgatctgatctcttgctgtcggaggttagcaagccagtgtaacgaactgattttgtttgtctgctccgtactagttacattggctgtctcagaaattaatattaaacgtgatcacccagttaccagtaacaacccttagttgctctagtgctatcaacctcctgtccattgctctgtcccggccggttccaccagacgactgtatagttttcactaatcgcccggtttccgccgcagtccctgtagcaagacgcctagagaaaaaggaacgttccaccctagcctttcctgaaactggtgcggacgtacctggatgggtttgatcaacggcctcgttggaggtaatataagggctgcaaggcaaacagtataaagttttttttttaccgattcaatcgatccgagtgaactacatattgaggactccaagcataataaggttttggtcctgtaaggaccatcaaattcctttcaccatttttttataaaaccaagcacaccctgaccttattgacaatagtcgaaaagaggtctgaaatttctggtttacggtccaaaagaacaccaagataatcatcccgtgttattctgccgcttctcgttagcctacatattgggttatttcacctgtgaactttggtagggatcctagggtagtttcgcattttatagttgggtcaattgtttggattttataatcatccacttaatttatgctagcgtttaactatccttctatcccttcaattttactggccacttcccccaattgtacattttttaatcagttaattaattccattgtcagattggtggcgctggatatcccgcccgcaggaaaagttggtgcgaaacctccggttgccattgttaaatttaaaattgcaaaactatttattaaattttccagattgtttcctttaattaatggtaacaattgatgttgttctagtattccctgtatctagctcatattttattaatttatttttaagattattttccgctcacaatactttccgttagtgtcctccttctgtttagttgtgctgattacttcctgttggggtcttccttcaggttaattgtcatgattattatctcgttgggccttccttcaattttttgtatttagttgtagcgagtgattgcccccagctcttccttccttcatggtgctgattttcttatattttgaatatatttggttacagattttggtttgtttttatttgtgtttcttgttgtgttcttgtaatttgtattaagtattcagtccacctttttataactaaacactgatcaggatcattgtcacagtagttggatgtcgttggactactgtggatattttaatttttccactaaaaatgtgagttgttggcgaccgaattccgttttatatttaacttatcgttattatttttttaaaacttttgaagtacaccgcccacgttgggcgccaaataacgtcgttacattttaataaaaaaaaataatttttattttattattatttaatatttatttggggatagactttttcacttattacaagacactctttaaatggttatctttgatttgaaactgttcacgatctcgattgagactgatcttgtgaatctcaacccttatccatttaacctcggccagaagcatttctttgggattttcttgaactttaaaatatgcttaggataaaagatttatactgaaattatttcacagttgtgcttatcgggtggctaagtgctggcgacaagcacggacaaaggaattactgctgagattggagtttgaaatttgtttatcaactggggcagagtgctatatttacgggttggataacaaacttccttgtttatgttgtcaatgttaaaatcatctctagttttgtacaaatttagcggtgattgagctctcctgataaatactgatagatgattcattgatgaaacgttatgttttttatagctatagctttatgtgtcacttgtgactggcggtagagtgcgcacgagaagcgaagcgagaagctaccagcaaagcgagaggatggcagagtgaatgcttttcgagaaatgaactacttggcttgtacttgtaagaagcggtaacgtggtcgatccattaatcacaagcatcgtcatcagaaaatgtccactcaatataagaaagtgaagctaaaaatgatttctgtctatctgttgcgaatcaaaactatttcttaggcatattcatcttggagaaaaattatgttgataagtacaagtgtaatcaaagcagtttgatccatggtaaactatttccgcatagctcccttaaagattctctctattattgaacgtaatggattcggacgagaaattttttacaaaaaaaaaaaatggcgtcaactccctcaactgcaataggaatgaaaaaggcgaatcaataatttgtataatgctttacgaaaccacccagaaaggttctttaactatgcgtggatgtctatttcgacttttgattatattttaaataaaattagtagtcgtatgacgaagaattggccaaattttgttaaacaccctatactaacattgaggtaagttttcaatatatttcacaacaaaccaaacaaaaaacgtgttttgaaaataaacggcaataaaaacatataatacaacaaaacaatcgtacgctctgtgcaggttgaaaactgctctttcgcattatcgcttgatcgcttcgctctctttctgacgtacgctctgtgcaagttgaaaactgctctttcgcattatcgcttgatcgcttcgctctctttctgacatatttggaacgattgcacataaaatggggacgtatccggagacgggtcgtttatcgtcgacgtcctatgtcgctcagggacgctccgggatcccactactttttcgccacgatgcccctgcaatatttatccgatattaaaccagtaatcctgccacatttcgtgttcgtcggttcaagcagtatcagactcgtttacctttctcagcttgatctatccaatttttcttcaaaaattccctctccaataatttttccttcacacctttatttttgtttcgggtttcgttcaagtttcagtgatatttctgagactttaatttcgccgctagctatatcgagaccgttggtgttcatatctgattttgcctgccttaaagcgtatacaaccagatttagcgatcttttcttatatttgacctcgtagatgcatttgttaaccgatgtcggttgtgcactaaagtgaaagtaactaaagaaaatgtaaatcaaccaaacggcacgggaaacaggctttaaaatcataaatattaaaacaaacaaacgagtgtatgctatagtcgatacccgttactcagcaagtggaagtcagaatgcgaaatttcacaatttttggcatatcgatagatttttgcgctcgtctgcccgctgaaacctaatttctaatctttgttctgtcggttaccatgactgctgacaattttgggaacccctaacgcaaattcaaggcgcaaggcgacaaggcgacaacataaacaagctcagcatttacatgtgaagacgccatttgaggctctcagagagctcaaagaactggattttgagtaaat

SEQ ID NO: 25685 - DNA, 1780 bp, DROSOPHILA
gcagcgcatgatttattctggctctacgtacgctttgttgaggaatcttaacttattggatgaccgattcttaaaatttgaccgtccagactcgttcgaaatagggcggaagaaagcatgcatgttagcgaagcactacgaaaatgagaggaaatacaatctccggtccagaatcgtttcgtttgccgtatataccgtatataaattcggtcctccttttgtagaagtcagagttcgtagaagagaacaacaattgctgaacatatttgaagttattatagacacccttgaaggaaaactaaaacgcattgacagtctagataatacagttgatcttcttatgaaaaatatggaaacgctgcaaaatcgggtagtgaataacgtgttaaaaactgattttattatatctcaactgaaaaatatagaaaaaactatttctaatgaaatgcttcaaggtcaatcatcaaacttgaatgttgcttacgaaaccacaaaaattacacaaaattcttcaacgctcctaaaggaacaaatcgttaatttggatcgaaaagtatctgatattgataataagctggaatgtatgaaagtccaattagataataacttgttgcacgttgaagactttaatgccgaagctagtgagaaaaaacccgttacaataaatgtaaatgatgtcacaaaggcattgagctatgtagctatgacacaagtaacatccgaattgagtgagcttcgcgattcaactgacaacattgataaaaagttacagttttatataaatatcgcttctgaaaatatcggaaaaatgacaagcatgatgcatgagattcattgtgctgtagttcatcataacaatcaatttaaatttttgaatgtgacaacacattcaaaatcaaataatattaataagctcgttaaagaaataaggccaatgggtgtagtatctgaacaaaacgataatgtttgggacgttggagtagacacaaaatcaactgatggtcatcttctctccaagtccactgccccattgagtcagacacaacgtcaagaacgtgcaatagatgaaatccaccatgacaaaaaacccaaatcgtacttgaatattaataacttcgatatggttaaaaaacaatttgaaaaacaggaaaattttaagccccctgaagagatatcagagacaagaatcaaagaagccttggaatatgaatcaaaaaactacactgacacggatgaaaattcaagaacggagatcttacttttatccctctctaatattcaaccaaccatagttaataaaactataactacaccgtttacttccacacctggagatggagatgtgctcggtccgctacattcggagtcgttagactctaaccgaactcactacaacggaccagcagtcaatggattgaaatctgcaaatcgcaaagaccgaattatctttccaagcataaaaaaaaaaccagcatttctaaacacaacgatttccaatgatttttgggcgctcaaggatgtaaaattacattggctgtctcagaaattaatattaaacgtgatcacccagttaccagtaacaacccttagttgctctagtgctatcaacctcctgtccattgctctgtcccggccggttccaccagacgactgtatagttttcactaatcgcccggtttccgccgcagtccctgtagcaagacgcctagagaaaaaggaacgttccaccctagcctttcctgaaactggtgcggacgtacctggatgggtttgaaataaa

SEQ ID NO: 25686 - protein, 588 aa, DROSOPHILA
MIYSGSTYALLRNLNLLDDRFLKFDRPDSFEIGRKKACMLAKHYENERKYNLRSRIVSFAVYTVYKFGPPFVEVRVRRREQQLLNIFEVIIDTLEGKLKRIDSLDNTVDLLMKNMETLQNRVVNNVLKTDFIISQLKNIEKTISNEMLQGQSSNLNVAYETTKITQNSSTLLKEQIVNLDRKVSDIDNKLECMKVQLDNNLLHVEDFNAEASEKKPVTINVNDVTKALSYVAMTQVTSELSELRDSTDNIDKKLQFYINIASENIGKMTSMMHEIHCAVVHHNNQFKFLNVTTHSKSNNINKLVKEIRPMGVVSEQNDNVWDVGVDTKSTDGHLLSKSTAPLSQTQRQERAIDEIHHDKKPKSYLNINNFDMVKKQFEKQENFKPPEEISETRIKEALEYESKNYTDTDENSRTEILLLSLSNIQPTIVNKTITTPFTSTPGDGDVLGPLHSESLDSNRTHYNGPAVNGLKSANRKDRIIFPSIKKKPAFLNTTISNDFWALKDVKLHWLSQKLILNVITQLPVTTLSCSSAINLLSIALSRPVPPDDCIVFTNRPVSAAVPVARRLEKKERSTLAFPETGADVPGWV

SEQ ID NO: 25687 - DNA, 2264 bp, DROSOPHILA
cgctccgtggttgctctctcttgagcttgagggtaactcgtaagatttttattctaaatatcaggtattttcgaacaaattctccttaaattagggcggaagttccaaacgctactggaacagaattttatggaccatttttctacaagcctgaaggcgccataacgaagctatgaagtgctacgtttgtggtttcattagttttgtacccaaggcaataatgttggagctgaacaggaatctccctttatttagctttctgcgtggtctgaaacttctcgtatgcggactaggcaactaactttgtaggcaccgtactttgatgaccttaaacccttcttcgtcacatattggcggtagcttaccattagtatctgcttcaaaaagccctgctgaactgccaaggcatcgacaatcgcctgcagcttaagagaggcagaatatttaatttaactgcagtagagataagggggttaccctagcctggtctagttgtgaaaattagccaccaatgaagtggcctttagcggatggaaagcccaagttgcagtactaagcacagaagttcgccgtgtatgtttatttattgatctgattttgagtttcggtggtaaagactatctgaatggtgtttgattcaaaggaagcaaatgacaaaacgaataaaagcagctaaaaatgggcgaagcatttttgctgttttattgcctttctgttcagtagcattttcaatttagagtcgtacggatcgtaaacaaacgtaaaacaaacttacgaaaagaaacgcgaagtttttatgttgttttattgcgtttctgttcgattgccaaaagcgtaaagcatttattttgttttattgcatttctgttcagttgctctttcaattttcaatcgtcaatgctttcttagatatttagcgacggcacttaggtctattctatttcgtaagtaagtagcaaattattaataatatttattaataataaattttaatttaattatgcctttttcctcaccacgcataataagatggctgtacctcatggtagtcaggcccatactaacctatggggcaatagcatggggtgatagagcatgccttaccaccactaaggtgaaactccataagctgcagagaatggcctgcgtatgcatgacaggagcaatgcgtacctgtcccactgcagtcttagaaagactaatggagcaggaaatgactgcaacctcacaagtaaggatgctgaaagcctaaaaggggatatcctatgccagctgagcataggttcgctcagaacttcagcactcatctcataataaaaacagttggacatccctggggaaagtacaccctatgaaaccacaaacaataaagtggacggatccctcaccgacgagggaagtgtgctgggggttgtaggccccaggttgaaatatcaccgaatcaatgggcagatacaccagcatttttcaagctgaagtctgtgctattggacgctgtgcggagtttaatctgcaaaggaactatcgtggcaaggacattgctatactgtctgatagttaagcagccatgaaggtgctcagcaaaagctaagacaatatccaagctagtaaataaagtgaggacagccctagacaaactaggagctgtcaacatactcacaataaggtgggtcccgggacacaacaacattccgggaaatgagctagcggacaacctagccaggaaagggtcagagaacactctaattgggcccgatcccttctgtggtgttggtcaccacagggcacgaggcttactaaagtcactagaggaagaaaaacgtctgtccttctgagaacatctaccagggcttaggcagtctaagattctcctccgtgaatatacccataaaaggttcaagaccttaatgacacacgggaaaaacaccgtgcgcattttgactggccttcttacgggccattgccgacattacagccatttgcacaagattggcattgcagacagtgaactctgccgcttctgctgcatggaggaggggagctctgcacatattatatatgtgactattatgtgactgcatggcgctttccatcaggaggaacagactcctatattcgttgaatagtatgtaactggtagaaggaagcctttcctttccggccagactcaaccatttcaacatctctgtgcttctcagatcgtgaccttgcttttcctcaatggacacattaaactgtctttttcaaacttcagtttctgactg

SEQ ID NO: 25688 - DNA, 264 bp, DROSOPHILA
atgcctttttcctcaccacgcataataagatggctgtacctcatggtagtcaggcccatactaacctatggggcaatagcatggggtgatagagcatgccttaccaccactaaggtgaaactccataagctgcagagaatggcctgcgtatgcatgacaggagcaatgcgtacctgtcccactgcagtcttagaaagactaatggagcaggaaatgactgcaacctcacaagtaaggatgctgaaagcctaaaaggggatatcc

SEQ ID NO: 25689 - protein, 83 aa, DROSOPHILA
MPFSSPRIIRWLYLMVVRPILTYGAIAWGDRACLTTTKVKLHKLQRMACVCMTGAMRTCPTAVLERLMEQEMTATSQVRMLKA

SEQ ID NO: 25690 - DNA, 2215 bp, DROSOPHILA
tgttcagttgctctttcaattttcaatcgtcaatgctttcttagatatttagcgacggcacttaggtctattctatttcgtaagtaagtagcaaattattaataatatttattaataataaattttaatttaattatgcctttttcctcaccacgcataataagatggctgtacctcatggtagtcaggcccatactaacctatggggcaatagcatggggtgatagagcatgccttaccaccactaaggtgaaactccataagctgcagagaatggcctgcgtatgcatgacaggagcaatgcgtacctgtcccactgcagtcttagaaagactaatggagcaggaaatgactgcaacctcacaagtaaggatgctgaaagcctaaaaggggatatcctatgccagctgagcataggttcgctcagaacttcagcactcatctcataataaaaacagttggacatccctggggaaagtacaccctatgaaaccacaaacaataaagtggacggatccctcaccgacgagggaagtgtgctgggggttgtaggccccaggttgaaatatcaccgaatcaatgggcagatacaccagcatttttcaagctgaagtctgtgctattggacgctgtgcggagtttaatctgcaaaggaactatcgtggcaaggacattgctatactgtctgatagttaagcagccatgaaggtgctcagcaaaagctaagacaatatccaagctagtaaataaagtgaggacagccctagacaaactaggagctgtcaacatactcacaataaggtgggtcccgggacacaacaacattccgggaaatgagctagcggacaacctagccaggaaagggtcagagaacactctaattgggcccgatcccttctgtggtgttggtcaccacagggcacgaggcttactaaagtcactagaggaagaaaaacgtctgtccttctgagaacatctaccagggcttaggcagtctaagattctcctccgtgaatatacccataaaaggttcaagaccttaatgacacacgggaaaaacaccgtgcgcattttgactggccttcttacgggccattgccgacattacagccatttgcacaagattggcattgcagacagtgaactctgccgcttctgctgcatggaggaggggagctctgcacatattatatatgtgactattatgtgactgcatggcgctttccatcaggaggaacagactcctatattcgttgaatagtatgtaactggtagaaggaagcctttcctttccggccagactcaaccatttcaacatctctgtgcttctcagatcgtgaccttgcttttcctcaatggacacattaaactgtctttttcaaacttcagtttctgactgacgagaacttcacaattatgctagcaacaatacctaaacacagtaaaagtacgcgtcctgtggagccacttggtattccctcatctattctgtttcccactatattttaacgcagaacagtcaatctatagggattgtggatcgtttgtaagagaaggcacaaggaggaagaaagctctcaggcatctcataccttttatataaatttcttgtatacactgtgttcaattaaatagcagtgcaagggaaactaagaaatacaaaggtatttttacatatccgttttcggaatcgaattgtttgttccacttatttctgtaaaatggaatgtgtagatataaaaataattcgaaagtctcgttagtttttctttatattcctgagcaaattcacaacttttaggttgttcgttacaataggagtgcctggttttgcccaacgtaaagtccaaagatcatcaatattttctaaaaagtgagtttggttaagttaattcgtatatttaaaagggcaataaattaagagaaaagaatgttaattcttaagctaagaaaggaagggaaaatatataaaggactgttttgttttgacaaaatggtatccaatgccgttaaatatgaacgaaagcccgaaaactgtgggtccatatgtaaaacaacagatatagaggatcgacgcatagttcgttatagcaaagtcaatccttttgcatcctctagggacataaagtctgagctgaacttgagaatcagcaactttacaattcggagacgactaatggatcaaatttattaaggaaaggttaaacttcgctaa

SEQ ID NO: 25691 - DNA, 215 bp, DROSOPHILA
attctcctccgtgaatatacccataaaaggttcaagaccttaatgacacacgggaaaaacaccgtgcgcattttgactggccttcttacgggccattgccgacattacagccatttgcacaagattggcattgcagacagtgaactctgccgcttctgctgcatggaggaggggagctctgcacatattatatatgtgactattatgtgactgca

SEQ ID NO: 25692 - protein, 55 aa, DROSOPHILA
MTHGKNTVRILTGLLTGHCRHYSHLHKIGIADSELCRFCCMEEGSSAHIIYVTIM

SEQ ID NO: 25693 - DNA, 2129 bp, DROSOPHILA
ggagctaacttctttcgtaatacagggtttcaaaaataatcttcaaacagatgtcatctacactgattttaataaagcatttgactctgtcaatcattacctactaataagacaacttcatcttttaggtttccctgttaatcttctaaatttcaagctgtctgaatggcaggacacaacaagtcctctttaaaaattctttatctcgtattctccgagtcacatccggtgtcccacaaggtagccatcttggtccgcttcgttttaccttattcaataacgacctccccttaataataaaacattcacgtgtacttatgttaaagaggattggaaatacgttgctatggtattggatagactttttttgtggatattcacgttggcagttgtggttgggaccgccggaataattttacaagctcctacgttatatgacgaccgcatcccgattattgagcaaaaggatttggacttttcaggaacatcagccggtcgctgtagacctccacaataacattattatattaaaagaatttaattttaaactgaggtgtatcagattattattacaaaatgaactttaactaatattttctgcaggaaaaaatgttaaaaattacatatgtgtgtattgaaggctttaagtaacaaattacctattttttatttttgaccacatttagatattccaaagtaatttggtattcttaggcacttcaaaccacgacattttttttatttatccttgtcaacgaacttaaagaataaaattttaacattttaatcttaaaccagaaatgcagaaatgttgattacgatcttacatattcgaaagagcacacaaaacaacaaatccataaagtgttcagcttttcaaatatacatttacaagaaaaacggtttagtgtgaaaatagcttcgaagaagtgcaatcatccgttactcgtagaaaaaaagggtacactagattcgatgaaggaaaaggcttaatcgcataaggagtattaattcgatgcaatgtccgtcggttagtctgtataaatgtcaagatgtctcagcttaagtttgtttaagattgttgccatgcccgcattaacgaataaaacccgctcaaaactgtcacccaaataattttcagctctacgacgcatattaaaaaaagatgtcttgtacattttttttagagcaaaggctattgaggcattcaccagtcgcatgtcgactaccccatgcaaataaatgaaactgtaaacttgttgtgcagattctaccgtacttttttttcagtcggagaataccgactggctacgcttcatgaggatacaaatttttatgagatgattagtatttatttcatatttaattagtaatagcatcatttaaaaattaatatctttgtgagttcgatgtagttgagtttcccaactattagatacctgttactcaactagtagaagtgcgaacaagaaattttaaaaactttattgcatatggataaaaattgggaaaaaataaaatgaagaaaacaaattttttaatttttcaaaagaatgggcgatatagttctggacggtttgtttgtcttcgaaaaggcgtggccaaaatgttataaaacaaaaaattggcaggacaaataataaacgaaaaaacaccaaaacatttgtcagaatgttgggcgaggcagtcttacctggatcgtgggcgtataaagatcaacttaaaaattaactttctagctatcatggccacatcgagtcggatattgagaaaaatacttaacagggtctgagacgattccaactacttgatacctactttatatcgaatctagtacactcctttattcaaagggtattaaaattccgaaataggcaaattatttcaatatgtcaatagacagtttacaaaaactcttatatataatatacaatgtatggtattgttttcaacttgcattttcaatcacttattcgtacacttaagttcacttatgtgcgtacaatttttttccaggacaatattaattgacatagcataacattttggaggcgttacacatgtcgtgagcattaagtatttccggcggttctatttattttgtttatgacaatattcaattttaattt

SEQ ID NO: 25694 - DNA, 2428 bp, DROSOPHILA
gattttaataaagcatttgactctgtcaatcattacctactaataagacaacttcatcttttaggtttccctgttaatcttctaaatttcaagctgtctgaatggcaggacacaacaagtcctctttaaaaattctttatctcgtattctccgagtcacatccggtgtcccacaaggtagccatcttggtccgcttcgttttaccttattcaataacgacctccccttaataataaaacattcacgtgtacttatcaactacaacaaattagttagacctgttgttaatacgacagatgttctaaaagtttgcattaaattaaaactttcacagcttatagatgtggtaagtaaaaatattagcacgaacctttcgtggtatgattacaaacttcgttgggaacctaaagaatatggtggagttcatatgctgcatgttccttcagatcatatatggagaccggatattgtcctttataataatgctgatggtaacttcgaagtgactcttgcaactaaagccacaatttactcagaaggattagttgaatggaagccaccagcaatatacaaatcatcctgtgaaatagatgtagaatatttcccatttgatgaacagacctgtgttctaaaatttggcagttggacttatgatgggtttaaggtaggagttatgttaaaatgtatatttttcagtgctgatggtcattatgaagtgacacttatgacaaaagcaatagtctataataatggattggtcatatggcaacctcctgccgtctataaatcctcttgttcaatcgatgttgaatattttccgtatgacgtacaaacctgcatcttaaaattaggaagttggacctatgatggttttaaggttgatctgaggcacatggatgaacaacagggcagcaacgttgttgctgtgggtgtggacctatctgaattttatatgtctgtggaatgggacattctcgaagttccagctgttaggaatgaaaagttttatacttgttgcgacgaaccatacttggacatcacatttaatataacaatgagaaggaagacgcttttttatactgttaatataataataccgtgcatgggaatatcatttttaactgtattaacattttaccttccatcggatagtggagaaaaggtcacactatctatctccattcttattagtcttcacgtgttctttcttttggtggttgaaattataccaccaacgtcattggttgttcctttgctgggaaaatacctaatatttgccatgatacttgtgtctatcagtatctgcgtgacggttgttgttttgaacgttcattttcgttcacctcaaactcataaaatggcaccctgggttaagcgcgtctttattgactttttgccagcgtttttattcattaaaaggccgacgtacaactttgaaacgagttcagacgaaatagccgccgtccccgatatggatatcggacccttagggatgaaaagtcccattttaaataatccagcattttcccactctaaatgccttcctaaaattcacaaaagctgtttttgtgtgcgctttattgcagagcatacaaaaatgcaagaggactcaactaaagttaaagaggattggaaatacgttgctatggtattggatagactttttttgtggatattcacgttggcagttgtggttgggaccgccggaataattttacaagctcctacgttatatgacgaccgcatcccgattattgagcaaaaggatttggacttttcaggaacatcagccggtcgctgtagacctccacaataacattattatattaaaagaatttaattttaaactgaggtgtatcagattattattacaaaatgaactttaactaatattttctgcaggaaaaaatgttaaaaattacatatgtgtgtattgaaggctttaagtaacaaattacctattttttatttttgaccacatttagatattccaaagtaatttggtattcttaggcacttcaaaccacgacattttttttatttatccttgtcaacgaacttaaagaataaaattttaacattttaatcttaaaccagaaatgcagaaatgttgattacgatcttacatattcgaaagagcacacaaaacaacaaatccataaagtgttcagcttttcaaatatacatttacaagaaaaacggtttagtgtgaaaatagcttcgaagaagtgcaatcatccgttactcgtagaaaaaaagggtacactagattcgatgaaggaaaaggcttaatcgcataaggagtattaattcgatgcaatgtccgtcggttagtctgtataaatgtcaagatgtctcagcttaagtttgtttaagattgttgccatgcccgcattaacgaataaaacccgctcaaaactgtcaccca

SEQ ID NO: 25695 - protein, 520 aa, DROSOPHILA
INYNKLVRPVVNTTDVLKVCIKLKLSQLIDVVSKNISTNLSWYDYKLRWEPKEYGGVHMLHVPSDHIWRPDIVLYNNADGNFEVTLATKATIYSEGLVEWKPPAIYKSSCEIDVEYFPFDEQTCVLKFGSWTYDGFKVGVMLKCIFFSADGHYEVTLMTKAIVYNNGLVIWQPPAVYKSSCSIDVEYFPYDVQTCILKLGSWTYDGFKVDLRHMDEQQGSNVVAVGVDLSEFYMSVEWDILEVPAVRNEKFYTCCDEPYLDITFNITMRRKTLFYTVNIIIPCMGISFLTVLTFYLPSDSGEKVTLSISILISLHVFFLLVVEIIPPTSLVVPLLGKYLIFAMILVSISICVTVVVLNVHFRSPQTHKMAPWVKRVFIDFLPAFLFIKRPTYNFETSSDEIAAVPDMDIGPLGMKSPILNNPAFSHSKCLPKIHKSCFCVRFIAEHTKMQEDSTKVKEDWKYVAMVLDRLFLWIFTLAVVVGTAGIILQAPTLYDDRIPIIEQKDLDFSGTSAGRCRPPQ

SEQ ID NO: 25696 - DNA, 6607 bp, DROSOPHILA
gtatcaagttgaagccggacagcaagccaaattcacagaagagctggtggagcgactgtaggtctattagcttgaggagacaaactcatttggggtgaactctttaccgttttgaacttcgttccttgctaattagttgggccataaaaactgatttattatggcccggtcaatgctacacagcgtcacgcgcagccccccgcctaccaactccctacatttcgtcttgaccaaagacgctcagccaatttggcaccgctatgaaaaaacaatcactgaaaaatattttgccagttttaatggtgttaaaataacttatgtatatatttaactaacatttaggttaactcataactcagcttataacttataaccccgactaacgcatttgagttctcttttttggttctatacacttggtatagaatttttctcactgtgcccattggcgaaaagttcgttgcacagcgtattaagtaatattagcaaaatggatagcagcacaatttttttggcaaggctaaaagcgcgagatgagttacacattgttgctagcagggaacacagtgcgtatgaggaatattgaaataatgcttcagctgctcataaatttctctatttgctctcatacaacagactgcattcgttgagtgcgtcaagtaaagtacgccaacaaccttgcttataagttaaataagaggtaataaaaagtatacacacatgtatgtatgccagggcgataaccaaaaactaatattgaataatagctcgagcgtcttatctttcgacaaattttcgctcacacgcaaaagaggcggatttggtgactttttgtttttattaagtatatgtatttgttacacatatacatttttgttgttttgcattatacgaactttggcacaattattaaaattagatttgaatagcatgcgttttatctttggtcgtaggagctttttgccacacatcttatcgggcttcatagtccagtcgccagtggcaagtgctcatggcaagtttacaaattaggattgtacttagaagggagagcagaaaatcaagtaacccgtagttctctaccagagtcaatcttaagttaacttcggtatttttaattgtttttagattcctgcattggcggcaatcaatcgcccacgggcacgccgcgcccctttctgcgatccaacacccttcctctgcgacagcgacccagtccggcggaggtccaatatgaaagctacgtgcaggccacggtggcggccaatgccaagtcgccggtggagcagctggagagcgcaaagtctccaggtgctccgccaccaccgcctccgaggcgccaccacctgttggccaccacgcccacgggaaaacccactttcaaggaggatcgaccgcaggagaatggttccgtaagcagcagctccctgcagtcgccagtcatctcggaaaccggtcagactacggcagatgcacaagctctgttccagatacgagaacaaatggccctgagcctgaggcgtcttaaggatctggaggagcaggtgaaagtcatacccgacatggaggtgagaatgttaatgtttaatacggataagtgatattaaagaaataccattccgactttcagctggaacttaattctcttcgctcggaaaagcagaaattgctgcgcagaaacgaggagttgatgcgaagtcagcggcagacgccttcgccgccaagtccgggactcaagactgcctcacccgtgcagttcactccgcaaaggatcagtccagtgtcgctggagagcctaggagcacgcatgcgcagcagttccacctcggcatctccatctccaagcgttgtccgtcgagatgtctccactcaagcagtggtgcgaccacctgccacacgagatgtgtccgttggccaccagcccaccacgagaaatgttggagttcagccgtcggaaactgtctactccaaggaggagctggataagaaggtggagcaggcactaaccaatgcacaaaagcaacaattgagaaagctcatctctgtgggcacccaaatgtatgtgccccagagggaccaaaaagatagtggagtgcaaaccacaccggaacgacccaaactcaagtaccatgtgggagtcaccgtgaaaccggccacaagggagaactttaccagttgcaagccggatgtgcgtcatgtgggcagctctgatgatcgcctggatgatgtgctatgcgaaaaatgcgccgtcagcaagagaagcgtggcctgcggtccggaaactccggcggagaaggtaaaacctgctccccaaatgcccggacgcagcaacaccttcagtttgggcgagaatgagaccgtatccgtggtgcgtaagacaattggatgccagacgccagttaccctggttctcagttctggaagtcaaaccaccacggctgttgttcgttccaccggagcccaggttaatccacagcaacagcactctggcgtccagtgtgcaacggagcaggtatcccgacagactgataccaagggactgcagcgactcactcggagtcagacgaaggctgaacaggtctcagagtctgtgccccgccctacaacccgtcacacagccagcaatacggacaaggtggaggaagcggagccggctaaggttcgcacaagccactccgcctgcaacacggaggaggttcgcaagagggatgtgggctgtggcgacatcgtcaagccacacatctccattgcctgtgcagccaactactgtgattcctgcaaggaggccatccaggatctggccaggggtttctcgaaggccagtcccacggccaccagaacgggaggagcagtgcgacgctccacgtcggcggactcgagaattccgcgacccaagcacctctccagtccgagtccggtgcgcaaagagttcatgcggcagaacacctacacgctggccacgccttcgccaactccaagtccacaggtggaaaggaaggcgcgattgaggtgagtctcaaaaaaaaaaaaattgaagagcctctcttagtgaaattatttttatgatcagcatgaataattttgtaaaaactcttttaaaaatcaaactattctttggattttatccgtaaattcaatttatttattttttgttgctgtatgttcaatattgacccactgtactagccaagtttcacgaaaagcttttagccgagtcaccaaccagacgccagctcttgcgcattggggtcacaaaagtcagtgtctgaaatcgaaatgtcttgaccttcagttgagttttggtgtttgctttggcccaattgctgagccgcttatttttgctttttgtttggattttggtttttcgcatggtgctgccaatgttttccagcctgagcagtttcacgtgctatccgctgctggtcagcggatgctcggctctgctagtaacgtgggtttaggatttgccgtaaaaaccatcaatctgtcgtacttatcaaggttattcccctttcagctccctgcaagagaagccaccgtcagtgtccagtttccaggcatcggagccattgcccgaatcccaaagcttcatccgtcaaccgcagaaggattcattggatctgagtctcttgggcgaggatgagttgatagtccgagaggagaagcgggtgagcatcagctggtcgcgcgatgcctcaccagctccgctgatgacctcctcgggcactaccaagtccgaatcaccggaacaggagccggcaatgagctcctcaagtgattcaagtccgcccatcgacgtccagattgcccagggagcgcgcaagaagtccagcactccactcaaatctagtcagagcgagggctcccaagtgaccgtgatcgaacagccggccaccaaagcccagctccaccagttggcccaggcggattcggagccccgaaaaaagtaagccacttttaatatttatattttttgtagtataaaaaggatctcgtttatttgaaaattcaacaaattcgcagtattaatatttaaaattataatttcagaaccgagttgtcccagagccttaaagacgccctcaagatcattaacgactcgctgctgaagaagctgggcgccaaacccatatcctcgcagagtctcaagtcggccaaggcgaccattcaggatcattggttcactaactccagtactggcaaatccgatccccatcaggttgaggattatctagattactttgaatcgctgtccatcccattgctggagtactgtgtcaacctgtccgacagtaatgtgagtttgaatcacatactaagtaatatagatggatcactaagataatatcttatttcagggcaacacagccatgcactatgcagtctcgcacggcaacttcgatgtggtatccatactgctggattctaaggtttgcgatgtaaaccaaatgaataacgccggatacacatcggtgatgctcgtatcgttggccaagctgaagcagcccgcccatcggacagtcgtcgagcgactgttcaagatggccgatgtcaacatacgggccaagaaggtaggtaaggggccccaccgcccatggatctcgagccccgtatgtgctgaccacacactactcccctactaaccgctcccgtcctgtttctatccactaatccacagcactgccagaccgctttgatgctcgctgtgtcgcatggtaacggggacatggtcaatatgcttctggacgccggggcggatattaatatccaggacgaggacggcagtacggctctgatgtgcgccgccgagcacggacgcgtggatgtgatcaagcatctactgtcgcatcccgagtgcgattcactggtcaccgatgtggtgagtgtgcctatatacataatttatatagaagaggatttaaatgatttcatttctctcaggatggcagcacagccttcaagatcgcctggcaggctggccaccgggatgtgggactgctcatctatgtccacgagcagatgctgcgaagcaagctgccaaatcgcggagatgcaacaagaagctccctgatttcgccaccgcgccacaagcgccagccatcgcagtaaagccatttcgtattagcggccaaatcgacgaacaaacagctagtgactaagatttaaattagcatttcgtagagctgctcagaatacattccataccgccatactgcggaaaggcacaagggcagcttacacttttcatatgtatattgtataactagaattcgtttgtcgtacgttttatttatttgtaaatctaatttaatcgctaattgtagtagcagctaactctgtgtaatcattctgagacacatcgatcaactaatgcaattaagtactactgcacaggcctgagctaccgatcttaaagtagccgacaaaccaaccaaccatatcaagcaaccgacaatgcaaaaaacgatatatattgtactaaccagaaataacgaacagtgaatcaaatcaaaaggttcatctttaggataaccgggtgtatttaataggaataaaaccaagctaatttaaaagcaaatgttttctcaaataaataaattcttaaataaaaacaagtgtttaatattaactattctatgctgactctgcctattgggctacctgaactttagtttaatattgtttcggttagttactatgctgagttttatattgctttctagactttgttcatagagtaaattcttcgtcattaggcaaaagattgagatactgacataagctaaatctctttgtttcgacttttttatgcacaatgagttgctttaattgctttttccatataaagcacgaagcggaaacattaaaattaaattaaaatatttgcaaagaagccacacaatatattgaatgttagtgcatattctatagaggttttatctatatttctagttaactaaacaagtaccaatccttgctatcccagagataaagctaatgtcagtgatcatgcattctcaagctgcgagcttataccgccctctcctcgtttccgggttctatgacacccaatggcatcagggttagtgctataccatcctccaggttaatcagtggtttcctggtattcaaggagaattcatactcggatagaagcagagccaatgccaatcgcagttgcagctgtgcgaattgtataccaatgcaactgcgagcacccacgccgaatccaaaccaagtgccctgctcctgcagcgaatcccgtggtccgctccaacgatccggcttgaattcctcgggatccggatagatatccggatcgtgatggatagcgtgcgtgggtatgatgaggaacagctccttgaccagaatgtacttgggatgatccggaactgcgtagtcatttaaggtgcgacgtaggatgtagggtgttatgggatgcattcgtagtgtttcgttgatcacctgacccatgaaactaagcgacttaatgccctcatgtgttatgtgaccatcatgtcgctcgatggccttcttgacctcctcccgcacacgtacttgcaattctggatgcaatgctagctcatagagtacatatgatagagtg

SEQ ID NO: 25697 - DNA, 3639 bp, DROSOPHILA
tggcaagtgctcatggcaagtttacaaattaggattgtacttagaagggagagcagaaaatcaaattcctgcattggcggcaatcaatcgcccacgggcacgccgcgcccctttctgcgatccaacacccttcctctgcgacagcgacccagtccggcggaggtccaatatgaaagctacgtgcaggccacggtggcggccaatgccaagtcgccggtggagcagctggagagcgcaaagtctccaggtgctccgccaccaccgcctccgaggcgccaccacctgttggccaccacgcccacgggaaaacccactttcaaggaggatcgaccgcaggagaatggttccgtaagcagcagctccctgcagtcgccagtcatctcggaaaccggtcagactacggcagatgcacaagctctgttccagatacgagaacaaatggccctgagcctgaggcgtcttaaggatctggaggagcaggtgaaagtcatacccgacatggagctggaacttaattctcttcgctcggaaaagcagaaattgctgcgcagaaacgaggagttgatgcgaagtcagcggcagacgccttcgccgccaagtccgggactcaagactgcctcacccgtgcagttcactccgcaaaggatcagtccagtgtcgctggagagcctaggagcacgcatgcgcagcagttccacctcggcatctccatctccaagcgttgtccgtcgagatgtctccactcaagcagtggtgcgaccacctgccacacgagatgtgtccgttggccaccagcccaccacgagaaatgttggagttcagccgtcggaaactgtctactccaaggaggagctggataagaaggtggagcaggcactaaccaatgcacaaaagcaacaattgagaaagctcatctctgtgggcacccaaatgtatgtgccccagagggaccaaaaagatagtggagtgcaaaccacaccggaacgacccaaactcaagtaccatgtgggagtcaccgtgaaaccggccacaagggagaactttaccagttgcaagccggatgtgcgtcatgtgggcagctctgatgatcgcctggatgatgtgctatgcgaaaaatgcgccgtcagcaagagaagcgtggcctgcggtccggaaactccggcggagaaggtaaaacctgctccccaaatgcccggacgcagcaacaccttcagtttgggcgagaatgagaccgtatccgtggtgcgtaagacaattggatgccagacgccagttaccctggttctcagttctggaagtcaaaccaccacggctgttgttcgttccaccggagcccaggttaatccacagcaacagcactctggcgtccagtgtgcaacggagcaggtatcccgacagactgataccaagggactgcagcgactcactcggagtcagacgaaggctgaacaggtctcagagtctgtgccccgccctacaacccgtcacacagccagcaatacggacaaggtggaggaagcggagccggctaaggttcgcacaagccactccgcctgcaacacggaggaggttcgcaagagggatgtgggctgtggcgacatcgtcaagccacacatctccattgcctgtgcagccaactactgtgattcctgcaaggaggccatccaggatctggccaggggtttctcgaaggccagtcccacggccaccagaacgggaggagcagtgcgacgctccacgtcggcggactcgagaattccgcgacccaagcacctctccagtccgagtccggtgcgcaaagagttcatgcggcagaacacctacacgctggccacgccttcgccaactccaagtccacaggtggaaaggaaggcgcgattgagctccctgcaagagaagccaccgtcagtgtccagtttccaggcatcggagccattgcccgaatcccaaagcttcatccgtcaaccgcagaaggattcattggatctgagtctcttgggcgaggatgagttgatagtccgagaggagaagcgggtgagcatcagctggtcgcgcgatgcctcaccagctccgctgatgacctcctcgggcactaccaagtccgaatcaccggaacaggagccggcaatgagctcctcaagtgattcaagtccgcccatcgacgtccagattgcccagggagcgcgcaagaagtccagcactccactcaaatctagtcagagcgagggctcccaagtgaccgtgatcgaacagccggccaccaaagcccagctccaccagttggcccaggcggattcggagccccgaaaaaaaaccgagttgtcccagagccttaaagacgccctcaagatcattaacgactcgctgctgaagaagctgggcgccaaacccatatcctcgcagagtctcaagtcggccaaggcgaccattcaggatcattggttcactaactccagtactggcaaatccgatccccatcaggttgaggattatctagattactttgaatcgctgtccatcccattgctggagtactgtgtcaacctgtccgacagtaatggcaacacagccatgcactatgcagtctcgcacggcaacttcgatgtggtatccatactgctggattctaaggtttgcgatgtaaaccaaatgaataacgccggatacacatcggtgatgctcgtatcgttggccaagctgaagcagcccgcccatcggacagtcgtcgagcgactgttcaagatggccgatgtcaacatacgggccaagaagcactgccagaccgctttgatgctcgctgtgtcgcatggtaacggggacatggtcaatatgcttctggacgccggggcggatattaatatccaggacgaggacggcagtacggctctgatgtgcgccgccgagcacggacgcgtggatgtgatcaagcatctactgtcgcatcccgagtgcgattcactggtcaccgatgtggatggcagcacagccttcaagatcgcctggcaggctggccaccgggatgtgggactgctcatctatgtccacgagcagatgctgcgaagcaagctgccaaatcgcggagatgcaacaagaagctccctgatttcgccaccgcgccacaagcgccagccatcgcagtaaagccatttcgtattagcggccaaatcgacgaacaaacagctagtgactaagatttaaattagcatttcgtagagctgctcagaatacattccataccgccatactgcggaaaggcacaagggcagcttacacttttcatatgtatattgtataactagaattcgtttgtcgtacgttttatttatttgtaaatctaatttaatcgctaattgtagtagcagctaactctgtgtaatcattctgagacacatcgatcaactaatgcaattaagtactactgcacaggcctgagctaccgatcttaaagtagccgacaaaccaaccaaccatatcaagcaaccgacaatgcaaaaaacgatatatattgtactaaccagaaataacgaacagtgaatcaaatcaaaaggttcatctttaggataaccgggtgtatttaataggaataaaaccaagctaatttaaaagcaaatgttttctcaaataaataaattcttaaat

SEQ ID NO: 25698 - protein, 1042 aa, DROSOPHILA
MASLQIRIVLRRESRKSNSCIGGNQSPTGTPRPFLRSNTLPLRQRPSPAEVQYESYVQATVAANAKSPVEQLESAKSPGAPPPPPPRRHHLLATTPTGKPTFKEDRPQENGSVSSSSLQSPVISETGQTTADAQALFQIREQMALSLRRLKDLEEQVKVIPDMELELNSLRSEKQKLLRRNEELMRSQRQTPSPPSPGLKTASPVQFTPQRISPVSLESLGARMRSSSTSASPSPSVVRRDVSTQAVVRPPATRDVSVGHQPTTRNVGVQPSETVYSKEELDKKVEQALTNAQKQQLRKLISVGTQMYVPQRDQKDSGVQTTPERPKLKYHVGVTVKPATRENFTSCKPDVRHVGSSDDRLDDVLCEKCAVSKRSVACGPETPAEKVKPAPQMPGRSNTFSLGENETVSVVRKTIGCQTPVTLVLSSGSQTTTAVVRSTGAQVNPQQQHSGVQCATEQVSRQTDTKGLQRLTRSQTKAEQVSESVPRPTTRHTASNTDKVEEAEPAKVRTSHSACNTEEVRKRDVGCGDIVKPHISIACAANYCDSCKEAIQDLARGFSKASPTATRTGGAVRRSTSADSRIPRPKHLSSPSPVRKEFMRQNTYTLATPSPTPSPQVERKARLSSLQEKPPSVSSFQASEPLPESQSFIRQPQKDSLDLSLLGEDELIVREEKRVSISWSRDASPAPLMTSSGTTKSESPEQEPAMSSSSDSSPPIDVQIAQGARKKSSTPLKSSQSEGSQVTVIEQPATKAQLHQLAQADSEPRKKTELSQSLKDALKIINDSLLKKLGAKPISSQSLKSAKATIQDHWFTNSSTGKSDPHQVEDYLDYFESLSIPLLEYCVNLSDSNGNTAMHYAVSHGNFDVVSILLDSKVCDVNQMNNAGYTSVMLVSLAKLKQPAHRTVVERLFKMADVNIRAKKHCQTALMLAVSHGNGDMVNMLLDAGADINIQDEDGSTALMCAAEHGRVDVIKHLLSHPECDSLVTDVDGSTAFKIAWQAGHRDVGLLIYVHEQMLRSKLPNRGDATRSSLISPPRHKRQPSQ

SEQ ID NO: 25699 - DNA, 3552 bp, DROSOPHILA
tctaaccttgtaagcacttgctctgctcaataaagagacatttaaaagttacgccgtcgaatgtttattgtgaacgttcatttatatagtgacgtatttgcgccacccaaaccggccaatttcattaattccctgaacaataaagctgttaattggttcccgtactgtatgccatctgctcagtatgcgttttgataaacaaattcattggcaacggaactttgccattcatgtaaacaaatccgaaagcctaacattagaagttagttcgatttgtaaaacgggtacttttgtcaaatcttatcagatcttatttactaaaggaaaaaattgtttactcagtggtatattgatgtttattgcaaatcaccataagattattctgtcacttagttattttatacaaaatttattgatttgacaaacaaaaatttgccgacatcggaattaaaactgtgaaaaaggtggcctctctaatgtcaggaaaacagctgtccgatagcaaaacaaaaaccagagcaccttaaaacgcaattaaacgattttgcccgaatcaaaatcgaaaaaaaatacgattatgtctaatagaacagtctatatagtaaggtccatagaatcgcacattacacattcattatctttgaaatcgaaaaatttaaaaagtagccatgcttagggaaatggcatctgtgggaacagtgcacatacattatacacatacactgttcgtaaaatacctatatttttatattttgccatctaagcaaattacaacatgcttctgattttaacgtgttattttaaatgacgatttcaatcgcttcaaaaccgggtctcttataggtctgatacgttgttgatgctaatctgtgagaaactcatataaattccattacttacgtaaatattattccaaaacaacgtaatatagtagtagacttggttccgctgccttagcctattcaataaataatataataatttcttaaattatccaatgtaaatagtggaatctgacagtacttaaatggcggacgacttgcataattataagctacaattgcaacaagtgtgtataattaattaaataaagtatatattttggtgtggtcttggtcaagattgtatatgtttcgcttatattctttaagtaaagacattttgttcagtcctttaaaataatagtagtcagtagtcgatgaagcgcaactggaggatggcgagtactatatgtacatatgtacatataaacgaagaaatacaaaccaatttcctgtggatgtccggtcccaatcatttatatacaaacatcgttgccatgttaggagtttgaaaaagaatccagcttcgtactggaaaacaactcgcaacttcggtgtgaagaacggtgacgactatatacagagatattctatacagctttcataacatagcttggataaatactatcacttaaaaatgttgtgtaaactattccttgatttcgtttggctcgtttatggccatggcctagtaatgttattattgtattcccctactgaatcaaaccaaacattggaaatttatttgtgcttttaaaaaacgtgtatataagccaaccccttaaaacaagcgcttatggtaagcctgtacataaagattcagcttctggttagaaagtttacttcctaatgcgtggcatttcaaagatcagtttattgtgaaatgttcatatataaataaacttttttgaattattcaatctacaatgtaatatattgaaattgttgcacatgaattaagcaattataaatttaatttttaggtggaggcagctcttcaaactgatccagaaaatgaagagctattaaaactcagaagtgatcttgacgaagttattacccttactcgtgatttgatacaaactcaactggaagaacaaaataaatcttcatatgtggagccatcatcaaccaaaagagattcgtccaactacttcgacgaaatagaagcagctctattagaagcagaaaaattagtttcagctgctaagatttggaaaaaaggagacaagtgtcaagctaaatggaaggaggatcgtcagtactacgatgcaactattgaagatatatcaagtacaggagaagttaatgtaatattcgatgcctatcaaaatcgatctacgacccacgtcaatgagttgcgtgaacgtactattcgcaacgaagtttttccgtcaaacaagtataaatattttaacagtaagagtaataaatttctaaaacggtttttacaggcggcacaggcccaatcaaaaagaatatttaaaaaaacgtaagcaaaaaaagcaacagcgcttcaaggacttggaagaggaacgtgaatcagacaagaacaaatggcttaattttaacaacaaaaaccaaaaaaaaaacggaatgaaagcaagaagtatatttgcgtctccggataatgtaagcggcagagtaggagtcggcacttgtggaactgcaggaaagggcatgacagattttactgtgggtgaaaaatatagaaaaggtctttagaatattatctattaaacggtataataaaaaaggttcataaaaatataagaaaacaataataataataatctttatagtgaaatttataaatttaccgggcattaccgcttcggtaatcgaattcgtacaaatttttcgatttgattttgatatcgcaaaatcgatggtccggttctcgtgtgccgcgtatcatactgctcgattcgcgagaggatagacgcttctatatcgtacagaaatctaggaaaaaatataatataaaagaaatataatagatataaatataaatataattaaaatctaattatgtgttaaaaaagtaagagttgattgctttcgggtcacgaaggcgccagcaattcctgatatatactttgtaaacatgcaaactttggagacagttatataattttcttcgttatctaagtttttctgtcacgatctctctagtactctcgcatctacaccgttggcttagtgttctgctgttcgctcagcaattaagtcactcattattatgcgcttttgctatctacgcatatattcatcgaagcacaatcttgctcgctaaatccaataaaatcttatagtttgaaatcactacatacaattcgtgttttcattgctcaaaatagctaataaaaagactatgatttagtattatgattatgtagtttctagtgaatttgcttgaaacagggaaaatgtagccgggactatcaacttcaccacgagtaagctttttttttatcaatttttattttttcggtagaaggagacaatttttccaatattttctggttaagcttgttaacttggattgagcttctaaccataagaggctcactgccagttgagaaagtacctccacatgaccaggtaattgatcagcaaccagctgcggtcgaggctactgaaaaattaacaaaagctgtcgtaggcacaatggtgactccgttaacgtattaaaaggcatcttctgaagcgccttttaagttatctttcc

SEQ ID NO: 25700 - DNA, 756 bp, DROSOPHILA
taaatagtggaatctgacagtacttaaatggcggacgacttgcataattataagctacaattgcaacaagtggaggcagctcttcaaactgatccagaaaatgaagagctattaaaactcagaagtgatcttgacgaagttattacccttactcgtgatttgatacaaactcaactggaagaacaaaataaatcttcatatgtggagccatcatcaaccaaaagagattcgtccaactacttcgacgaaatagaagcagctctattagaagcagaaaaattagtttcagctgctaagatttggaaaaaaggagacaagtgtcaagctaaatggaaggaggatcgtcagtactacgatgcaactattgaagatatatcaagtacaggagaagttaatgtaatattcgatgcctatcaaaatcgatctacgacccacgtcaatgagttgcgtgaacgtactattcgcaacgaagtttttccgtcaaacaagcccaatcaaaaagaatatttaaaaaaacgtaagcaaaaaaagcaacagcgcttcaaggacttggaagaggaacgtgaatcagacaagaacaaatggcttaattttaacaacaaaaaccaaaaaaaaaacggaatgaaagcaagaagtatatttgcgtctccggataatgtaagcggcagagtaggagtcggcacttgtggaactgcaggaaagggcatgacagattttactgtgggtgaaaaatatagaaaaggtctttagaatatt

SEQ ID NO: 25701 - protein, 240 aa, DROSOPHILA
MADDLHNYKLQLQQVEAALQTDPENEELLKLRSDLDEVITLTRDLIQTQLEEQNKSSYVEPSSTKRDSSNYFDEIEAALLEAEKLVSAAKIWKKGDKCQAKWKEDRQYYDATIEDISSTGEVNVIFDAYQNRSTTHVNELRERTIRNEVFPSNKPNQKEYLKKRKQKKQQRFKDLEEERESDKNKWLNFNNKNQKKNGMKARSIFASPDNVSGRVGVGTCGTAGKGMTDFTVGEKYRKGL

SEQ ID NO: 25702 - DNA, 2552 bp, DROSOPHILA
ggtaagaactttcgaatttaattcattatttattccatgtaattgattaattttatttaaaaaaaatagtataactcacaaaaagttatcatttaaatatatataatatttaagtgttttaatacatttttgtcattgctatattaacgtttttacattaaggttgattacacgagtggtcccatgctccaattaaactaaaaataaattgctcctacttccgtagggactgacgcatacttgcatactttaaataaggaaaatgaaaatcaagacagaaaattgcctgagaccgagaagtttcaatattttttggaataggaattggggtacaaattaatgaaaaaatttttcaaacgagtgggcgtggtagtttttggcagttttgggcggtttgtgaacgttggagtggtgtcgcaacatacgtcaacaatcctcgtctatgtttctagaatctttatcctaacgttctatattttatagttcactagatcttgatgtccatacgaaagaaaggacagacggacagacggacagacagacatggctagatcgactcggctattgatcctgaccaagaatatatctactttatatagtcgaaaccttttacattcttttcatggaatcatatttatcaggaaaatttgaaataaaccctatcgaaaaccatcaaggatttattttatttgaatcaggaacgatacaacttcatactacttttatgcaccactgtctcacaataatcataacacaaattgaagaaccatgtaacaatcttattaaagaaagtcaggaatgtaaaccaagagagaatgctatagtcgagttccacgagtatcagatacccgttgctcagctagtgtgactgcgaacgcaaaatttcatctttcttctgggatatcgatagatattgttgaaaaatatgagaaggagttcattgagattcctctccctagaaaagctaacaaattggatgcaagcaattacacaggagtccctaaattgtcttggaactggaaggggacggataattatcagatattacggccgctggcacgggtccgtggttcgttggtcgctgtgttggagtgagattattgatgtctgctgttgttactgatatatgttccagaaagaagacgactgggtagctttatttcacttcactttattggcggtcggggtgatcaagactagcttaacctaacaaaaagagtgccgcggaaccgcggagtggtgaacttgctggctggacggagagcgagaaggcgaagagagcaaagctgcggcagtctcctcctgagtgctgatggcgaggcagttcgagcagtacttattaatacctctgtcgctggttaaaattcactttgcgctagccatagctctggcccttgctgcttctctgatctgtgccagcagagttaataacctgccaattcacgtagggatacgtctcgactgcctagatcggcagagatttgtttagatcgaacgcgagcccaatagtcgactggtgtcgcctgcgtgatcttggccactctgttggccacaaacgtgctccagttgcaggtaggttttagcaaaagtaagacaatagaacaatagtggaatctgtcaagcaacggatatctaagctagctgtcagcatttcggttaacagctcttaccgggaaagggatattatttttaccggagccactcgtgtttttgctgtaaaattcgtgtacagatcttgtgcaccatctcgacgcgagtgtagatttccgcgccataggccttctgagactggtcacagaatccgtgatgctctatgattaccttaggctgataccaggacccatcacggaacgcggttctgattgaaaacaaactgtatataaatatacatacagtcaagaaactgcttacacactgtcagaggtggcaattgttcttatgtgagtattccgaactattccgaatttttgactttaagggtaaaaattaagggttccatgcttaattaaacggaatttttttattttcctactttgttttgctcttttctttgaacgaacacaatttttccgttttttttggctttgcattgctttttacaatgcttctattgaaattttttgactttgcttgtgaaattttgttgatcaaacgtgctttaagcgaattattaaacttaataaaatgcctggaaagagattaacagcagcactgcagtctctagttaaaggcggctgggggcctgcttgctcacccctcgggttaccgactacactagtgggggatctcgaaagcctggagttcctcctgaaagggtcgttgcgatccggggactaccctttagtttagttagtagttttgagaacagtgcactaccgtacagttttgttaagttagaaattactacattcatgcagaagactagttcagatatgaacgtcgagatttcatatcccagaaaatttatgaaatttcgcgttcccattcacactagctgagtaacaggtctcttcctgtcctcttccgtcggagacctcgactatagcagtctc

SEQ ID NO: 25703 - DNA, 477 bp, DROSOPHILA
ttttcaatcagaaccgcgttccgtgatgggtcctggtatcagcctaaggtaatcatagagcatcacggattctgtgaccagtctcagaaggcctatggcgcggaaatctacactcgcgtcgagatggtgcacaagatctgtacacgaattttacagcaaaaacacgagtggctccgattccactattgttctattgtcttacttttgctaaaacctacctgcaactggagcacgtttgtggccaacagagtggccaagatcacgcaggcgacaccagtcgactattgggctcgcgttcgatctaaacaaatctctgccgatctaggcagtcgagacgtatccctacgtgaattggcagtaacaacagcagacatcaataatctcactccaacacagcgaccaacgaaccacggacccgtgccagcggccgtaatatctgataattatccgtccccttccagttccaagacaatttag

SEQ ID NO: 25704 - protein, 117 aa, DROSOPHILA
MVHKICTRILQQKHEWLRFHYCSIVLLLLKPTCNWSTFVANRVAKITQATPVDYWARVRSKQISADLGSRDVSLRELAVTTADINNLTPTQRPTNHGPVPAAVISDNYPSPSSSKTI

SEQ ID NO: 25705 - DNA, 3786 bp, DROSOPHILA
tggctccagttattttagcattgcttaattccctgggcagcgaagaccatctctcttccattggccattttggacaacaaaaatttaaatttgttcattgcgttttttactaaatcaaatatatacaaacatccatgatatatgcttaaatctattaatatgcgaaaacatttaaaccacgccacaaaaatgttaaactatattcctaatgatccactctggtaatcgagaaagccgactatagtgttctctcttaattttctttttccgactaaatttctgaaaatatttgggaaagatgcaggacggacatgactgtcacaatgtggttgtatgtacttattaagaatatacatatgtataaattaagtattttatgccggtgtaatcgcgcgcggctatacgagtctgggtgtcgggcggggccgcgacaattaaagacaaggagttaatattaattctttatttgctaagccaagcggagctgtggcgttggagtacgaaatcaaactaaagctacaaatacagaaattcaagttaggagctaaaatagaaaacgaatcacattgttgcggtttcatattcgtagcggtcatgcaaataaacaaagtttgccagctacgtaacgacgtccggcataatgcttacattgcagaatgccttcgtcgacgtatttcatgcggtggacatagcgacggtaactttagttaattatatactttatatggttgccaatgtcttcgggcttaaccgtaaaatcagatgttttaatgtaatatcggaaaacgtacaatcaatgtaagttttaaaaatgttgtagcacaaaaagcacaatattttacccttttcgagcggcaagcattataaaatattcagtcggacatggccgctcgactcatctcggctggtggtcctgttaaggaatttatacactttatacctgttcattttttttacgaatatagttaacctttagctatactagtcattactatactacccgtctacatacatacacatttacatattttgacaagtacctgcattgtgtgtgttttcccacaacctgtttgaccgtaagcaaaaatggttccattatatccttcgattgtactctcaactaatgaataacacatctcgtcgtaaatcacttccgtgtcagttttcatattataaacactatcaaatatgaattttttttgttgagatatgcgagctgatggattagtcacggaaactgcaaattcattaatttcaacaatgttctgaaatgacaaaagtaaataaattgtcgttttattaaaaaataaattaattttatgatcgcaaaaaatcttagctttatataactttgaagtatattcaccccaagacaattataatttcgtaggcatttctatcggcttttgtgtcagtttgctgactttgattaattcaaagtttgattatttaagataaccgaacgccgtaaattaaatcaccgaaaagctgctaatcgcactgatgaccagagagagagagacagtcaaagaaaatgttgtattgtattactatctcagaaatgtgatacttattatagaaaaatgaattaaataggctttagattctaggagctcttgcacataaaagcaacaactatcataatattaaaaattattcaaatgtgtgggcgtgaccggtttggcggccttagggtgttagaggtggcgtggcaaaaagtttttttggcaaaacgatagaaatttacaagacaaataaaattatgaaaaaatatccaataatttttctaaaatggtggcgttgcgaccacgaccacaatttttgagaaatgtgttgtattttttcacatctttattagtctcgtacgtttgggtttcttacaataatttaattaatatctatcgatttgcaataaaaaaaaatttttgtcacgcccactctattgaacaattttttatactttaattagtcttgtaaatttctatcgatttgcaaaaaaaccggtcacgcccacacttttgaacaattcttaaattttatcccatcttattccccaatatttatcgatatcccagaaaaattatgatatttcgagttcgcgttcacactagtaacgggtaactgatagccgcggaaattgactacaacattctctcttgtttaaattatctatacgaagtctgccgggaagctagtacttaatgtaaacatatctattaattgcgtatttataatgcgtgttcggagcggatcgccagggcctagtcatgcataggtgtatcactttactaacacaactttattaacctgcatgataagtcccagtctccaaggaatcctgaaaacgctaaaactttcttttacccaaatatgttttgttaagggtattgaaggattatcatcttccatatatttagaaaagacaatgtttaatgaatgtatttaaaagttagtgtttttgatttccaccaagtcgctgtagtttggaagtacagcaaatttgctttccttacctgttacacactcttaacaaaacaaaatatttaaaatcccaaaagtgttcggcaaaaaaatttaaccttctctttgtaatgtcgatataaagtcgatgtaataaattaaaatatacacttacttgacagtttcgttctttttcagtttggttcatcggacgacatcgaacaacaactttaatattttcactcattttcctgtgttggtcaaaataagtcttaaagtttacttaaaattcaactaaaaatatttataattgcttcaagagaaaatccatacatgaaattaaaagctactttgaaagtattcgaaatacattcacgtaaagctccgaatttaaatcattttcataccataattttggtagaatcaataagtctttcccaaccttgtgaaatgaaaccgctcatcatccaaagttttaaagaactttgaatttcaaagcaacattttttacttatgtgtataaaattgccatttgactgaagtaaaaataaagattttagtcaaatttttaaatatcctgatttggtataccctttaacaatacgagtaacgagtaataatacgagaaaaaagtgctaaacgttgcgtgcaacataatagattatcggcattttgtgaaaaaccacatgtttttgaattcaaataaaaatttatgcattccattattatgcataagtatataattaggtatattatggataattcgcatcggcagttaaatgaaaatataaaaatatacttccattttgaattgcgtaagaatattgtattttgtattaaacacaagtttttttgaaaacttaggaaataagcctttcttatatcgtacgatcataacgggcgacacacaagattcgattatacacttagcgtattttaaaatgggttatataattaaagcttgcccatattgcttaatttaggctaaaaacaaaagagttaattttaatccaaattttaataaatttttgaagctaacaacaattcgatattacccagtgtgaaaaaccattctgtgcctcacgatttcttcgaaatcgatagggaatgtatgggaatgctctattataatacacatataaactaattttgcaaagctttaagctcccgttttgaccactgtaacctgaaaagagggctacgatttttgaacacgcgcacgcgtgatcttaggatgcaagtcacatacgatatgaaccaaccctcacttagtcacgtttccgcggagtgttgtagacgtcatagcaaagagtattcattacaggt

SEQ ID NO: 25706 - DNA, 416 bp, DROSOPHILA
ttttctcttgaagcaattataaatatttttagttgaattttaagtaaactttaagacttattttgaccaacacaggaaaatgagtgaaaatattaaagttgttgttcgatgtcgtccgatgaaccaaactgaaaaagaacgaaactgtcaaaacattgttgaaattaatgaatttgcagtttccgtgactaatccatcagctcgcatatctcaacaaaaaaaattcatatttgatagtgtttataatatgaaaactgacacggaagtgatttacgacgagatgtgttattcattagttgagagtacaatcgaaggatataatggaaccatttttgcttacggtcaaacaggttgtgggaaaacacacacaatgcaggtacttgtcaaaatatgtaaatgtgtatgtatgtagacgg

SEQ ID NO: 25707 - protein, 110 aa, DROSOPHILA
MSENIKVVVRCRPMNQTEKERNCQNIVEINEFAVSVTNPSARISQQKKFIFDSVYNMKTDTEVIYDEMCYSLVESTIEGYNGTIFAYGQTGCGKTHTMQVLVKICKCVCM

SEQ ID NO: 25708 - DNA, 3495 bp, DROSOPHILA
ataacaatatgtatgcctcatttcgctatggacaaacttttgcaaacttttacttgtaggttcccaaaatttactttggcttaaacgaccccgatgtaacacaacggcatccacgtggtgttccctgtgtaccgagcttaacattttaatcgggatctaattcgagctgcaacaagtacatataggaaggcacatttatttatttattgttcttaaatttatctgatgagtatctgatcagtaacgggaatctgatagtcgattcctccctgggaggagatcacgagatagcgctgttcatacagagagacggacggacaatcccacaagaccagatcgactcggctattaattcttctcaagagaaggtattatttatatagtcggaaacaactgatctttctttttaacgtatctaatataagtttaaaatataaattgggaaaatctacattcaatttatcaagaataatttatttaataacttaaaaataaaaatgctatatttgaaatacttactttttctccaactacaatttcattttggttgttgtgctgattttcactatggatcactaaaggatgaatacagtgaagtccagatttttgtgtagccggaggaagttttattaaatcggactctgggattctccacattttaagatcatcattccataaagaattttgcaaaatagtgtctggagtcctttatcaaaaacataatacagtgtgttttaatataatattatagacaattaatttgacattttatattactccggtgaagagaatatttgtcttttgtctgttttcgactcgtgtgtgaccaaacaatttacatctatttttatttatttcgcttttacgcctacaattaaattttttttttgtttttaatacttttagggcaagaaaattttggtcgaggtttgattatcaattccatttatatatttctctcccgttattggaagctagttgtttaatctaatgtaaggtcttaccaattccggtcaaattttccgggatttgaagaaaatttcaaaaaaagttgttgatggaacttcacttgacgtccaaggttgcgaatttcgtccaaataatcctctctatccagctgaaattctgaatttaaatcggaaacttccatttcaagcattttaattttctctttgcactttctaatataatcattttttatatcaatttcttgtgtaatagtggcataatgcccctgcaaaaggtcgcgatcttcacatttcactctacttaaggcaatagctattgcacttaagtggcgttgggctgcatattttcgggccatgtgcttttctttaagctcgaaatcatggatacgttcaccaccaattaaactacgctttattagatcgattcgacttcgcgcttgcagttgtacctcttctttcgattgaattaaagggaaatttggttttgttaatatagagttatttgttttaaaggatgccttacaatttcgacctaaatctattatttgaacattttttgtagaattcatatttgtatgttgtataatttttagaggtgattttattattttatttggatcattatttttattaatgatttgttgactctcttgaagcattcttttcaaatatagtatttcattttggtactgtcgaagtcttgcatcctttggatcttcattaattttgggtttattagaaatattctttgctctacttgcatatcgaagtgtagatatggtttcatcataatgtatgtctgttggtgatatacaagatatcataagagtttttgtattccctcctaaggaatccttattaaaataatactattaaaataatatttaatatttatttatattttaataataattacctggagcaggcgtgtaagttttgagtccctaaagggtacatgctttgctttgccatccaccaaagatgaaataacgttgcctaatgcagaaagtgataagtttatttgggaagcttccttaagtcggtctccttgagccccagtctttcgctgcctctcggagcctgctaggtctactaagcttagttttcctctacatattcctccaaaggcatccgatccaatactatttaaaaatggagattgttccaaagtgatagtaaatatagtgtgggatcgtgagctattcttattcattaatgtagctgcagttactcgatttttatttccaaaatgtagccaatcgtaacattgatttgcattgacaacaggttgcgtggtaagcgttggaactgaaacaccaatacctggtagttccttaaggaaatgatttatcacgttcgtattttcatttttattaagtaaatctcgaatacgttcattataaatttccaaatacgttactaatgccaaatatctgacatttgtggtcattgatatcctttcaaatatatgatcaaaacatttgggaattattccagtgctgttgctgaaattttcgtcgccctaatatcacaacgagaaaaggggatgcatgaagttattaacgatgtaagatataagatgtaagatgtaagataacctgttgtaacccatctaaaaactttgataaaaatgtttatttgataaaacttaagataattggatttcatcggaaggcgatgaacgtggttgcattgcaaaaatttgattgatttgaacagcaaacacctgcttatagtcatggaaaatactggggaaaaagattgcgagttaacatacaggtgcggttaaaataataacactactgcaggtggaaagttgatttcctaaaaaaaattattaaatgtttattttttttaagtcagattgcatgaataataagtaccatatgtttggctctctgagcaagaaatttttactctctcaatgtaacgattctttatgtttttgcgcacttgccctaatatcacaacgagaaaaggggatgcaaattaactttttgtggtataaattatttaaaaaaataattttttattttttaatatttttattggtgttaaacctttcaacttatcactttattacaagacacttattggtatctatttatacatttataaaccgttcttttaatcctcccgaatcagactgatcttccaattctgaatcctaatccaatcaacctcggccagaagcttttctttgacactttctgaacttttgataaaagctttatgctgaaattattccactgcattgtaaaattcaattatgctgatcgatgcagttttttgattgaagcgtaataagttggccgtggtttggtctccaagcggaagctgtgtttacgttaagtttgggttatttactttagcgggtagctaagcgctggcaaagcgggtagctaagcgctggcaaaggcaatgacaaaaacaaagacaaaggaaatgccgacgagattgagaattgaaatttgtttataaactgtggaagggtgctatgtttatgggttggataactcgagattga

SEQ ID NO: 25709 - DNA, 1448 bp, DROSOPHILA
attagggcgacgaaaatttcagcaacagcactggaataattcccaaatgttttgatcatatatttgaaaggatatcaatgaccacaaatgtcagatatttggcattagtaacgtatttggaaatttataatgaacgtattcgagatttacttaataaaaatgaaaatacgaacgtgataaatcatttccttaaggaactaccaggtattggtgtttcagttccaacgcttaccacgcaacctgttgtcaatgcaaatcaatgttacgattggctacattttggaaataaaaatcgagtaactgcagctacattaatgaataagaatagctcacgatcccacactatatttactatcactttggaacaatctccatttttaaatagtattggatcggatgcctttggaggaatatgtagaggaaaactaagcttagtagacctagcaggctccgagaggcagcgaaagactggggctcaaggagaccgacttaaggaagcttcccaaataaacttatcactttctgcattaggcaacgttatttcatctttggtggatggcaaagcaaagcatgtaccctttagggactcaaaacttacacgcctgctccagtattattttaataaggattccttaggagggaatacaaaaactcttatgatatcttgtatatcaccaacagacatacattatgatgaaaccatatctacacttcgatatgcaagtagagcaaagaatatttctaataaacccaaaattaatgaagatccaaaggatgcaagacttcgacagtaccaaaatgaaatactatatttgaaaagaatgcttcaagagagtcaacaaatcattaataaaaataatgatccaaataaaataataaaatcacctctaaaaattatacaacatacaaatatgaattctacaaaaaatgttcaaataatagatttaggtcgaaattgtaaggcatcctttaaaacaaataactctatattaacaaaaccaaatttccctttaattcaatcgaaagaagaggtacaactgcaagcgcgaagtcgaatcgatctaataaagcgtagtttaattggtggtgaacgtatccatgatttcgagcttaaagaaaagcacatggcccgaaaatatgcagcccaacgccacttaagtgcaatagctattgccttaagtagagtgaaatgtgaagatcgcgaccttttgcaggggcattatgccactattacacaagaaattgatataaaaaatgattatattagaaagtgcaaagagaaaattaaaatgcttgaaatggaagtttccgatttaaattcagaatttcagctggatagagaggattatttggacgaaattcgcaaccttggacgtcaagtgaagttccatcaacaactttttttgaaattttcttcaaatcccggaaaatttgaccggaattggtaa

SEQ ID NO: 25710 - protein, 456 aa, DROSOPHILA
MTTNVRYLALVTYLEIYNERIRDLLNKNENTNVINHFLKELPGIGVSVPTLTTQPVVNANQCYDWLHFGNKNRVTAATLMNKNSSRSHTIFTITLEQSPFLNSIGSDAFGGICRGKLSLVDLAGSERQRKTGAQGDRLKEASQINLSLSALGNVISSLVDGKAKHVPFRDSKLTRLLQYYFNKDSLGGNTKTLMISCISPTDIHYDETISTLRYASRAKNISNKPKINEDPKDARLRQYQNEILYLKRMLQESQQIINKNNDPNKIIKSPLKIIQHTNMNSTKNVQIIDLGRNCKASFKTNNSILTKPNFPLIQSKEEVQLQARSRIDLIKRSLIGGERIHDFELKEKHMARKYAAQRHLSAIAIALSRVKCEDRDLLQGHYATITQEIDIKNDYIRKCKEKIKMLEMEVSDLNSEFQLDREDYLDEIRNLGRQVKFHQQLFLKFSSNPGKFDRNW

SEQ ID NO: 25711 - DNA, 4652 bp, DROSOPHILA
gataacttaacaaagagcatttttatattggtcgtttttatatttttcaagtttttgaaaatgatgcgtgcgtgcttatgacgtaaaaaaattgaaacaaaatttacgttaaagctcgtttttttaagattttacccaaaatatttggaaaaacaatatatgttgtttttccattttatgcatgattaaaacaccggggagtaccgatttctgaataggatacttaaactttctcttctgattcagcagttaagatcgtagcttcaatcagacttgggaatcactcttttagtggcaatcatcataaaatttcagttgcttcaatcgtcaactatcgtgaccatttcgcttcatttgatgtgtttcgtgcattgcgcttatacaaggggtacaatatagttaagcaaaaatgtgtgataaccttacaccaatttacattacattcaatttatttaaataatttattaaagaataaatattattctttaatatatttaataataaatattattaagaataaatttataaagaataaataaatactttgttctttgacatacaatgcaggtaaaaactattttaatagaaccccattaataaatttaaatttcagttgttaactaatgagatttctattactggtttcttagtgcacattttaattttttggtccaatcacttctaccgttttgccactaatactaccggtattaaaattagagaattaatgtatattttgaactgtattgcagaaaaacgcgaaatttactttattgcaattattgacgttcttacacaatatggagtaaaaaaacaggtatttcatttaatacttaaaagaaaggttgtaattttaacagcatattttaggcagctaaagcagccaaaactgttaaatatggcagtaatgttgacggtatatcaacctgtgaccctgaacaatatgccaaacgattcttggactttatggataaagctatagaataaagtattatactcattatgtatttgccacattcaaaatgtcaaaaatgtatttatctaagacataaaatataagatattattttgaagcttccagatgatcatcttttggacgaatgcaaatatattgccttaaatatccatttagaaataattcggatttagtgaccatcacgatgttactagaaaaaattggtgagtcgggtaaggatatttattctactgcacttacaacaaaacgttttatttgagtttttgatgggttctccatagcagtttccgattttttcatattttcaaagcgttcccgtattctgaaattaaaggaccattaccttgcaaattagtcaagatacataagtaagtttgatcttacgctttggcactttcaatagattcgtttgaaataagctgtgaatatacatcaatgcgaccttcctttatttcttgttctatttcgttattttgccatttttcaaatttcgctctcaattgcttagctcgtgcaacactttgcgcctaaaaaaacgagaagtgtatttaatgtactttgtaattacttctggtaacttaaagctataaaacattaaagactctttagttgttattgggagtacaggacttattacactggccaactttttcttgaaaaggtagtaccaagatcaccgaattaaacttattatgtaatagatttagcgaggagcaggttcgtagcattctctttgtcgaggacttctcctacagcaattacatgtaattacaaaatttcatcgaatctaattttaaagaactttgaccacaggcaggcttacaataaaaaatgtttggccgttatagtgggcgtacgtggacgtttttgccatattgatatatatgtgagatacacaatcaaaaaaaatgtataaatgttcgttactcatagataaaaataataaaaaaaaaaaacaccgaaaaaaactggaaatacatataataaactaaaatttacaaaagtgtgggtgtgggaccggtttgtgggcatggccaaattagggcaacatgggtcaacaaacttgcgctacgtctatgtctttagaatctattgatcctgatcaataatatatgtacgttataaggttgcaaacgtttccttctacctgttacatactttgaaacaaaactagaatacccttttactttatgtgtaacgggtatagcaagagttagcattcactctttaaaaaagatttaaaaaaattttaaaatggaaaggtgtgggcgtgaaagttttgggcggggcaaaaagtattttggtaaatttatagaaatttacaagagcaataaaaaattaaaaaagatcaaaactttttgctaaattgtggccgtggcagttttgagcaaattgtgggcgtaagagagggcgtgtcaaaaatttgttcgaaaaatcatagaaatttacaatactaataaaattatgaaaaaatatccaaacaatttacaaaagtgtgagtgtagcagttttgggtggtgtgtgggtattagagtgggcgtggcaacatgggtcaacaaacttacgctgggtttatgtttctagaatctgtatgcttaatcttaaccttctagctttaatagttcctgagatctcgacgttcatacggacaggcagacagacggacgggcagggccagatcgagtcggctattgatcccctgatcaagaatatatatacttttatggtcggaaacgcttctttctgcctgttaccaatacacgggtataccaatcaaaacatttttaaaaatctgcatatacatacttttcaaggaatctactttttaatctacgagtaacggttataataaggtacgattgaaattcatttaaaaaacgttcataacgcctgtctcaagtagataaataagcataatgcataaaacgcatataaaacgcatataatatatataatataatgtttgggcttttcattgaagtttaagaaaatcttacctcgagaagtgccttatcgttgtaataagagtttgaagggttaatttcagactcttcgtcgttttcactattttgttcgtagtcactgtcgctttcctcctcagtatctgatctaataaattgatgtgaaatttcaggtggtggagtaaaacacttcaatggctttgggtttttttttttttgttgatcactcattttttgttcctccatttcgcgaaacttatttaaaatagtggacgttgttttcgttttctgcaaaatgttatcattgaataaagtcgtgctaatttgttgattcgtttcggagtcaggaggtggaaacattacaacgccctcacgtggcggtgtcatgcggaatatcctttttttattttcggccggagaatatgtttcgaagaatttaaacttttttgacaactcttcagtggcgaccttaacttcttctggctttgagtcggatttgacaatttcaacatcgctattctgtattttttaagttatgaaaataagaacgttctaacttttttaattatagactcacctcctgcactttttgattatgtatctgatattttttatcggggagggtatattgtacatgattgcttaaacccgattttatatttgcatctagtttcataaagatgtttcttgatgctttgcttattcctgtattattaaaaaaggttaggtatatttagcaaagctattattatattaagatatactttacttataacaggttcgtaaaaacacaaactacgaaaaaattagtaaaaatacatagtgcgcagttttacacaagtgcctattttgcaattaactgtgctgttacgaaggctgttatagtatagccttaccagattcgaatacatccgcatcctcatgaataccacaacttacttcgcttgatagtatcttactatctttataaacttcaccgttctcaaatcggttctttatttcctgagtgggcttaatagcacaaatatctggggttttgccaactgatgtaacgggttgttctgattcagcaacagctaatttatacatttcttttattttggcttgtttacccagaaacaatcgagagcgtatgttttgtatttcttgttttctttcctcgcggcgcccttcctttgccattaagtcaccttgctcaaacttagatcttatatcgttcatggcttcccccaagcctacaggggtttctctttcgatctccttttttaagcacataaaattcatgtcgccatcgccatcactattattgtcactgtttttatcgtctaatttggttagttctgaattaggtatccctagcccatgaaacttagtcagtgtagactgtattgacttgctatgcgtaatagcaatatcttgacgttctcgtaaattattgttatgttcttcatagccattttcgaaaactttaaattttgagcgcagattaagttcttggagctcgtcaaggccaagacttggtttatcggatgctaaaatagttaataattatatttgattatatatattcattcttaccataaatgtatgttgaataaaatgaataaattttttattagtacattttccacatttcatgaacacaatataagaaaaaagtttactacttaatctggctggaacgacgaatgatatgtgttattgacttctcgccc

SEQ ID NO: 25712 - DNA, 1012 bp, DROSOPHILA
aataatacaggaataagcaaagcatcaagaaacatctttatgaaactagatgcaaatataaaatcgggtttaagcaatcatgtacaatataccctccccgataaaaaatatcagatacataatcaaaaagtgcaggagaatagcgatgttgaaattgtcaaatccgactcaaagccagaagaagttaaggtcgccactgaagagttgtcaaaaaagtttaaattcttcgaaacatattctccggccgaaaataaaaaaaggatattccgcatgacaccgccacgtgagggcgttgtaatgtttccacctcctgactccgaaacgaatcaacaaattagcacgactttattcaatgataacattttgcagaaaacgaaaacaacgtccactattttaaataagtttcgcgaaatggaggaacaaaaaatgagtgatcaacaaaaaaaaaaaaacccaaagccattgaagtgttttactccaccacctgaaatttcacatcaatttattagatcagatactgaggaggaaagcgacagtgactacgaacaaaatagtgaaaacgacgaagagtctgaaattaacccttcaaactcttattacaacgataaggcacttctcgaggcgcaaagtgttgcacgagctaagcaattgagagcgaaatttgaaaaatggcaaaataacgaaatagaacaagaaataaaggaaggtcgcattgatgtatattcacagcttatttcaaacgaatctattgaaagtgccaaagcaatacgggaacgctttgaaaatatgaaaaaatcggaaactgctatggagaacccatcaaaaactcaaataaaacgttttgtttaacatcgtgatggtcactaaatccgaattatttctaaatggatatttaaggcaatatatttgcattcgtccaaaagatgatcatctggaagcttcaaaataatatcttatattttatgtcttagataaatacatttttgacattttgaatgtggcaaatacataa

SEQ ID NO: 25713 - protein, 269 aa, DROSOPHILA
MKLDANIKSGLSNHVQYTLPDKKYQIHNQKVQENSDVEIVKSDSKPEEVKVATEELSKKFKFFETYSPAENKKRIFRMTPPREGVVMFPPPDSETNQQISTTLFNDNILQKTKTTSTILNKFREMEEQKMSDQQKKKNPKPLKCFTPPPEISHQFIRSDTEEESDSDYEQNSENDEESEINPSNSYYNDKALLEAQSVARAKQLRAKFEKWQNNEIEQEIKEGRIDVYSQLISNESIESAKAIRERFENMKKSETAMENPSKTQIKRFV

SEQ ID NO: 25714 - DNA, 2279 bp, DROSOPHILA
attggataattgataatttataatttataatttataatttataatttataatttataatttataatttataatttataatttataatttataatttataatttataatttataatttataatttataatttataatttataatttataatttataatttataatttataatttataatttataatttataatttataatttataatttataatttataatttataatttataatttataatttataatttataatttataatttataatttataatttataatttataatttataatttataatttataatttataatttataatttataatttataatttataatttataatttataatttataatttataatttataatttataatttataatttataatttataatttataatttataatttataatttataatttataatttataatttataattattatattataataataataataataattataaataatctctttagttgagatttttaccaattgaactgcttccatgacatatttaaaaagcctgtcggtttcatacaacatagaatgtatggatgtacatacttccatttattacatcaagacttgatgtactcaaagctaaattttagcaaccataaattgatattcaatcagtatatttatgtatgttccttttgtaagattattcttatcttgttttatatgattttatagacagatccatataacgtacacaagttgtatgtttgcttgataagattatactatagcgctaatcatacttcaaatataaagcttttgcgcacatgcgtacatacgtatgttcaaatgaaaaggatgtacttttgattatatatatgtatttatttcagtatacattcatatcaatacgaacatatactgatcattaaaataaatattaacataagctcaggcattgacaacgctgactgtatattaatgtgcaatatatttacattgcaagatacttacatttcattatgccgtatacagcgtgatgatgatttcaattcatagaactccatattctcagtaacatttggtaagaaatccatattgtcgttatcattcaacaagtttatatttagatcaaactccatatcaaagcccaaatcgattccagattccgtcatatttaggattaaattttttatacttaggaaattttatatacccaactaacaatatacatagaacaatttttattttttactaattatgaagttcacataatttcgcctcagcagttaaagattcggaactactaatgaatacctaaagtttcataacacgtatagagcttttaatagtggtgagaatatgacagtaagtgatcgcacatatatcgtgatgttaaaagagcttagagaactgccagtatctcaataaaattttaagatataattatcttgtattttactatcaatatagtaaaaaaaatcattcaatgtacaacgacaatttaactaaatataactaaatatatgtaatttgcataattatcatattatgaaggaaagaaatcaagctatatatagcggcttcttagacaaaagtgatacaactaaagtttctttctcctaaagtttttaagtatttttactcttccccttattaggattttctttttcttattagattaattttaaatttttaaacttatcatattacatttcactttgaaatatataaaatatatatatttttaaataagaaaattaaaatacaaaacagctatcaaatcgaaagttttaaacagaatgaagtagtttggtatgattatttatccgatgtacttcagttttttccgactctactgaaaaggggaagtgttaaccgactctaacacaaaagatattttcagcattgttttttctacaaaatattcataaacgttattcataaaacgttaaaaataaatatttattgtgcttttattattgtcaaaacatgaacaataaagcatgcagctttattttcgtaattgaattaagaaagttatctttggcaagccgaatcgtaaagtaacggtgtaaacagattaaaaacaaattaataaaaactaatgaagttattccggcatgctctggtaatggtcattttttggatttgggcaaaatctttcgatttcgtttttaggtgctctggttttcgcaacatttctgatatcgggatgcttcataaacagtaaacagctgtttcagaccatagagcggccatcttattcacaattttttaaattttata

SEQ ID NO: 25715 - DNA, 279 bp, DROSOPHILA
ctgctgaggcgaaattatgtgaacttcataattagtaaaaaataaaaattgttctatgtatattgttagttgggtatataaaatttcctaagtataaaaaatttaatcctaaatatgacggaatctggaatcgatttgggctttgatatggagtttgatctaaatataaacttgttgaatgataacgacaatatggatttcttaccaaatgttactgagaatatggagttctatgaattgaaatcatcatcacgctgtatacggcataatgaaatgtaa

SEQ ID NO: 25716 - protein, 54 aa, DROSOPHILA
MTESGIDLGFDMEFDLNINLLNDNDNMDFLPNVTENMEFYELKSSSRCIRHNEM

SEQ ID NO: 25717 - DNA, 6077 bp, DROSOPHILA
aaaagtgcccgttttacaaatcaaaagatcgaaaatttttgtagccgaaggcaacatgttgtttgtcaaatctgaggtttaatcagaaataaatattttataagatatctatgtggcagaatgatcttgtggggtgatgtggagtaaagaaggtaccactaagatctgatttgatataaatataggcatttacttttcatttcggccaaacaaaagtgaaaaattcttgcgaattcaaaaaccggagcaccaatttttcgatttcacatcgaaatcgtaagattcttacgaattcgaacacaggagcaccagtttttcgattttaaatcgaaatcgtaaaattcttacgaattcgaataccggagcttgcccgattatattttattttataaattcaatttttcccgagcgctaatatggcagagaatttcgatcaactcacatttgtgttccactttaaatttgtcttcatatcagagcacgtgcttttggttttctaaaaacaactcctacaaaaacctttatatttaatatacaatgcggttagtctctttgtttgatctaaattgtttctcttgagtattgcttgctattattaaaagattttcaactctctgaagtccttttagaagcatagaagtatttagaagatttaagagttaaagtattaaatagtttgtgatatcagaattacttttaagtggaaacggcgtttcataagccgatataaaaaacaataaatacatatctgaatttatcgataaggtatttcatattataaatttatgtaaactacaaatttgtctgttcaaaagcctgcgagtcattgtaaaatacaataatcatatctgcaaagtaaactaaatttattatgaacgctgggttattttagttttcaataaaatgtaataccaaagttctgtttaatgtaaattggtaaacaatttacgtgcaactctatacattgtattaatcaattttgggctatatgtgtatatagatatataagtgaatgtatatattcaatgttacagcatgtattattaaaaatattagttttttaagtggctcatcagctctaaatttaactttgcttaatttgttcagtaatgttaaactatatttttgattttagtaattttagccacccaaaatatggaaaaaaagatctcatcgtcatcccagccccggattttaaaaaagaagcacttcagggttaagcatcaaaaggttaaattatttagagccaatgaaccaattttaagtgtgttcatgtggggaataaatcacactgtatgtaacaaatattaaacaagaaaggcaagataagctaatttgaaatatttccagattaatgaattaagtcacgttaatatacctgtaatgcttttgccggacgattttcgagcttattctaaaattaaggtggataatcatctatttaataagtaagaaaccaaaacaaatacatttttgatattctcaatcgttggtattttcctgttattatatccactacagagaaaacatgccgtcacatttcaaagtcaaggaatattgcccccttgtgtttcgaaatttacgtgaaagatttggcgttgatgatgttgattaccgcgagtccttaactcgatcccaacctattcaaattgattcgtctggaaaatcaggagcgcaattttatcagagttatgataagttttttataataaaaagtttgacatcggaagaaattgaacgaatgcacgcatttttaaagcaataccatccggtgagtaaagtatggtttaattgactaaaatatccttattataatttttagtacgttgtggagagacacggaaaaacgctgttacctcaatacttgggaatgtatcgtatcactgtagaaagcgtgcaatattacttcgttgtcatgaggaatgttttcagctcccacttgacaatacacaagtatgaaatatgttgaaagttacaccgattatatgtatagtataaccattatttattcgatagaaagtttgatttaaaaggtagcaccgttgatcgggaagcatcagaaaaggaacttgaaaaaaatttgccgactttcaaggacaatgattttataaaacaaaaagtgaaattagacattggaaaggaagctaaggacaaactaatggacacgctgagcaacgatgtggatgtaagcaaaaatttttattttattcgtataataattgtttttatcaaaatttaaacaagaaagaatgcgagtttcccgactatcagatatccgttactcagctagtggaaagtcaaagcgaaatttaattggggaatcaaatgagaaacaagggagaacgctatagtcgggttccccaactagttgccctaatattaacggcattagatgggaggagaaaaatgtgaattgactggacgaagaagttcgctagaaactgcgacacaactaataaaattaaataaaatttgttataaatgtgggcgacaggtggcaataagttttttggcatatcaatagaaatttacaagactaaaaaaaatatgaaaaaatataaaaacaatattcaaaagttcaaatcttcatgtcttcatttaatagtttctgagatcaaggcggtcataaggattgacgttcggattcagacattgatcctgatcaggaatatagcgtccgaaacgcttcatattacctgttatatactttccaacaaatatagtataccaatttaccaaagacaatagaataacaagatgcgtaacgccatacgatttttttttggcgtggctttagaggtggctccaggctctctcgaatttttgttcaagagcgagagagcggaaatctctacagccagcagctcttttctacgcgtaccaatagtaccaatatagtataccaatttaccaaagactatagaataacaagatgcgtaacgccatacgatttttttggcgtggctttagaggtggctccaggctctctcgaatttttgttcaagagcgagagagcggaaatctctacagccagcagctcttttctacgcgtacagtgacagccgacaactgtacgtatgctcatgcattgtaaatttgacgaaataagcccttcatcttagaagttcttagactttaaatctacattatttttgatcaattggcaccatgtacaaatttatttgttttgaattgccttaacgttgtttttatttaaatatagcttagaaataataatagcctaatcttctatgtacataataccagaaaataaatttcaaaaatgactttatattagaatatttgtcattagagtattcagcttgcgacgactagacttgttgaatcgatctgaaacatcgaaatttgggaagctgtaagtgctataaggagtgcaattaacatatcgaggatcatcgtcttacatatcttgaatgttattaattcatagggactacaaatttgtcgccttgcacattttatataaatttcaggtcttgaaaatcatacgaatgtgctgccattttcaagcatattgcgttaaatctaattcataaaaaaaagtcctacgaagtggtacttgaaaaccatttaatctgaacaaatttatctaaaaacctttaaattgttgtagtttaacctatataaccagtagatataattatgtcttgcatgacttgataatttatttatttataaatataaattaccaatactttttgatagcatatggtgacatataatttattttagcttttaaccaagttgcacattatggattactctttgttggtcggcgtgcatgactgtgttcgtgcagaggaggaagctttgcagggagataatatactaactgttggtcgcagtgagaacagcgaaagcgaggaatgcgatagcggggaacggtaaataaaaattattttatttaagccttaaatgtacgcagttcttgttaaagctggacgtataacactcctcccgattctccaagaggtgcacagtataaggaagtcgtttatgaagttgatatatatgacattccaagtattgaaggtaaatgtagtttaaaagttttgtacgcaatagccctgataacttaacaaagagcatttttatattggtcgtttttatatttttcaagtttttgaaaatgatgcgtgcgtgcttatgacgtaaaaaaattgaaacaaaatttacgttaaagctcgtttttttaagattttacccaaaatatttggaaaaacaatatatgttgtttttccattttatgcatgattaaaacaccggggagtaccgatttctgaataggatacttaaactttctcttctgattcagcagttaagatcgtagcttcaatcagacttgggaatcactcttttagtggcaatcatcataaaatttcagttgcttcaatcgtcaactatcgtgaccatttcgcttcatttgatgtgtttcgtgcattgcgcttatacaaggggtacaatatagttaagcaaaaatgtgtgataaccttacaccaatttacattacattcaatttatttaaataatttattaaagaataaatattattctttaatatatttaataataaatattattaagaataaatttataaagaataaataaatactttgttctttgacatacaatgcaggtaaaaactattttaatagaaccccattaataaatttaaatttcagttgttaactaatgagatttctattactggtttcttagtgcacattttaattttttggtccaatcacttctaccgttttgccactaatactaccggtattaaaattagagaattaatgtatattttgaactgtattgcagaaaaacgcgaaatttactttattgcaattattgacgttcttacacaatatggagtaaaaaaacaggtatttcatttaatacttaaaagaaaggttgtaattttaacagcatattttaggcagctaaagcagccaaaactgttaaatatggcagtaatgttgacggtatatcaacctgtgaccctgaacaatatgccaaacgattcttggactttatggataaagctatagaataaagtattatactcattatgtatttgccacattcaaaatgtcaaaaatgtatttatctaagacataaaatataagatattattttgaagcttccagatgatcatcttttggacgaatgcaaatatattgccttaaatatccatttagaaataattcggatttagtgaccatcacgatgttactagaaaaaattggtgagtcgggtaaggatatttattctactgcacttacaacaaaacgttttatttgagtttttgatgggttctccatagcagtttccgattttttcatattttcaaagcgttcccgtattctgaaattaaaggaccattaccttgcaaattagtcaagatacataagtaagtttgatcttacgctttggcactttcaatagattcgtttgaaataagctgtgaatatacatcaatgcgaccttcctttatttcttgttctatttcgttattttgccatttttcaaatttcgctctcaattgcttagctcgtgcaacactttgcgcctaaaaaaacgagaagtgtatttaatgtactttgtaattacttctggtaacttaaagctataaaacattaaagactctttagttgttattgggagtacaggacttattacactggccaactttttcttgaaaaggtagtaccaagatcaccgaattaaacttattatgtaatagatttagcgaggagcaggttcgtagcattctctttgtcgaggacttctcctacagcaattacatgtaattacaaaatttcatcgaatctaattttaaagaactttgaccacaggcaggcttacaataaaaaatgtttggccgttatagtgggcgtacgtggacgtttttgccatattgatatatatgtgagatacacaatcaaaaaaaatgtataaatgttcgttactcatagataaaaataataaaaaaaaaaaacaccgaaaaaaactggaaatacatataataaactaaaatttacaaaagtgtgggt

SEQ ID NO: 25718 - DNA, 1219 bp, DROSOPHILA
atatataagtgaattaattttagccacccaaaatatggaaaaaaagatctcatcgtcatcccagccccggattttaaaaaagaagcacttcagggttaagcatcaaaaggttaaattatttagagccaatgaaccaattttaagtgtgttcatgtggggaataaatcacactattaatgaattaagtcacgttaatatacctgtaatgcttttgccggacgattttcgagcttattctaaaattaaggtggataatcatctatttaataaagaaaacatgccgtcacatttcaaagtcaaggaatattgcccccttgtgtttcgaaatttacgtgaaagatttggcgttgatgatgttgattaccgcgagtccttaactcgatcccaacctattcaaattgattcgtctggaaaatcaggagcgcaattttatcagagttatgataagttttttataataaaaagtttgacatcggaagaaattgaacgaatgcacgcatttttaaagcaataccatccgtacgttgtggagagacacggaaaaacgctgttacctcaatacttgggaatgtatcgtatcactgtagaaagcgtgcaatattacttcgttgtcatgaggaatgttttcagctcccacttgacaatacacaaaaagtttgatttaaaaggtagcaccgttgatcgggaagcatcagaaaaggaacttgaaaaaaatttgccgactttcaaggacaatgattttataaaacaaaaagtgaaattagacattggaaaggaagctaaggacaaactaatggacacgctgagcaacgatgtggatcttttaaccaagttgcacattatggattactctttgttggtcggcgtgcatgactgtgttcgtgcagaggaggaagctttgcagggagataatatactaactgttggtcgcagtgagaacagcgaaagcgaggaatgcgatagcggggaacgttttgccactaatactaccggtattaaaattagagaattaatgtatattttgaactgtattgcagaaaaacgcgaaatttactttattgcaattattgacgttcttacacaatatggagtaaaaaaacaggcagctaaagcagccaaaactgttaaatatggcagtaatgttgacggtatatcaacctgtgaccctgaacaatatgccaaacgattcttggactttatggataaagctatagaataa

SEQ ID NO: 25719 - protein, 394 aa, DROSOPHILA
MEKKISSSSQPRILKKKHFRVKHQKVKLFRANEPILSVFMWGINHTINELSHVNIPVMLLPDDFRAYSKIKVDNHLFNKENMPSHFKVKEYCPLVFRNLRERFGVDDVDYRESLTRSQPIQIDSSGKSGAQFYQSYDKFFIIKSLTSEEIERMHAFLKQYHPYVVERHGKTLLPQYLGMYRITVESVQYYFVVMRNVFSSHLTIHKKFDLKGSTVDREASEKELEKNLPTFKDNDFIKQKVKLDIGKEAKDKLMDTLSNDVDLLTKLHIMDYSLLVGVHDCVRAEEEALQGDNILTVGRSENSESEECDSGERFATNTTGIKIRELMYILNCIAEKREIYFIAIIDVLTQYGVKKQAAKAAKTVKYGSNVDGISTCDPEQYAKRFLDFMDKAIE

SEQ ID NO: 25720 - DNA, 2647 bp, DROSOPHILA
caatagtccaagggcagatctgtgttttcgcgcagaacgccgtggagatcgctatattgtcgctctcaggtgatctcaatgttctcaagtgatctaacgggtcgggggactccagttccttatccacaattttatattatattatattattattttatatatatctttgatttttcatatgtttacttcatcgggagcttctccaagtgtattcttgtctcctaacgcggctatttttgtccgcgcgcttagccttactttggacccttttatttctaatacaatattaattaagataaacacaaatcgcggggtctcaatttatttgcggctgtgaagggaaggggtgctctacggatgctccactacacggcctgacttggttcttttctctctttctgtccgcttaaaaagttaaagccttcgcgtctattcccccgatattcaaaaccctttgactgccccagtcgaaccttgggggtcagggcggtagcgctgctgggcgatggctcagtcatgcgaagatttttccagatttaaattccgcctggaaaacacacacaaaaacttagaccgcacaccattttgtggcaaggaaaactcactctaataatatatttccgcactaaacaaaatttacacgcccgcaggttataattttacaacaacacgaacctttcacgactttactaggccatgagcgaaaatcacgatcagttgaaagtcactctatttgcgacaaccaaattataccaaaactttccgggttcagctgataaagagttgcatctcgtctagtatattccccatgcataatactgcatttaatatgaccctaaataagaatcccacggttaagcgcaagcttcctaaagtttgtctatctggagctttcaaagtaatctaacataacagcttcagtcgccactacaaaacccccgctacactcagactagggtactcatgaagacaccctaggctgagaccgactgaaggtaccttattgccgaatatctttggcatatgtacccataactcgtccttggaggtgttccagctcgtagtacgagttgccgatcttcttacgacctcgagatttcacgaacgtaggtctgagcttggcgttataacctgtttgaaagcagctttgcttgaaattgcgccgatcatgtgctgcccaaataccatttaataaggacttgtaccaatattagaatgtactgcagaccttaatccataacatattcgactgagaaattcatcccaatccatttggtcgaggcgtagatatgcgtggattgcagcaattaccgaccggtttaaacgctacgaagcgtttgtctgaggcgagtgaacagtggccaacatgtgcttaacgccgtaccgttctagctcgaaattcagaaccgttgtctgacagtatcacttcggggactctgaacgtcattaacaattcgttttccagatactttatgacgacgtgggaatcgattttttttactggctttaagaatacgttcttcaaaaaatgatccacgacaataaagatacctatgtagccgctccttgacctaggatgcggccggaaaaatcgataaataaacgttagatgaatcgctgagactcaggcgcttttcctagcggcggtgctttagtagtctcacaaacctaacatgcggtatgtcagaaacgataccaggcctagaattttttttgtttttaaatttttttctttaaactacaacctttttttaaaaaataacaataagtaattggttaactagatgtgaaaaagaaaagtagcgcccttcccagtgcaaggatacgctaatacattaataattttattgtttaattctgttggagttctgcgttttaatcttcttggtttcaactctgtcatcggtatttgcctcaagtttgtgttttggtggctaagtagttatttgtgtgttttttgctgttttttttaaatagtttcgttgactgtttctatgtttatgtcattatgtatgtcttcgtttctaatgtaatattcgacttttgtgattattctgagcgtttttgattgcgttcgctggcagttccccagagttctattccatacgtccatattggttttattatcgctttggatattgctattttattatgtaattctagttttgagtgttttcctattagccaattaagttgtattacttgttgagttttatcttaagttatttcgataccccatctctcaaaccaggatacctgatacccttgatccaggggttgttggcgctggaatatcggaggtataaatcgggtataatatgggcccaagcacactaccttggggaacacccgctgacattggcataatatctgagcattcattgtcgtatttaatatagaaaaatcggtcctttatatagctttgaggaatggtatataggttatatggtagtatatttcttagcttatgtagcggtcctttgtgccacactctgtcaaatgctttagcaatgttcaagtacacagcatatcaaaatttatttttgtcaatatcgtctgttatattgttaattactcgatggacctgttggacagtcgagtgctgcttccgaaagccgaattggtgaggaggtattatatttttttg

SEQ ID NO: 25721 - DNA, 542 bp, DROSOPHILA
ccgccgctaggaaaagcgcctgagtctcagcgattcatctaacgtttatttatcgatttttccggccgcatcctaggtcaaggagcggctacataggtatctttattgtcgtggatcattttttgaagaacgtattcttaaagccagtaaaaaaaatcgattcccacgtcgtcataaagtatctggaaaacgaattgttaatgacgttcagagtccccgaagtgatactgtcagacaacggttctgaatttcgagctagaacgcgtttaaaccggtcggtaattgctgcaatccacgcatatctacgcctcgaccaaatggattgggatgaatttctcagtcgaatatgttatggattaaggtctgcagtacattctaatattgatttcaagcaaagctgctttcaaacaggttataacgccaagctcagacctacgttcgtgaaatctcgaggtcgtaagaagatcggcaactcgtactacgagctggaacacctccaaggacgagttatgggtacatatgccaaagatattcggcaataa

SEQ ID NO: 25722 - protein, 113 aa, DROSOPHILA
MTFRVPEVILSDNGSEFRARTRLNRSVIAAIHAYLRLDQMDWDEFLSRICYGLRSAVHSNIDFKQSCFQTGYNAKLRPTFVKSRGRKKIGNSYYELEHLQGRVMGTYAKDIRQ

SEQ ID NO: 25723 - DNA, 2617 bp, DROSOPHILA
taatggcccttggccaactctcgagcccagcggaaatgccagccgaccaacgatgataacggtaatgataatgatgatgttgatgtcccccggtttggggtcatgacggaaaggatagtggccgatcggggcgtggcagctgagcggtccatttaaagctgattgctctgaatgcatcttggctgggtgacatcgattacatttaatgcagttaaatattaagtaaatgttaaaaatgtacaacaaacatgtggttataagaattaagaaatcctacataaatttatttacaaatgttataaaattattatacccgttactagtagaataagagggggtatacttgattcgttgagaattatgtaacagctgaaatggatatattcttaaacaggatcgctaggcgagtcgatctagccaaagacactagaataattctagctattctagcgtctttgatctagccatgtccgttgtggttcgaaaaactaaaatagatggaaagttgagataaaatacgcagatttcatagatataaacgcacatgtctccaccacaaaatgaccactcaattttgaaaaatgttttcattttatgaattgttgaattgtcatcggtaggtaaagtccaccaggtcatgatcgacaagttgagtcaacaccatatacagcgcggctcagttttccacatccgtccgaattgtatggaaaacaacttagttgttaggccaagatagaatcgtttgctaacttttattcgcctatcattaacataacacgtttgtatcgaatttattagttgggttaaaaggtcatatatctatcatctaggtcatatcttctttatttagcattttctttgcatatcctcgaagagtgtaaaaaatcaattgtatacaattatccagcttgccgaattggtttgctacacttctttataaattattttaactctataaataaacaacattcaaaataactgtattagtggacttttctggttagcggaatgaagataatagcactcttagtattggcgaatctgggctttggtgagttcattgcagatccagattgagatatcagcctctaatatgacaggaaattacaatacattccacagcccttagtagtaaggaatatgatgaacacgaaaggctggtgacgtggagacttcgaaatattgtaaacaagtataaatacttagccaccggaaacgcggagttctcccggtggattgaaaaagtaaacaacgctgctgcccgaagtaaccttgaagtaaagttggacacagaaggttacttcaaagtatacgatgaacaacgccaattgcttgaagataacattactcagcgcttgaacacgctcagatccctaatatcattaagaaaaggaggcaagagatgtgtccgattctaccagcatcaggaaaatgaacttaagaatgcctacaagttctctaatcagaaaaaagaagaggtgtttgtgaatagtttgaagaaatgctttgcaccaccggcgatacaagaatatgattatgattactatctaggctattgatcattaaattgtccaatgaaatcgaataaaagctcgcttttggttaacctttatcgaacacctattctacccatataccaacaaattgttgaaaattattgttcgcaactgacaaatgggtatctgatagtcgaggaactgggctaaactggcgttggatgtgttgtagcatattggactaatctaccctaaaaataccataaatgcttgggtatacatagcgtcaatacattgggacactttgtcataataaatataaatatacaaatatacaaaaagaccaccaaaaactacgtaagcactccagcgccccagtaatacgatctaacgcttatacataagccgatcgcggagcgtgggaatgcttctgccttctgcatacatatgtatatgtataaatgtaagtaagaatacatagatataagcaatgtatgtgcgggttagctgaacccaacttcagcacactttgattattcaaataaagaacctcgaacagagcagaagctaagctcttctttcattaaacatcaaaatggcaacctttaaaatagcacctttcacagtgtgcagtcagatgtttgacttataccagggggcctagctttaactgcggtagatacattaatagttatgcctaaggggaacgccccccagctgttttgcggttttggaggaagtccagcttaagataccaacttgtctgcactggtttctcaaccagtgattttacctctcccgattagtttacctcctcaagggaatatagagtatagaatatagaatatagagaaaaattttatctgcagtgccaaaacacctcacgttggttccactaaagaaacaaatttttgtttctcggcattctcctgatcaagtatcctctgatatcttatatacaagaaaataatatagtcgagttccacgaccgtttcagatgcccgttactcagctagtgtgaatgcgaacgcgaaattatataattattcttgaatatcgatagatattggttaataaaatgagaaaaaaagttaaaaactgtttaaaagtgtggacgtgac

SEQ ID NO: 25724 - DNA, 546 bp, DROSOPHILA
ttagcggaatgaagataatagcactcttagtattggcgaatctgggctttgcccttagtagtaaggaatatgatgaacacgaaaggctggtgacgtggagacttcgaaatattgtaaacaagtataaatacttagccaccggaaacgcggagttctcccggtggattgaaaaagtaaacaacgctgctgcccgaagtaaccttgaagtaaagttggacacagaaggttacttcaaagtatacgatgaacaacgccaattgcttgaagataacattactcagcgcttgaacacgctcagatccctaatatcattaagaaaaggaggcaagagatgtgtccgattctaccagcatcaggaaaatgaacttaagaatgcctacaagttctctaatcagaaaaaagaagaggtgtttgtgaatagtttgaagaaatgctttgcaccaccggcgatacaagaatatgattatgattactatctaggctattgatcattaaattgtccaatgaaatcgaataaaagctcgcttttggttaacctttatcgaa

SEQ ID NO: 25725 - protein, 159 aa, DROSOPHILA
MKIIALLVLANLGFALSSKEYDEHERLVTWRLRNIVNKYKYLATGNAEFSRWIEKVNNAAARSNLEVKLDTEGYFKVYDEQRQLLEDNITQRLNTLRSLISLRKGGKRCVRFYQHQENELKNAYKFSNQKKEEVFVNSLKKCFAPPAIQEYDYDYYLGY

SEQ ID NO: 25726 - DNA, 4853 bp, DROSOPHILA
ctgatagacaaactttagaaagcttgcggttagctttgggattctaacttacggtcatattaaatgcagtattacgcaacggaaatgtactagacgttgcatctctttatcagatgcacccggaaaagtttcggttagagtaaatagagagactttcacctgatcgaaatttccgctgatggcctagaccccgctatatttttatataatataaaaaataataatataaaaaaaaatgtgtgcccgaggggaaaacttagtttacattatttatatttttaatgttatttaaattgaattttgtagtatttaacgtttttttatattatttaatctaaactaatttaattattttccctaagatgaatactttttcagagagtgcgtgttttcgggtaaaatttaaagttgttttgattcgaaattcaagtatgtgttcgtacattttcaaagtattcgtggaaaatgccacgctttaatttcagcacatttgcgccgggaaatcaatcttctgcagaagagaagaagatacattttggatacattgtggatgggttagatataccaagatatttcaaatttaagctgtacatcagcaaaaaatttcaagagcttaaagagcaattcgagatataccaacgcaactgcatgttcaatcaagtcaaatcgtacagtggtggcaagaaaatgccagccaccgaaatgtttgttgctttatttgagggtaagctgagcacctgagaagggagcgcaatacagatacaaaatgttttaaatgtgaaggcgtgggacatattgcacgggagtgtctacaagtatccagatctgagcagatggttcattcttcaaaacgacataaagcgataaacgtgaacaaacttgaaatagattgtctggtgggacacacaactcagttttcatgaaacttacaggcgtgcacagggaaaaatgtttaactgtactctgaggcctaggaaatgtaaaaacaatgccgttgggttcatttataggagccatgtgcgtcgatggagctgaggtagaataaaaacttgttgttgttgttgataaaaatattgatgatgacgccctgcttggttttgacttcgcatccaagtttcgtgacacattgaagacacctgaatctccaatcgaggtcgtctacaaatgatgatcggaccggatgagcaaataaaaccatttcgccatcaaccatgtcggtatccagctatggaagcggccgccgtaagggagaagacaacgtaaaatttcgccagtcgagtggtcatagtgaagtaaaaagacggaagaaacggacagtttccttgtacccttaattgatgaagtactagcagagctgcaatctgcaatagtatttactgtcatgaatctcgagaacatcttcttacatgtactgatcaatgagtttagtcgtcgctggactaattttatcaccaaatagggtttatttgagttctgttagcaccatttcgattttgcaatttaccttaacagttttttcaatacctttttcaaaacctgatacaaacaggtgccatgcatacctactttgacgatataatgatattcgctaaactgttctacagtaaaactgtatgcagtaataacccgaccgctaacaaataaaccgttgaataaacctgtcctgcagttttataacgggagagcaccaaccgaactacatactcattcttctttgaatgggtttggtggcatattaatgcacatccagttgaaagaaaacttcagcagcgaattcaaagcgccacagttatactctagaagttaaagcttagtatttatctgtcaagcagtttctccattacctaccacctactggaagtcaagttaaagttgctcgccgattgcgcagcgttttctcagacggtgaagaagaaagatgtacccagagaagtagctgaatggattctgtatgtcgaagaatttctcatgccgcaaccctacaaggacttccagtaaaaagcattttcaaggtagtggatggtatctagatcatagtcgtccttaaatcagtggagaacgatataataaaggaagcacctcatattggacattttgccctgcagaaaactatgcattccttgcagcaacatatttggattcctcaaatggaggaaaagtaggtcaaagcatcaacgattgcgtaaaatgtattccgatgaacaaaaaggtaggaaagaaagaaggtcagctgttctgtattgacaagatagataagccactgcacactcttcatattgatcatcctggaccaatggatgaaacttctaaacagtatcggcattcaccaaatttgtgtggctataagcgagagaggggtgatagaggggtcgcgtttacgtcaaatcaattctaaagcatataaagagaaattgaattgagcgtatgtggactacaacaggagtttcaagaggaaacggacaaattgaatttgtaaacaggtgtataatcttaatgatagctaaattgccagctgaatatccatccaagtggtattagtttatagcgcaagttcaaggagcactaaattcgcatgtacactgctccgcaaagaagactccgttccagttactatttcgagtaaaaatgcactacaaagttagcgatgtgttgccgttgctaaggaagaaataggcaatgttttctctgctcttagtggcagaggcgtcggcagaacattggcgtcgtcgctgatggcgtgatcggcagctaggcggagcattggagtggtttgaacttgattgagctggatcgaattgtaatctctgcaatttcggtgttgcgtgtgttcgtcgcggcggatttttataatattgttgaattaggatttttgaactcttgttttccctagaatactttgttgcacaattcttgcaggcaaagtactaagggttcattgtatcggccgtcgagaggagtaacaaaagtttctgttgttaactctcccccctcaggatcctacttgtcctcaagtgggtgttagaaatagggaatattgttgaattcgggctgtatcggctttggctttaaattatttgttttaagtttaatattaagcgtgggaagctcttgttgaatttgaatggttactttctctctgggcttaaagtggattttggagattattgaaagaagtatgaagtagtagtatggtgcccagtaagcacaagatcgcgatgtggtttatggtagagtgtgttgttatattatttaagtgctttgtgtttttgatgttgagggcctccaatgattccaatgacaaaatttttaacctctccacttctatgggtgacatttgaattattggtgttccgggttttaggatagatttttctttattgttgaattgcttgctatttatttgaacggtatcgttccagaaataaaccaggtatgttccttttatattgtaagttatgttgttgtgtattaagttgccggtgtagttgttaagtaatattaagctgccatcgatctcctctttttcctgaatatgttctgcattacttaagtcacacagcgcttcctttccctcaattaacttagcaatacattttgttttttttagatttacagtgctttcttttttacatattttaaagtaattggatattttacagtttttgggtacattaatgatttctttctgcgctatgaatatttcattcgtttctaagtgtataatagagttattttttataacgggttttatcaacatatcttgataggtagtggggtctagttctggtattttgatgatatagataatcgctgttttattatgtaatactgaaacatcaacaaattctagcatttctgcgattgataaagaggtaatattgttttttgaaatattttatttacttcatttagttcaaattcgtttaaaaggagtgtgttaattacgttaatttttgcccattgaatggtatatttaatgtttacaatttcttcttttatcaatctgacctgattttgcagacttgttgctattttattgttaaaattgttatccttttttattgagttcgtaagcatatttgagattgttgttaaattattgattctactttgcagttgtttattaactattacctgatcgttattgttagttataaggctatttaaattattttcgatcatagttaattcgtcatgattcggatttcctgccacaaatttccaagctgaaccaatccaattgattgatcgaactttgcgatattttgaggtcagagtacttaatgcggtaaatgcctaaactatttcgtgtgttagtgtatggtagaggtagctttcttttaagtcattaattgtgtgttctcgtattttgtacaattctgtttctagctgttctaggtctattagatggattaatttagttgatgatatttgtagtttccctaatcctttgtacactgagacggtttgagcgtcggtgtaattagtgatttccatatttgccaatgctaatggcagaagcattacaaataagaaaatcctgtaatggggaaaaggggaagaagaaaaaaaatgtatatgaaatcatttattcagtgaacgaattaattttttaagggtataggccgatacctcacgatcggatcgatacccgcaaacggacaacaattgtgagttagagggtatttattataaaaaaattttatttcattttatgtttcttacttcagacgaatacggacatgtttccctaggcagtatcggactaaaaaattttattattactcttgttttatgttactcttgtgaacgattcttcctgtttctgtgataatagttgtatgtctattttc

SEQ ID NO: 25727 - DNA, 864 bp, DROSOPHILA
atgctagaatttgttgatgtttcagtattacataataaaacagcgattatctatatcatcaaaataccagaactagaccccactacctatcaagatatgttgataaaacccgttataaaaaataactctattatacacttagaaacgaatgaaatattcatagcgcagaaagaaatcattaatgtacccaaaaactgtaaaatatccaattactttaaaatatgtaaaaaagaaagcactgtaaatctaaaaaaaacaaaatgtattgctaagttaattgagggaaaggaagcgctgtgtgacttaagtaatgcagaacatattcaggaaaaagaggagatcgatggcagcttaatattacttaacaactacaccggcaacttaatacacaacaacataacttacaatataaaaggaacatacctggtttatttctggaacgataccgttcaaataaatagcaagcaattcaacaataaagaaaaatctatcctaaaacccggaacaccaataattcaaatgtcacccatagaagtggagaggacaggtttattcaacggtttatttgttagcggtcgggttattactgcatacagttttactgtagaacagtttagcgaatatcattatatcgtcaaactggataccgacatggttgatggcgaaatggttttatttgctcatccggtccgatcatcatttgtagacgacctcgattggagattcaggtgtcttcaatgtgtcacgaaacttggatgcgaagtcaaaaccaagcagggcgtcatcatcaatatttttatcaacaacaacaacaagtttttattctacctcagctccatcgacgcacatggctcctataaatga

SEQ ID NO: 25728 - protein, 287 aa, DROSOPHILA
MLEFVDVSVLHNKTAIIYIIKIPELDPTTYQDMLIKPVIKNNSIIHLETNEIFIAQKEIINVPKNCKISNYFKICKKESTVNLKKTKCIAKLIEGKEALCDLSNAEHIQEKEEIDGSLILLNNYTGNLIHNNITYNIKGTYLVYFWNDTVQINSKQFNNKEKSILKPGTPIIQMSPIEVERTGLFNGLFVSGRVITAYSFTVEQFSEYHYIVKLDTDMVDGEMVLFAHPVRSSFVDDLDWRFRCLQCVTKLGCEVKTKQGVIINIFINNNNKFLFYLSSIDAHGSYK

SEQ ID NO: 25729 - DNA, 2867 bp, DROSOPHILA
tgtcaatccttttaggtatgccaacacggtttactatcaggattggatccgcaggactcattcaggatgcaagaatcgtgttaactaaaagagatacaaggagagagcgattaactggcatcattatgatgtatttttgtataaatatgtgaaataaatgtattgactaaagcaacgctgataacttttacccttactcatgtggtcattgcctgcttttagatgggcaatcacaattttatggaactgtttgctaacatgttatggcataagataatgtcatgctagggctgaaaaattgtttgttatatgtgaaattatttggcctaatctaatgtaataaatagtgataattacttttaatgaattcaaatggatcatctcgtaaactaagaatactgttgttgttcaattcgttgcatttccgttatcaaaatgtatagtccagattatagatcggcttttatttagacttttaggtatgcattaaaaaaaattagtaaattttgaagatggtaaagagaaatttcctgattgcaaacaaccgctggcggcatctccaaaaatgagatgattttaaaagattcaagattttttgaaaccttattaaaaatatattcaattagaatatgatattggaaaatacgacttgcttgatcaaatcaatatatcatttagatatttgacgtggatggtaatagatgcaaccctcggttttacaaagtccagtggtaatatccagcaagtgaccattctagatattattcttatccaatgacggcgctgacattgattgccctgtcacaaaatgataatcagtgtgcgtctatatctttttacgatatcaggctttatgacatagatacttggggcggaaacattgatttcgatttacgataaaaccccaagacttacgataaaacgttcgagtataaaagaaaaatcactgcccatatgcaggcttaattgtcgcattgaaagtcaagcacccaccaccattatggttcgactgggtgttgtgcagatcctggtgatcctgctagcttgtacttgctataagcccattagcgccgtgcgtttggcgcagcttagtgaggatcagctggagtggatctcgaaggcggaaggagtcaacttccagaatcgcgtaatcaatggcgaagatgtgcagttgggcgaggccaagtaccagatatcgttgcagggaatgtacggaggtcacatatgtggcggatgcatcatcgacgaacgccatgtcctgacggcagcccactgcgtatatggctataaccccacctatctgcgagtgatcacaggaactgtggagtacgaaaagccggatgccgtgtatttcgtggaggagcattggattcactgcaactacaacagtcccgactaccacaatgatattgccttgattcggctaaacgatacgatcaagttcaatgagtacactcaaccggctgagctgcccacagctccggtggcaaatgggacgcagttgctcctcacgggctggggctcaacggaactttggggcgatacgcccgatatactgcaaaaggcttatctcacgcatgtcgtgtactcgacttgccaggagataatgaacaacgatccgtcgaacggtccatgtcatatctgcacactgacgactggtggacaaggagcctgccatggcgattccggcggtccgctgacgcacaacggagtactctacggtctggtcaattggggttatccctgtgcacttggagttcccgatagtcacgccaacgtgtactattatctggaatggatcagaagcatgatctcgggaccatgtagcaactgtcactgctatgccagtaactatcccagcctgtgatccaaggggacgacgatatgctgagcaagatatacaattttgattaggtaagaatgtacggtgactaacttgtggaaataaaatcaatggcagattaacaataagaaaatcgtgttagtattccttctcagatagtcaggcaatatagatttctatatctacttttgagtgtttacccatattttatggtttattattaatttctatttcataactataatttcatatatgtaagtaaatttgacctttaatttatgagtctatattttcttgttaattgtgttttcaaattaagcctggataagcgaaggcgttcaaaaaaaaagtggagttatttttagatatggtttttttaattccacttgataataaaccacatttcaaaaggccacttttataatagtcttaatttttctttattttcctctgaaatctttctaacaatttactaattcaatttggtaagtaaattagtagtagcatttgttgttgccactgagcttgctgcgaatccagtcgaggtagtagtacacattggcctgcacatcgggcagtccgacaccgcatggtcgtccccaattgaccacacccaccaattggccattgctcaccagcggaccaccggaatcgccgtgacaggcgccctcaccctcgcgcgaaaaggtgcagatgtgacccacacccatgctgctggttcggttgaaggtctcatagcactcatccagaggaacaaggcccacggtcagcttgtgcaggtcctccatggaactcccgtaggccacatcggagccccagcccgtgaggacgatctcttcgccgagttgaaccggtctagttggcaaagcgatcggctgtgtcagctcattgaaggtgatgttctcggtaagcttcaccagggcgatgtcgttatgcatgtaaggctggtcgtacatacagtgtttgtggatctcggcggtgtagtagatcgctccgggctctgcccacttattggtgcccgtga

SEQ ID NO: 25730 - DNA, 867 bp, DROSOPHILA
atggttcgactgggtgttgtgcagatcctggtgatcctgctagcttgtacttgctataagcccattagcgccgtgcgtttggcgcagcttagtgaggatcagctggagtggatctcgaaggcggaaggagtcaacttccagaatcgcgtaatcaatggcgaagatgtgcagttgggcgaggccaagtaccagatatcgttgcagggaatgtacggaggtcacatatgtggcggatgcatcatcgacgaacgccatgtcctgacggcagcccactgcgtatatggctataaccccacctatctgcgagtgatcacaggaactgtggagtacgaaaagccggatgccgtgtatttcgtggaggagcattggattcactgcaactacaacagtcccgactaccacaatgatattgccttgattcggctaaacgatacgatcaagttcaatgagtacactcaaccggctgagctgcccacagctccggtggcaaatgggacgcagttgctcctcacgggctggggctcaacggaactttggggcgatacgcccgatatactgcaaaaggcttatctcacgcatgtcgtgtactcgacttgccaggagataatgaacaacgatccgtcgaacggtccatgtcatatctgcacactgacgactggtggacaaggagcctgccatggcgattccggcggtccgctgacgcacaacggagtactctacggtctggtcaattggggttatccctgtgcacttggagttcccgatagtcacgccaacgtgtactattatctggaatggatcagaagcatgatctcgggaccatgtagcaactgtcactgctatgccagtaactatcccagcctgtga

SEQ ID NO: 25731 - protein, 288 aa, DROSOPHILA
MVRLGVVQILVILLACTCYKPISAVRLAQLSEDQLEWISKAEGVNFQNRVINGEDVQLGEAKYQISLQGMYGGHICGGCIIDERHVLTAAHCVYGYNPTYLRVITGTVEYEKPDAVYFVEEHWIHCNYNSPDYHNDIALIRLNDTIKFNEYTQPAELPTAPVANGTQLLLTGWGSTELWGDTPDILQKAYLTHVVYSTCQEIMNNDPSNGPCHICTLTTGGQGACHGDSGGPLTHNGVLYGLVNWGYPCALGVPDSHANVYYYLEWIRSMISGPCSNCHCYASNYPSL

SEQ ID NO: 25732 - DNA, 2640 bp, DROSOPHILA
aagtattcttatgaaattcacctacaaaattctgctgttcattgccttaacaaaaacgatttccgatcacttaccggaactcctgttgcgcagggccatccccagttgaccagtcccaccaggtaaccattgctgaccagaggtccaccggaatctccatggcaggcaccttctcccagccgcgaaaaagtgcaaatgtgacccacatcacaatcttcatcgttgctcagcagggctttgcactcgcgatggggaacgtactgaaggtatagaacctgcaaatcgatgggactggtgccccagaggaccgtggatccccaaccagtgaggattacttcatcacccggctgcatgggcaccaagggcaacgggatcggctgagtgcgctcgtcccaagcaattggctcaactaattccaacagggcaatatcattgtgcatctccggattatcgtagttacaatggatatgaatggcttttaggaaatacctgcctcctggttggttatacttattagtgcccgtgacgacaaccagccatggaataaaggcattttcgacacagtgagcggctgtcaggacgaaggtctcgtttattatggcaccaccacaggagtgggcaccggagattccctgcaaggatatctgatagggagcgaagccatcctcagctgcctgaccaccgatgatccgttgatccttgtaaaaccgaccatccgttgagtttcccttgattcgtatggctgttatggatacgagtcccgaaagacccaacaaaataagtaaaaccactgccgacatcttgttactggccctggtcagctaatgaagttttcagtcgtacttgctgccttcttgaccatttatcggaatcagataaaaaatcagtttatggcgcgattgttggaacctttggtcaggccattttgactttcgtatagttcaatcaaaatcgcgaagggtaaaaccagactagctcagtccgcgattgcatttcagccatgtcgcttgcacgtttcctattttatattctcgtgttcagttcactctactgtgacttattggcattggagcacttcattgtgggtggccagaatgcagctgaaggagatgccccctaccaggtgtcgctccaaactcttttgggtagtcacctatgcggtggtgccatcatatcggaccgatggataattacggctggtcactgtgtcaaaggatacccgactagcagacttcaagtggccactggtacaattcgctatgcggaaccaggagctgtttattacccagacgccatctacctgcactgcaactatgacagtcccaagtaccagaatgatattggcctgctccacctgaacgagagcattacctttaacgcactaactcaggcggttgaactacccacatccccttttccaagaggagcttcggagctggttttcaccggatggggatctcagtcagcggcggggtcgttgccatcgcagttgcagcgtgtccagcagcaacacctcaactccccggcttgcgagtccatgatgtctgcctacgaggatctggaactgggaccttgccatatttgtgcttatcgtcaggcaaatattggagcctgccacggagattctggaggtcctctagttcaccagggcaccctggtgggcatactcaacttctttgtaccctgcgcccagggtgtgcctgatatattcatgaatataatgtactaccgcgactggatgcgacaaacgatgagtggcaatggcaaatgtgcacaggtcaaccagcagacaatagatggataaaaacatttgaactcattaaagaacctcaattcataatgtaattccttaatgctgtaaataatttattaatttattaagccatttaaacataagataattcccaaactgccagccttgtatcaaatatcaccaaacatgcaccaaaaccgcataaaacccgcaccaaagccgcacacaaatcgccaccaagccgccaagaagccgctaacaaatcgcgtgcaagtcgaactgaaaacgaagggcaggatgtatcctctacgggtcactcgtaagggatcattctgtacggggcatcctctatttttttaattacttgggttgctgtagttcacttgttttttggcgggagtggtgaattattttaatgtttctggaggcaagtgatattcttggcccacagccaggagtccgttcagtcggacagccggaatgtcttagtgattcagccacccgccgttttctgatttatttcggaagaagagaagtgtcgcactggtcacacgtgtcgtcctgatctaattggtagcaggtagacccagacagacgtggtcttagtcatgatttgagttgtgagaaaaatttcgacacaaatcgctcacggcgcatggaaattctgaaaatatttctatcggcactcgctgttcagatgggggaaaaacaaccgggaaaactctcagttgtgggctgtatcttggcattttgaaaaagattttcagttgctgtattgacttggacgtgtgcggtgcgggcctcgaattttcttggaatacgcggcgtatacgcaatccgtgagctatatgtagacgcgtgtcttgctcatatttttatatatacag

SEQ ID NO: 25733 - DNA, 640 bp, DROSOPHILA
atgtcgcttgcacgtttcctattttatattctcgtgttcagttcactctactgtgacttattggcattggagcacttcattgtgggtggccagaatgcagctgaaggagatgccccctaccaggtgtcgctccaaactcttttgggtagtcacctatgcggtggtgccatcatatcggaccgatggataattacggctggtcactgtgtcaaaggatacccgactagcagacttcaagtggccactggtacaattcgctatgcggaaccaggagctgtttattacccagacgccatctacctgcactgcaactatgacagtcccaagtaccagaatgatattggcctgctccacctgaacgagagcattacctttaacgcactaactcaggcggttgaactacccacatccccttttccaagaggagcttcggagctggttttcaccggatggggatctcagtcagcggcggggtcgttgccatcgcagttgcagcgtgtccagcagcaacacctcaactccccggcttgcgagtccatgatgtctgcctacgaggatctggaactgggaccttgccatatttgtgcttatcgtcaggcaaatattggagcctgccacggagattctggaggtcctctag

SEQ ID NO: 25734 - protein, 213 aa, DROSOPHILA
MSLARFLFYILVFSSLYCDLLALEHFIVGGQNAAEGDAPYQVSLQTLLGSHLCGGAIISDRWIITAGHCVKGYPTSRLQVATGTIRYAEPGAVYYPDAIYLHCNYDSPKYQNDIGLLHLNESITFNALTQAVELPTSPFPRGASELVFTGWGSQSAAGSLPSQLQRVQQQHLNSPACESMMSAYEDLELGPCHICAYRQANIGACHGDSGGPL

SEQ ID NO: 25735 - DNA, 3100 bp, DROSOPHILA
tatcgaactacacacctttgtagacgccagcgagttcgggtatgctgctgtttgctatttttgcaaaaagcaaagtggcgccgcttaatccactttcttttccacgcatagaactactccctgaattagtcggcgcacgcctggctcaaagggtttgcaaaacccgtaatgtgaaaaccgatcaagagattgattcaagtgtagcatatctaccccacctatcaaataaagaatgggtataactttgcataaatacattgtgacactgtcatagtaaacgtaaatatacaaaaacccaaaaaaccaccaatgactacataagcattccagcgtccgagtaatacgatctaacgctcatacataagccgatcgcggagcgtgggaatgctgagcatgcactttgcagctcaagtggtcaagctatacataacatatgcatgccttctgcatacatatgtatatgtatatatgcaataaagaatacatagatataagcacccaacagaacacactttgaacagttgaataaagaacctcataaagagcagaagctcttctcttgttatttaaagtgtactttagcaaaatactaatatctcctaaatatcaaacattacacaaggaaagtactcttctggctgcaatggacccgcaaaacttttagtcctttctaatgtaccgagcttgagaaattatggagaccacgagcgctaatcaatggcgctgggttccgacgaagctaaacgtagcagacttggcaacaaagttcatttctaaaccctaagcgtcgcctaatgtattaatggtccgctgtttcttcgataaccagacaagcacactggacgcaccgtttcggatagcgagcgaaacgagattcgaaaaacgaacttggtggtaaagatatcaaacatacaagcgatccaagtaaacgacgagggttttttttatatagagccaccgctacgtttctcctatacgtagccagccacccttcgaactagatgcaaacttgaaaaaattgtgaagactgtaacctttgaacaaattaagtacgctaagggtatacagttcagagaagctcaacgagataccgtatataaatcggtccgaaaatgttgtcagagatgtaaaaacaattccgccaaaatgtcaccattgccacctgccagggtcgccatgaagccatttacctacaccggggtagattttttggatatatcctcgtgaccgtgggaaaaacgttcaattagaaatatactacagcttggataccagctcttgtgcgatgtgtcttactaacttaatgtctcgacgagcaacaccgaagaaaatattctcagataatggcacaaatttcaacggagaaggtggggaaggaagaactaaaaaggtggactttggaaaacttcttgttaaatatgaccagattaagttgcccaagagagagttgtaatgcgatatcaacggaatgattttttaaagctcttaaaaatgttctaaatctagttttcgaccttgttgcgaatttttaatctaaatgtttcttgaagatcaacgatcagaacatgaagaacgtaatcgtccgctattatatattacagtcgccttgcattttaacaatgtcaatatgtcaagagtaagatggaacttacagcaaactggcgcaaattaggggcaacagtccgttactcacctatatccgcgctcaaatacaactatatttgcaatcttgtatggtaaacaaacgtaatttgcaattttcattgcaccttgtttaaaaattgtcaaaattttgtagtcctgaaaacgctctctgtagctaaagtgatttaataaatttttaaataaatgtgtatgatttgcactgagaattgtttatgcagaaatcacccaagcttatcaatttgctattttaaataccacgacgattttagaatgatcgaagtctattttctgttggctacagatataattgagcatagctacgcgtatgcatatgttacaaaagtgaacgacaagagacttcattgcagagaaacagagagaaagaggagcttagaggctcccgcaacttcccagcttatttacataagtagataacgagcataactgtgcctccaaagtgtgcgataaaaaaattacgatcaggctggaatcgtcgtaaattattgtgaaatcagttaaactttttatttattgataagataccataacatacacgaatattttacaagcttaagttaaagattatcagattgatgagagccattttgttttttgtttgcaattcgggacccaaattgaatagcccttttctttaagaacacaacatctcgcaaaccgatttgatagccatacagtctcagaagtaatttatcgccgactccttccgggaaaccaaagcaacatttttgatacacttctaacgatcttataaattttacaaagttctcttcgatgaatggggatcttgctgttttaccagtatctgcaataatgcggtcatctctggctaaattacgggccgaaatacgttgccagtccctttcaagttcgttttgcacagcaagttggcgctccagatcgtttcccagacaacggctataactgttgcgatagcgggtatacccaccaaatagttcatctgccccgcttccgataagagcgactctagcagtagagtgagtgcaatgcgaagcaaaccagaaggcacatccaagactctcatctaataccgtatctagcggatatataagatgctttatacgtgatgttaggtgctgctgcaattcaagtcgagttacattcactttcagtagattccagcacctctccggacaaagctgttttagttcattgacagatactaatgacgtttttctatctggtacatcaaaaagcttttccgatatattttggcccttaacgctttcgaaagcaacattaataagttcgatgggttcatttactggtacaaattggttggccagcaaggccaaaattgtacagtcaaggccacccgaaaatagaatacacaattttgcgtgtctgcatggaggcgatatatttaatttttgcatgcagagtctgcaaaatggag

SEQ ID NO: 25736 - DNA, 1015 bp, DROSOPHILA
acatagatataagcacccaacagaacacactttgaacagttgaataaagaacctcataaagagcagaagctcttctcttgttatttaaagtgtactttagcaaaatactaatatctcctaaatatcaaacattacacaaggaaagtactcttctggctgcaatggacccgcaaaacttttagtcctttctaatgtaccgagcttgagaaattatggagaccacgagcgctaatcaatggcgctgggttccgacgaagctaaacgtagcagacttggcaacaaagttcatttctaaaccctaagcgtcgcctaatgtattaatggtccgctgtttcttcgataaccagacaagcacactggacgcaccgtttcggatagcgagcgaaacgagattcgaaaaacgaacttggtggtaaagatatcaaacatacaagcgatccaagtaaacgacgagggttttttttatatagagccaccgctacgtttctcctatacgtagccagccacccttcgaactagatgcaaacttgaaaaaattgtgaagactgtaacctttgaacaaattaagtacgctaagggtatacagttcagagaagctcaacgagataccgtatataaatcggtccgaaaatgttgtcagagatgtaaaaacaattccgccaaaatgtcaccattgccacctgccagggtcgccatgaagccatttacctacaccgggattttttggatatatcctcgtgaccgtgggaaaaacgttcaattagaaatatactacagcttggataccagctcttgtgcgatgtgtcttactaacttaatgtctcgacgagcaacaccgaagaaaatattctcagataatggcacaaatttcaacggagaagatataattgagcatagctacgcgtatgcatatgttacaaaagtgaacgacaagagacttcattgcagagaaacagagagaaagaggagcttagaggctcccgcaacttcccagcttatttacataagtagataa

SEQ ID NO: 25737 - protein, 116 aa, DROSOPHILA
MSPLPPARVAMKPFTYTGIFWIYPRDRGKNVQLEIYYSLDTSSCAMCLTNLMSRRATPKKIFSDNGTNFNGEDIIEHSYAYAYVTKVNDKRLHCRETERKRSLEAPATSQLIYISR

SEQ ID NO: 25738 - DNA, 2831 bp, DROSOPHILA
tgatcaacttaattataaagtgaaagctaatttggcagcaattaaacaatgggtttaggaacttttagcggcagcaaggccccacaaatttttttgtgcgcatcttgtcggacggcgctgatgaagttatttgtgggatacgggcaggggaccgcaaaaaaaagatcaaattgcatatacttgccgaatcggggctcatcgaccaaccaattcttgaaatatctgacatctcgtcgcgatactttattgactctttaactcgaagatcatctgttacgctccacgctgatgtacaggtttaggttgtcacagtttagagtactggaacgtgccccagcttgaatttttaaaattaaagaggctcggtttcaattgtcgcagtcctaggtatatggctggaatctcaagcattgcaagctggttcatggctcaacgcattcaaggaaaggggtaattatgttaaagcatctagcggctaccaactttcaacttcaggagttgaatcttcctatacacctagcatactgcccgtctttacaataaccaactcaacatacgataagcgtttctggcactgaaaataactatactaataacaccttggaaactctaacggtactaggttccaaccattcttgcagccctccgcgaggcctggatatctttccggatactgaatctacaataaccctatcatcagaatcattcgtctagagaatatgcgcatttcgaacgcacgcacgcacgcatatcagtttttggtctcacagccaacaccgttggcgtaatccgagtatcttcaagctgatctgaattcgaaccaaaccctcgaattagtctcttttatcttaccctcgctggcgtcatcacttctagttctgtcgatttctccatcttctacttggaggcaactcttccagcttatcttagcagatcccacatttttaacaacgggatcaatcacgctgaacttgacactttgccttggtcatttatgacgatggccagcattgccgaggtccgtgccatgacagagaactccaaggtgtcagtcttcgaagtccgcgctggtgaagacacaggagctttccgtggctatcgctacacccctgggcatagacttgagaaaggggaaggttcgagcattcgacgaagcttcgctgggatcaaaacagttgtcccgtccccaaagggaggactgtctcaaagcccagccgcattaaaatctctgtgccggatccagtggataaaaaagcgcgatagagaggagtggcacgtgtgttaggtgcaaagagtcgggacaaaaatgtcaatcagaatgcggaggtactcgccagaaaccatcttcatgcaactaattcaactttacatgaatcattgcttggtggtgcaggagctgttcacccatgccgtccgcgatctaaagacagaggtggctctcctcagcgagacgtacagggttaacccatgtggcaagtgggtttcagaccaaaaaggcaaagacacgatctctacggctgtgatcggtgcctttcgcacaatatcggacgatgccgctatagtcatcgctgggctggtgttccttgacgaactagttcttaaaaaggacgccaggagaagtagcctagacaactggcaaaacgcttgggacaactcttccaaaggacgatagaccaacaggctgatcccaaaagtgaagctctgggttaacaagaagcacggtcaggttcacttccatggatattctcggcatggatattctcgggagaatccatgccaaggacttcggtctaaagcaaaaactagagatttcgtcgtcaagagtccagagaacccaaagaggaacgaagatcccatcctgagcaaaagcccaggattccaaagtccaggggcactcaaaaggacttttcgtaaaggaagatccactcttttaagctaacagacaagaagtcaagagaggtgaaggaaggcatacaatccaaaaaaatttacaagaattccccagatgggtggcaaggggtccaaggcttccgagaatacagccaatgtgataaacaccgtggaagttatcgatcgcaaagacgagatcctaggcgtactcaatagccaatgttatcaaactatgttataaataaaaaatatacattaaaaacaagagagaatgctatagtcgagagtcgagttccccgatacccgttactcagctagtgggaaacccgaaatttaatcatttttctgggatatcgatggaataaaatgagaaaaaatttacgaattgttcaaacgtgtgggcgtgaccggtttgtcggctttgcgccgttagagtgggcgtggcaaagttttttgtcaaatcgatagaaatttacaagactaataaaactatgaaaaaatttcgaaaaattattaaaaaatttgggcagttggtagttttagtaatcgaagttataactgccggctgcacctcaacgaccgcccagcccagcaataaacttattaggacattaatcacaaacactaccgctaagtgaaagtaaactaagctagattaagatttaaatacttattgttagtctcttaaaacaaaggaaagattcaacatttaaaaaaaaaaacaaacaaaaaaaaaactcctttgtagatcaatcaatccttgtagatcaggaaccaagtatatatgagtctgcaatatggattttattgggatggcaaaatcgaattcgatcggcgccaaaattacctccttatccagttgacttatgttgattaacttgtcatccaaacctacccgaagaacgttgcttgaagcaatctatctatataatattttacgt

SEQ ID NO: 25739 - DNA, 714 bp, DROSOPHILA
atggccagcattgccgaggtccgtgccatgacagagaactccaaggtgtcagtcttcgaagtccgcgctggtgaagacacaggagctttccgtggctatcgctacacccctgggcatagacttgagaaaggggaaggttcgagcattcgacgaagcttcgctgggatcaaaacagttgtcccgtccccaaagggaggactgtctcaaagcccagccgcattaaaatctctgtgccggatccagtggataaaaaagcgcgatagagaggagtggcacgagctgttcacccatgccgtccgcgatctaaagacagaggtggctctcctcagcgagacgtacagggttaacccatgtggcaagtgggtttcagaccaaaaaggcaaagacacgatctctacggctgtgatcggtgcctttcgcacaatatcggacgatgccgctatagtcatcgctgggctggtgttccttgacgaactagttcttaaaaaggacgccaggagaagtagcctagacaactggcaaaacgcttgggacaactcttccaaaggacgatagaccaacaggctgatcccaaaagtgaagctctgggttaacaagaagcacggtcaggttcacttccatggatattctcggcatggatattctcgggagaatccatgccaaggacttcggtctaaagcaaaaactagagatttcgtcgtcaagagtccagag

SEQ ID NO: 25740 - protein, 184 aa, DROSOPHILA
MASIAEVRAMTENSKVSVFEVRAGEDTGAFRGYRYTPGHRLEKGEGSSIRRSFAGIKTVVPSPKGGLSQSPAALKSLCRIQWIKKRDREEWHELFTHAVRDLKTEVALLSETYRVNPCGKWVSDQKGKDTISTAVIGAFRTISDDAAIVIAGLVFLDELVLKKDARRSSLDNWQNAWDNSSKGR

SEQ ID NO: 25741 - DNA, 2431 bp, DROSOPHILA
aatccaagaggaagacagacataactcattatagtgctggccaggaactcaaaacggaagtgttcaaatatggtggtgatgaagtcacatatttgtatcattcggagagcacagctctacgtatacagtgagatccgaaaactgtatgtgtgcacacgtatgctcatgcattgtaaatttgacaaaatagaagttcttagactttaaatctatattttatatagatatatatttttgcaaaatttatgttttaaattacagtagtcataataatttcctttatattttgtcgttttgttgcaatagtaaagtacggatatggatcagaattgactttggcccgaaagtcgtcttctagcacaacacgcaatacatatacgcgttctcgtttatggtttgtactcatacaagcaagcaaattctatttttagatttcttacgctctcagcgtaagcgagcggacagagggcaattttggccgtcaccgaaaagtggctgcatagtgcaaaaccaatttatggccgttacgcatcttgctattctagtgtctttgttatacccaagaattcttacagaataaaacgagcctacgaataagtctgccccttactttcggcatccagggtggaatggccgtgtataccgccgttgagaaatgtcagcgccgtaataaaacatctacgctttaggttcggccgaccgaagcagcttatacgcagccagcttaacagcgtgcgagtggtgcacccgatctcggagcacaatttggcgaaggtcattcgcttcgcgattcgagtgagcaacctcgcggacttcttgcagtcagtgaaggcgaagcagcaccgtcttggatgtcgagggaaaggagccgaggcttcgagttctgcatgagagcgtcgaccattacgaaggcgaacaggtcaagacaacacgcaatcacgaattgccgagaattcgttggctactagatcttgctctatgcaatctgagtgccaaaccaatggatgccggaggatccataatcgtctgctacatgtcgcggacggggagcaacgagatggtcacagggaccaagaatgaaacaagcagcgagcagtatccagaactttgtacagcggtgacattaaggagatgttccaccaagtactgatccggcccgaggatagatgttcccaacgattcctctagagagatagcaacgacgagagaaatccggatgtctacgagatggaggtaatgacatttggagcatcatgttcgccgagctctgcacataacgtgaagactctgaataccctaaagttttgggattcggattcaagggctgtcaagttcatcaccgactaccattatgtagatgactacgtggacagtttcgttacagagagatccagctcgcccactgtggaaacggttttaggacctgggtgaatcaagagcgttggatgggatgaggctgagcagaagatcctcggaatgcgttggcaaataaaaaggtagacttcaggttcaagcagcttcctgagtacctggaagaggaaatacttgtgcctggtgatgtcgacgtttgatccccttggattcctgttctgccgcatggttacgacgaagctgcttttgcgagagagcaatcgaccttagtcaggattcaaggcttagaggacctcatttttgaggcagccagcagctacctggccggggcccgagtaaggaattgaacaagtcccagatgttcctaataaaaaagagatgccaagagagtttgcgttagttgcggcaaacgactttgttatcccttttcatagattctcgagatttagtcgcctggtgaggatcacagcctggtcctacggtttgcgcgcgggtgcctcaaacaaagaagcgaataggaatagaatattctctaggaatacggccttactgcagcagaatgtaagaccgcggagaacctgtttgtcagacaggcacaactgaaatagttcctcgaggagataaggtcgacggaagctggaaaggacgtctttagctcgagcgacatttgaggttgttgccttcgttgtcctgtgacaacggacgacgtgccggcccgttatggggcaggcgtatcgtagacgggttgaggcaacgctcggcctgggaccacctatcccgaccactgactccactatccctttcgaccacgccatgtccttgtcgtctcctccgacgacctgcggctggaatgggtttataatgttatggggcagggtgtatcgtccacgggttagggcggcgctcggcctgggaccacctttgctgaccacagactccactgaccctttcaaccacgccaggtccccgttccaccagtgcaagaatcgttcttgcttttttaatatctttggtagaaccctctgtattgacaggagagtgttatgcgctggcgcagcat

SEQ ID NO: 25742 - DNA, 360 bp, DROSOPHILA
atggatgccggaggatccataatcgtctgctacatgtcgcggacggggagcaacgagatggtcacagggaccaagaatgaaacaagcagcgagcagtatccagaactttgtacagcgagagatagcaacgacgagagaaatccggatgtctacgagatggaggtaatgacatttggagcatcatgttcgccgagctctgcacataacgtgaagactctgaataccctaaagttttgggattcggattcaagggctgtcaagttcatcaccgactaccattatgtagatgactacgtggacagtttcgttacagagagatccagctcgcccactgtggaaacggttttaggacctgggtga

SEQ ID NO: 25743 - protein, 119 aa, DROSOPHILA
MDAGGSIIVCYMSRTGSNEMVTGTKNETSSEQYPELCTARDSNDERNPDVYEMEVMTFGASCSPSSAHNVKTLNTLKFWDSDSRAVKFITDYHYVDDYVDSFVTERSSSPTVETVLGPG

SEQ ID NO: 25744 - DNA, 21231 bp, DROSOPHILA
actatagatttaaagtccaagaacttctaaggtaaagcgcatattttgtcaaattaacaatgcatgagcatgcgtgtgcacacatacagttgtcggctgtcactgcatgcgtagaagagagctgcctagtcgcgtaagtggaggtattccggaaggtctttcggaataattctttgtccagtagaagtactggcaaatgaaggaattgcttctgtacgcactccctgaacggcttgtaaatgcttttcctctaatgattgtgaatgcattctcggaaatgattttgaattcagtgcctgaaatgtctttctaagattactctgaaaggcttctggatgtaatatgtatgtagatgtaatattacatgtagatataatatttcaatctaaagaggaggaagtgttcccaaaaaatataacaaagtcccggttgaagaaaaatttcatttttatatactatatactaaaagggtatactgaaaattatgtaacaggaagaattagccgtttccgatcatataaagtattcttgaaattcttaaaatattcttgatctggatcaatagcagagttgatgtggccatgtccgtttgtccgtatgcacgtcttgatctcaggaactagcatacagattccaaagacatttgaaaaatgtggtaatatttttgatatttttataaatcctgtaaatttctatcaatttgctaaaattttgacacgcttgctctaacgccctacaaccgtccaaaaatgtcacgtccacatttttgaaaatttttcctaaagccgcccaaaacatccaagcacacaagaatgtttagatttctcttcggtttatggtttttgtagccaatttttatctgtacaccaaaaacactgtggccgcaaaacatgtgtgggtggttttaaactttaatgactttaataaaatttgtggttcaatttgttacgcttaagatcttggcacctactttaatcaatttaattgatctcttttctctctattctcttgtgtcgttattacaaccgccgaccactccgcgtctctcggcctatttgctcttctggcttctttccgattcctacactcggcagtcctgactgggtgttcgtgccaaactccttcatgaactcagatacagttaatgtttttgaaggaccttcaccatctcccactttctcaacatcatacctggcatgcttatgaacctttgcaatcttgtaaggaccaagaaactttctatttaactttagaccatcttcatactgagtgagtctgattgcaactagatcgttgaccttgtactgcatttcggcctttctcttctgattgaaagttcgcctgttctctaacctcctgacgcatctgtttacgatattcgcccaactcctgtatcaaagtctgctgcacctgatctttaagctctgaactatcaaccactcgcatgtcaacatatgttagtagtttgaacggtaacacttttgtgcttctaggctcgatattgtttatcaattgctcgaccctacctacatgcttgtaccaatttccagggttctctaggctcaccttcgacaacatcggcacctcgattttgtgcaccgaggtacacctgtagcgatcactaaatactgaatctgctgttttttgcaatattccttggacaaatgtaatgtgaaagatgcaccacggtctgacacaatcctgaatgggttaccaaaatttaccgcctgtctccctaaccaataaagtacttcctctaccccagtacttcgtgtcggatacaaccaaaccaaacgagaatgtatctacttatttttgtgatatccatcagtcctacgtgatctctatgataagtgacgagaggtttgtctcccttatcaattgggttgagatatccctcctgtctacctgcttttgagtttactaaaatgcactcaacacaactttcagcaccttatctttcactttggaatgaaagaagatttctgcaccatatcctgtgactccttcgccaaaaaatgggcttgcctatcagcaatatgaatgatttcagttcccatttgaaattaaatgacgatccttgaacaatgtctgatttattatgtagtaatcctcatgtccctttgctccaaacaaacttctgactgccttgatccagtcatctgctgagcttcttttagctaatgcattccgctttctgttaaaacaaaacattacactcaactgagagcgtctacatgcctcatttttgttcctgatcgatgttcggatgttttggaagttagcctctactggaacatgaatattggttggttggttaagtacaatgttgtgaatattgtccctccttggaatttctcaattactctattcatctgaaccattggatagttgtccatcacaattttctcattcaatttgcaataatcgcagcacaaacgtttctttacattcattttcgccacaagtacgttaggtgatgcgtactccgaagaacttggtttaataatcttttggtcaagctactcatgaacctgctcgtctgcaagtgcgattttcatctcgaccggataatgaatgtttcttttcggcgtgtactcttatatcatacgttctacaacacttcgcttcaattgtggcaaatgcgacaagtctaagtcaagcttgcctgctaattgctctatagatatcatgcacaagctctggaatttgttcaagaactccatgcatgaactttagttctgctctccattttgaacatgacttttccgaacacaggcctgaagcataaccacgcttgttggcttagtcttgccttcaacctgtactaaatatgtgttcttctcctctttggctccatttcgaccttgcattggttggttggttgcatctgaaacagttgttgtctctatttcgacaatttctttttatgtgtgactctcccccacagttaaaacatttcccaaccttctcaacaactttagctacatctttaatggattgagagtcatatttgacttgccaatgatctcatttcagatgcttccatctgaattgttaactgcctcatagccttcgcttgatataataaagccttgttcaccttgcagtctgtaatcccttcaacaaagtattcgatcacgctctcatagtctgaatcaataggcttacaaatttacggtgaacctctgccgatgacatctgtcgggccacgcagtcggcatcattaaacaaaacctattgcaatagttaagattaacgtaaatcaatcattgttttcctcttgtgctctattttatcatttacctaaacaaacgtttgtcttatctttacgcgcatcggtatatacagcgttcggagagtcgaactctctcaacgtcagtcgtttacatacttcgcctgcatacaaactcgcggtagtttgacccttccgctgtcaaaattacattcgttcctttaactttaagtcgtagcactgatgccactgcgcatcctcccaatgtcactgcactcattgcaaaggatctcggtagtgctattgcgcatctagccactacgtccgttttagttaaacgctgtaatgaatcgctcattcccggtcgggtattgcttgattcataaaatcccgttttgcaaaccatcaagatcctgtggcacagtttcaggaatatccgatttcaatttcgttactgatgggtttttggttgatattatcctgagttccactacttcggactactttacaaactgagcttctgtgcgttggtgctgtccgctgatgcagaaaactcgtttgggatgggttgtgtctgtaggttgggtacggccaggtatcacttccttaatatcttctcgcgttccattccagacccctgaggacaatgttaatgaaaggcttaatgttctttcgtaacgcttctgggagatagaaagttgtctggacgaatattttagtccacaagggaagaataagactttgaggtgcacatcgcccgaatgacgtctggtgattattctgtaatttttttgggagattcctatcagcaggatattcggaggcttctatctcttgacaggtagcttaatcggaatcttcttatacttcttctggttactctctgaatgatctgtctatgtcaggtccattgcttccaagatgtttatagatggttatagtgataatctaaacacagttacgtacagaaccaagccagcctcctatatggatgagcatacagatttctacgtgaataatctcatatcaggtgccaatttcatgaaagatgccatcaaaggaggaggaggataagcatgaccataattgtgtttgcggtttgccctaccctacctatgaccactttccttaagagtatggtcaaagactctagaataacaaaatgcgtaacggccatacattggtttggcactatgcagccacttttttggtgacggccaaaattactctctttccgctcgcttacgatgagagcgtaagaaatctaaaaatagaatttgcttgctggtgtgagtaaaaacaagagacgagaacgcgtatatgtgtgcatgttgtgttagaagacgattttcgggccgaaatcaattctgatcgaagaaacgaatttacacatttggggagttttggccaatttcgtagcaatatgatgaaattgagagctttttaaaaatatcaaattggaataaaaaaaatgaaactgaaaaacaactaaatctaatgtgaattttaaataataaaaattgatcatttacatacatcatattaggtcaaatgactaaataaatatacgaaataattaaagcaaatacaaaggaaattattataactactgtaagttaaaacataaattatccaacaagacattacattgagaaataaatatttcataacagtagtaaaataaatctaatactctaatgacaactaatctaatatagtcatttttaaaatttattttttgatattatgattcggatatttctatttctaagctttatttaaataataataacgttaaggcaatgcaaaacaagaattattcgcatagtgtcaattgatcaaaaataatatagatataaagtccaagaacttctaaggtgaagggcatattttgtcaaattaacaatccatgagcatacgtgtgcacacatacagttgtctgctactactgtatgcgtagaaaagagctgtgcgctgtagcgctcgagcttcgagagagcctggagccacctctaggtggacagggaaaaaatcgtatgtcgttacgcatcttgttattctagtgtctttggtacaacgtcagctacatttctggcaataatacatatatacatacacacatactcaaaaggcaactcacacggatcaacagtcaaaatacaacaggagttaaacagtatttttaccatctggattcaaggtcaaggtgcgaaaatgatgctcaaaaaagaacaggttcttacggaaattctcgataaagaaatggtcaaacaagccaactaatagtgaaaccctacagtgttacgaccttatgtttgcctggatgacacaaaagaatcactaaccagttgggtccgtccatcacagaaaattaaaacgtcaaatccgcctagatatttgatcttaacggacaaattaccacgtacatagtagtatttatacagaccatacttgggtgggattgactgtttgagctacctgagctagcttttctgcaaactttaaatttttttaaaagttcatgagcacatatcaaaaaactaaatcaaaaaatgcaaacattcgtcaatgcatccgagtaagcgtatggagcagcattatgaattaaagccatcaataaatgccaatgctcgaattgtataaaacatttcaaacattaaatgtatacacctcaggaagcaaatatgatcaatacacttatattatatttataatatataaactatatatgccactatatttggcactacttttaattacttttttagcaattaattaaaaaaggtgaagggcacaatacaagtacacaaatttaatctgtttcctttaaatggccgattatatctacgcagttttttttaatttgtttcgctatttgaaattttaataaaaccatttgtattattaaaactttgatattcttattttatttattaaattatctgattagtgctctaaatattttttaatatgatattttacaattaagttgagtaaatatagcaaatccctctttgctattggaatataagttaatataatttaaactttgaattcatttatgtatttttaaatactttaataataaaaaaacaaccaattttatagttgttttctaaccatttctgaaagcattgcagattcattagacataacggcaccactggaatcgttagcactatataatgtgcttgttccgcgttgaatggttctgtcctcatagcgagtacgtccctgtgaagccatcggtctattaagtgtattgttaacgttattcggtgaacttggtggagtattatgtgcagtaaaatgtttactaacaaaatcttgctctttccatccattttttttataaacgtctcgcaattcattatgttgccacatggtgtataaaacttgacttgcaaatttcaacacacaagaggtatatttttctttccgttttgttatgttcataagtctatctatcccacctgaatccaatagggaacgggaaaactctggatttttttttataacctcattaattgttgctaatacagctgtgattgtatcatctgatgtattttggtcatgttgtacatttccggatggaagtttctgaactaagtcacgcattgcgtactttccaattagttctttgttgcgttgatctatagctaaattgcgtagtgctgtggcgactgcacaaactacgcgatccacttccatcctaagaagctcaacaagtatcggtaggcctttctctttacgcactgttgcgcgaatatcaatactgggttgccaatagcatgcagacaaattttgaattgctccagcagcggcttcaagtgtttctggattagaacaactttgcaataatgacaaatagtattgaactacttcaggttgccataattgttcatatcccttgtttaatttgttatatgttacagaacttttagaatagtcagcggaaatgttgtattcgttgagagcatcggaattattagcttcttttttttttttatttgttccaaaacagcccaaattttctcctgaaaataaggaaatatttataaatgtatataattcaataattttatataaggagtacaattttaaaattttatttttatacattttttatttgtcaacgtcgaacacttaaagatagaaaagttaaacataaaaaggtttttatgccagtttttgggacgaaagattattatagccgttactcgtaaaataaaagactatagtaatttctttgcaaagtatgtaacaggtagaagaaagcgtttcagacaacaataaatatatatatttttgagcaggatcaacctttccgtctgtctgtccgtccatatgaaggtcgaattctcaggaactataaaagctagaaggttgagattaagcatacagattttagagacatatgcaccgcgagtttgttgacacgcccacacttttgaaaaatgttttgatatttttcatttttgtattagtcattttaatttctatagattttcctaaaaactttctgctaatctcactctaacgcccaaacaccgcccaaagttttgcaaaatgttttaatattttgtcatatttttattagttgtgtgcatttcatcgatttaccaaaaagctttttgccatgcccactctatcgcccacaaaccgccagatcaagaatctctgactaaattaaggaaaaagataaatccccacgcccatactttcgcaacatattttaatacttttcttcatatttttattagtcttgtagtttctattgatttcagaaaaaaaaaaaatttgccacttcgcacccacaagcctcccatttttgtcattatattctccaatatctccaatacataggccagaaatattataaaatttcgcgttctcacttccactagctgagtaattgagcactcgtatctggtagtatgggggaacttgactatagcattccgtattgttttttattattgatatgaattatctatatttttcgccaattcgattgttacatgagtaacaggcggaaaatataaacaaaaaaaaaaacttttttatttatttacctttagatgacgatggaataactctttctggtgttataaagggatgtttgtcgtaattgggatcatcaacttcttgacatcggtatgaaagatttcgaagtatacatacgcaattttctacagttttatttccaatattatttttctcaattgatgttcgcacaacataaagaaggcattcaactaaatgttcacaatttcgaagacatcctcttgcatgttctccagcagaactgacatttcgtaaaactccagaagcatttcgaaataccgtagaaaagcatgtttctccacaacaaactgcatcccaaccagaatgaggcttaatcacgctgcaaactacagcaacgagcgcttcatcaataattgaccgtttcaagtcttcacaggaagacatattccacaaaacgccagtcaccaattcttttacttctgtttcttgtgaccgacataaaagatgcaccaaagctgctattccaccagcgttctttattccacgcttgttttcatcattttgtcttccgtaagataaattacgtaaagcaccacaggcatttctgaaacaaaaacaaaaagttcgtaaacgtaatttagctctacatttgtctttaaaacaatataaaatagatataatcttaacttcttaatttttttctaaagtaaaaaaaaattgaataatatttcttttttccctacgttgagctaataaacttctatattagctattttaaagcattaaaaaggcgaaatttatttataatgagcgacttaatcaatagcaggccggacagcagaacgctaagccaaaggtgtaggtgcgagagtactataaagagagcaagagatgggagcttagataaggaaagatattgctgcacagctgaggtgtcgcagagtttaactatcaccacacatattacacatatttacaaagtataatttatggataaaaggatagcagatacagcagagaagatagcatggagataaatttgatccaccgggaatacgtccgccttagtaagacgctttcttcggtacaaaagaggcgtggtgggttccacgctgactttatcagctgcgctccacctcctggaatgtcgaagctgttgcgaagggctgttgctgcattttaagttgcacacacccctttagggtggccgtggcattgtataaggttgtttaaccattccacttggtcctacttgtggcgattccggcgatggaacgcctccgtggggtgccttttgtggttgctcaacttcttcttgttgttgcgattgctgctgctggaacgggatgacgggcatcctaatctgctggcttgctcccgaggagcttatttcgaggttcagcgatatttgcttaggtccaccgctttccctgatccctggtccctgaccaccctgtagcatttggtattgcggcagcctgttgctgggtggacctatgttgatggttccgtgctgtgggatggccacattggcatgcctgaatggattccggtctgcccgttgccgcagccctgtggcgccataatctcagtgggatgcgcctggagagctaaacgccgattagcaaatctgtttttttaacaatttctaagctatagcatagggaattttttccaagctcaaggggggcaacgacggtgccctattgcggagtgaacgctgctgacggagaaatgccgtcatttgttgcgagcgcactatgaaatctaccccccccccccctcccagaactaaggattaaaacgttacgacaacatcaaattagttttaatttcatctaaatcaagttatttaagctcgctcatcagcttcaacatctcaagaagaacagaataatcaaacgaattcaacgttctgcgctgacaaaaaatccgctaatcgctacactcttttatatacatattgcagttgcctagcgctttaataatatcaccctgtttgcatcagcggtaattttttcagaattttcagcagccaatggatacagcaacaacaacgaaatggcaaaaacagcgacttcaaaattcggtaagataagaagattcgggagatatgcgaaaagaagaattaacggcagcttccgttgtttggctatttatgcgcacaaatggaactatgtatatgtaatcttgcatagccaaaggagttacttgttatgttaactgcctttaattttatctgaatattgcagatagcaacaacagcaaattaattatacagctttgcatgtataatatatagcataaatcacgtcggagtcaccaagtgttgagctaataagctttttattcgttattttattaccaatgaaaagacgatttttatgtagctatttcgaacgattgtgtattgatttcagcatactatattctgcattaaggcatatatgcataagggacgactattgaattaattgcagagcgaacagcagaacggtaagccaaagatgtaggtgagagagtactagaacgatagcgagagagggcagcatagataacgaaagatatttaccgcacagctcagattccctagtgtttaactgtaattgcatgtaaacgaataaaaaattaaggaattgctggccttaccgccaattactttccgagaattgcaaaaaaaaaaaggatctagtgtgtagcgatttttaaggattatggtttatttgtttgatcaaacgagatgatgatcaacttaattataaagtgaaagctaatttggcagcaattaaacaatgggtttaggaacttttagcggcagcaaggccccacaaatttttttgtgcgcatcttgtcggacggcgctgatgaagttatttgtgggatacgggcaggggaccgcaaaaaaaagatcaaattgcatatacttgccgaatcggggctcatcgaccaaccaattcttgaaatatctgacatctcgtcgcgatactttattgactctttaactcgaagatcatctgttacgctccacgctgatgtacaggtttaggttgtcacagtttagagtactggaacgtgccccagcttgaatttttaaaattaaagaggctcggtttcaattgtcgcagtcctaggtatatggctggaatctcaagcattgcaagctggttcatggctcaacgcattcaaggaaaggggtaattatgttaaagcatctagcggctaccaactttcaacttcaggagttgaatcttcctatacacctagcatactgcccgtctttacaataaccaactcaacatacgataagcgtttctggcactgaaaataactatactaataacaccttggaaactctaacggtactaggttccaaccattcttgcagccctccgcgaggcctggatatctttccggatactgaatctacaataaccctatcatcagaatcattcgtctagagaatatgcgcatttcgaacgcacgcacgcacgcatatcagtttttggtctcacagccaacaccgttggcgtaatccgagtatcttcaagctgatctgaattcgaaccaaaccctcgaattagtctcttttatcttaccctcgctggcgtcatcacttctagttctgtcgatttctccatcttctacttggaggcaactcttccagcttatcttagcagatcccacatttttaacaacgggatcaatcacgctgaacttgacactttgccttggtcatttatgacgatggccagcattgccgaggtccgtgccatgacagagaactccaaggtgtcagtcttcgaagtccgcgctggtgaagacacaggagctttccgtggctatcgctacacccctgggcatagacttgagaaaggggaaggttcgagcattcgacgaagcttcgctgggatcaaaacagttgtcccgtccccaaagggaggactgtctcaaagcccagccgcattaaaatctctgtgccggatccagtggataaaaaagcgcgatagagaggagtggcacgtgtgttaggtgcaaagagtcgggacaaaaatgtcaatcagaatgcggaggtactcgccagaaaccatcttcatgcaactaattcaactttacatgaatcattgcttggtggtgcaggagctgttcacccatgccgtccgcgatctaaagacagaggtggctctcctcagcgagacgtacagggttaacccatgtggcaagtgggtttcagaccaaaaaggcaaagacacgatctctacggctgtgatcggtgcctttcgcacaatatcggacgatgccgctatagtcatcgctgggctggtgttccttgacgaactagttcttaaaaaggacgccaggagaagtagcctagacaactggcaaaacgcttgggacaactcttccaaaggacgatagaccaacaggctgatcccaaaagtgaagctctgggttaacaagaagcacggtcaggttcacttccatggatattctcggcatggatattctcgggagaatccatgccaaggacttcggtctaaagcaaaaactagagatttcgtcgtcaagagtccagagaacccaaagaggaacgaagatcccatcctgagcaaaagcccaggattccaaagtccaggggcactcaaaaggacttttcgtaaaggaagatccactcttttaagctaacagacaagaagtcaagagaggtgaaggaaggcatacaatccaaaaaaatttacaagaattccccagatgggtggcaaggggtccaaggcttccgagaatacagccaatgtgataaacaccgtggaagttatcgatcgcaaagacgagatcctaggcgtactcaatagccaatgttatcaaactatgttataaataaaaaatatacattaaaaacaagagagaatgctatagtcgagagtcgagttccccgatacccgttactcagctagtgggaaacccgaaatttaatcatttttctgggatatcgatggaataaaatgagaaaaaatttacgaattgttcaaacgtgtgggcgtgaccggtttgtcggctttgcgccgttagagtgggcgtggcaaagttttttgtcaaatcgatagaaatttacaagactaataaaactatgaaaaaatttcgaaaaattattaaaaaatttgggcagttggtagttttagtaatcgaagttataactgccggctgcacctcaacgaccgcccagcccagcaataaacttattaggacattaatcacaaacactaccgctaagtgaaagtaaactaagctagattaagatttaaatacttattgttagtctcttaaaacaaaggaaagattcaacatttaaaaaaaaaaacaaacaaaaaaaaaactcctttgtagatcaatcaatccttgtagatcaggaaccaagtatatatgagtctgcaatatggattttattgggatggcaaaatcgaattcgatcggcgccaaaattacctccttatccagttgacttatgttgattaacttgtcatccaaacctacccgaagaacgttgcttgaagcaatctatctatataatattttacgtggggaattgggtataccaaacatggttagatggctagacggaggtgacagatgtctacgattaaaattataaaattatttattaagaagttgagtttaggcatttcataagcagctaagtttaactttttttattgttattattttgacgtataagtgttactgtttcataaagacagtgtacatatatacaagttaagactatcacccagcatccaatctgcagagttaaatgtaagcgcccaaagctttcaagataagagtgaagccttgactcaagattagggatagcttaagagataaagattgtattagttagttgatttctggataataaacgagttggtcatcgccacgtaaatcgaaactcaaatactcatttagcgcagacagcgcttgtcaacgaaattgctaaaatattgtttcggcggccatcgttacgaaaataaaaaacaacaatagcatttcattatttacatatacacaaaaaaataaacacgttcaaatgaatcgattcggtgttatctgtaaacaattatgttattattttcttagtactctgaaaatagattagagtacacatagagtagagtatatactctataaaggggagctaccataatctaaaaaaaataaattacgaacactttcttataatttaggcaaaaaaccgaaagaaactttttattggattatagcttataacaagttttggacttaatgctgtgtttaaactacttattgcacataaagaggtcgaccagtagttatttcagcagatggttcgatactagtctgcagccattaaaaaagcgaaggataaacggaagtggataacaaaatttttgaccgatcacaataagtacacaatgtaaagtatatataagtatatatataagtataaataaaagtatatataaaagtatatatataagtatatatataagtataaatatataggtatatatataagatatatatataggtatatatatataggtatatatataagtatatatataaaggtatatatataagtatatatatataggtatatatataagtatatatatataggtatatatataagtatatatatataggtatatatataagtatatatatataggtatatatataagtatatatatataggtatatatataagtatatatatatagggtatatatataagtatatatatataggtatatatataagtatatatatataggtatatatataagtatatatatataggtatatatataagtatatatatataggtatatatataagtatatatagagaaaaatcaaaatttgtaatatagccggatttttggcgtctttatgttgaacgatcttacacccgccattgaaaataaatattttctttatcatcacaagacaataatatttatataataatattctttaaaaggatatggtctattttatacataactacttgttacaaagaccattttatattgctgtaatcatgactgccgacaacaatttacaaatgctctaaattgatagtcaggaaaaacttctatgaacattcgagacagctataacttacatttcttgtattttaaaatttgtactcacttatgtatttctggagaatcataagatagcagtcgaactaatggtggtatacctcccagagatcttgtacgttgcttgtttggatcatccatgtagcacaaatgctgtagataggctgctgcattagcttttatagcactactcgggttgcttaaaaagcttattacttctgaaagatttggatcccgccatctcattgtagaacaaatatcattttctgatccttcaatgtaatcatccttttcttccaatctttgcggcactgtatttatagagctcatggcgaattgaggtaatttaaattcagctgaacttttaaaggttctacattgggaatccgcaacagcttctgctccatttatgttatcattaaaaggccttccagaaaatggtttaatacttgaagtcgtgttttgaattcctgtatagtttgcatccgacgtatagcagtaaggtacgacagcttcagctgtgtactcagagtctattccacaagtcaaaccagctacaccatattcggatgtatcctcatattgacccgcttgtacatatctcactgttgtagctagtggatgattctcaatgtctggaatggaattgtctgtagagttcgtctcaatcttattttgagagcagtgtggcgcaacttttgttattgcacctactcctgtgggctttgttatatataatggagtgcttgaatatcctgctgccgaaaattgatcataattttgaaaagacccaaattgggattgcatgtttgcaggctcgtgcgtcaatgaaaggtccatgtttatgtgagttgaattcatatttaaactgaaaagggagttaaatttctttaatatacgaacacggcataattaacgactattagtttaatctagatgtaatttcgattggttcggagttcaaaacaaaaagggtaccagtacttacaatatgaatagcaataatttattgagctgtctccagatctggctcccggctctctcaaatttttgttcaagaaccaaaaccaaagagcggacaggtctacagtcagcagctcccttatacgcatacacggacagccgaccacattgacaaaatatgcttcactttactggttcttaggctttacatttatattatttttgatcaattgacaccatgtaaaaaattcttggtttgcactgccttagcatgataattcgaatagaaattgtaatagcagaatctatgagcataatatcacataataaatttcataaatgactttgtattggattaattgaaattcgagtattaagttggcctcgtgtgaaaaatgagagaaagacaactattttaaggtgcttatgtcaaaaagtcaaaaaaagtcaagaagtcaattaaaaaaaaaactggttgtatttttatatttattttatatatatatatataagaaatatatatatatttattttaaacaatgtatgcttatataatcagtttgaaaaaaattttttaaaagtgttttatttatttggaaaatgtatgctttaaataatttgtaaataattttttcacctttgtaaataagatctgatttaatataaaaaggtcattatttcggccagaccaaaagtgtccgttttacgaatcgaaaaaattttacgattttgaaaaacgaagcatcgatttttctatttcaaatggaaattgtaaaatccttacgaattcgattaacggagcatgcccgattattaattagaagcatgaataaaaatatgaaacgataataaattagttaaaaggaaattaaattttatatataattttttagtagataattttgcaacgaaattgacaaactctaaaaatgtaccttcgattcttacatcaaaattgattttgataaatgtatggccattacttatctttttattctaatgtctttggtatgacgtctgagatctcgggaactattaaagctagatagttgatactaagcatgcagattctggcgaagacttccctgtgcaagattattcgtaaaacccttactttgaaaacttgattggatttctttattttattttggtcttactaatttctaagtccaaaaataaacataagttattgccatccgattttaaattcgtatcatagtattataaataattatttaaggaaggcacttcacaatccgggtaattctaaccttcttccaacttacccaatgaggaactttaacgaacgatccatatgtaattagcgcagtcgcaccagaattgatttaattaacgatgccttgtattggcaggacacgaaaatgaagctcctaagatatatgtatgcacacgtatcctcatgcattgtaaatttcactaaatatgcccttcactttacaagttcctatactttttaaaactcaagttttgcattgcctgaactgacaattattcaagtatagcttagaatagaataatacataataaatttaaaaaatagagaatactatagtcgagttacccgactatcagatactcgttacttagctagtgtgaatgcgaacgcgaaatttcataatttttctggaatatcgatagatattggggaacaaaatgagaaaaaaatttaaaaattgttccaaagtgtgggcgtgaccggttagggcgctagagtgggcttggcgaaaagtttttggcaagtagatagaaatttacaagactaataaaactataaaaaaatcgaaaatggttcaaaaatgttggcgtggcagtttgggagtttaaggtcgttagcgtgggcgtggcaaaatttttttttttgcaaatcgatagaaatttacaagactaatagaaatgttaaaaaatatgaagaaaattttccaaagtgtgggctttttagttttgtgcggtgtgttggcggttgtctcaagaatctgtattctaaatttcaacctttacttccattagctttaataattcctgagatctcgacgttcatacggacagacggacatggctagatcgactcggaggttaatcgaagctaatgcactaatgcttacagccttatataccagcagcggtgaacttttcgttttcgctttcgcttgtgcgccggtgctttcgatgttgcttggctcttttcgtttagcgcacttatgtagattagcggaacgctaagtgacgcactaccctgtattcgtcagctatattctcttcggcgtcattttgcacctttttcacattttacagttttgtgctgtttgtgggcgttagagtgggcgtgggtcaacaaacttgggctgcgtctgtgtctctagaatctgtatgctgaatctcaaccttctagcttttatagttcctgagatctcgacgttcatacggacagatcttgatcaagaatatatatactttatatagtcggaaacgattccttctgcctgttacatacatacctttcaacgaatctagtatacccttttactctacgagtaaagggtaaaatgactgttggattaattgttattagagtattcagcttgcgacttgtgaaaagttttagaagacaatgattcttaggtgcctatttccgcacgtcgtgcctcaaaaaatcaattttgcaataaacaggttacatatttttaaaatttttggtaataaatagtgatgaactatagttgatgtttcgtttgtgaaatgagtcaaaaaaccgctaaacggatatgaagaatataaaatatgaaatgatatgaatatgaatgaaatgaatatattataatataaaatataatatataatgtaatgtaatgtcattagcattgggaataattgctgtagttgtcctatcatagttgtacaacaatagcgcataaaatagttcaggagaaaatgggatgattgagaacgaatcacttgttctctgacaaatttgtcttctgcctcaaaccatcgcggatagcatacaaatttcccccgaacaaggaatcctttacgacaaacaaggggagggggctttaataaaaactcaaattttcattggatggtaaaagtgatggtaaaataatagtatgtatacataatatacataataatatatgtgtttataatatacacaattttattaaatattctttaaacggaaggcatggatggatagacaaaaaattatattgtgatattttttcaaataaatcatgggaaaattattgtaattctttctgaattatgagcgaaactgtaagccactttaatacctagccactcccttacagctatgtactcataggagacaggtatataaatttgtacattgagaagccctgataacaatgaaaatattattgttaaagcatttttgcatgcgtatcattttatatgtcatgtatacacacataagttccttcctttttttcatacagtgattgattagctcgaattaaattatcgatttttcttgttttattatgttacacaaactatcactaaaaaaattaaattaattttttttcatttgatttaatttgatttaatttcattccttatttaatttgatttgatgaaaacaagaattcgtgtaatttaattaacactctctttgccctttttatatgcgaattccaacatatgtatgtttaaattaataccacatacccgattaggctgtgtttgagagatcgcgcttccatagatgtccatatgtaaaactacatattcacaaaaaattgaaatccgattttccagatattaaagcatttagtacaacatcatacacaaaaaaggaaattctgtaatgcttgtgacaaaagaactagttcattattaagtggttcgataatgtaagcgcaatcgaatactttatgtgaaaaaatatcctaattacaatcggttatgctcgggtaatcgtaatttgttttcgatttcgattttggcaaaatctttcgatttcgttttgggtgctctggttttcgcaaaatgattgctattgggaatgttttgtttctttctgctgacttattttgtttgtctaaagcaaataacgtgaaaaaggccttttatatttgcaattgcttgttttgaagccaggagaagcagaaatgcattcaacagtaaatagacgtttaagctgttttccagacaagtagagttttaattctgatttacgcaattacttttcacagcactttatccaattaagtaactaactgaaataccactatttacgaataacacttttggtcgtcttttaaattaattaatattttatataaaaattatttatttattttttataaaataactcagtagcagaatgatcttgtgctgatgtggaataaacatcaatagaccactaagttaactatgttattcccttagtaaaagatctgttttgttataaaataatactaatacttattactttacctaattttatgtatattatgtataataattaaatttcttttcatctgatttccaaaaaccttagtcctgttaaccctaaggagtatttgtataacaaagaaaaatatttatttaaacaatttataattatatgtaatttatttagttgtgtcaaaaacattagaataacaagatgcgtaacggccttacattggttatgcaatattccagcgacttgtttggtgacggctgtagagcgtacaaatctaggaatggtatgcgcccgcttgtgtgagtaacaacaataactaaaagtgtgtatgctgtgtgctatttttagacgaaatcaatctatacctaagaaacgaattcgtatgcttagagccaattttctttttatatg

SEQ ID NO: 25745 - DNA, 2545 bp, DROSOPHILA
tttgtcacaagcattacagaatttccttttttgtgtatgatgttgtactaaatgctttaatatctggaaaatcggatttcaattttttgtgaatatgtagttttacatatggacatctatggaagcgcgatctctcaaacacagcctaatcggatggacctttcattgacgcacgagcctgcaaacatgcaatcccaatttgggtcttttcaaaattatgatcaattttcggcagcaggatattcaagcactccattatatataacaaagcccacaggagtaggtgcaataacaaaagttgcgccacactgctctcaaaataagattgagacgaactctacagacaattccattccagacattgagaatcatccactagctacaacagtgagatatgtacaagcgggtcaatatgaggatacatccgaatatggtgtagctggtttgacttgtggaatagactctgagtacacagctgaagctgtcgtaccttactgctatacgtcggatgcaaactatacaggaattcaaaacacgacttcaagtattaaaccattttctggaaggccttttaatgataacataaatggagcagaagctgttgcggattcccaatgtagaacctttaaaagttcagctgaatttaaattacctcaattcgccatgagctctataaatacagtgccgcaaagattggaagaaaaggatgattacattgaaggatcagaaaatgatatttgttctacaatgagatggcgggatccaaatctttcagaagtaataagctttttaagcaacccgagtagtgctataaaagctaatgcagcagcctatctacagcatttgtgctacatggatgatccaaacaagcaacgtacaagatctctgggaggtataccaccattagttcgactgctatcttatgattctccagaaatacataaaaatgcctgtggtgctttacgtaatttatcttacggaagacaaaatgatgaaaacaagcgtggaataaagaacgctggtggaatagcagctttggtgcatcttttatgtcggtcacaagaaacagaagtaaaagaattggtgactggcgttttgtggaatatgtcttcctgtgaagacttgaaacggtcaattattgatgaagcgctcgttgctgtagtttgcagcgtgattaagcctcattctggttgggatgcagtttgttgtggagaaacatgcttttctacggtatttcgaaatgcttctggagttttacgaaatgtcagttctgctggagaacatgcaagaggatgtcttcgaaattgtgaacatttagttgaatgccttctttatgttgtgcgaacatcaattgagaaaaataatattggaaataaaactgtagaaaattgcgtatgtatacttcgaaatctttcataccgatgtcaagaagttgatgatcccaattacgacaaacatccctttataacaccagaaagagttattccatcttgttctaatccagaaacacttgaagccgctgctggagcaattcaaaatttgtctgcatgctattggcaacccagtattgatattcgcgcaacagtgcgtaaagagaaaggcctaccgatacttgttgagcttcttaggatggaagtggatcgcgtagtttgtgcagtcgccacagcactacgcaatttagctatagatcaacgcaacaaagaactaattggaaagtacgcaatgcgtgacttagttcagaaacttccatccggaaatgtacaacatgaccaaaatacatcagatgatacaatcacagctgtattagcaacaattaatgaggttataaaaaaaaatccagagttttcccgttccctattggattcaggtgggatagatagacttatgaacataacaaaacggaaagaaaaatatacctcttgtgtgttgaaatttgcaagtcaagttttatacaccatgtggcaacataatgaattgcgagacgtttataaaaaaaatggatggaaagagcaagattttgttagtaaacattttactgcacataatactccaccaagttcaccgaataacgttaacaatacacttaatagaccgatggcttcacagggacgtactcgctatgaggacagaaccattcaacgcggaacaagcacattatatagtgctaacgattccagtggtgccgttatgtctaatgaatctgcaatgctttcagaaatgaagagaaaggccgaaatgcagtacaaggtcaacgatctagttgcaatcagactcactcagtatgaagatggtctaaagttaaatagaaagtttcttggtccttacaagattgcaaaggttcataagcatgccaggtatgatgttgagaaagtgggagatggtgaaggtccttcaaaaacattaactgtatctgagttcatgaaggagtttggcacgaacacccagtcaggactgccgagtgtaggaatcggaaagaagccagaagagcaaataggccgagagacgcggagtggtcggcggttgtaataacgacacaagagaatag

SEQ ID NO: 25746 - protein, 779 aa, DROSOPHILA
MQSQFGSFQNYDQFSAAGYSSTPLYITKPTGVGAITKVAPHCSQNKIETNSTDNSIPDIENHPLATTVRYVQAGQYEDTSEYGVAGLTCGIDSEYTAEAVVPYCYTSDANYTGIQNTTSSIKPFSGRPFNDNINGAEAVADSQCRTFKSSAEFKLPQFAMSSINTVPQRLEEKDDYIEGSENDICSTMRWRDPNLSEVISFLSNPSSAIKANAAAYLQHLCYMDDPNKQRTRSLGGIPPLVRLLSYDSPEIHKNACGALRNLSYGRQNDENKRGIKNAGGIAALVHLLCRSQETEVKELVTGVLWNMSSCEDLKRSIIDEALVAVVCSVIKPHSGWDAVCCGETCFSTVFRNASGVLRNVSSAGEHARGCLRNCEHLVECLLYVVRTSIEKNNIGNKTVENCVCILRNLSYRCQEVDDPNYDKHPFITPERVIPSCSNPETLEAAAGAIQNLSACYWQPSIDIRATVRKEKGLPILVELLRMEVDRVVCAVATALRNLAIDQRNKELIGKYAMRDLVQKLPSGNVQHDQNTSDDTITAVLATINEVIKKNPEFSRSLLDSGGIDRLMNITKRKEKYTSCVLKFASQVLYTMWQHNELRDVYKKNGWKEQDFVSKHFTAHNTPPSSPNNVNNTLNRPMASQGRTRYEDRTIQRGTSTLYSANDSSGAVMSNESAMLSEMKRKAEMQYKVNDLVAIRLTQYEDGLKLNRKFLGPYKIAKVHKHARYDVEKVGDGEGPSKTLTVSEFMKEFGTNTQSGLPSVGIGKKPEEQIGRETRSGRRL

SEQ ID NO: 25747 - DNA, 3705 bp, DROSOPHILA
gttcaattagaaatatactacagcttggataccagctcttgtgcgatgtgtcttactaacttaatgtctcgacgagcaacaccgaagaaaatattctcagataatggcacaaatttcaacggagaaggtggggaaggaagaactaaaaaggtggactttggaaaacttcttgttaaatatgaccagattaagttgcccaagagagagttgtaatgcgatatcaacggaatgattttttaaagctcttaaaaatgttctaaatctagttttcgaccttgttgcgaatttttaatctaaatgtttcttgaagatcaacgatcagaacatgaagaacgtaatcgtccgctattatatattacagtcgccttgcattttaacaatgtcaatatgtcaagagtaagatggaacttacagcaaactggcgcaaattaggggcaacagtccgttactcacctatatccgcgctcaaatacaactatatttgcaatcttgtatggtaaacaaacgtaatttgcaattttcattgcaccttgtttaaaaattgtcaaaattttgtagtcctgaaaacgctctctgtagctaaagtgatttaataaatttttaaataaatgtgtatgatttgcactgagaattgtttatgcagaaatcacccaagcttatcaatttgctattttaaataccacgacgattttagaatgatcgaagtctattttctgttggctacagatataattgagcatagctacgcgtatgcatatgttacaaaagtgaacgacaagagacttcattgcagagaaacagagagaaagaggagcttagaggctcccgcaacttcccagcttatttacataagtagataacgagcataactgtgcctccaaagtgtgcgataaaaaaattacgatcaggctggaatcgtcgtaaattattgtgaaatcagttaaactttttatttattgataagataccataacatacacgaatattttacaagcttaagttaaagattatcagattgatgagagccattttgttttttgtttgcaattcgggacccaaattgaatagcccttttctttaagaacacaacatctcgcaaaccgatttgatagccatacagtctcagaagtaatttatcgccgactccttccgggaaaccaaagcaacatttttgatacacttctaacgatcttataaattttacaaagttctcttcgatgaatggggatcttgctgttttaccagtatctgcaataatgcggtcatctctggctaaattacgggccgaaatacgttgccagtccctttcaagttcgttttgcacagcaagttggcgctccagatcgtttcccagacaacggctataactgttgcgatagcgggtatacccaccaaatagttcatctgccccgcttccgataagagcgactctagcagtagagtgagtgcaatgcgaagcaaaccagaaggcacatccaagactctcatctaataccgtatctagcggatatataagatgctttatacgtgatgttaggtgctgctgcaattcaagtcgagttacattcactttcagtagattccagcacctctccggacaaagctgttttagttcattgacagatactaatgacgtttttctatctggtacatcaaaaagcttttccgatatattttggcccttaacgctttcgaaagcaacattaataagttcgatgggttcatttactggtacaaattggttggccagcaaggccaaaattgtacagtcaaggccacccgaaaatagaatacacaattttgcgtgtctgcatggaggcgatatatttaatttttgcatgcagagtctgcaaaatggagccatgtttctaacacgattttttatcgaatcggatagcagtgtatggagaatagatagagtatacttaatttctgactgatctattaagtttttataaaggttcacgttattcttgatgtattgaaattcatagaagttataactaaatgcggggttgcaatttaacatccaatctggcgacattggactctctactgcagttttccacccaatcgcaagatcaaggttgcgtaaaagctgagtcgaataattattgaggggctgccatggatacaatacgcacgaattcagatcatttagtttaactcgaaaaagacccaatgggggcaattccagtgatatttttttatcttcaaaatgtgatgtgctcaataattggaagccattacaaatgcgttcaattaatagtgaatttcttccaagtgcgtcgcgactaaagtaaaggatttgttctcgtttgtcataaattattaaacaatgtggtccctccaatcgcttaagtatcttcaaaatattctgttctttacaacggcattcagctagcctttccgctatccaagtcgtgtcagacatatattcaggctttgaagtattgtaaatgtctccattgaaaagaaatataaaatcgtcctccaccacaggttgcttttgtacactttccccttgttgccataacacgaagccagcaaataaaatttttccaaaacaataatctataaccacctcgtcttgcacatcaggaccgcggtttttcagaattactttcagagcgctagaaatattaaaggagtttaaaggaacattgttcacgactgaacaaaatattccacacattattgacgtttgtatagaaaagttatcaaagaaatatattggtagatctatcaggtataaatctatctttaaccataaacaattaaagtgtgtgtcaagatagcgtcagcaagattgcggcatttgaggaatagtggaatataaaacatgggaccttaataattagtgacgaaatcaagaacaagagagaatgctatattcgaattcttcgactatccgaactattctgggatatctatcgcttgttagggaataaaatgagaaaaaatttaaaaactattcaaaaatgtggacgtgacagttttgcgcggttttaggtctttaatttgcaaatcttttggcaaatcgatagaaatatacaaaaccaataaaattatgaaaaaatatccaacaatttttcaaaaaatgtggacatggcagtattgggcggtttaaggcggtatagtgggtgtggcaaattttttttttagcaaatcgataaaaatatacaatgctaacaaaaatttaacaatatcaacaaatttatcaaagtgtgatcagcgaatctagtatacccttttacagatatgttgagattggaatgaactttcgatttacatacatatttacgcctaaagacattagaataacaagatgcgtaatagggcataacaccattctctttgtttgcaattagagtatccattcgttttactgcctattcagaatacatggcattcagttggtcgcgttctctttgcgttcacttcgtatgtattcggactttaaggagtccaatcgaaatgaactaactgaatgtcttcaaagaatgaatgaaacgaatgatttttcaatggtaattcagagtactctgaattcctaatgttgtcattgggtaaaatgagttcggatagcgcggatgaagtcaaagttggttttttttatgtttatggttattataacaatataataatattgtagcatttgtcttatatagattatttagcgatcttaccaaattgtgttgtcaa

SEQ ID NO: 25748 - DNA, 1705 bp, DROSOPHILA
aacgtcaataatgtgtggaatattttgttcagtcgtgaacaatgttcctttaaactcctttaatatttctagcgctctgaaagtaattctgaaaaaccgcggtcctgatgtgcaagacgaggtggttatagattattgttttggaaaaattttatttgctggcttcgtgttatggcaacaaggggaaagtgtacaaaagcaacctgtggtggaggacgattttatatttcttttcaatggagacatttacaatacttcaaagcctgaatatatgtctgacacgacttggatagcggaaaggctagctgaatgccgttgtaaagaacagaatattttgaagatacttaagcgattggagggaccacattgtttaataatttatgacaaacgagaacaaatcctttactttagtcgcgacgcacttggaagaaattcactattaattgaacgcatttgtaatggcttccaattattgagcacatcacattttgaagataaaaaaatatcactggaattgcccccattgggtctttttcgagttaaactaaatgatctgaattcgtgcgtattgtatccatggcagcccctcaataattattcgactcagcttttacgcaaccttgatcttgcgattgggtggaaaactgcagtagagagtccaatgtcgccagattggatgttaaattgcaaccccgcatttagttataacttctatgaatttcaatacatcaagaataacgtgaacctttataaaaacttaatagatcagtcagaaattaagtatactctatctattctccatacactgctatccgattcgataaaaaatcgtgttagaaacatggctccattttgcagactctgcatgcaaaaattaaatatatcgcctccatgcagacacgcaaaattgtgtattctattttcgggtggccttgactgtacaattttggccttgctggccaaccaatttgtaccagtaaatgaacccatcgaacttattaatgttgctttcgaaagcgttaagggccaaaatatatcggaaaagctttttgatgtaccagatagaaaaacgtcattagtatctgtcaatgaactaaaacagctttgtccggagaggtgctggaatctactgaaagtgaatgtaactcgacttgaattgcagcagcacctaacatcacgtataaagcatcttatatatccgctagatacggtattagatgagagtcttggatgtgccttctggtttgcttcgcattgcactcactctactgctagagtcgctcttatcggaagcggggcagatgaactatttggtgggtatacccgctatcgcaacagttatagccgttgtctgggaaacgatctggagcgccaacttgctgtgcaaaacgaacttgaaagggactggcaacgtatttcggcccgtaatttagccagagatgaccgcattattgcagatactggtaaaacagcaagatccccattcatcgaagagaactttgtaaaatttataagatcgttagaagtgtatcaaaaatgttgctttggtttcccggaaggagtcggcgataaattacttctgagactgtatggctatcaaatcggtttgcgagatgttgtgttcttaaagaaaagggctattcaatttgggtcccgaattgcaaacaaaaaacaaaatggctctcatcaatctgataatctttaa

SEQ ID NO: 25749 - protein, 564 aa, DROSOPHILA
MCGIFCSVVNNVPLNSFNISSALKVILKNRGPDVQDEVVIDYCFGKILFAGFVLWQQGESVQKQPVVEDDFIFLFNGDIYNTSKPEYMSDTTWIAERLAECRCKEQNILKILKRLEGPHCLIIYDKREQILYFSRDALGRNSLLIERICNGFQLLSTSHFEDKKISLELPPLGLFRVKLNDLNSCVLYPWQPLNNYSTQLLRNLDLAIGWKTAVESPMSPDWMLNCNPAFSYNFYEFQYIKNNVNLYKNLIDQSEIKYTLSILHTLLSDSIKNRVRNMAPFCRLCMQKLNISPPCRHAKLCILFSGGLDCTILALLANQFVPVNEPIELINVAFESVKGQNISEKLFDVPDRKTSLVSVNELKQLCPERCWNLLKVNVTRLELQQHLTSRIKHLIYPLDTVLDESLGCAFWFASHCTHSTARVALIGSGADELFGGYTRYRNSYSRCLGNDLERQLAVQNELERDWQRISARNLARDDRIIADTGKTARSPFIEENFVKFIRSLEVYQKCCFGFPEGVGDKLLLRLYGYQIGLRDVVFLKKRAIQFGSRIANKKQNGSHQSDNL

SEQ ID NO: 25750 - DNA, 3792 bp, DROSOPHILA
caaagacaaaagatttagttaatttcctagtgcaaaaataaaaaaaaacacacgtaaagcgaacggagttttaataattatctttacaaaattaaattataaaagaaatttttaaaaaagcctcctctggagaccaacctttttctttgggaatatcatttgaatggaggttatggttactagatgttaaaaaaattatcaggagagtgctatagttcaagcaaagacactagaattctagggtctttggttcaagtgatcgacttagatactcagcttatgggaacacaagtaaaacaaagctagtgtgaatgcgaactcaaattgaattatttttctgggatcttgatagatattaagaagtaaaatgagaaaaaatttaaaaattgtaccaaagtgtgggcgtgaccggttcggcggcttttgggcgttagagtaggcatggcaaaacgttttttggcaaatggccaaaaatatatggttcaaaatgtgggcgtggcagttttgtgcaacttgtgggcgtgccaacatggctcgaacttgtgctgcgtttttgtctctgggcagtctgtgggcgtttactcgtcatagtaattggcaagagtaaagtgtgagcgtggcccttttttatgctgtttttttctggccagaaatggctgtgtatttgaattaacttgtcttaatttgcctttggaatacattacctaccagagaaatgttaagcagtgaattgatgaaatagtgttccactgcggccgaaaccgaattaagtacacaagttcccatcttaccattaatgactcttaatttgtaatttgtacggagggatgtggggtttttctagatttaataccgattcagttcattcctcacttaaggtaattttgtatttagactagtattgccccatttctgtcacatttctcggccgcacactacagattgaaatttttaagaagagtttcccaaataatggctgttaattactaccaattgtcgctggtgtcattagaactgtttatttatttttacaccaatataaactgaagctggtgacgaacacttttaagcctcagtttcagactgcagcttggcaacatatgctgccttatgagctgcaatcttagtcttccgttgctcgtttgtgagtttcttagcattccaccttttcttcgtaacggcagaagacttcttagcggtgaccttgtgtgtagggtcgttacgaattgcctggtgggcttttttatagatatcctcaagctgcaaaaccaaagtaatgaattagacttttaataattaaatcaagatcaaattgttaaagctcatatttttaagactaaataatatatatggttatctgaatttaaatatacaatatttgatgaaaagtatggaccaggttgaaagacaaagcagtatatgtaatatggatcaagatcgctaacacagtcgatacgcaacataaattttgagagctcggaatctgaaattcaacatacagatgcacgaagcataataagatcagcccttaaggcaacaggagcattatctgctcggctggtgatcataatcaaggcatatattgtccaaatatgctttttaacgaacctattatgttatttaattcgcgagtatttggattataaattgtataaaatgtgtaaccataacaggaagtgtgatccattgggagaaaaacttcgaacataggttgcagattttatgttgtccacttatggcacagttagcgtcgtgtgcgaaacgcagctgtaattttttaagtggacgtcttgaaaaactatgtagtacttacatcatcagcacgaatgcccaacttgatgtatcggctaaactgccttttgaagctctcctcatcctcctcctccaaagaacgcatatagtctgcaacgtgctggccaaatatatgagcgcgatgcacatcggcattaaagctcttggtttcagcagagtatccaggaaagcgtttcacagagtgaggtatgtttagaccaccatcaactgctcccttcatagcgccaaacacacgggcaccagttgtagtacgagcgagtccaacatccaagaagcaacggaatgcccctgggccgtcatcaacaggctcgacgttgaactcctcaccagtcacttcagtgcatcctgcatatagggagtccagtcccaacttgttaaggacacgacgggcgaccagcaggcctgtgcagtaagcagcagcgtagttggtcaatccaaccttaaataaatataatgggccatcaagttgagtacgccagaacgcagtgggaaaactcacctggatcccgtatttgggaagctcatgggaataagcagcgcacaccacgcgatcaccctcgatgcgagcataggcgatctgtactgtgatgtccttgttggacaaacgtacgatcaaacggtacttgggagtgttgtacttgttcttgtcctgaaatgttaggcgtttcctggcatagtaatcggtctttccttcgcgacgccttcggaacttgacttggtacctcttaaagtactgcttgttcttgactaccttaacgaaaccctgcaaaaaataaaaacaaatgcaactaataagccaaactttttagacgcctgaacacatcattttctcggcacgaccaaatcacttatttcagtatttatcttaataaataaatgctcaatgtttcgagtccatgctcgcttttctatagcacctaccattttaaaatttgataacaatataaccgctaaaataaaaaagatttattaaaatcacgtggagtagaaatattttacacatacctcgccggaaattgctagcaaaaagaaggaaaatagtgcggccttattggatccaagaaacaaatgtactaaaaaataccttacaataaaaataataaatgccaatataaggcaagacagcgtcaaaggcacagcacaacttatggaacacttggaaatggtgtccaatttagaattatttattttcgatattaagttgataagtttcctttccagaatagtgatgtggaatcagattgacgtaggtgttaacattcaacaacgcaatttcttaaagtacgaaacaagcgatgtgaacggtatgaacgatatgacaggtttacactgctaatcgcatttaatttcacttcaatagccatgtgaagtatgacaattagatcaagtaatgttgttaaatgctacattgtctaactgagttgtcttcacagatagggacgaaatagaattttaaactgcaatcactgtactataatttttatatcctctgctcgaatatattacggattttttaatcgtatactatactagattcaatgaaaaatatgtacaggtagaaggaagcgtttccgattttgtaaagtatatcaggcatgctctgataataaaaaaattttaagggtatattaagagttggcttcttgatattgcccaaaatgttaccaaattagacaaagggtgacccaggaggaagtgtaacatcggttaaaatggttgggacgtccgctttaagcttcagagaagtggaaatgtgtaaatgtatagctttcacattagagtgaatataagtaaaatttataggcttggaaagataggcgaaattcaataatgaaatataagccacctaaacccaaaaagacctaaaacctaaaagaaatatttaacgtcttattatacgaattagttgtaaattaacttcgacgtgactacacgaaaatacacatatttttccagtgaaatctataatgaatagcgcaa

SEQ ID NO: 25751 - DNA, 1021 bp, DROSOPHILA
cgtgattttaataaatcttttttattttagcggttatattgttatcaaattttaaaatgggtttcgttaaggtagtcaagaacaagcagtactttaagaggtaccaagtcaagttccgaaggcgtcgcgaaggaaagaccgattactatgccaggaaacgcctaacatttcaggacaagaacaagtacaacactcccaagtaccgtttgatcgtacgtttgtccaacaaggacatcacagtacagatcgcctatgctcgcatcgagggtgatcgcgtggtgtgcgctgcttattcccatgagcttcccaaatacgggatccaggttggattgaccaactacgctgctgcttactgcacaggcctgctggtcgcccgtcgtgtccttaacaagttgggactggactccctatatgcaggatgcactgaagtgactggtgaggagttcaacgtcgagcctgttgatgacggcccaggggcattccgttgcttcttggatgttggactcgctcgtactacaactggtgcccgtgtgtttggcgctatgaagggagcagttgatggtggtctaaacatacctcactctgtgaaacgctttcctggatactctgctgaaaccaagagctttaatgccgatgtgcatcgcgctcatatatttggccagcacgttgcagactatatgcgttctttggaggaggaggatgaggagagcttcaaaaggcagtttagccgatacatcaagttgggcattcgtgctgatgatcttgaggatatctataaaaaagcccaccaggcaattcgtaacgaccctacacacaaggtcaccgctaagaagtcttctgccgttacgaagaaaaggtggaatgctaagaaactcacaaacgagcaacggaagactaagattgcagctcataaggcagcatatgttgccaagctgcagtctgaaactgaggcttaaaagtgttcgtcaccagcttcagtttatattggtgtaaaaataaataaacagttctaatgacacca

SEQ ID NO: 25752 - protein, 299 aa, DROSOPHILA
MGFVKVVKNKQYFKRYQVKFRRRREGKTDYYARKRLTFQDKNKYNTPKYRLIVRLSNKDITVQIAYARIEGDRVVCAAYSHELPKYGIQVGLTNYAAAYCTGLLVARRVLNKLGLDSLYAGCTEVTGEEFNVEPVDDGPGAFRCFLDVGLARTTTGARVFGAMKGAVDGGLNIPHSVKRFPGYSAETKSFNADVHRAHIFGQHVADYMRSLEEEDEESFKRQFSRYIKLGIRADDLEDIYKKAHQAIRNDPTHKVTAKKSSAVTKKRWNAKKLTNEQRKTKIAAHKAAYVAKLQSETEA

SEQ ID NO: 25753 - DNA, 4064 bp, DROSOPHILA
aagggtgacccaggaggaagtgtaacatcggttaaaatggttgggacgtccgctttaagcttcagagaagtggaaatgtgtaaatgtatagctttcacattagagtgaatataagtaaaatttataggcttggaaagataggcgaaattcaataatgaaatataagccacctaaacccaaaaagacctaaaacctaaaagaaatatttaacgtcttattatacgaattagttgtaaattaacttcgacgtgactacacgaaaatacacatatttttccagtgaaatctataatgaatagcgcaagtgtcatgtctttcgctaggaactgtagcatcggcttagagaatcttaaggccgttatatctatttgaaccagttcagtctttccttgaccttaaacacaatgtgacccaaaccatgtttctcaagttgtgaaagtgataataaaaaactactggaccgattagcaatgcaatttgttgtgaagatcccgaaattttttgagcctttttgaaagtgttcgtttccccattttgcaaacattttagttcgtcgccgataaaaaaacgagtttgtttggcgacagtgtttgatttgattatttctgactcaaatgaaattgtggccaaaatcacaaactaaataactaaaacatataattgctttgggcaaacatttatttaaaaaaaaatatgtcttcattcttccctacaaatcgactgcaaaaattatatttgtagggtctagtatctgcttatgactcgttcgaataaaaaaacgtatctgccttggcaataaatatagtggttaaatttaaaccgcccgaccgatttctcggctttaagtttgcctaacgcttttgttctcgtaatagtgagattagcaccgaaaatgctgggatgtgcttagtgggtctttgttgttatacaaatgaagattagttaaggaactctccttataaataaataacgttttaccgctttatactcgccaaggtcgcacttataatcacattaaccatgaacccgtacaataagtttcaagatatggttttaaagcaatggttggtcatggatgatgcacttttccaagcatgtgggttttgtctagttgcggcatctgatgaccagtcggtgtttatcacttgggacaagtattatttgctaaacatacgctttaagatgccagaggacagctgcaggataaaaatgactgctgtgcgaattcctgtgcctaaaagtggaggaggctatattaggagtgtgcatgctttgaggtacaatacgattctgcatatgtcgaatggggagttatacagctttacctcatttaaggccctgaatcttataaaatggctcaatgcagttcgttgtttagctatagtcgatgtgggattcagcgtgattcgaatagagaatcgccgactgctgctgcagacgtatgttgatcttcctgattgggaaaaggacaagtgtacactgcaacattcatttgacataacttttgaccaggagaacatatttcagagcgactggcagcataacgaatacactctgacaactttaaaagtgaccgaaaaggaagaagagttcgcacgaactcttttcggcacaagagcggcagaacaaaattatattcacatattcagcataggtggacatgtatttgcgttggcttataattacaaaacaacatcagatagtaccggtcctgactataatatcgagctcctgtgcatttatgcagcgcacgttaaattcattaaactgctaccaatggagaacctttgtttgatttttctcggctctggcagtatagacatgtggtacacgtccaggctcctttctataaaacagcgtcaaatttttcacacaggtgctgaatggctggactacgatgcaacaagtgccaatggcgacgtctattacacagacgggaaccagctagtgcgactgcgattcaaatacaacgcccagcttgacgagtgttttgtctacaccttgacgaagccagtctccgggatatacgcatgctgttggatagaccaaaaagaagaattgttctgcctgagcgacaacaacacactttattgcatttcttttgggatgtccgaaatgaacgatcaaacgctgagaatttcaacgccgaactttgcaccatcagctttgatgagactgcagcacaatgccgaagccttgcaggaatataaaaaacatcctgattcactaaggcaaaaattatatagggagtataagcaacagcagcttatatctatgagtaaaaatatccggagagtaaatgcggccattaaaacctcactggaataccaccttcaagtacctattgatattgtcagggataatgttcttctacaggcagcgcagagtctagatcttgatcagaaaagctgtatatacgctgtgcttaacgtcagacttatcgatagccggcccctattgcaggggacattttggaagcttttgatatgctatgacaaccgcatcaatgtcctcctactgcccacagaagtacttgttaataaaaaatgttgcgtggttatagcgttaagtaaaatgaaaaacgagcatctgcctcattttaaaatccagcttctgcaacttgtggaacttaatgagcaatcatgtgctgtactttttcaggtaccggtagaaagttgtggaaatacattccgagcaattttcagtggaagaatagtacctgcgaaatacaggttgaacaataagcaatttatggaaaggaaaccaagtataccaaaaatcaggcaggtcagcagtcttggaagtcaattcacttttcccaatatagcggatctattttgcaatgccgtctccattcacaatgactattgtaaattgcattttataaacgaaaagttgcaattccatttaaatggaatgttggaaagtaaagatgcttcagcgatttactattttaagcaacatattattctaaactcggatcaactggaatctgcatccaaaaattatgacatgacctttcatacaataatggtaagtaaataatttatctttaacctaagattgatcttaaaagaagatttcagagcgacgttgaccgatttcggtaccgacaatgtaacgacatcttggcccctggaacaaatttttccgttttaaagtcaaaatataatatcattagaaatgacattcattaagaattttgcgtacatcgaaactattcaataaccttttacgctcacttttcttatttataccctatagttagataaactaaatctaaatctaataaactaaatctaatctaatcgttccaaggcttgtacgtatgatattttagacaccagacccatatccaaaagttgtcattgtgtaatcctcttctctgcattattaagaaaattattgaattgtgtctatcacaagcgcaaagatcatcccatcagaactatgctatgtgatttttgaagtaatagcgcaaacattgttgttgtctggactttagatgataaatcaatcgctcagctacaagataaacattttgtacaagaaaaatataatgagtatatatgcttagttataaaacaaataaaatattcttaagatgttcatttgggttcatttgtatattacacccttaccttattggtcctgtaaatttctaccgatttgcaaaaaaaaaaatgtttgccacgcacactctaacgacctaaagccgccaaaccggtcacgccacccttttaaaattttttttgacattccccaatatctaacgatatcccagaaaaatttttaaatttctcgttcatttccacgagccgagtaacgggtatcttatagtcggggaacccgacaatagcatgcattctcccttgtttaattttaaatcatccatatcgtaagttttttcttataaatttagcgacgggtttcaggtttgtactttgcgagtaaataataatattttaaaatattttatttgaatctaattaggcgtttttcgtgttagttcttttatttatttattttaacagcatcaaacagctataaacttgcatctctac

SEQ ID NO: 25754 - DNA, 2064 bp, DROSOPHILA
cacttataatcacattaaccatgaacccgtacaataagtttcaagatatggttttaaagcaatggttggtcatggatgatgcacttttccaagcatgtgggttttgtctagttgcggcatctgatgaccagtcggtgtttatcacttgggacaagtattatttgctaaacatacgctttaagatgccagaggacagctgcaggataaaaatgactgctgtgcgaattcctgtgcctaaaagtggaggaggctatattaggagtgtgcatgctttgaggtacaatacgattctgcatatgtcgaatggggagttatacagctttacctcatttaaggccctgaatcttataaaatggctcaatgcagttcgttgtttagctatagtcgatgtgggattcagcgtgattcgaatagagaatcgccgactgctgctgcagacgtatgttgatcttcctgattgggaaaaggacaagtgtacactgcaacattcatttgacataacttttgaccaggagaacatatttcagagcgactggcagcataacgaatacactctgacaactttaaaagtgaccgaaaaggaagaagagttcgcacgaactcttttcggcacaagagcggcagaacaaaattatattcacatattcagcataggtggacatgtatttgcgttggcttataattacaaaacaacatcagatagtaccggtcctgactataatatcgagctcctgtgcatttatgcagcgcacgttaaattcattaaactgctaccaatggagaacctttgtttgatttttctcggctctggcagtatagacatgtggtacacgtccaggctcctttctataaaacagcgtcaaatttttcacacaggtgctgaatggctggactacgatgcaacaagtgccaatggcgacgtctattacacagacgggaaccagctagtgcgactgcgattcaaatacaacgcccagcttgacgagtgttttgtctacaccttgacgaagccagtctccgggatatacgcatgctgttggatagaccaaaaagaagaattgttctgcctgagcgacaacaacacactttattgcatttcttttgggatgtccgaaatgaacgatcaaacgctgagaatttcaacgccgaactttgcaccatcagctttgatgagactgcagcacaatgccgaagccttgcaggaatataaaaaacatcctgattcactaaggcaaaaattatatagggagtataagcaacagcagcttatatctatgagtaaaaatatccggagagtaaatgcggccattaaaacctcactggaataccaccttcaagtacctattgatattgtcagggataatgttcttctacaggcagcgcagagtctagatcttgatcagaaaagctgtatatacgctgtgcttaacgtcagacttatcgatagccggcccctattgcaggggacattttggaagcttttgatatgctatgacaaccgcatcaatgtcctcctactgcccacagaagtacttgttaataaaaaatgttgcgtggttatagcgttaagtaaaatgaaaaacgagcatctgcctcattttaaaatccagcttctgcaacttgtggaacttaatgagcaatcatgtgctgtactttttcaggtaccggtagaaagttgtggaaatacattccgagcaattttcagtggaagaatagtacctgcgaaatacaggttgaacaataagcaatttatggaaaggaaaccaagtataccaaaaatcaggcaggtcagcagtcttggaagtcaattcacttttcccaatatagcggatctattttgcaatgccgtctccattcacaatgactattgtaaattgcattttataaacgaaaagttgcaattccatttaaatggaatgttggaaagtaaagatgcttcagcgatttactattttaagcaacatattattctaaactcggatcaactggaatctgcatccaaaaattatgacatgacctttcatacaataatggtaagtaaataatttatctttaacctaagat

SEQ ID NO: 25755 - protein, 674 aa, DROSOPHILA
MNPYNKFQDMVLKQWLVMDDALFQACGFCLVAASDDQSVFITWDKYYLLNIRFKMPEDSCRIKMTAVRIPVPKSGGGYIRSVHALRYNTILHMSNGELYSFTSFKALNLIKWLNAVRCLAIVDVGFSVIRIENRRLLLQTYVDLPDWEKDKCTLQHSFDITFDQENIFQSDWQHNEYTLTTLKVTEKEEEFARTLFGTRAAEQNYIHIFSIGGHVFALAYNYKTTSDSTGPDYNIELLCIYAAHVKFIKLLPMENLCLIFLGSGSIDMWYTSRLLSIKQRQIFHTGAEWLDYDATSANGDVYYTDGNQLVRLRFKYNAQLDECFVYTLTKPVSGIYACCWIDQKEELFCLSDNNTLYCISFGMSEMNDQTLRISTPNFAPSALMRLQHNAEALQEYKKHPDSLRQKLYREYKQQQLISMSKNIRRVNAAIKTSLEYHLQVPIDIVRDNVLLQAAQSLDLDQKSCIYAVLNVRLIDSRPLLQGTFWKLLICYDNRINVLLLPTEVLVNKKCCVVIALSKMKNEHLPHFKIQLLQLVELNEQSCAVLFQVPVESCGNTFRAIFSGRIVPAKYRLNNKQFMERKPSIPKIRQVSSLGSQFTFPNIADLFCNAVSIHNDYCKLHFINEKLQFHLNGMLESKDASAIYYFKQHIILNSDQLESASKNYDMTFHTIMVSK

SEQ ID NO: 25756 - DNA, 3307 bp, DROSOPHILA
tttaattttaattttaaaattttttaattttaaagctttttaaattcgtttgttaaaatcgccgctcgaattagctaccgtttacacatttatatttatgttcaattctaatttgtctctcatctgacaattttttaaaagcaaaatttttttttgaaacacttttaatgttaatattacatcattttaagtcaaatgacttaataaatatactaattaattaaaggaaaaacaatagaaattattataactactgtaatttcataaatttcattaaaatataataactagaattattctagtgtctttgctttgttcatatcttgaggcaccgaagtgcggacacaagcactcaacaatcattgccttattaatttttcacacgcctcaagatgaatactctaatgacaaatattcttacataaagtcatttttgaaaattttttttgtgataatatgtacatagatttggctatttctattctattttcaaataataataacgttaaggcaatgcaaaacaagaatttttcgcatggtgccaattgatcaaaaataatatagatttaaagtcaaagaactttgatggtgaagggcatattttgtcaaatttacaatgcatgagcatacgtgtgcacacataaagttgtctgctatcactgtatgcgtagaaaagagcggttcgctgtagcgctcttcgctctctcgctctctaacaaaaattcgagagagcctggagccacctctagagccacggccaaaaaattgtgtgccaaaaaatcgtatggcgttacgcatcttgttattctagtgtctttgctagtacgatagattgctggttcataattgtactcaattttaagtgtctttactgcttttactttgcttttgtgcaaatatatgtgtagatgtttcacaagtgtgaacaggccttaaacattgtgtttttctggcattctagtcggctttatttgagctgtttcacaaacgaaagatatggctttcttgtaatcgtgaaccgtaaacttgtgtgttgcgctaggaatagggtgggctgtgtagagctcttcatgtttatatatattataacaaaaataggagcatccgacaaatcaaccctcactcgtatagtctatgcgacgtatatcaagaacttataccaacatctgaaattacgtgagtttcaaatataactgaggcatgcacaaaattataaacgttaatcccaatttaagccaatcgattaatggagcaaaactcaactgcggctggcaacgccaaccctgctacagttcctgccaaaaggggtacgcaacaaggtcgcaagaagtctggccccaagttcgaactgtctgaggcccaaaaatgcgacattaaggaggcctttgatctatttgacaacgaaggcacgggttacattgaggtaaaggaacttaaggtggccattagggctctgggattcgagccaaaaaaggaggagattaagaggatgatttccgacattgacaaggactgcagtgggcgcattgcgtttaacgtctttctgcaactgatgactataaagatggccgaaaaggacactaaggaagagattcttaaggcttttcggctttttgatgatgatgacactggaaaaatttcattcagaaatctaaagagggtggctcgtgaacttggtgaaacacttactgacgaggaactgcgagagatgatagacgaagccgatttggacaatgacggggaggtaaatcaagaagaatttctgcgaatcatgaagaagactagtttgtattaaagagcagcgcttaatcttcattttaaaacacttcgtgcgttcctggtgcacttaatgaaacattctcaaaataatttgccgttttaagtcatcaattataaatgtaagttttagatattttaaagttttacgtatgagtattacatcaagaaataattgttcagctcgttttgaattttaaacaaaaatactttttcccgatttgcgataaaagggcgtagtaacatcaactgcaaacatttataatatcaaatttcatgatggtgaatagtaaaatttaaaacaaaatgtaagggaactaattattggtatatgttacttgaattaggtcacaacgctactttttacagcttattgtctaaatctaagcaaggtaaataaattcatacaatttttagataagaaggtacaatatcacatcgtccacaagtaaattgcaatgcttatatcagaaatgttacaatgccttgctagtgtttatatattagttgagcatactatttaaaaactagaaccaaatttttatttttaattaaacaatgaagctaaaaaaataagtgaatcaaagatttttatttcgatttgggaaatgttattaactaaaccaatatacatattttacttatatgtttatcaatttcataaataaattcgtgtgcttggttttgcaaattttatttttataccctacgaagagtaaaagcaaagacactagaataacaagatgccatacgccatacgacgccgtgggtcccaggctctcccggatttttgttcgagagcgtgagagcgaagagcgctacagtgaacagctattttctacgcatacactgatagacaactctatgtgtgcacacgtatatgctcatgcattgtaaatttgacaaaatattcccttcatcttttttttttgatcaattggcaccttgcgaaaaattcttgtttttcattgccttaacgttattattatttaaatatagcttagaactagccgaatcaatgtacataattttaaaaaataaatttcaaatatgactatattagaattagtattcagcttgcaacgtgtgaaaaattaatgaggcaatgattgcagagagcttgtgtccgcacttcgtgcctcaagatatgacttttccccttgaaaatatatttgcgtgcgtttgagcaaaagatggtaactgcagaaacttttcagttaatgaatttaatataataattgccaagctcatatctctacacatttttaaattttcacaaaagtcgaattgcgaattagacgatgatgttatgttgccaatagagttcaattcgataatatatcagcctttcattgtaaaaaaagaaatacagcaacaagaatactctgtatcattttccaaaattgtataagacaatgagaggtacatactttgaccaaaatatagataactttttgtgcaataatgtactcattgaattaacttccagtagacattttgttagatatattgctaagggatccagttgcga

SEQ ID NO: 25757 - DNA, 1248 bp, DROSOPHILA
ctttcttgtaatcgtgaaccgtaaacttgtgtgttgcgctaggaatagggtgggctgtgtagagctcttcatgtttatatatattataacaaaaataggagcatccgacaaatcaaccctcactcgtatagtctatgcgacgtatatcaagaacttataccaacatctgaaattacccaatcgattaatggagcaaaactcaactgcggctggcaacgccaaccctgctacagttcctgccaaaaggggtacgcaacaaggtcgcaagaagtctggccccaagttcgaactgtctgaggcccaaaaatgcgacattaaggaggcctttgatctatttgacaacgaaggcacgggttacattgaggtaaaggaacttaaggtggccattagggctctgggattcgagccaaaaaaggaggagattaagaggatgatttccgacattgacaaggactgcagtgggcgcattgcgtttaacgtctttctgcaactgatgactataaagatggccgaaaaggacactaaggaagagattcttaaggcttttcggctttttgatgatgatgacactggaaaaatttcattcagaaatctaaagagggtggctcgtgaacttggtgaaacacttactgacgaggaactgcgagagatgatagacgaagccgatttggacaatgacggggaggtaaatcaagaagaatttctgcgaatcatgaagaagactagtttgtattaaagagcagcgcttaatcttcattttaaaacacttcgtgcgttcctggtgcacttaatgaaacattctcaaaataatttgccgttttaagtcatcaattataaatgtaagttttagatattttaaagttttacgtatgagtattacatcaagaaataattgttcagctcgttttgaattttaaacaaaaatactttttcccgatttgcgataaaagggcgtagtaacatcaactgcaaacatttataatatcaaatttcatgatggtgaatagtaaaatttaaaacaaaatgtaagggaactaattattggtatatgttacttgaattaggtcacaacgctactttttacagcttattgtctaaatctaagcaaggtaaataaattcatacaatttttagataagaaggtacaatatcacatcgtccacaagtaaattgcaatgcttatatcagaaatgttacaatgccttgctagtgtttatatattagttgagcatactatttaaaaactag

SEQ ID NO: 25758 - protein, 221 aa, DROSOPHILA
MFIYIITKIGASDKSTLTRIVYATYIKNLYQHLKLPNRLMEQNSTAAGNANPATVPAKRGTQQGRKKSGPKFELSEAQKCDIKEAFDLFDNEGTGYIEVKELKVAIRALGFEPKKEEIKRMISDIDKDCSGRIAFNVFLQLMTIKMAEKDTKEEILKAFRLFDDDDTGKISFRNLKRVARELGETLTDEELREMIDEADLDNDGEVNQEEFLRIMKKTSLY

SEQ ID NO: 25759 - DNA, 8503 bp, DROSOPHILA
acatatatattttattttctataacctatttctattgtttcaaactatatgggcgttcatcaattactgtgcggattaagtttgcaatgttttcagaaaaataagttgtttcgtcgaaatccgaatccgcgcaagtctgagccaatgtagtagcgtagagcacttgttttcgattcgtcaacgtttcattattttgtcaataaatgacagaattgactgctgttgcctttgtggcaattcactgactgttaaattaatatgtatcctcattacgtggcaagacaagttagtattattcgcacttgtttggtgtcttgccccacttaatacatttgtctgtcttgccattagccgattagcttagcaagatctttccctgcaaatggtgatgggtaaaacagaaaaatctaacatcgatgtccgaaaatttcgatgtttccgatttttttttaaatatctatgtagcgctatctccgatgtttcttccagctctattttgtagtttgcgagatcacagccttcagtcagacagaccggacctgatcgaatagtgtttatgatcaggagtacactatactttaaggttcggaaacacatttttatgccgactacaaacatacccttaacctttctagcatacgacattgctctaaaacattttaaaattccgaaatctcctttcttattataacaattttagaaaattatttgtttctttttattggaaatgtaattgcagaacatttgtatgccgactacaaacatactcttaacctttctagcatacgacattgctctaaaacattttaaaattcttaaatcttatttcttataaaaattttagaaaattattgtttgtatttattggaaatgaaattgcagaatggaatggttctatcgttgcatgtcaacatagaaactggtatatggtatataaactggtatattgtatattattatatacaataatgcttagcgcttttttcatcgttccgtgttcatcaccagttgattgtcgctattttgacggaaatattttaagtatgcacacaaatttaccgcgaaaccaggtgtttttgtacaacaattgttcaaagttaaagaaaactaaaaaacacgggtagaaggttgcaacaattaatacaggaaaattacaaaattccaaggtaagccaagcgtgcattgtaaaataaaggtaaaaacgttgcgcaatatcaaacatttatattattgcgaatttaatgttcttgaacttaagcggtcctccccgtaccatataatttatttttaaatcaaaaaagtaaacaatttccaaccgttccaaacatttttaatgcctggtttaagttgtcgtaattaatcggcacatccttaactcgaaaattgcttaattcataagaatgaccaactaatggcatagttttttgtttacaataattcttgaaaacattgctattgaacgtacatatttttgtatcaaatgcaaattcattctgtatgtatgtatgtatgtatgtatgcatttacatatgtgtgtatatcttatgtggtcggaaaccttttcaaattttcatcgggaaaagacaaattttatagttacattaaattaaagcaggcctttaaaatttggattcattgtcaatgtttcggctagtcggatttgtcaaacagcagccactcgtgtattactaattactaacttgttaatccgcttttgttctcgtatccccaaaggtttgtttggatgtaaagtaatggtcttggtgtgcaatgagtggttaaaaaataatgttgatgaagaccagacgtcaagttcattatcgccgacgccagcatcaggagcagtcggatcaacggcattaaacagaactggcacaaccgacacggccacggaattacctcagacgaccagatatccatccggggaagaacctgctgtgaagccagaggaggcgcaatacgctttaaacatggaaactgaaaaaaatttggagcaggacaatttctttcatataatggacataaaagaagatatggctgatagtaacaacgaggcgtccacgaagaaccaggaaaataataatatggaactttgtgattccaacacagtatgtattgaccgacgtccggctgaagtttcccagcatgctatgaatatggccatgaactctgtgctgaatgcaaataacaccggggttggagttcgagtaactactgcctgcagtctgtttagcccactaggagtactaaacaatagtgctttacaaagggaggtggcatcggaatgcggcactttacaagtctcttcagtgcccccaacttctggcgtagatctagacataggattggagtctgccccaacgccatgtaagggtgcagcaaaaatcgtactcctatgtgaaccaaagtcgcacaagtttgaaacgagatctatattgctgcagcccaaccaggattgcaaggtgggccgccttatagctaaaagtaaggcgggtgaggggaacgctatatttgactgtaaagtattgtcaagaaaccatgcgattttgtggtacactccagacggtaaattctgggtcaaagacacaaaatccagcaacggtacctttattaacgacaacaagttgggtagtgatccagcggaactacattatggcgatattgtgaagttcggcgttgaggtaattgagaattcacgtcaggaggtacacgggtgtatcctggcccgtgtcgccctctttctacccaatggacaagaggccatttcagttgaggcagagcagatgatgttgactgtgcctaaccgaatcagctttgatgaagtgcagcgcctaagctcgttcctccaagaggctgcacaaagggaaaaatctctgaaagctaaattaagcagcttgcaaggcgtccttgataacaccagaaagaactctgcgatgtgttggcaaagcatgatcactgaagaccaattgcttcacaagataaatattctggaaaagaaactgcaaatgatggaaaagaacattccagagaatgcactgcgaaacgaggtaagtcccattagcgaccgattaaaaaattaagcctttgtttattttttacaattttatcctgtgatcctggacaactatgaaagcaagaatactggtattaagcatgaaactaagcaaaacctcaaaaacctttcacacgaacaattaaaaaagtttgttcataaatacgtacacacctttccgttagcctgtataacggaatctctaaaaaaccatttttgcacacttgtgttttccttttaatttaaagatttcaatatgcaaatttttaataaatctgtttcccaaaccggacaagataaaataaattgaaccaaatcttataatgaattgtcttaactacaaacataatcaaaatgtttaatgcacaaaaattaagcaaatctgaatctaagcaatttaattcggtcccatcaaattatatctagtggttgtgcctttaaaacaaagcagtatataatggctttagagtttcattttgttattcattcattgattccttcatttttattatttgaatacgcattaattataatcatttgtataaggtgtattgtattttaattgtgagcaaatggtattttggtgccaccgattggtgccagtggagtaatttgttatacatattttgtaaacgttactttttatttgtttctaatttttaggttaaagtatattttctctttttttctcagtttttatataacagaaaaaataaatccttaaacaaattgtgctttgctgacccaatcctcacatttgatacgaacagatcattgctattatttttgtacaaaataagggactcctatttgataccaaaagctgtttcccaccccacactttctaatttacagaattaaaagagttatattctaatgtatataccaggtttgtcaagaaactgtttacacactgtgaaataagttgaatttttgactttaaagctaaaaataaagggttttttgcttaattaaacgcaatttttttataaaatataattaaacaatatttattttacttataaatcaaaaaacaaattaaaaatattaaatatacaagaaaataaacaacaaattccaagtttacacacttttgagactgtcaagaaactctttacacattttgttttcctactttgttttgttctttttcttagaacgaactcgatttttccgttatttttggctttgcattgctttttacaacgcttcctattgaaattttgttgactttgcttgtgaaattttgctgatcaaacgtgcttaaagcgaattattaaatttaataaaatgcctggaaagagattaacttttgaagttacccaattaataaactataaccaccagttgggaaaatcttttccagaattagtataaatgtttcctgtatcccgtaagaccgtctacaatgttttaaaaggctcggaaaaagagggcaggcttgaacctaagagcggtggtgggcggaaaattaaaattaaaaagcgtgtagaccgctttattatgcgaatagtgattgcgaaccccccaatctcggtcagatcacttgctctggatatcaggcaagaatgccacctaactgtgtcacaccgaaactgtgcgccaagtcatcctacgccataggtacctcttcaagatttgcaaggaaaaaccctttgctatcagatgccaatatggaaaagcgtcattaattcgctgtgagcatgatggatcatgcggaagagtactgggatgactgtcatattttgtgacgaaacaaaaatgatgctcttttataacgacgggccaagcagagtatggcgcaaaccgttgagtgcgctagaaaaacaaaatatcattccaacgataaaatttggaaaaatgtcactgatggtttggggctgtatcaccagccgtggagtgggaaaactagccttaattgagagcacaataactgccgtgcaatatctagaaatgttaaaaaacaaatttgaaggccagtgcagaaaaattcggtctagttagcaacaacaagccaaatcttaagttttaccaggacatgatcagaaacataaagagtgcaatgtacgcacctggcgccttaataactgtggtaaagtgatcagataccgccccctcagagtcctgatctgaaccccattgaaaatttgtggacctacttaaagaagaaggtggcaaaaagggacctaaaacacaacaacagcttatgactgtaatagtcgaagagtgtgaaaagatcccgtttgaatatgacctgcaaaaacttgtccaatccatgaaaaaaaggcttcaacttgtagctaaagccaatggggaacatactacataccaaaacttttaaaattttaataaaataattaaaaaatttaggattaaacttcgatttagtgttttgtgtaaagagtttcttgacagtctcaaaagtgtgtaaacttggaatttgttgtttattttcttgtatatttaatatttttaatttgttttttgatttataagtaaaataaatattgtttaataatattttataaaaaaattgcgtttaattaagcaaaaaaccctttatttttagctttaaagtcaaaaagtcaacttattttacagtgtgtaaacagtttcttgacaaactgtacatacatgtgctctagggctctaaaacaaagaactcatacagaacggtaaaaatacagataggcaagcaaattgagaccatacgaatatgcgattttaaacttgtgcgtgaaataagacaaaacaacaaaaaggtaccgaatacaggaaatattctatagctcgaaaattcaaccttttagctttttgaaagaaattaatatacccttataaatgggtttaaaaaactcgaagaggacctttttccgacttaatggtcagtagctcctttgaatattaaaattttgtctgcaaaaaattttaagtatattttggtaaaatttgattttttttttttaatatttctctctttgtcttcaatagattgtaaagcttcttgaggacaaaacaacgtaccagttgactgccaaagaggccctgcggaaggtctaccaggaacgctgcgatgctatgcaaatgctctctaagatggagatggcctacgccacttctgaaaacgagtgcggcatacttcgcgctcaagttctaacactaaagcagacgctgactgatttcaatacccggttagaggaacttcagcaggagtacatggaattcaagaaggagtcagtgcgccaagaacaagaggctaaagagcaagaatcacgcagcttagaggtgctaaatggaaagctgacgacgcaggagctcgagcttaaggagcttcgtctgcaggtctcgcgaatccatcgcgatttatctgagtctgatactgaacatttgaaggagcgaattgtcttaaaaaacttagatacaataaatcttgacgattatgaccacgctcaagatagagcgctaaatgaaagggatgataatgaaagttctgacgatgatattttgtctgtgtcaccagctaaaaatgtgttgtctgaaacgaaaaaaagggtaatgcttatagcagtcttaatgctattatatattaatatattcctatttaattctagaagctaaaactaagtaatcccgatttagaagaaggcaattataaatcgaacgtcttaagattgctaaagaactccgatcttggcaagggagaagaaggatcttcagtgcttaaagctatttttaatggtgacgatgaagcctttgaatgcaaagttaaggaggaggaggatatggcaaacgattcagttccaacagagttcgttagcagaaatacatccgaaatcgtggatcactttaaaaaccattcttcaactacacatacaattttagaggattcggctgcaacgaaattgtcagcccctaatgcggaaagtaaggaaaagcttgtagacgttgaggaaaatcttaatattccaaatgcattaccgacggagcaggcaattgatatgttacaagaggaatgtgatacgtacaagaaaaaaacagctcatttaacaagtgaaatacacttcctgcaaggacaaattgagctattaaagaagcagcttgagaaaggcgttgatcacaattttgcaacaaacttgcaggaagaggaaaacagtttaccgcgtgagacgttagagctaattgataatcgagatagcacagaaggtgtttggaatgaggacattgcaaccattaataaccccaacgtagaaaatgaagaagaactaattgtttacaaagagcttcttgaaaattcggagcttaacaacatgcagcttcgcaaagaaatctctgagctgcacttaaagcataaacacatcccatttagtaaacaagagttactatgccgctttctacctcttggctgtgttgccatcggcctgctcatatattttctttccagtcgaatttaagcgccattcttttagctaatgaggaaaactcgcgcattaaaagcttttatctacacactattagtgtacactgggatgacagcatatttagttaatgcttgcgttgtcgtcaagctttattaaatttttatttgcatttggtttcaaaatcactttaaggtccaaatttaagtcgaaataataaaccagagacaaaattattattaaaagtaatttactgctttaagcatggaactcggttcaataaagttctgcaaattacaactataatgctatgagtatacattagcattactatttgctattttaaataagtttgtatacataagccgactgaaaaccaattggaatataccaaaaatagctgacattgaagggggtcaaaaaatctatatattagcacacaattttaaacgtgtaggtgtggcacgtaagttttaacaaatggctttcattcgggaaatgagcattcaatatcccgccgatacctaccaatatcaaagatcatcatccctgaataaataattaatttaacatcgatcttgaacgcaaaatttaattctcggggtgaaacactttattaaaagggctgcgtttttttttgcgcccttaaataatcatataaactcactcgtcgtgacatctaccggcaatcaaactataataatttccaagagaaccaactacacatccagttggcacaatgtatactgtgtgtactttcgtaaggataccgtcggcaaatttcattctctgggcacaaactttgcaaaaaccgtaaacgaagacggcagccaaaaaatcgaataagacattgtgctcctcgatgggaacacatcatggttgttacttaggcatataggcacccttgttctggaacttggaaggagttgcatccgctgttcagagacgaggtagtcagcataagctcttcgtgttagggtggtgtgatttcgtaagcctctcacataacaagaacataaattaactgtgtgcaatc

SEQ ID NO: 25760 - DNA, 2880 bp, DROSOPHILA
atcaccagttgattgtcgctattttgacggaaatattttaagtatgcacacaaatttaccgcgaaaccaggtgtttttgtacaacaattgttcaaagttaaagaaaactaaaaaacacgggtagaaggttgcaacaattaatacaggaaaattacaaaattccaaggtttgtttggatgtaaagtaatggtcttggtgtgcaatgagtggttaaaaaataatgttgatgaagaccagacgtcaagttcattatcgccgacgccagcatcaggagcagtcggatcaacggcattaaacagaactggcacaaccgacacggccacggaattacctcagacgaccagatatccatccggggaagaacctgctgtgaagccagaggaggcgcaatacgctttaaacatggaaactgaaaaaaatttggagcaggacaatttctttcatataatggacataaaagaagatatggctgatagtaacaacgaggcgtccacgaagaaccaggaaaataataatatggaactttgtgattccaacacagtatgtattgaccgacgtccggctgaagtttcccagcatgctatgaatatggccatgaactctgtgctgaatgcaaataacaccggggttggagttcgagtaactactgcctgcagtctgtttagcccactaggagtactaaacaatagtgctttacaaagggaggtggcatcggaatgcggcactttacaagtctcttcagtgcccccaacttctggcgtagatctagacataggattggagtctgccccaacgccatgtaagggtgcagcaaaaatcgtactcctatgtgaaccaaagtcgcacaagtttgaaacgagatctatattgctgcagcccaaccaggattgcaaggtgggccgccttatagctaaaagtaaggcgggtgaggggaacgctatatttgactgtaaagtattgtcaagaaaccatgcgattttgtggtacactccagacggtaaattctgggtcaaagacacaaaatccagcaacggtacctttattaacgacaacaagttgggtagtgatccagcggaactacattatggcgatattgtgaagttcggcgttgaggtaattgagaattcacgtcaggaggtacacgggtgtatcctggcccgtgtcgccctctttctacccaatggacaagaggccatttcagttgaggcagagcagatgatgttgactgtgcctaaccgaatcagctttgatgaagtgcagcgcctaagctcgttcctccaagaggctgcacaaagggaaaaatctctgaaagctaaattaagcagcttgcaaggcgtccttgataacaccagaaagaactctgcgatgtgttggcaaagcatgatcactgaagaccaattgcttcacaagataaatattctggaaaagaaactgcaaatgatggaaaagaacattccagagaatgcactgcgaaacgagattgtaaagcttcttgaggacaaaacaacgtaccagttgactgccaaagaggccctgcggaaggtctaccaggaacgctgcgatgctatgcaaatgctctctaagatggagatggcctacgccacttctgaaaacgagtgcggcatacttcgcgctcaagttctaacactaaagcagacgctgactgatttcaatacccggttagaggaacttcagcaggagtacatggaattcaagaaggagtcagtgcgccaagaacaagaggctaaagagcaagaatcacgcagcttagaggtgctaaatggaaagctgacgacgcaggagctcgagcttaaggagcttcgtctgcaggtctcgcgaatccatcgcgatttatctgagtctgatactgaacatttgaaggagcgaattgtcttaaaaaacttagatacaataaatcttgacgattatgaccacgctcaagatagagcgctaaatgaaagggatgataatgaaagttctgacgatgatattttgtctgtgtcaccagctaaaaatgtgttgtctgaaacgaaaaaaaggaagctaaaactaagtaatcccgatttagaagaaggcaattataaatcgaacgtcttaagattgctaaagaactccgatcttggcaagggagaagaaggatcttcagtgcttaaagctatttttaatggtgacgatgaagcctttgaatgcaaagttaaggaggaggaggatatggcaaacgattcagttccaacagagttcgttagcagaaatacatccgaaatcgtggatcactttaaaaaccattcttcaactacacatacaattttagaggattcggctgcaacgaaattgtcagcccctaatgcggaaagtaaggaaaagcttgtagacgttgaggaaaatcttaatattccaaatgcattaccgacggagcaggcaattgatatgttacaagaggaatgtgatacgtacaagaaaaaaacagctcatttaacaagtgaaatacacttcctgcaaggacaaattgagctattaaagaagcagcttgagaaaggcgttgatcacaattttgcaacaaacttgcaggaagaggaaaacagtttaccgcgtgagacgttagagctaattgataatcgagatagcacagaaggtgtttggaatgaggacattgcaaccattaataaccccaacgtagaaaatgaagaagaactaattgtttacaaagagcttcttgaaaattcggagcttaacaacatgcagcttcgcaaagaaatctctgagctgcacttaaagcataaacacatcccatttagtaaacaagagttactatgccgctttctacctcttggctgtgttgccatcggcctgctcatatattttctttccagtcgaatttaa

SEQ ID NO: 25761 - protein, 897 aa, DROSOPHILA
MVLVCNEWLKNNVDEDQTSSSLSPTPASGAVGSTALNRTGTTDTATELPQTTRYPSGEEPAVKPEEAQYALNMETEKNLEQDNFFHIMDIKEDMADSNNEASTKNQENNNMELCDSNTVCIDRRPAEVSQHAMNMAMNSVLNANNTGVGVRVTTACSLFSPLGVLNNSALQREVASECGTLQVSSVPPTSGVDLDIGLESAPTPCKGAAKIVLLCEPKSHKFETRSILLQPNQDCKVGRLIAKSKAGEGNAIFDCKVLSRNHAILWYTPDGKFWVKDTKSSNGTFINDNKLGSDPAELHYGDIVKFGVEVIENSRQEVHGCILARVALFLPNGQEAISVEAEQMMLTVPNRISFDEVQRLSSFLQEAAQREKSLKAKLSSLQGVLDNTRKNSAMCWQSMITEDQLLHKINILEKKLQMMEKNIPENALRNEIVKLLEDKTTYQLTAKEALRKVYQERCDAMQMLSKMEMAYATSENECGILRAQVLTLKQTLTDFNTRLEELQQEYMEFKKESVRQEQEAKEQESRSLEVLNGKLTTQELELKELRLQVSRIHRDLSESDTEHLKERIVLKNLDTINLDDYDHAQDRALNERDDNESSDDDILSVSPAKNVLSETKKRKLKLSNPDLEEGNYKSNVLRLLKNSDLGKGEEGSSVLKAIFNGDDEAFECKVKEEEDMANDSVPTEFVSRNTSEIVDHFKNHSSTTHTILEDSAATKLSAPNAESKEKLVDVEENLNIPNALPTEQAIDMLQEECDTYKKKTAHLTSEIHFLQGQIELLKKQLEKGVDHNFATNLQEEENSLPRETLELIDNRDSTEGVWNEDIATINNPNVENEEELIVYKELLENSELNNMQLRKEISELHLKHKHIPFSKQELLCRFLPLGCVAIGLLIYFLSSRI

SEQ ID NO: 25762 - DNA, 2411 bp, DROSOPHILA
gtgacttaacaaggaaatctaacaattttttcttataaaatttataattcattttgaacagttgtaaatagaataacaattggatggcaaattcagaaccttccgtggtgtggccgtgaagcattgcttcgcgatgacgatcaagatccgctcactcgtgaaccctcctgactctctcagctctcctgagctcggttgttaccgctgcggcgaagctgttgaccgcttgccattacaccaccccccgcagcatgaatgggactagattatccgcacttagcctgccgccaagtacggcttccagggatctcctttccctcgcacgagatgagaacgtgctctggggctttgcaccgtccacttccgcaccatgggcattcatccgactcctcgtgtccaaacgtcatttcaccatacttccgttctatccacggcttaaggctaggaagctgtttctttgtccagcgaccctatagcccgttgatcaacctgtactgccatgtctccagggctgacttgctttcgtttatattgacctcttcgcgttggatgagaggcctttaccgtgagtttggttaaagaccactttgttctcttgtgctattaggtctagtattattaggcggtaatcctgcgatcaccaatgccgcctcggtggacactgttctgaaggcgctgcagatacgtaatgccgacagtctatgggcttttgcccacaccggggctgcatatagcatggtagtctgggttacgctcagtcgtctcagcagtcgtctgctcacctgttctggacctcttgtgttcaacattatacctgataacgactcccaggtactttattgttcaagaggaggccaccaaggtactgccaacttcgacagtagccgtctccactaccttcctggagcttatcaggacaatcgcattgagctgagccactgttcaatggctctgatgtttatgttacgcttttcctcagccttaccgggatgcttgtctgtcaacaacgagcaaagccacgtcgtccgcgaagcctacgattcgttcctctcaaccagtggtaagcgaagtatcccgtcttcatggcgttccacagaagctggccaagaaccgaacctttcgggactccaccggtgacctgggggctaaagactccttccgacgactcgcagagtagaacccgtttcgagaagtagctgcgaataatcctgactaggtaggctagctccccgaagccaattaatgcttttatgatccggtcccacctcgctgtgttgaagacgttcctgatgtctagtgtgaccatgatgccctcgattgcctgggccgctactttgaccactatgtttactacatccacggtggaccgcgctttcctgaagccaaactgggaccgtgagaggtcagtcatagctatgtaaaatagatagcgagctacaccgaaggcctgagttaactccattattaggtccgggagtttgagcttcgtagttgagcggttgattgtccccaaaacccgtttggattgagtttataaatcagaatgaactcttatatttctttctagttctttacgggttggatttgtacactgtgtttgttttaaactgctgatcggccaaaagtagaagtggagcagatgcgattgggtgttgcaagaggttttgtttggcccgatacgacgactcggcattccgaatgggtagtaacgaagtaattcttgggccctctagatctctggttgtcttgggggctttggtggggggccgccgagggtaaatgctgaggcggtaacttgtgcgtttaatgccgttcgcgaattcagactgatttttgtcctcttgtccgttctccaaatcccagtcgtatggactgcacagcaacgatcgaacaattagctggtcgccgctctcccgcatattgggacaagtagcaaactgaacatgccgcccgccaatgctagcatgacctagtatgaaacacccctccagtccatcctggtaggtaaggtggaatctattatggagaaaatgagacaagaagtgtcagcaagaagccgttcattatgattgaggtatgtaagcgagagcctttaaaaacggattggcagtggacacagtttcgatactgtccgttttaaatgaccctgttgggttttaagtgtcactattcggactaacgtatccgtccctgtgtgttactcgacgatacgtcctagtaaccattttgacagcggaaattggtcatccctgatgatgagaaggtcgttgcctcctggcaacactgcggcctcagctgtagatgagctagacattgtagactccaggccttccagaaatgtcgtatcattgtttgatgaatgagaaacagctccacgaaattcaactgtggtcaattttccggtctagatc

SEQ ID NO: 25763 - DNA, 411 bp, DROSOPHILA
atgactgacctctcacggtcccagtttggcttcaggaaagcgcggtccaccgtggatgtagtaaacatagtggtcaaagtagcggcccaggcaatcgagggcatcatggtcacactagacatcaggaacgtcttcaacacagcgaggtgggaccggatcataaaagcattaattggcttcggggagctagcctacctagtcaggattattcgcagctacttctcgaaacgggttctactctgcgagtcgtcggaaggagtctttagcccccaggtcaccggtggagtcccgaaaggttcggttcttggccagcttctgtggaacgccatgaagacgggatacttcgcttaccactggttgagaggaacgaatcgtaggcttcgcggacgacgtggctttgctcgttgttga

SEQ ID NO: 25764 - protein, 136 aa, DROSOPHILA
MTDLSRSQFGFRKARSTVDVVNIVVKVAAQAIEGIMVTLDIRNVFNTARWDRIIKALIGFGELAYLVRIIRSYFSKRVLLCESSEGVFSPQVTGGVPKGSVLGQLLWNAMKTGYFAYHWLRGTNRRLRGRRGFARC

SEQ ID NO: 25765 - DNA, 1631 bp, DROSOPHILA
cgtatttgctgaataaaattaataggggtgattactttggttttttttcgacaaattttgaaaaacggagttgcactaaaggttttaattgaattttttccaaacgaagaccaaaaattctctagtcatgggtcgcggaaagcattgtaccgtcgaaaaaagaaatttgattaaaaacatgatctctgaaggtaaaacctactctgaaattggtcgcattgtcggttgctgaaacaaaatgatccgcaaagcactgctgtttgtcgaaaagaacgaaacatggaagaaggagcttcagatagctaaaagcgtggaaactgttcgcaaacgcttaggacaaagcaaccttaatgcgtgcagccccagaaaagtcccgcttttgactgttaagcatgtggcaaagcaatttgaatatgacaagatacacaaggacgggcctgtggagaagtggcgaaacattttttggtcagatgaaagcaaaattgtgttgcttggtgggaaaggctctcggtcttatgttcggcgtccaccacgaactgaatataatcctcgttacacctttaagaaatttaaaaattgtttaaaagggtgggcgttttgttgttgaaagtggggggtgggccacagtgttacgttgctgtttgggttaatagtttcatgatacgcactttgaaaaatggaaaagtcactgtcactatctatctatcactatctatgtatctgtaaatagaaaaatattttataaaaagtcttgaaactattaacccaaacagcaacgtaacagtttttataattaaattaaaggacattaactattacgctgaattcaacacataaaggtatcgaaaaaattatacgagtttttgaaaaaacccactattttcccgactataatacatatattcaaaaaatcattgatgttttcaaagtctgcaatcttgcaaaaacagtacgtagaccaacgaaacttatttttaaactccagagacaaaaaactgaagagaactttacgttattgatattaatgctagacaataaagaatatttatcctgtattgacgtctactcaaaatgcatcccctataaaaacaaagagattggttggagattgtttgtctttcaaatttttaccaaacactgtggccacgttcctcctttcacctacacaacgcccaaaacggtaacgcccacactttcaaacatatttttttaaattttttctcatttcattccccaatatctatcgatatcccatacaaatgacgaaatttcgcgtttgcattccctcaagctgagtaacgggtatctgatagtcggggtaaccaactatagcaatctctcttgttccatttccagactattacatctgtttattcgaattcggaatatcatcaagagtagctgggagtatcatatcatcaagagtacgggtattaattagtcacgggagtggacggtatttgatggtcgaggaagtggactattgcgttttctcctggtgggaacaatataaataatacacttaaacattcgtataagccctgcgcgcgcacgtgtttaaggctaaaagtgtcatagctgaaccacctgattttgtttcaatttggtgtttaatatttatacagttctgt

SEQ ID NO: 25766 - DNA, 495 bp, DROSOPHILA
ggaaagcattgtaccgtcgaaaaaagaaatttgattaaaaacatgatctctgaaggtaaaacctactctgaaattggtcgcattgtcggttgctgaaacaaaatgatccgcaaagcactgctgtttgtcgaaaagaacgaaacatggaagaaggagcttcagatagctaaaagcgtggaaactgttcgcaaacgcttaggacaaagcaaccttaatgcgtgcagccccagaaaagtcccgcttttgactgttaagcatgtggcaaagcaatttgaatatgacaagatacacaaggacgggcctgtggagaagtggcgaaacattttttggtcagatgaaagcaaaattgtgttgcttggtgggaaaggctctcggtcttatgttcggcgtccaccacgaactgaatataatcctcgttacacctttaagaaatttaaaaattgtttaaaagggtgggcgttttgttgttgaaagtggggggtgggccacagtgtt

SEQ ID NO: 25767 - protein, 122 aa, DROSOPHILA
MIRKALLFVEKNETWKKELQIAKSVETVRKRLGQSNLNACSPRKVPLLTVKHVAKQFEYDKIHKDGPVEKWRNIFWSDESKIVLLGGKGSRSYVRRPPRTEYNPRYTFKKFKNCLKGWAFCC

SEQ ID NO: 25768 - DNA, 3274 bp, DROSOPHILA
aaaaattagataaggtcagctaataaaatataaaaaatattaaatactaaaaagaactcaatttaaataaaattaaaaatacacaagtgatgtaagcacacataataactgattaaaataaatgtaaaaataataataaaaaaaatatacaaataaaagtacacatttttgtagattattgtaaaaccttatagtatatagtataagaatataatttaatttctctgtgttcgatgtcgcgttaggccacacagagttcatcaagcatttttatatacatttttcgatttttatatgttcacttcatcaggaacttctcactgtgtattcttgtctcctaactctgctattttttcctgcgcgcttaaccttactttgagctctttttttttattaatacatttttcgagcaattaatttaaatacacatcgcagggtatcaatttattttggcggccgcgttcccgctcagtttgctttcttcttcggtcactcgatggtaagggcgctctacgactctgttcttttatttatttctgcccgcctaaaaagtcagagcattcagaactaaaattatttccacgccagtggaaatcgttgtaagtatacaacgacacgaaattttcacgacttgactccacgactattttattagaaaagaaataaaacggaaactcaagccgggttccaggccatcggcggtaattataccaaaactttccaggagcagcatctagtatattcccggggcataatactgcatttagtataaccctaaattagaatatcactactgagcgcaagcttcctaaagtttgtctatcggaagctgtattgttttacagcttttaaactttttcagtccccactaaaaaacccacccgctacactcagacaccctaggctgagaccgactgaaggcaccttatttccgaatatccttggcatgatatatacccacaactcgtccttgagggtcttcctcgagttacagattttcttattttcgatatttcacttcttgttcctcgacgaacgataccatacgagaacggagattatatagttcctcgttctcgtcgtgattaattcgcatctgctcagcagcttgcttctgcattatctcgaaagaatcgtgcctgtcgaacttcagagaacgatcgtccaaaagatttaatcgtctaatgaacgagtatgtcagccctgaagtgatcatgtgctgctcaaataccatatattaaggacttctaccaatactagaatgtactgcagaccttaatgcattcggatgagtaattcattctaaatccttctggcttcaagaaaacgtacttcgaaaaatgatccaggacaatgaagatacctatgttgccgctccttgacctaggatacggtccgagaaaatcgatgaaaaaacgtttaaagaatcactgagactcaggcgcttttcctagcggcggtcaaaaagtgaaatttggtgctttcgtactcttacaaacctcacatgcggtaatataggaccagacgtcagaaacgagaacaggccagaaataataacgtcttattatttcaatagttttgtgaatgccaccatgtgaagccaaaggactgtcgtgcgagcgagaaaggatctttgactagttttttgtactcgtcagactggaagaattcggaatctaaatcaataatcaagccttctcgcaaatccacagcgtccaaagcctctttatttacacgataaattcacgctagtcgtgaatttaagtcgtgattggacattaaccacttaagcgacgcatgatcggttatttttttttgaagagctacttaagagtagcagaaagaatttggaagtttccggtaccatccacacaatacccggacactccgcacacttttcaaactctttcgtaacggaaaatcggcgattccagctactttttcagggccagtccgtattcccccttcaccgataatgtggcccaaatagcgtactctctcgcaaaactctcccacagaatttccccattggctatgacagcgccaaaataactcattagccttgcctttaaataatacacatatgttcctacataataagttaaaacttccgatttcgactctgtatataacactgtccactgacccattcagtatgtggacgactttatgcggccggtcaaacagatctgaagtagcgcttcttagagaaggaacaggatttggctttgttaaatactgcctctcataggcacttggttgatgagcggacatttcacttgcagtatagactaccgcaggactactcgctgcatgcttgcgttgatagaatttggtatctaatgtgtcatctcctctgataacgttgctagtagcctacgctccatgcctaacaaagttatcgcattagcacttatagagcttaaactttcttcattggtgttagacccacgtgctgatgtcgaagatcccctgtctactgtagcgggtggaaaattcttagatttcctacaagtttgtcgttctactctttcggttggttcaacagatctctaacagtctagtttgtaaatcggacagttctcacttctttaaaatgattcccaatgcattccctgtgaaattcatgcttgcttgtagttacgtaccagtctggtgtgatgatctctgctgcactaggagatttcctagttggttatcatactttagaaaaataccacattccaaaatagagagtaatataaaataaaattatatacaaaaatatcaacgataatgtgcgagataagataataaaactgaactcttggcttgatgttctctatttatatggctgtctattatttttagcgtagaaggttgtttttttttaagaagtattccctttgttcgacttaatttcaaaaacaaaaccgatcggtatttttagtgaagtcttggaccaatcacccttcctctgcaagagtattccaactagggggaaatctatcttcttttagaagaatagtgaagaagaagaacatcggcaactatatgaggatatggcaaccatctcgagtaatactaatattttccgtcatgtcacattgatgatattttttgttttcaggatagcgtttagttaactcaaggaagtagattaaactgggacagaaaccaaaccaaagttacgtgttactctgttttttttttttgttctcagaaaaattcacctttccgtttgctacacttaggtaaattgttgggataagtctaaggtctgggcagtcagcaa

SEQ ID NO: 25769 - DNA, 582 bp, DROSOPHILA
atgtccgctcatcaaccaagtgcctatgagaggcagtatttaacaaagccaaatcctgttccttctctaagaagcgctacttcagatctgtttgaccggccgcataaagtcgtccacatactgaatgggtcagtggacagtgttatatacagagtcgaaatcggaagttttaacttattatgtaggaacatatgtgtattatttaaaggcaaggctaatgagttattttggcgctgtcatagccaatggggaaattctgtgggagagttttgcgagagagtacgctatttgggccacattatcggtgaagggggaatacggactggccctgaaaaagtagctggaatcgccgattttccgttacgaaagagtttgaaaaggctgacatactcgttcattagacgattaaatcttttggacgatcgttctctgaagttcgacaggcacgattctttcgagataatgcagaagcaagctgctgagcagatgcgaattaatcacgacgagaacgaggaactatataatctccgttctcgtatggtatcgttcgtcgaggaacaagaagtgaaatatcgaaaataa

SEQ ID NO: 25770 - protein, 193 aa, DROSOPHILA
MSAHQPSAYERQYLTKPNPVPSLRSATSDLFDRPHKVVHILNGSVDSVIYRVEIGSFNLLCRNICVLFKGKANELFWRCHSQWGNSVGEFCERVRYLGHIIGEGGIRTGPEKVAGIADFPLRKSLKRLTYSFIRRLNLLDDRSLKFDRHDSFEIMQKQAAEQMRINHDENEELYNLRSRMVSFVEEQEVKYRK

SEQ ID NO: 25771 - DNA, 2737 bp, DROSOPHILA
ctatcaccccccaatgacattgtgggttgtgcattgagagaaactccctatctatcattttccatagctatcatttaaattcacatagatatgaatgagcacccaaatgctgtaacctcaaaagaacaccacgacactcgctgacgagatagagccggattgaaatgcgtgctttcttgatatcccctatcaacgtccaaagtattaccactattgaaatatagctagtctccgaattaaattcagtataaaactgcgctccacccataacctttattcaaggctatctgctgttccttgtgttacgattttgataaagccgtacgtactcacaaaaatatgcgacatgaagaaatagttattttagatgggaacacttagctaatcctacctatcctgagtctaaaaaaaaatatccgaaatacaatttcactagaaaggagtagagagtagtttggattactggaggtcagtcttctggacccagggagatcatattattttgcacccagccggggcgatgattcggtagactacgccttcgaagttcttctttgtatggactaaaaacaacagaagtccgatgatttaagcattgttggagtttaattcagcggagtcggcatagcactataccttaacatatgtaattaacacacacgatctacaagcaacaattggataatttattgatttaaccgtacataaagattaattagaatgttgatgtagtaaattaacatatttcaagtattaaacttcataacatcttgatgtgcacctttcgatgttttattttccttaaatagtggtgacgttactatttctcccgtttttgtttactaaaaaataaacaatgtacacatagcattaataattaagtcaatgtagatttaatttaaatcataaatatttaattttcaactgcttgtttttaaaagaacattgtcggttaaaaacgtgttggtataaaatattactttctagccatagcaatgccaagtcctaatattccgccaagtactaaagctgctccgcctgcaaccaccataccctttgccacttccttatcgatttcttttttaatatattcctgaaatatgtaaagttatttagtaattattcgtacattgaattttagtgtatgtacattagtgaggatcacatgaatatgtttttcattattatatatgtacatttaacacgacacatcttttgtgatcatgggattttggttgtcataaaaattttctggatcaaaaaattatttgaatctattggagattatatagaaattgctgctttccttagtgaccttactaacctctagggagcgaacttgatcatttgactcgatgtcaagaaaagctcggcagtattttaagccagacgtatactccttgatacgagcattaccaaacgcaagataatatatatagtcacgccttccatctggatgcgtacgagccagttcctccaaaatcataattccctggattataaataaaataatatttttacatctttacagctttaaaagtgagtcacctttctaacgtcatttgtgtaccgacttcggaccagacagaatgcgtacctattgtgtcattagaattgagaagaattgagatattttaatgtttttagatttaggaatgcgtactcaaactttgtgtctgtggtaacttcaccatccaactcaagttcgtgatgatactttttttcgaatctctggagcaaatgcaaaatatttattttataacaatcagaactaaaataatattttttacttctaaatcttcttgtggtacaacttcgtttaaaagatcctccattgtttggcaaatgttgttagcaaatacaaaaattatatacagagaatttaacgccaagagtagccgttcattctaaaaatataggattagtcgtaccgtttatatacaattctcagagaacgacttccttcacatttttagtgttccttcttatattcgattgccactgagactatttaataaggggtactccgttaatagcatgtgttcttaattaagccaaataaaattcagctttggagtttcaaaaattttagcgaattcacggaagtatttgattttaactactttagtttgattttataaaatttttgatgttataattattaattgtgatcagagaaaaatgcatttacaaaaaaatgttaacttctttggctcctcaataccgactcggttattgatcctcaataaagtgttaggaaaagttttgtgttacctgttttattcatttaacgggtataacaacgaattgttgatttctttttaattcatttcaattgaacctgatccagacttttcaacgaatctactttaacattttactcttcgagtaatgtgtgtaatttagtattcaaattcctgtattttgtgaatagataaggtgtaagtccgttttttatgtatctcggttccatcaattcagagtttcttaaaaaagtttgtttataaaaatagttgttatgaaataatatttatcatgttctcgatgtgcgctttataaaatatgaagataaatgcaatgaagacactgctggtcggaatctcttattaatatacccctaaaagagtttagaatgaaaagcttttttgaaaataaatacccatcattaactttaatggccactgaatttcgtatttcctacctaccttcaaaagatcgctcgattttagagctggcc

SEQ ID NO: 25772 - DNA, 450 bp, DROSOPHILA
ctccagagattcgaaaaaaagtatcatcacgaacttgagttggatggtgaagttaccacagacacaaagtttgagtacgcattcctaaatctaaaaacattaaaatatctcaattcttctcaattctaatgacacaataggtacgcattctgtctggtccgaagtcggtacacaaatgacgttagaaagggaattatgattttggaggaactggctcgtacgcatccagatggaaggcgtgactatatatattatcttgcgtttggtaatgctcgtatcaaggagtatacgtctggcttaaaatactgccgagcttttcttgacatcgagtcaaatgatcaagttcgctccctagaggaatatattaaaaaagaaatcgataaggaagtggcaaagggtatggtggttgcaggcggagcagctttagtacttggcggaatattaggactt

SEQ ID NO: 25773 - protein, 85 aa, DROSOPHILA
MILEELARTHPDGRRDYIYYLAFGNARIKEYTSGLKYCRAFLDIESNDQVRSLEEYIKKEIDKEVAKGMVVAGGAALVLGGILGL

SEQ ID NO: 25774 - DNA, 8819 bp, DROSOPHILA
acatagttcaaccacaataccgttagttcactgttcgtcctgtctgttctcgtccaaagtccacaccgttaccgtttgccctccgtgcccttggccggccgtttgaccttgctgcccttgactcctttcgcattccagccttcttcactgtttctatgcagctctcctgcaccctgatttgaggggagttttaagaatcctcaatgcagtttgccataattgtggaaattatccttatccttatccacatccttattccacatttactggtgatctcttaggtctcaattcggtgactttgattgttctgtttgatttttgtttcgttttcaattatagcgatccaatcctttttgctttgttggctttattagtttttcagcagaaacgagcgttgcagtcgacacaccgtgcatacggccgattccgtgcagtatttgttattgtttgtaatgcagtgatgaacgaggtcgacgtgttggttatgatgggtatcatcagttctcttcgggtcatagttggtttcgatggtgagcaatatcgcgccctctctcgctcgttgttggcataagttggtgtatggggttgacgtcgttttacttaattaacaatagagaatgctacagtcgatacccgtacaaatgcgaacgcaaaatttcttcatttttctgggatatcaatagatattggggaacaaaatgggaaaaatttttaaaaaagtgcttagaagtgtagacatgaccggtttggcggctttatgtcgttagagtgggcgtggcaaaaagttagaaattgttggtttttagaagttaaaaggtcttcccaaaacggtaattccgcgctagaatgtaggaaagaactggacctttaacaattgttcagttgaaaagcatataatttaagtttgtgttggtgggtcacccaaacaataaatattgttccttaaaccctcgttgccattttatctccctttccaacattataatgtttattgcattttatatttcagggagccggaaatttaagcttcaacaatatagatcaagatcatatgcccaatattttaaatgaagcggttaccctattttcgaaagcactggagtgtgaaacgcaagaaaaagttatttgctgtactttggagatgtttgggttgtggactcaaaaatttatacacaatttaccagatgttgttatcaatatatttacatctggaatgcggctgaaaaccacaaatcaaattattcggcaaagttatctcgagtggcttctattgtcaattcaaaatgcggaggttaataaccatatttctattatacaggatcttatttcattttatactaaagctttgcaaaactcatcacaatcatgctatttgtctgaagctgcatgcattgcttgtatattgcttattttggaaaaaccatctgaaaactataacttcttttggaccacagtgttcgatatgaaaaaactaattttttataatgaaaagtttactacaacagctccgattcccacgttatgcaatatatcattaatggctagaatattgataaattcatatcctgaaaaaattaaaggcaaactagaacctttagctcgaactttagtttctaacttatgttgtaattcagttaaagttcgagtatatactgctaagcaggtcaaacaaataataaactcatcaagcggaattgagtttgttaaattagccttatgcgagtttggtaaacgtattaatttagttaatattgaaacggacggggagcctttaattgatcaatttgggacttcgaatcaagtgtatgtagacgcacttctcactttaacaagcataaaacatattacatatgaagattctgtggatgttgctatagatctacttcttatatcacatcaccctgcaattgtatcgaatgagccatacctatgggaaacaaccatacaaaagcatttaaacttggatgcaaaaaatgttatactagctaaaacaaatgaaattgttaatgaatacattgacaactatatagctagtgcgcaatatgagaatacaatatcagcattgattcgaatttgtccgaatcttattgttccaacagttgtcaataatttaaaaaactatcttagtaacttctcaaactataatgtttctaatgaagaatatttaatatttttgactccggatggagagttatttgataaaagtgtaatacctcatatagactcgcaatatgaaacagttcgacttaaaagagaaaataaagtttacagctacaaggaacaattagaagagattcaacttcggcgtgaaattgacgataaaagggaaaaagaaggcaaattaaaaactataaggtatactcagaagcaagaagaacaaattaaaaatcaaatggaaaaagaactacatataaaattaagaattacactgctttatgaaaaacttatttcgaaaataagcttactaaaagcatcatgttctgggaatggagaacaaatggcccaacatttttattctttattagacggcatattgaatgcttctaaaagtcccctatgtgccgaagttcttactgacctgtacatatttttgcataatctgtgctttactttccagccaaaacttggacgtgccatcgcattagcgacaatcaaacttcaaagcccgtcctgcgttttaaagaaggaatttgaagcttttaatgtaaatcaagctattaatgatataataattgaccttgacaatcacgttaaatcaaactatcttgactcgccatctttttcatatgccttcgagttcttaaagcgggcgttattattgttaaataccgattcggattttgatcttatttctaaaggaatacagatattagcactccatacaagcgcaggtgtttgctgtaagccacagtttatgcctcgatttggtatgtttaaaatgttgttagatcttttaaagaacaacaataaactgtgggctcaaacttcagctgccatcttacaagttgcgaagtgttcaaatggggataattgttctagtccggataaccatattataagcatatttctgcaagcattgcaacattgttctgacgctgtaagaaaagtggcattgcaatctctaaaaataatggttaatggaattgtaaatcacataaaagtggataacagtcttgaaaaggtaattataaatcgattttgggttgccaaacatgatccagaggaagaaaacagagaactggctttatttttgtggaacactgcgaaatttcctttacccggatatgttgatattattaatgatatcacacactccgagacctgcatccaaaaatccgcttcagaatccctaataccgctattagctggcgatgaagttttaaaaaaatgcgttataaaaaagttattttctatttacaaagcgaagctgtccctattaccgccggtattggatcaatttgaccgcgaaattgagcctgcaatcgatcagtggaaaccgcgaagaggtattgctattgcattctccactatcgctttcctattatctattgaagatataaacgatattatgaattttatggtatcacaaggacttggtgaccgagaagatgttgtacataaggaaatgttagctacggcattaaagatagttgatttacacggaaataaagcaattgaaaatttgctaccagtatttgaagattttctcgataaagcgccaaaatcccaaagttacgacaacatacgtcaagctgttgtgatattaatgggttcgttagcacgtcatttggaaaaagatgacaaacgaattgacccaattgttaaaaggttaataacatcactgtctactccatcacaacaagttcaggaagcggtctcgaattgcttacctcatcttatgccatccgtaaaggatgaggccccttcaatgataaaaaaactcttacactcattggcgaagtctgaaaaatatggtgaaaggcgtggagctgcgtatggcattgccggtatagttaaaggtcttgggattttatcattaaagcaactagacataatgtcaaagctgaccgcatttattcaagacaaaaaaaattataggtccagagaaggcgctttgtttgcttttgaagttttgtgtagtacacttggtcgtttatttgaaccttatatagttcatgtcttgccacatttgttacaatgttttggtgatccatcgcagtacgtaagacaggcagctgatgatacagctaaagtagttatgagaaaactatccgcacacggtgtcaagctagtgcttccgtcacttttggaagctcttgacgaagattcatggagaacaaaaacagcatcagttgaattgttaggtgcaatggcattctgtgcaccaaagcaactttcatcttgccttccaagtatagttccaaaactaattcaagtccttggagattctcacactaaagtacaagaatcgggtggagaagctcttaaggtaattggatctgttataaaaaatcctgaaattcaagctattgtccccgtgcttttggatgcattggaggatccatccaacaatacatctacttgtttgcaaagcttgctaaaaactaagtttattcactttattgatgctccctcattagctctaataatgccagtggtgcaacgtgcctttatggaccgatccacagagactagaaaaatggctgcacaaataataggaaatatgtattccttaacagatcaaaaagatctggcgccctacttaccaagtataattccaggcctgaaatcatcattactagatccagtccctgaagtgcgagctgtgtcagctcgtgcgcttggtgctatggttaaaggtatgggtgaaagttcatttgaaaatttattaccctggcttatggaaactctaacttccgagtctagcagtgtggatcgcagtggagcagcacaaggactctctgaagtagttggaggacttggcgttgaaaagatgcataaacttatgccggaaataatttcgactgcagaacgcgtagacatcgctgcacatgttaaagatggatatataatgatgtttatatatatgcctggagctttccaagaagaatttacaccttatatcggacaaattatcaatccgattttaaaagctttggcagacgaaagtgaattcgttcgtgatactgctttaaaggcaggtcaacgtattgttaatttatacgcagaaactgctgtggcacttttacttccggagcttgaaaaagggctattcgatgataattggaggattcgatatagttctgttcaattacttggagacctgttgtatcgaatatctggagtatctggaaaaatgactacggaaacagcaagcgaagatgataattttggtacggaacattcacatacagctattattcactttttgggcgatgaacgtagaaatagagtattgtcagggctttacatgggacgtagtgacgtttcattgatggtgcgacaggctgcactgcatgtatggaaagttgttgtgacaaatactccgcggactctgcgtgagattctaccaacactgttcggtttactacttggatgtttggcaagcacaagttatgataagagacaagtggcggctcgaactttgggagacttggtgagaaaacttggggaacgagttttaccagaaataattcctattcttgaaaatggtctaaactctgatcatcctgatcaacgtcagggagtatgcattggtttgtctgaaataatgggttctacatcaaaagaaatggtacttacgtttattgacagtctggtccctacagtccgaaaggctttgtgcgatcccttaccagaagttcgagaagcagcagcaaaaacattcgagtctttacatagcacagtgggatctcgagcgttagatgaaattctaccatttatgctgcaaggtctttcagatgccgacccctttgttgctgagaatactttagacggtcttagacaggtaatgtctattaaatcaaaagttgttttgccatatcttgtgccgcaactaacatccccaccagtgaatacaaaagccttatctatactagtctctgtcgccggagaagcgttaatcaaatatttgcctaaaatattatcatcattattggaggctctatcagacgcctacggatatcctaatgaaccacaagaaaatgagtactgccaaacggttatattgtcagtaacagatgaaactggaattaggacaataatggatacattgcttatttcagcgaattcctctgacctatgcactcggaagtctgcggcaagcttactatccgctttttgtattcattcacccggaaattactatgaatacattcctcaacttttaagatgtttacttaagttgttagtagaaagtgataaagatatactacagaaatcttgggaggctcttaacgctgtaattaaaggcatgaatgctgcgcaacaaatatgtcacgtatctgatgttcgccaggccgttaggtttgcagcaagcgaacttgaaggaacagagcttcctggattttgtcttccaaaaggaattactccactattaccggtttttcgggaagctattttaaatggattaccagaggaaaaagaaaacgcggcacaaggactcggtgaagttatttttctaactaacgcaaaatcgttgcagccttcagtagtacacataacaggtccattgattcgaatactaggagaccgtttcaacgcagcagttaaggctgcagtattggaaacgttgtcaattttacttcataaagttggtgttatgttaaaacagtttttaccacagcttcagaccacttttcttaaggcattacatgatcaaaatcgaaacgttagaatgaaagctggaaaagcattgtctgagttagtggcaattcattctagagcagagccattatttaatgaaattcataatggaattaaaaactcagatgattcttctgtcagagagacaatgctccatgcacttcgaagtattgtcagtcgatctggagacaaaatgtcggaaccaataaaaaaacaaatttatgttaccttattgagtatgatcggacatcacgaagacgctactcgaagcgcagtaggaggatgcttgggagcaatattaaagtacatagcttcgggacatgtatatgatttgtttaataatattatactgacgaataatacagatgatctaatagtgaaacatggacacacaatagtattgtttgttgcactaaaagaatgccccaccgaagtacttgtgttagatttgcctgaaaagattacatcttatgtattaatcaatattttatcagaaaaagtgccaattgcctccaatgctgtaagagctgccacttaccttttggactattaccttgtcaatcaaaatgaaccccctattaaaattgtaatggcgttatctagggcaatgaatcattctagcaacgatgttaaacagcttgttgcacaaagttgtacctacctttctaaaaatttggcagcaaatcaaagtagcattgatgttttgaaatatttggtgcctatgctggtaaatggaactaaagaaaaaaatggttatgtgaaatcaaattcagaactagcattaatttccattttgagattaagatctgacgatacgagctttttaaaaatttcaggtctgttagaatctggtgctagagactcattaaatgacgtagttttgaaagttttaaaacgcacatcttcacaatctattataaaagaagaagaattggatgacactctgcaatcataaccaatttttcttaaaatcgttccaaaaatatcttgaactcttaaaaaatagctgtatttcaaattttttgtaaataaagtaaaaattaaaaaaagcaatacaattcaatattttatattatacattgtatataattttgggtaagtagtcttaataagttgttggttgaaaacgaaaagatatatatttgatgttcgtccacatgtacatatggagcgtacacgcgaatgtaacggcctttctcgttaattagttaggtaaaaaggagcggaccaaggtggatcccttgtagaacatcgtatgtgactcggagaatacaagaaagataacttttaaaacccgttgcatcctgcaattcagatacttaaaatccaatttaaaagattatcaggtaaactagaagagaatgattaacagagtcaaatgctttactaaaggcagtctagatgacatcagttaagattatttctgaagccctaacttacgaagaaagtaagctccaaaaggttagtggttgttaaaactgtgatgacatggtatatataagttattgcccttcaagtgattgccccacatctagcgtttcagcattgtttctgggtaaacacaagtgctcaaaatgctgaccagaggtctgcatagtctccgctgccattaacgccaacgaacggttaaagtgcgacatcagcacttctccgctgcgacgctgctgacgcctccacatgattgctagggagtttggaatatatttggtattgttaggtttcagtttcaaatgatcagttacaataaacggtcgcttgcgatctacaaaactaaaggaaaataactgtaactgttcggcgcccgaacagggaccaacaaataaacgcgaacgacagacaaaagtcgcagagcaaaatcataattttggaaaaaaaaaatccgttggttaaattgtgcccaagaaattcccgtgagttaataaaaaacaaaaaaaatcacggtcggcaatatagta

SEQ ID NO: 25775 - DNA, 6819 bp, DROSOPHILA
atatttcagggagccggaaatttaagcttcaacaatatagatcaagatcatatgcccaatattttaaatgaagcggttaccctattttcgaaagcactggagtgtgaaacgcaagaaaaagttatttgctgtactttggagatgtttgggttgtggactcaaaaatttatacacaatttaccagatgttgttatcaatatatttacatctggaatgcggctgaaaaccacaaatcaaattattcggcaaagttatctcgagtggcttctattgtcaattcaaaatgcggaggttaataaccatatttctattatacaggatcttatttcattttatactaaagctttgcaaaactcatcacaatcatgctatttgtctgaagctgcatgcattgcttgtatattgcttattttggaaaaaccatctgaaaactataacttcttttggaccacagtgttcgatatgaaaaaactaattttttataatgaaaagtttactacaacagctccgattcccacgttatgcaatatatcattaatggctagaatattgataaattcatatcctgaaaaaattaaaggcaaactagaacctttagctcgaactttagtttctaacttatgttgtaattcagttaaagttcgagtatatactgctaagcaggtcaaacaaataataaactcatcaagcggaattgagtttgttaaattagccttatgcgagtttggtaaacgtattaatttagttaatattgaaacggacggggagcctttaattgatcaatttgggacttcgaatcaagtgtatgtagacgcacttctcactttaacaagcataaaacatattacatatgaagattctgtggatgttgctatagatctacttcttatatcacatcaccctgcaattgtatcgaatgagccatacctatgggaaacaaccatacaaaagcatttaaacttggatgcaaaaaatgttatactagctaaaacaaatgaaattgttaatgaatacattgacaactatatagctagtgcgcaatatgagaatacaatatcagcattgattcgaatttgtccgaatcttattgttccaacagttgtcaataatttaaaaaactatcttagtaacttctcaaactataatgtttctaatgaagaatatttaatatttttgactccggatggagagttatttgataaaagtgtaatacctcatatagactcgcaatatgaaacagttcgacttaaaagagaaaataaagtttacagctacaaggaacaattagaagagattcaacttcggcgtgaaattgacgataaaagggaaaaagaaggcaaattaaaaactataaggtatactcagaagcaagaagaacaaattaaaaatcaaatggaaaaagaactacatataaaattaagaattacactgctttatgaaaaacttatttcgaaaataagcttactaaaagcatcatgttctgggaatggagaacaaatggcccaacatttttattctttattagacggcatattgaatgcttctaaaagtcccctatgtgccgaagttcttactgacctgtacatatttttgcataatctgtgctttactttccagccaaaacttggacgtgccatcgcattagcgacaatcaaacttcaaagcccgtcctgcgttttaaagaaggaatttgaagcttttaatgtaaatcaagctattaatgatataataattgaccttgacaatcacgttaaatcaaactatcttgactcgccatctttttcatatgccttcgagttcttaaagcgggcgttattattgttaaataccgattcggattttgatcttatttctaaaggaatacagatattagcactccatacaagcgcaggtgtttgctgtaagccacagtttatgcctcgatttggtatgtttaaaatgttgttagatcttttaaagaacaacaataaactgtgggctcaaacttcagctgccatcttacaagttgcgaagtgttcaaatggggataattgttctagtccggataaccatattataagcatatttctgcaagcattgcaacattgttctgacgctgtaagaaaagtggcattgcaatctctaaaaataatggttaatggaattgtaaatcacataaaagtggataacagtcttgaaaaggtaattataaatcgattttgggttgccaaacatgatccagaggaagaaaacagagaactggctttatttttgtggaacactgcgaaatttcctttacccggatatgttgatattattaatgatatcacacactccgagacctgcatccaaaaatccgcttcagaatccctaataccgctattagctggcgatgaagttttaaaaaaatgcgttataaaaaagttattttctatttacaaagcgaagctgtccctattaccgccggtattggatcaatttgaccgcgaaattgagcctgcaatcgatcagtggaaaccgcgaagaggtattgctattgcattctccactatcgctttcctattatctattgaagatataaacgatattatgaattttatggtatcacaaggacttggtgaccgagaagatgttgtacataaggaaatgttagctacggcattaaagatagttgatttacacggaaataaagcaattgaaaatttgctaccagtatttgaagattttctcgataaagcgccaaaatcccaaagttacgacaacatacgtcaagctgttgtgatattaatgggttcgttagcacgtcatttggaaaaagatgacaaacgaattgacccaattgttaaaaggttaataacatcactgtctactccatcacaacaagttcaggaagcggtctcgaattgcttacctcatcttatgccatccgtaaaggatgaggccccttcaatgataaaaaaactcttacactcattggcgaagtctgaaaaatatggtgaaaggcgtggagctgcgtatggcattgccggtatagttaaaggtcttgggattttatcattaaagcaactagacataatgtcaaagctgaccgcatttattcaagacaaaaaaaattataggtccagagaaggcgctttgtttgcttttgaagttttgtgtagtacacttggtcgtttatttgaaccttatatagttcatgtcttgccacatttgttacaatgttttggtgatccatcgcagtacgtaagacaggcagctgatgatacagctaaagtagttatgagaaaactatccgcacacggtgtcaagctagtgcttccgtcacttttggaagctcttgacgaagattcatggagaacaaaaacagcatcagttgaattgttaggtgcaatggcattctgtgcaccaaagcaactttcatcttgccttccaagtatagttccaaaactaattcaagtccttggagattctcacactaaagtacaagaatcgggtggagaagctcttaaggtaattggatctgttataaaaaatcctgaaattcaagctattgtccccgtgcttttggatgcattggaggatccatccaacaatacatctacttgtttgcaaagcttgctaaaaactaagtttattcactttattgatgctccctcattagctctaataatgccagtggtgcaacgtgcctttatggaccgatccacagagactagaaaaatggctgcacaaataataggaaatatgtattccttaacagatcaaaaagatctggcgccctacttaccaagtataattccaggcctgaaatcatcattactagatccagtccctgaagtgcgagctgtgtcagctcgtgcgcttggtgctatggttaaaggtatgggtgaaagttcatttgaaaatttattaccctggcttatggaaactctaacttccgagtctagcagtgtggatcgcagtggagcagcacaaggactctctgaagtagttggaggacttggcgttgaaaagatgcataaacttatgccggaaataatttcgactgcagaacgcgtagacatcgctgcacatgttaaagatggatatataatgatgtttatatatatgcctggagctttccaagaagaatttacaccttatatcggacaaattatcaatccgattttaaaagctttggcagacgaaagtgaattcgttcgtgatactgctttaaaggcaggtcaacgtattgttaatttatacgcagaaactgctgtggcacttttacttccggagcttgaaaaagggctattcgatgataattggaggattcgatatagttctgttcaattacttggagacctgttgtatcgaatatctggagtatctggaaaaatgactacggaaacagcaagcgaagatgataattttggtacggaacattcacatacagctattattcactttttgggcgatgaacgtagaaatagagtattgtcagggctttacatgggacgtagtgacgtttcattgatggtgcgacaggctgcactgcatgtatggaaagttgttgtgacaaatactccgcggactctgcgtgagattctaccaacactgttcggtttactacttggatgtttggcaagcacaagttatgataagagacaagtggcggctcgaactttgggagacttggtgagaaaacttggggaacgagttttaccagaaataattcctattcttgaaaatggtctaaactctgatcatcctgatcaacgtcagggagtatgcattggtttgtctgaaataatgggttctacatcaaaagaaatggtacttacgtttattgacagtctggtccctacagtccgaaaggctttgtgcgatcccttaccagaagttcgagaagcagcagcaaaaacattcgagtctttacatagcacagtgggatctcgagcgttagatgaaattctaccatttatgctgcaaggtctttcagatgccgacccctttgttgctgagaatactttagacggtcttagacaggtaatgtctattaaatcaaaagttgttttgccatatcttgtgccgcaactaacatccccaccagtgaatacaaaagccttatctatactagtctctgtcgccggagaagcgttaatcaaatatttgcctaaaatattatcatcattattggaggctctatcagacgcctacggatatcctaatgaaccacaagaaaatgagtactgccaaacggttatattgtcagtaacagatgaaactggaattaggacaataatggatacattgcttatttcagcgaattcctctgacctatgcactcggaagtctgcggcaagcttactatccgctttttgtattcattcacccggaaattactatgaatacattcctcaacttttaagatgtttacttaagttgttagtagaaagtgataaagatatactacagaaatcttgggaggctcttaacgctgtaattaaaggcatgaatgctgcgcaacaaatatgtcacgtatctgatgttcgccaggccgttaggtttgcagcaagcgaacttgaaggaacagagcttcctggattttgtcttccaaaaggaattactccactattaccggtttttcgggaagctattttaaatggattaccagaggaaaaagaaaacgcggcacaaggactcggtgaagttatttttctaactaacgcaaaatcgttgcagccttcagtagtacacataacaggtccattgattcgaatactaggagaccgtttcaacgcagcagttaaggctgcagtattggaaacgttgtcaattttacttcataaagttggtgttatgttaaaacagtttttaccacagcttcagaccacttttcttaaggcattacatgatcaaaatcgaaacgttagaatgaaagctggaaaagcattgtctgagttagtggcaattcattctagagcagagccattatttaatgaaattcataatggaattaaaaactcagatgattcttctgtcagagagacaatgctccatgcacttcgaagtattgtcagtcgatctggagacaaaatgtcggaaccaataaaaaaacaaatttatgttaccttattgagtatgatcggacatcacgaagacgctactcgaagcgcagtaggaggatgcttgggagcaatattaaagtacatagcttcgggacatgtatatgatttgtttaataatattatactgacgaataatacagatgatctaatagtgaaacatggacacacaatagtattgtttgttgcactaaaagaatgccccaccgaagtacttgtgttagatttgcctgaaaagattacatcttatgtattaatcaatattttatcagaaaaagtgccaattgcctccaatgctgtaagagctgccacttaccttttggactattaccttgtcaatcaaaatgaaccccctattaaaattgtaatggcgttatctagggcaatgaatcattctagcaacgatgttaaacagcttgttgcacaaagttgtacctacctttctaaaaatttggcagcaaatcaaagtagcattgatgttttgaaatatttggtgcctatgctggtaaatggaactaaagaaaaaaatggttatgtgaaatcaaattcagaactagcattaatttccattttgagattaagatctgacgatacgagctttttaaaaatttcaggtctgttagaatctggtgctagagactcattaaatgacgtagttttgaaagttttaaaacgcacatcttcacaatctattataaaagaagaagaattggatgacactctgcaatcataa

SEQ ID NO: 25776 - protein, 2225 aa, DROSOPHILA
MFGLWTQKFIHNLPDVVINIFTSGMRLKTTNQIIRQSYLEWLLLSIQNAEVNNHISIIQDLISFYTKALQNSSQSCYLSEAACIACILLILEKPSENYNFFWTTVFDMKKLIFYNEKFTTTAPIPTLCNISLMARILINSYPEKIKGKLEPLARTLVSNLCCNSVKVRVYTAKQVKQIINSSSGIEFVKLALCEFGKRINLVNIETDGEPLIDQFGTSNQVYVDALLTLTSIKHITYEDSVDVAIDLLLISHHPAIVSNEPYLWETTIQKHLNLDAKNVILAKTNEIVNEYIDNYIASAQYENTISALIRICPNLIVPTVVNNLKNYLSNFSNYNVSNEEYLIFLTPDGELFDKSVIPHIDSQYETVRLKRENKVYSYKEQLEEIQLRREIDDKREKEGKLKTIRYTQKQEEQIKNQMEKELHIKLRITLLYEKLISKISLLKASCSGNGEQMAQHFYSLLDGILNASKSPLCAEVLTDLYIFLHNLCFTFQPKLGRAIALATIKLQSPSCVLKKEFEAFNVNQAINDIIIDLDNHVKSNYLDSPSFSYAFEFLKRALLLLNTDSDFDLISKGIQILALHTSAGVCCKPQFMPRFGMFKMLLDLLKNNNKLWAQTSAAILQVAKCSNGDNCSSPDNHIISIFLQALQHCSDAVRKVALQSLKIMVNGIVNHIKVDNSLEKVIINRFWVAKHDPEEENRELALFLWNTAKFPLPGYVDIINDITHSETCIQKSASESLIPLLAGDEVLKKCVIKKLFSIYKAKLSLLPPVLDQFDREIEPAIDQWKPRRGIAIAFSTIAFLLSIEDINDIMNFMVSQGLGDREDVVHKEMLATALKIVDLHGNKAIENLLPVFEDFLDKAPKSQSYDNIRQAVVILMGSLARHLEKDDKRIDPIVKRLITSLSTPSQQVQEAVSNCLPHLMPSVKDEAPSMIKKLLHSLAKSEKYGERRGAAYGIAGIVKGLGILSLKQLDIMSKLTAFIQDKKNYRSREGALFAFEVLCSTLGRLFEPYIVHVLPHLLQCFGDPSQYVRQAADDTAKVVMRKLSAHGVKLVLPSLLEALDEDSWRTKTASVELLGAMAFCAPKQLSSCLPSIVPKLIQVLGDSHTKVQESGGEALKVIGSVIKNPEIQAIVPVLLDALEDPSNNTSTCLQSLLKTKFIHFIDAPSLALIMPVVQRAFMDRSTETRKMAAQIIGNMYSLTDQKDLAPYLPSIIPGLKSSLLDPVPEVRAVSARALGAMVKGMGESSFENLLPWLMETLTSESSSVDRSGAAQGLSEVVGGLGVEKMHKLMPEIISTAERVDIAAHVKDGYIMMFIYMPGAFQEEFTPYIGQIINPILKALADESEFVRDTALKAGQRIVNLYAETAVALLLPELEKGLFDDNWRIRYSSVQLLGDLLYRISGVSGKMTTETASEDDNFGTEHSHTAIIHFLGDERRNRVLSGLYMGRSDVSLMVRQAALHVWKVVVTNTPRTLREILPTLFGLLLGCLASTSYDKRQVAARTLGDLVRKLGERVLPEIIPILENGLNSDHPDQRQGVCIGLSEIMGSTSKEMVLTFIDSLVPTVRKALCDPLPEVREAAAKTFESLHSTVGSRALDEILPFMLQGLSDADPFVAENTLDGLRQVMSIKSKVVLPYLVPQLTSPPVNTKALSILVSVAGEALIKYLPKILSSLLEALSDAYGYPNEPQENEYCQTVILSVTDETGIRTIMDTLLISANSSDLCTRKSAASLLSAFCIHSPGNYYEYIPQLLRCLLKLLVESDKDILQKSWEALNAVIKGMNAAQQICHVSDVRQAVRFAASELEGTELPGFCLPKGITPLLPVFREAILNGLPEEKENAAQGLGEVIFLTNAKSLQPSVVHITGPLIRILGDRFNAAVKAAVLETLSILLHKVGVMLKQFLPQLQTTFLKALHDQNRNVRMKAGKALSELVAIHSRAEPLFNEIHNGIKNSDDSSVRETMLHALRSIVSRSGDKMSEPIKKQIYVTLLSMIGHHEDATRSAVGGCLGAILKYIASGHVYDLFNNIILTNNTDDLIVKHGHTIVLFVALKECPTEVLVLDLPEKITSYVLINILSEKVPIASNAVRAATYLLDYYLVNQNEPPIKIVMALSRAMNHSSNDVKQLVAQSCTYLSKNLAANQSSIDVLKYLVPMLVNGTKEKNGYVKSNSELALISILRLRSDDTSFLKISGLLESGARDSLNDVVLKVLKRTSSQSIIKEEELDDTLQS

SEQ ID NO: 25777 - DNA, 5770 bp, DROSOPHILA
aatcaattttgatctgagaaaggaagttaaatatttagtttttcaatttcgttgccatatggtctactaaaatattatttaaaaattattgcattgaccattacttttgtaaatgtttttaattaaaaatctaccgtttacatgttcacatttatgtttataattattaatatatactatggcactgacgacaaatgtcaacaggggacattaataaaattaattttatcattatttcaagtatttaaataaagtttacatctggaattactattataacttttgtaatttacataaacataaattgtccaaaaaaaaagaaagtacattttaaaaaatacttttttaaataaattataaggttcaacatgtttatttcaaaattaattttttgaggcacgacgtgcggaaataggaacctaagattaattcaattataattttcacacgtcacaagctaacatattctaatatccaattaatccaatacagtcatttttgtaatttattatgtattattaataatcacgttaagacaatgcaaaacaagaaacatggtgccaattaataaaaaataatatagatttaatgcccaagaagatgtaaagttgctctttacttcattttgaaagatttacaatgcatgagcatacatgtgcacacgtacagtggtcggatgtccctgtatgcggagagagcggctggctgtagagctcgtcgctctctggctcttgcacaaaaattccagagaccctgaagccagcacaaaaaaatcatatgccgctacgcatcttgttatcctagtgtctttgcttttactctacgagtaacgggtacaccaaatgaattagaacttgctgttcacttattcatggttcaattttcttttatttcgcatgtatctatatttttgtatattttttttttttataaataaagtttgcgagtattatacaaaaatattgtattatcattcccacttaaaaaattatagtcaattagatgttatactgtgaggaatttattcgatttctctgtttaatcccttaacgaacagttgaagtcatttttaagacagtagcttaagttattttatttttcttcggattttatattttttttttgcataattatcatattgttaaatggcttctatcccaaactcgaattacagtattcatcaaaatgaaaaaacttcttattgctgattattgggattcatttgaccattgacaataggtaagaaatatggatgggccattgcttcgcgagctgtgagtcgatcaacgtgatcatagcgtaaaagtttatcaagaaagtctagtgcttcaggagaaactagatgttggttgtcagaatggacaaatctttcccatcgctttcgtgagtgacgctgtagaatgtcgtgaaatcttggatcgaggtcaatattgtatttatccaaatatgcgtagagttcttcggtgcccagcaccttggcaatgcgtaccaattgatcatagttatcatgtccgtggaaaaatggctcttttcggaatatcatcgacgccaacatacaacctagtgaccacatatccagtgagtaatcatacatctggtaatctaccagtaattcgggacctttaaagtatctcgaagccacacgaacattatattcttgaccaggatggtaaaattcggcaagtccccaatctataaggcgcaattttcgattttcgtgatctatcataacattgtggggctttacatcacgatgcattattcccatgctgtggcagtagtcaagtgccttaagaagctcaaacaagtagtaacgaatctcataatcagttaatgtttggtaaagttgcttgaaatctgtgttgttgacgtgctcaaaaatcaacgctggtgttcgagaaactgggtccttgacaacggctaaaagtgttattatattagttcctccacgcaagttctccaaaattttgatttcacgctttatcttcttttttttaacaggtttcagaattttaacaacgcacttttccgtggtcgtaatattaatggcctcgaagacctcagaatactttccacggcctaatttacggaccaactgataatcgtcttgattgccccaatcaaccacataattttcatagtcccaatattcatccggtttgtgcgcattgacatctgtgtacacgcgagccgcactaggaagtgtcatttttctcaacaaaacgttcctttctgcctccttgttaaaatttttttcgggttgtagcagtaagtttatgtgagctgattccgttctcagtcggttggtggtcctaacaatattattattgtacaacaatctgaaagtaaaacgaaaacgtatttaatcagaagcaatcggaaacacatgtctacacctcttcatagcataacacatttccgaaacagcttaaatatcgttatatcagtaacgcaaaatgccaaattttaatcgtcttaacatagaaagaaaattgagtaataataaacaaaatcaactgtaaccactaacattattcgaggtaaatgaagttttacaaatgttacaaatttctttctgcatatgcaatttcatttgcaaaatcatttgtaggttattgtacttccgtcatctagcagctctgcaactctccaaacgaaaacaaaacaaagttctttcgctcgaaatgttgatctaaagataatgagactttccaccttcaaacgcgataattgtatctaaaactttgtttaaattaataatttagataaatgatatatatatgatatgctggatcagatgcgtaccaaagaagcaagaagaaaaataatcaatatattactaatatttataaatttgtctcaaaaagtagcctagcaaaaccgagtcgtctttatttttcaaatggatacaaccgttagcgtgaagtgcaaaaaaataaataacactcggagttctgtgtcacggtttataattttttaatccattccaaaacctgtccaacttcacctatagtttttgtggaacccctgatattttcgatcaggattattccttattcctacgtacttaagaacgcctagttctcggtaactatggatgctagaacgttaagatgaacaaggttttatgagttgttaaaattccgaatatatgcagatatcgttcacgcattcaccgagttgagaagaatcacacaacggtgattgtaatcaaagtgtaacacgagtcaaataaataaatgtttgaaggttttttagcaacaaaaacacccactttcggattcatgaagacttaagttgtgtttagtggaaaagctatttcgataaatattataactttagatgatcaccaaaaattgtactaccttttttcacttgttgtcttgttttaaagtcccgactgcagaggaattaagtgtccttttgcaattgataatatcaaactaaaatacatcgagttaaaaaaaattttttacgatcgtattacgaacgatttttcatatgttcctgattttaaactttggcacgaaaacgtattttacatttgactacaaaattcacttatttggcaagactctagggctattatggcaattattattttgatatatcgtgcccataagtcaattaaagaataataataatttattggaaagtaatttattattcttgacaaaagttgaaattaaacaccttgtatgttgcagttgcgagcgttgatggctctttacctcgatacgtggtgtttttgtttgaaagacttttaccctaattctataatcagctaaaagtctgtcttacgattattataaatgttttaattaaaataatttaggaagaatgtattatattaaaaagctgcaaaacaaataatgtaagaagtacaaacatgtgggtttcttaatcgtgtgcacttaattaatatttttcagcatgaatttattaagttatagagcaaccaaaagagtttaatcgatggtttgcgccgcgcttgcaaaaaggcggttcttgcagacatacatattttccacgcaaatactgttggaattcagtggaattcaatcaatgcacgtgcctaagtataaatatggataaaaacgtacccaatttttgaagattgattgttataagctggcttgccaaagtattttaaaagatttctccgtctcgtatgatatccacagtgtatgccgggtatgttcctcacagttttgcactaatttatataataagcaggtatactaatgaaaataaattttaaatttgcttttatataaatacttagatatttattaatacatatattatgcgaaatcatttacataaataaacccttggtatatacaaaagtgtatataaaatatatgtgcatacataaatccatgtgtatgcaatgttatatttcaatgaatacattcgctactgaacaaattattagtaaaaacgagtacatacgccaatgttaaaaatacacacgaatatcataatgacaaccactctaaaattcagaaaaaactttagacgagttcaccggcttcatgacggcatgattcagaatggccccatatgtacctatttatgtacatgcataaaaaatttcaaagactttccacaacatatatacaattattgatatatttcactgatttcatgctcttgagaaaatacgctgtaacgcaaaatccgcatatacatgttaatttaatgccatttaatgacaagagtaataatactcacgtcttagtaaaaaaaaaaccagtgtacgtggttacggagaaaatttttcatattttaagaaggttagcttaaccgccgtctattttactgcataacaaaacagtaggtagtcaagatagatcaaaaaatcatccttatgtcagaaacgatggaagtgaaactgatccagctattttataaaattagttaggaatttatttagggtctattattattttatttctgtcggggaaacactgatagattacatttgtttataaaaacaataacatacgattattgaaatctgtggttagaattatagaatatatacagtttgtcaagaaactgtttacacactgtaaaataagttgaatttttgactttaaagctaaaaattaagggttttttttcttaattaaacgcatttttttttataaaatataattaaacaatatttattttacttataaatcaaaaaacaaattaaaaatattaaatatacaagaaaataaacaacaaattccaagtttacacacttttgagactgtcaagaaactctttacacattttgttttcctactttgttttgttctttttcttagaacggaactcgatttttccggttatttttggctttgcattgctttttacaacgcttctattgaaatttgttgactttgcttgttaaattttgctgatcaaacgtgcttaaagcgaattattaaatttaataaaatgcctggaaagagattaacttttgaagttacccaattaataaactataaccacccagttgggaaaatcttttccagaattagtataaatgtttcctgtatcccgtaagaccggtctacaatgttttaaaaggctcggaaaaagagggcaggcttgaacctaagagtggtggtgggcggaaaattaatattaaaaagcgtgtagaccgctttattatgcgaatagtgattgcgaacccccgaatctcggtcagagcacttgctctggatatcaggcaagaatgccacctaactgtgtcacacgaaactgtgcgcca

SEQ ID NO: 25778 - DNA, 1510 bp, DROSOPHILA
aaccacgtacactggttttttttttactaagactatacctgcttattatataaattagtgcaaaactgtgaggaacatacccggcatacactgtggatatcatacgagacggagaaatcttttaaaatactttggcaagccagcttataacaatcaatcttcaaaaattggattgttgtacaataataatattgttaggaccaccaaccgactgagaacggaatcagctcacataaacttactgctacaacccgaaaaaaattttaacaaggaggcagaaaggaacgttttgttgagaaaaatgacacttcctagtgcggctcgcgtgtacacagatgtcaatgcgcacaaaccggatgaatattgggactatgaaaattatgtggttgattggggcaatcaagacgattatcagttggtccgtaaattaggccgtggaaagtattctgaggtcttcgaggccattaatattacgaccacggaaaagtgcgttgttaaaattctgaaacctgttaaaaaaaagaagataaagcgtgaaatcaaaattttggagaacttgcgtggaggaactaatataataacacttttagccgttgtcaaggacccagtttctcgaacaccagcgttgatttttgagcacgtcaacaacacagatttcaagcaactttaccaaacattaactgattatgagattcgttactacttgtttgagcttcttaaggcacttgactactgccacagcatgggaataatgcatcgtgatgtaaagccccacaatgttatgatagatcacgaaaatcgaaaattgcgccttatagattggggacttgccgaattttaccatcctggtcaagaatataatgttcgtgtggcttcgagatactttaaaggtcccgaattactggtagattaccagatgtatgattactcactggatatgtggtcactaggttgtatgttggcgtcgatgatattccgaaaagagccatttttccacggacatgataactatgatcaattggtacgcattgccaaggtgctgggcaccgaagaactctacgcatatttggataaatacaatattgacctcgatccaagatttcacgacattctacagcgtcactcacgaaagcgatgggaaagatttgtccattctgacaaccaacatctagtttctcctgaagcactagactttcttgataaacttttacgctatgatcacgttgatcgactcacagctcgcgaagcaatggcccatccatatttcttacctattgtcaatggtcaaatgaatcccaataatcagcaataagaagttttttcattttgatgaatactgtaattcgagtttgggatagaagccatttaacaatatgataattatgcaaaaaaaaaatataaaatccgaagaaaaataaaataacttaagctactgtcttaaaaatgacttcaactgttcgttaagggattaaacagagaaatcgaataaattcctcacagtataacatct

SEQ ID NO: 25779 - protein, 336 aa, DROSOPHILA
MTLPSAARVYTDVNAHKPDEYWDYENYVVDWGNQDDYQLVRKLGRGKYSEVFEAINITTTEKCVVKILKPVKKKKIKREIKILENLRGGTNIITLLAVVKDPVSRTPALIFEHVNNTDFKQLYQTLTDYEIRYYLFELLKALDYCHSMGIMHRDVKPHNVMIDHENRKLRLIDWGLAEFYHPGQEYNVRVASRYFKGPELLVDYQMYDYSLDMWSLGCMLASMIFRKEPFFHGHDNYDQLVRIAKVLGTEELYAYLDKYNIDLDPRFHDILQRHSRKRWERFVHSDNQHLVSPEALDFLDKLLRYDHVDRLTAREAMAHPYFLPIVNGQMNPNNQQ

SEQ ID NO: 25780 - DNA, 3835 bp, DROSOPHILA
tggagaaccgcaaccgtcaagtttagcaaaatgtcggttatgatttgggtatgcatctagtcgaggagttcgagatttggcattcatattgatcacaatgaaagcagagcattatttaaacatttgaaatgcaatctgacatccagcgccatttggtttttataagaacaatagacctgatttcaaattcacaaagtgaattagtcgataggccaattggaagagactactattactgtctgttttctgtctgtctgtaaattacagaaaaattaataaaaaatctttgatatccaattctgtaagctgccttcgaaatgttcagttaaaagactagaccattccagccttttgccgattatgttactacgtaaaatatctggtgtgcctcagaaaatactctcattcctactttggatatccaaaacgagattggccacctagtctgattcggattatctgagtttgggtctataataaatgaagcaatacaattgtaagctcaatgtttctgctgcttataacatataaatctttgtaactttattctaggatagtaacaactcttagcggtccgttcgaaatgactgctgaaaatggctaaaatacaaaaccatgaagtgtaatatatataatgtgaatttttgtaaatgttactgttatatttatctgcccgaataccaatgacttagttatgataagcacaaatctgggttgaaaaacataaggtgtgcttatggttgaggtaagattctaatttacttatttagttgtagttttttagctttgacgtttaatcgccaaaaatattttttattccaataaaaatgtatcgaagaacacgaacacatacatattttacagtatgtagattttagtgagaacaacatataaagcaattcagttttgatttcaaattgtttcaaaacaaaggaaaacacttatctcaagtacatgattatcggtttgcgacgaaaccttttgtgcttccggtgttcgtgtcttccttttctcgtgtgcttcgttggaagaggttagtgagcggtaaatgatctttggaaatctaatatgtttcatgtttatagaagtttatattatcttaccaagtttctgttttgtgctgtgatgttagcatatattttatttatttgttttatttttcaggagtcgaaatgggccgacgaccagctagatggtaagcaaatcagtaattttgtatgaactgtccgtttagtaaaactcttatttcatcctccagctaccgctattgcaaaaataagccgtaccctaaatctcggttttgccgtggtgtccctgatccaaaaattcgtatatttgatttgggaagaaaaaaagctacagttgaggattttcccctgtgtgttcatttggtttctgatgaatacgaacagctgagtagtgaagctttggaagctggacgcatttgttgcaacaagtacttggtgaagtactgcggtaaggaccagttccacatcagaatgcgcctgcatccattccacgtcattcgcatcaacaaaatgttgtcgtgcgctggagctgataggtaaataatatttcatatctgtgttaactactgtattcttatgacctcttttgcactaggcttcaaactggaatgcgaggagcgtttggaaaaccgcagggcacggttgctcgagttcgtattggtcaacccattatgtctgtccgctctagcgatcgttacaaggctcaagttattgaagctttgcggcgtgctaagtttaagttccctggacgtcaaaaggcaagtatagcgagtcacttacaatagtatttaacccaatagtatattaacccattttttcaaacatcgaagtctgaacaaaccacatggaaaattagtaatcgcttttatttcatgtcatgggcgaggctattctaatatcgccacagttaatttgttgggaatgagctaaaaataatattactagcgaacctaaatcaatatctaaagaactttaaaatagtattataaattatttataactatatacctcatttaaaagaaaaaagtgttgaatcttaaacttcttattttcgttcaaattggtgacaagattttgggtaacacgtcgaaatcggcgttaactaaggcaaagattttatgattgctagtgtaacccgcaagaccctcgacaaaaatttaatgcatttcgctagggataaaaaggagaaatgtggaatcttccgcgcttgtcgagcatacgcttaggtctttgttgcaagctgataaccactcgatacttcctactatttttcttaacttaattatttccgtttccgctaaactctcctagtaggtataaaaaaagcattaaaggatgtttattctttagtccgttagcggtcatttggtaagactacgactatggttcgtgcaggtaaagaattttgaagacggttttggaaaatcgtattttggtccattaggtacatttgtttaaatttttaagcttcggtgcgcacgaacttaagatggtttacagaaattacgaaaaactaagaaaacagattttgtaaaacaatgtttttcttaaatatatttttagatctatgtttcaaagaagtggggattcaccaaatacgaacgtgagcgttatgaagaacttcgcgatgacaaccgccttgagcctgatggttgcaatgtgaaataccgcccagagcatggcccgattgccgcatgggaaaaagctcagcgtgatgtttatgcttaataacacattgaaataaaatgtcacttaaagtttcgtaactcagaaacaatatacaaaattaccatttcctgagcacatatatatatgcgttgctttttggtaggaagctcagaatgccctttgtattgttttaactttattatttcgcagcagcagatttgctttcgtagaaagaaaaaaagaaagattgttttaagcgtgtagaaaaggttaattagattaaaagcaaattgaaggtaatacgggtccgactagaatgggtactccttttctcgtttttattgcgtttctatatacataattatatacaattttatacatctttttacaatctcaagcaacaacacgattgtaggtattctctgtcgattcggaaacattttattacccagtaatttggaatttattttttgagtctctaatttctttggaaaccaattaaccaaagacagtttcaaaatatacgagcgtgatctacatttcaaaacgggcgctctaaaagtatccaacttaaattgtatttgaagaatacccacataatgttgcaatataaattcctatttgatttcatgcctcttcaaacaagcacaaacattgtaatatagtggaacgtgtgtgggctcgtatcaagctctgtattaaattcgggcggagatattaaagcgtgcctagcaaaagctgcatccgcactcaagcttcgctgacgccatttctttcactgttcgctgaaggcaaagctaactggctggacttttattctatgttcacgacgataatagatagccattctggccttatcgatggtagcatcataaggaagccgccgacctttgggaatccagttaggcgatctggccgttaatgtagtaccgtttcgctccggaattatcaaatggccaaaattatgtcgaatgacccaaggcggagaggattggtaatatggcggtgagcatgaaatgcaaatcagatcagaaatggcagctgagtttgaaagtttagtctcgcgcaaagatatttatttatagatttgtcctgtccctaaaatgaccgttgtggcaatataaaattgctgtacttca

SEQ ID NO: 25781 - DNA, 788 bp, DROSOPHILA
gtcttccttttctcgtgtgcttcgttggaagaggttagtgagcggagtcgaaatgggccgacgaccagctagatgctaccgctattgcaaaaataagccgtaccctaaatctcggttttgccgtggtgtccctgatccaaaaattcgtatatttgatttgggaagaaaaaaagctacagttgaggattttcccctgtgtgttcatttggtttctgatgaatacgaacagctgagtagtgaagctttggaagctggacgcatttgttgcaacaagtacttggtgaagtactgcggtaaggaccagttccacatcagaatgcgcctgcatccattccacgtcattcgcatcaacaaaatgttgtcgtgcgctggagctgataggcttcaaactggaatgcgaggagcgtttggaaaaccgcagggcacggttgctcgagttcgtattggtcaacccattatgtctgtccgctctagcgatcgttacaaggctcaagttattgaagctttgcggcgtgctaagtttaagttccctggacgtcaaaagatctatgtttcaaagaagtggggattcaccaaatacgaacgtgagcgttatgaagaacttcgcgatgacaaccgccttgagcctgatggttgcaatgtgaaataccgcccagagcatggcccgattgccgcatgggaaaaagctcagcgtgatgtttatgcttaataacacattgaaataaaatgtcacttaaagtttcgtaactcagaaacaatatacaaaattaccatttcctgagcacata

SEQ ID NO: 25782 - protein, 218 aa, DROSOPHILA
MGRRPARCYRYCKNKPYPKSRFCRGVPDPKIRIFDLGRKKATVEDFPLCVHLVSDEYEQLSSEALEAGRICCNKYLVKYCGKDQFHIRMRLHPFHVIRINKMLSCAGADRLQTGMRGAFGKPQGTVARVRIGQPIMSVRSSDRYKAQVIEALRRAKFKFPGRQKIYVSKKWGFTKYERERYEELRDDNRLEPDGCNVKYRPEHGPIAAWEKAQRDVYA

SEQ ID NO: 25783 - DNA, 2666 bp, DROSOPHILA
cgagtacaaggaggtgaatcttcaggcgggcgagcacctgagcgaggaatatgtgaagaagaatccccaacacacggtaccgatgctcgatgataatggcactttcatctgggactcccatgccattgccgcctacttggtggacaagtatgccaagtcggatgagctgtatcccaaggatctggccaagcgtgcgatcgtcaatcagcgtctcttcttcgatgccagtgtaatctatgccagtatagccaatgtcagccgcccgttttggataaacggtgttaccgaagtgccccaggaaaaactggacgccgtacaccagggtctgaagctgctggagacgttcctgggcaacagcccctacctggccggcgattcgctaaccctagccgatctgtccaccggacccactgtaagcgccgtgcccgctgccgtggacatagatcctgctacatatcccaaggtcaccgcctggttggatcgcctcaataagctgccctactacaaggagatcaacgaagctccggcccagagctacgtcgccttcctgcgcagcaagtggaccaagctgggcgacaagtgaaactaaacttatatttaaatatgacatttcacaagtttgaattccatcaattaacaacatacacatccatttctaaaacgtaaacttcttcaataaaatataacatatatataaaatatttaatttatttttttatttaatttatatttatttaaatatttgaatttataataaatactgaaatttataaactttaatatgggacttgagtcagtaattattatctcacagttggggaacccgaccgtaatatttttatcgctcatttatgatatcgtcagtgtacaattacaaaagtttatttaagatacaaatggggcaagctcagcgcacccaattgggttgtttagttaagctcgtttagatttctgtgtgtggcaaatttagtggaacttgggtctctctggtgatcgcatcatgtcggataaattggttttgtatggcatggatattagtcctcctgttcgcgcttgcaagctgaccttgcgggccttaaacttggactacgaatacaaggaaatggatctactggcaggagatcactttaaggatgcgttcctcaaaaagaacccgcagcacaccgtaccactcctcgaagataatggtgcccttatctgggattcacatgctattgtctgctacctggtggacaagtatgccaattcggatgagctatatcccagggatctggtgttgcgcgcccaggtggatcagcgtttgttctttgatgccagcattctgtttatgtcgctgcgaaatgtcagtataccctattttcttcgccaagtaagcctggtacccaaggagaaggtggacaacattaaagatgcatatggccatttggagaactttctaggggataatccctatttgaccgggtcgcaactgaccatagctgatttatgctgcggagctactgcatcctcgctggccgctgttcttgatctggatgagttaaagtatccaaaggtggctgcttggttcgaacgactctctaagttgccccactatgaggaagacaatctgcggggcttgaagaagtatatcaatttattgaaacccgtattaaatctggagcaatagtaatttgtattaaaaaaaaaataccatcaaatgccataaataccataaaaacaaatcaaatcgaatagtactacaactgatttgtaacaaaaacctatcatttttagaatcataataaaactatcattacgtactgaatcctaaagagagaaataataaaagagaaatatatagatggaaaaacttaaatgatcagttttttgcttatagatagttaatttccaaaaattgctgtttcactgtttaatataatcaactggcttatcggttaaattatgacaatggtctttaaatcccaaaacgatgagtaaacaaatagaaatgtttaatatgtgaccaaaagcgctctgtattgtaaagctttaaaacgtgaagtgtatatatattacgtatacgacagctaagagatatgtgggttccaagcattgagtatgacatactgcagagtcatcacagatgtgcaaagctctcttaagtgaagagcaccacctggtggctatataaagccccaagtttcgacgtttagtaagcagttactagtcaatcgccttacagcacactacagacatgggaaaacttacgctttacggaatcgacggtagtcctccggtccgttcggtgctgctcacgctgagagccttgaatttggacttcgactacaagatcgtcaatctgatggagaaggagcacctgaagccagagttcctcaagatcaatcccctgcacaccgtgcccgctctggatgataatggtttctatttggccgacagccatgctattaactcctacctggtgagcaagtacggccggaatgattctctataccccaaggatctgaagaagcgagccattgtcgatcagcgtctgcactacgactccagcgtggtgacctcgacaggaagggctatcacctttccgctcttctgggagaacaagacggagattccacaggcgaggatcgatgccctggagggtgtctacaagtccctcaatctgtttc

SEQ ID NO: 25784 - DNA, 666 bp, DROSOPHILA
atgtcggataaattggttttgtatggcatggatattagtcctcctgttcgcgcttgcaagctgaccttgcgggccttaaacttggactacgaatacaaggaaatggatctactggcaggagatcactttaaggatgcgttcctcaaaaagaacccgcagcacaccgtaccactcctcgaagataatggtgcccttatctgggattcacatgctattgtctgctacctggtggacaagtatgccaattcggatgagctatatcccagggatctggtgttgcgcgcccaggtggatcagcgtttgttctttgatgccagcattctgtttatgtcgctgcgaaatgtcagtataccctattttcttcgccaagtaagcctggtacccaaggagaaggtggacaacattaaagatgcatatggccatttggagaactttctaggggataatccctatttgaccgggtcgcaactgaccatagctgatttatgctgcggagctactgcatcctcgctggccgctgttcttgatctggatgagttaaagtatccaaaggtggctgcttggttcgaacgactctctaagttgccccactatgaggaagacaatctgcggggcttgaagaagtatatcaatttattgaaacccgtattaaatctggagcaatag

SEQ ID NO: 25785 - protein, 221 aa, DROSOPHILA
MSDKLVLYGMDISPPVRACKLTLRALNLDYEYKEMDLLAGDHFKDAFLKKNPQHTVPLLEDNGALIWDSHAIVCYLVDKYANSDELYPRDLVLRAQVDQRLFFDASILFMSLRNVSIPYFLRQVSLVPKEKVDNIKDAYGHLENFLGDNPYLTGSQLTIADLCCGATASSLAAVLDLDELKYPKVAAWFERLSKLPHYEEDNLRGLKKYINLLKPVLNLEQ

SEQ ID NO: 25786 - DNA, 2683 bp, DROSOPHILA
attgtctgctacctggtggacaagtatgccaattcggatgagctatatcccagggatctggtgttgcgcgcccaggtggatcagcgtttgttctttgatgccagcattctgtttatgtcgctgcgaaatgtcagtataccctattttcttcgccaagtaagcctggtacccaaggagaaggtggacaacattaaagatgcatatggccatttggagaactttctaggggataatccctatttgaccgggtcgcaactgaccatagctgatttatgctgcggagctactgcatcctcgctggccgctgttcttgatctggatgagttaaagtatccaaaggtggctgcttggttcgaacgactctctaagttgccccactatgaggaagacaatctgcggggcttgaagaagtatatcaatttattgaaacccgtattaaatctggagcaatagtaatttgtattaaaaaaaaaataccatcaaatgccataaataccataaaaacaaatcaaatcgaatagtactacaactgatttgtaacaaaaacctatcatttttagaatcataataaaactatcattacgtactgaatcctaaagagagaaataataaaagagaaatatatagatggaaaaacttaaatgatcagttttttgcttatagatagttaatttccaaaaattgctgtttcactgtttaatataatcaactggcttatcggttaaattatgacaatggtctttaaatcccaaaacgatgagtaaacaaatagaaatgtttaatatgtgaccaaaagcgctctgtattgtaaagctttaaaacgtgaagtgtatatatattacgtatacgacagctaagagatatgtgggttccaagcattgagtatgacatactgcagagtcatcacagatgtgcaaagctctcttaagtgaagagcaccacctggtggctatataaagccccaagtttcgacgtttagtaagcagttactagtcaatcgccttacagcacactacagacatgggaaaacttacgctttacggaatcgacggtagtcctccggtccgttcggtgctgctcacgctgagagccttgaatttggacttcgactacaagatcgtcaatctgatggagaaggagcacctgaagccagagttcctcaagatcaatcccctgcacaccgtgcccgctctggatgataatggtttctatttggccgacagccatgctattaactcctacctggtgagcaagtacggccggaatgattctctataccccaaggatctgaagaagcgagccattgtcgatcagcgtctgcactacgactccagcgtggtgacctcgacaggaagggctatcacctttccgctcttctgggagaacaagacggagattccacaggcgaggatcgatgccctggagggtgtctacaagtccctcaatctgtttctggagaatggcaattatctggccggcgacaacctgaccattgccgatttccacgtcatcgccggcttgacaggatttttcgtgttcctgcctgtagatgccactaagtatcccgagctggctgcctggatcaagcgcatcaaggagctgccatactacgaggaagcgaatggctctcgtgctgcccaaatcatcgagttcatcaagagcaaaaagttcactattgtttaaggcattttagtatagacaaaaataaataagaacaacaattatcataacgacttgacttttgtacgacaattttgcttaatatcagtccaaacttgttttgagtgaatcgataagagaaactactggtttattttgtgtttgctgcataagatgtgaaggcagatatgatatatggatcaccatatgtagtttgcacacgattgatggattttaaatgaaatttttatgaaaaatgtttggcgcttatatatttagagaaatatgtaaaactaaattattattaaaactactaagaggtcaacagtatgcatgtgaatcaataagtttagtactttgatttagctagcggtaattgctgggttataaccaatatctgataactaagcattgtttgttagaatgtaaaaagagcaggcggtaagagcttttgaaccaaaatcgtatataaagctctcttacgtcaaaaatctctgataactaaaagagcacggaaatattggctgatgtcatctaatttggtttactggccgagtcattacagcacagcgaaactctcttaatttaagagagcttcccagttgagggggaggcaagacagagatacccaaggctagatttgatgcactggatgaggtctacaagacacttgaactgctcctggaaagcaatgactttctggctggaaagttcccaacaccatcactgatttccacgtcatcgcagtgctttcacgtacgatactaatcagtgatttggatgccacgaaatacccaaagttggcgggttggactcagcgcatcaggaggttgccctactacgaggaggccaacggacggagcaaaaaaaaaaacactattttttacataaaattcctaataaactataaaatttatggaattgaaactttgcattattagacttatcacaaatggaatatgatacatttacgcaaaaccaaggcatgttgtttaaaaaactctcaaagtattttatcaagaaa

SEQ ID NO: 25787 - DNA, 683 bp, DROSOPHILA
ccttacagcacactacagacatgggaaaacttacgctttacggaatcgacggtagtcctccggtccgttcggtgctgctcacgctgagagccttgaatttggacttcgactacaagatcgtcaatctgatggagaaggagcacctgaagccagagttcctcaagatcaatcccctgcacaccgtgcccgctctggatgataatggtttctatttggccgacagccatgctattaactcctacctggtgagcaagtacggccggaatgattctctataccccaaggatctgaagaagcgagccattgtcgatcagcgtctgcactacgactccagcgtggtgacctcgacaggaagggctatcacctttccgctcttctgggagaacaagacggagattccacaggcgaggatcgatgccctggagggtgtctacaagtccctcaatctgtttctggagaatggcaattatctggccggcgacaacctgaccattgccgatttccacgtcatcgccggcttgacaggatttttcgtgttcctgcctgtagatgccactaagtatcccgagctggctgcctggatcaagcgcatcaaggagctgccatactacgaggaagcgaatggctctcgtgctgcccaaatcatcgagttcatcaagagcaaaaagttcactattgtttaa

SEQ ID NO: 25788 - protein, 220 aa, DROSOPHILA
MGKLTLYGIDGSPPVRSVLLTLRALNLDFDYKIVNLMEKEHLKPEFLKINPLHTVPALDDNGFYLADSHAINSYLVSKYGRNDSLYPKDLKKRAIVDQRLHYDSSVVTSTGRAITFPLFWENKTEIPQARIDALEGVYKSLNLFLENGNYLAGDNLTIADFHVIAGLTGFFVFLPVDATKYPELAAWIKRIKELPYYEEANGSRAAQIIEFIKSKKFTIV

SEQ ID NO: 25789 - DNA, 2669 bp, DROSOPHILA
ttttttacataaaattcctaataaactataaaatttatggaattgaaactttgcattattagacttatcacaaatggaatatgatacatttacgcaaaaccaaggcatgttgtttaaaaaactctcaaagtattttatcaagaaaactcaatggaaacaattttctcgtactttggtcccaaagtcccaaacggatcggtttctttctttggaagtagtctccgatgcactgagcttaagcccatgtgaaatactcacctaacaaatccttgatgacaaattgagagaccaattggagaccttcctggcggacaatccctacataaccggggaaactctgaccgttgctgatttttgctgtcaatctctgccagcttttgttcccctggagtcggataagtatccgaaggtcaccgcctggttgaaggtgttgcccaggagttgccctactacgaggaagccaatggggtgggggccaggaagttcgtggacttgctgaagggcaaactgagccttctataagaagcatttcccacaattatcgagttgctgcataaatttttaatactctgctaattaaagaaatttgttgacaaacgtttggcattgaccacactcgaagaaaaacccatgtagcagcaatgaaatgcattaaatacacaagtttcgtaaaatgttttaagcacgatataatcaaaaatattattaactttgctatggcggtaaactctaatacgaaactcaaatattgggccatatggactaacgtccttatttttacgccaactcattgctgcaatttaagtgtaaataatttaatttaaaaaaaaaaaatgtttcctggggacgtgggtttttggattccgcttgtatggttggttggggtgggcggacttaattaaaaatccattgacagcttggcagtttcccagggccggcaggttagctatataatcgtcctgctaccgtactgaccactcacttgtaagttcgctggagaatgggtaagatatcgctatacggcctggacgcaagtccgccaacacgggcatgtctgctcaccctgaaggcactggatctgcccttcgaatttgtgttcgtcaatctgttcgagaaggagaactttagcgaggacttctcgaagaagaatccacagcacacggtgccactgctgcaggacgatgatgcctgcatctgggactcccatgccatcatggcgtatctggtggaaaagtacgcgccaagcgatgagctctatcccaaggatctgctgcagcgtgccaaagtggaccaattgatgcacttcgagtcgggtgtcatcttcgagtctgccctaaggagactcacccgtccggtgctcttcttcggcgagcccaccttgccccgcaatcaggtggatcacatccttcaggtctatgatttcgtagagacctttctcgatgatcacgacttcgtggccggcgatcagttgaccatagccgatttcagcatcgtatcgaccatcacctcgattggtgttttcctggagctggatccggccaagtaccctaagattgccgcctggctggagaggcttaaggagctgccctactacgaggaggccaatggcaaaggagctgcccagttcgtggagctcttgaggtccaaaaacttcaccatagtttcgtaagcactagtcttgatttcgacagtaaatggcttaacattttaattggaaattatcgctttcacagaattgatattagcaaacaaaaaaaaatgttctttgttttgtgttcaaattatgcaattaaataggcaaagcacccccctaaaaggtattgttattacttttagttacctgtgggctagtttgcctggtggttagtttatctggggattagtttctgtatttttccattgttctatagaagttgttgcatgacatacaataccttatccacttgttcgaggtctttaacatgtttacttgaatcatggcaaaccaacttgatagcttgttatcaacaatcacgaaagtattatttgagtgagtcagttctagattgttttcacgaaagtacttaaacaatttcgattatcgttcgacgaaccgttagaccgtatcaaatgattgcataatttaagcagaacagtatctacagaatttgtaattacacaaatttttaatgtttcattgaaacttatgttattctctacacgaatcaactcttaaaggaccaatcaacaagaaccaacaaaaattctcttagaaatgtctcttagccatgctctcttaacctttccatttggtaacaacatttgtacgcgctcgatcccaagaatcagtcagtagagaacgttaactcaaagtgcaaacatggtcaagttaactctatatggtgtgaatcccagtccaccagttcgtgccgtcaaactcactctggctgccctccagctgccctatgagtttgtaaacgttaatatttcgggtcaggagcagctttctgaggaatatctaaaaaagaatccagagcacacggtgccaacactggaggatgatggtaactacatttgggactcgcatgccattatcgcgtatctggtgtccaaatatgcagattcggatgccctgtatcccagagatctgctccagcgagctgtggtggatcaacgactgcacttcgaga

SEQ ID NO: 25790 - DNA, 669 bp, DROSOPHILA
atgggtaagatatcgctatacggcctggacgcaagtccgccaacacgggcatgtctgctcaccctgaaggcactggatctgcccttcgaatttgtgttcgtcaatctgttcgagaaggagaactttagcgaggacttctcgaagaagaatccacagcacacggtgccactgctgcaggacgatgatgcctgcatctgggactcccatgccatcatggcgtatctggtggaaaagtacgcgccaagcgatgagctctatcccaaggatctgctgcagcgtgccaaagtggaccaattgatgcacttcgagtcgggtgtcatcttcgagtctgccctaaggagactcacccgtccggtgctcttcttcggcgagcccaccttgccccgcaatcaggtggatcacatccttcaggtctatgatttcgtagagacctttctcgatgatcacgacttcgtggccggcgatcagttgaccatagccgatttcagcatcgtatcgaccatcacctcgattggtgttttcctggagctggatccggccaagtaccctaagattgccgcctggctggagaggcttaaggagctgccctactacgaggaggccaatggcaaaggagctgcccagttcgtggagctcttgaggtccaaaaacttcaccatagtttcgtaa

SEQ ID NO: 25791 - protein, 222 aa, DROSOPHILA
MGKISLYGLDASPPTRACLLTLKALDLPFEFVFVNLFEKENFSEDFSKKNPQHTVPLLQDDDACIWDSHAIMAYLVEKYAPSDELYPKDLLQRAKVDQLMHFESGVIFESALRRLTRPVLFFGEPTLPRNQVDHILQVYDFVETFLDDHDFVAGDQLTIADFSIVSTITSIGVFLELDPAKYPKIAAWLERLKELPYYEEANGKGAAQFVELLRSKNFTIVS

SEQ ID NO: 25792 - DNA, 2669 bp, DROSOPHILA
cttcttcggcgagcccaccttgccccgcaatcaggtggatcacatccttcaggtctatgatttcgtagagacctttctcgatgatcacgacttcgtggccggcgatcagttgaccatagccgatttcagcatcgtatcgaccatcacctcgattggtgttttcctggagctggatccggccaagtaccctaagattgccgcctggctggagaggcttaaggagctgccctactacgaggaggccaatggcaaaggagctgcccagttcgtggagctcttgaggtccaaaaacttcaccatagtttcgtaagcactagtcttgatttcgacagtaaatggcttaacattttaattggaaattatcgctttcacagaattgatattagcaaacaaaaaaaaatgttctttgttttgtgttcaaattatgcaattaaataggcaaagcacccccctaaaaggtattgttattacttttagttacctgtgggctagtttgcctggtggttagtttatctggggattagtttctgtatttttccattgttctatagaagttgttgcatgacatacaataccttatccacttgttcgaggtctttaacatgtttacttgaatcatggcaaaccaacttgatagcttgttatcaacaatcacgaaagtattatttgagtgagtcagttctagattgttttcacgaaagtacttaaacaatttcgattatcgttcgacgaaccgttagaccgtatcaaatgattgcataatttaagcagaacagtatctacagaatttgtaattacacaaatttttaatgtttcattgaaacttatgttattctctacacgaatcaactcttaaaggaccaatcaacaagaaccaacaaaaattctcttagaaatgtctcttagccatgctctcttaacctttccatttggtaacaacatttgtacgcgctcgatcccaagaatcagtcagtagagaacgttaactcaaagtgcaaacatggtcaagttaactctatatggtgtgaatcccagtccaccagttcgtgccgtcaaactcactctggctgccctccagctgccctatgagtttgtaaacgttaatatttcgggtcaggagcagctttctgaggaatatctaaaaaagaatccagagcacacggtgccaacactggaggatgatggtaactacatttgggactcgcatgccattatcgcgtatctggtgtccaaatatgcagattcggatgccctgtatcccagagatctgctccagcgagctgtggtggatcaacgactgcacttcgagacaggagtggttttcgccaatggcattaaggccattaccaagccgttattctttaatggcctgaacaggattcccaaggaacgctacgatgccattgtcgagatctatgactttgtggagaccttcctcgctggacatgattacattgctggggatcagttgaccattgccgattttagcctgatctcgtcgattacctcgctggtggcgttcgtggagatcgataggttgaaatatcccaggatcatcgaatgggtcaggcgtttggagaagctgccttactacgaggaggccaatgcgaagggagcccgggagttggagaccattctaaagtccactaatttcacctttgcaacctagagttctgaaattataataaataatttggaaacttgtaaatattgcggttttttatctctttatattttagatttaagagaaatatcgctgtaggaaacaagagaacttagttagttccattaaagtagcaagagaatgaaatgtgtattaagtacacagagaacctattacagaatgtcgctacatacatagataatatatatattcttgccggcaacaaacattttcgagggctttccattttattaacctctgtcagcatgacttgtattttctgcccgagtactgtgtaatcattttcacatatgataagcggttatcacagaatacttgttgttctatgtttgtgattcatatagtgctctcatatgttcgcgctaaaatacttttaatcagttttttttttattttagatgttgggataggttaaaaataaacataaaaagaaaagtaaagtgagttcaaaagagtaggaggatacttaaaaatttgggtttgtatgaccaaagacactagaatattctagtatgacaaagatatacatatgtatgcatgattagacatatattcacattcatacatattattattgacttgtaaagtgcagtaaatatagagattttttcaagtacacggaatctctcttaaattttctctttcattgatcccaagttttgtatattatattagttattcggcagttatgggttagtttgaaaagagaccccacagcgacaagatggtgaaattgactttatacggtttggaccccagtcccccagttcgcgctgttaagcttactttggccgctctaaacctaacctacgaatatgtaaacgttgacattgtggctcgtgcccaactttcaccggaatatctggagaagaatccacagcatacggtgcccaccctggaggatgacggtcactacatctgggattcgcatgccattattgcctatttggtctcgaaatatgccgattccgatgccctatacccg

SEQ ID NO: 25793 - DNA, 669 bp, DROSOPHILA
atggtcaagttaactctatatggtgtgaatcccagtccaccagttcgtgccgtcaaactcactctggctgccctccagctgccctatgagtttgtaaacgttaatatttcgggtcaggagcagctttctgaggaatatctaaaaaagaatccagagcacacggtgccaacactggaggatgatggtaactacatttgggactcgcatgccattatcgcgtatctggtgtccaaatatgcagattcggatgccctgtatcccagagatctgctccagcgagctgtggtggatcaacgactgcacttcgagacaggagtggttttcgccaatggcattaaggccattaccaagccgttattctttaatggcctgaacaggattcccaaggaacgctacgatgccattgtcgagatctatgactttgtggagaccttcctcgctggacatgattacattgctggggatcagttgaccattgccgattttagcctgatctcgtcgattacctcgctggtggcgttcgtggagatcgataggttgaaatatcccaggatcatcgaatgggtcaggcgtttggagaagctgccttactacgaggaggccaatgcgaagggagcccgggagttggagaccattctaaagtccactaatttcacctttgcaacctag

SEQ ID NO: 25794 - protein, 222 aa, DROSOPHILA
MVKLTLYGVNPSPPVRAVKLTLAALQLPYEFVNVNISGQEQLSEEYLKKNPEHTVPTLEDDGNYIWDSHAIIAYLVSKYADSDALYPRDLLQRAVVDQRLHFETGVVFANGIKAITKPLFFNGLNRIPKERYDAIVEIYDFVETFLAGHDYIAGDQLTIADFSLISSITSLVAFVEIDRLKYPRIIEWVRRLEKLPYYEEANAKGARELETILKSTNFTFAT

SEQ ID NO: 25795 - DNA, 2669 bp, DROSOPHILA
gagatctatgactttgtggagaccttcctcgctggacatgattacattgctggggatcagttgaccattgccgattttagcctgatctcgtcgattacctcgctggtggcgttcgtggagatcgataggttgaaatatcccaggatcatcgaatgggtcaggcgtttggagaagctgccttactacgaggaggccaatgcgaagggagcccgggagttggagaccattctaaagtccactaatttcacctttgcaacctagagttctgaaattataataaataatttggaaacttgtaaatattgcggttttttatctctttatattttagatttaagagaaatatcgctgtaggaaacaagagaacttagttagttccattaaagtagcaagagaatgaaatgtgtattaagtacacagagaacctattacagaatgtcgctacatacatagataatatatatattcttgccggcaacaaacattttcgagggctttccattttattaacctctgtcagcatgacttgtattttctgcccgagtactgtgtaatcattttcacatatgataagcggttatcacagaatacttgttgttctatgtttgtgattcatatagtgctctcatatgttcgcgctaaaatacttttaatcagttttttttttattttagatgttgggataggttaaaaataaacataaaaagaaaagtaaagtgagttcaaaagagtaggaggatacttaaaaatttgggtttgtatgaccaaagacactagaatattctagtatgacaaagatatacatatgtatgcatgattagacatatattcacattcatacatattattattgacttgtaaagtgcagtaaatatagagattttttcaagtacacggaatctctcttaaattttctctttcattgatcccaagttttgtatattatattagttattcggcagttatgggttagtttgaaaagagaccccacagcgacaagatggtgaaattgactttatacggtttggaccccagtcccccagttcgcgctgttaagcttactttggccgctctaaacctaacctacgaatatgtaaacgttgacattgtggctcgtgcccaactttcaccggaatatctggagaagaatccacagcatacggtgcccaccctggaggatgacggtcactacatctgggattcgcatgccattattgcctatttggtctcgaaatatgccgattccgatgccctatacccgaaagatcctctcaagcgggctgttgtggatcagcggctgcactttgaatccggagtggtctttgccaatggcataaggagcatatcgaagtcagtgctcttccagggacagacgaaagtacccaaggagcgatacgatgccattatcgagatctacgattttgtggaaacttttctcaagggacaggattacattgctggcaatcaactgaccattgcggatttcagtctcgtttcatcggtggcctcccttgaggccttcgtggccttggatacgactaagtatcccaggatcggtgcttggatcaaaaagctggaacagcttccatactacgaggaagccaatggcaagggcgtccgccagttggtggccattttcaagaagaccaatttcacattcgaagcatgatattattttacagtttatatagtcacaataaataattgcttagaaaactctagagcttttgaatttttgtggtgaaataattgatttggacacaaatgaatagaagaggcgagagcaaaaacctaactgactttcttatctactgctctcgcttctcttaattactctctttcgaaattctataaatatagtgactcttcgctgttgacgtttagtaatagacgagactctacccagcgacaagatgcccaaattgatactgtacggcttggaggcaagtccaccagttcgtgccgtcaaattgaccttggctgccctggaggttccctacgaattcgtggaggtaaacactcgggccaaggaaaacttctctgaggagtttctgaagaagaatccacagcacacggtgcccacgttggaggacgatggacattatatctgggactcacatgccattattgcctatctggtgtccaaatacggcaaaacggacagtctctatccgaaagatctcctccagcgtgctgtcgtggatcagcgattgcatttcgagtccggagtgatcttcgctaatgcactgagaagcattaccaagccacttttcgccggtaagcaaacgatgattcccaaggagcgttacgatgcgattattgaggtctatgacttcctggagaaattccttgctggaaatgactacgtcgccggcaatcagcttacgattgccgactttagtatcatatcaactgtgtcctcgttggaggtcttcgtaaaggtggacacgaccaaatatcctcggatagctgcatggttcaagagactccaaaagctgccctactacgaggaggccaacggcaatggtgctcgtacatttgagtccttcatcagagagtataatttcactttcgcatcgaattaaatcatctatacatgctgctaatatatattaaacactttataaataaaataatcgtacagtacaaaaaataaacaaatagaaaat

SEQ ID NO: 25796 - DNA, 669 bp, DROSOPHILA
atggtgaaattgactttatacggtttggaccccagtcccccagttcgcgctgttaagcttactttggccgctctaaacctaacctacgaatatgtaaacgttgacattgtggctcgtgcccaactttcaccggaatatctggagaagaatccacagcatacggtgcccaccctggaggatgacggtcactacatctgggattcgcatgccattattgcctatttggtctcgaaatatgccgattccgatgccctatacccgaaagatcctctcaagcgggctgttgtggatcagcggctgcactttgaatccggagtggtctttgccaatggcataaggagcatatcgaagtcagtgctcttccagggacagacgaaagtacccaaggagcgatacgatgccattatcgagatctacgattttgtggaaacttttctcaagggacaggattacattgctggcaatcaactgaccattgcggatttcagtctcgtttcatcggtggcctcccttgaggccttcgtggccttggatacgactaagtatcccaggatcggtgcttggatcaaaaagctggaacagcttccatactacgaggaagccaatggcaagggcgtccgccagttggtggccattttcaagaagaccaatttcacattcgaagcatga

SEQ ID NO: 25797 - protein, 222 aa, DROSOPHILA
MVKLTLYGLDPSPPVRAVKLTLAALNLTYEYVNVDIVARAQLSPEYLEKNPQHTVPTLEDDGHYIWDSHAIIAYLVSKYADSDALYPKDPLKRAVVDQRLHFESGVVFANGIRSISKSVLFQGQTKVPKERYDAIIEIYDFVETFLKGQDYIAGNQLTIADFSLVSSVASLEAFVALDTTKYPRIGAWIKKLEQLPYYEEANGKGVRQLVAIFKKTNFTFEA

SEQ ID NO: 25798 - DNA, 2692 bp, DROSOPHILA
acggaatctctcttaaattttctctttcattgatcccaagttttgtatattatattagttattcggcagttatgggttagtttgaaaagagaccccacagcgacaagatggtgaaattgactttatacggtttggaccccagtcccccagttcgcgctgttaagcttactttggccgctctaaacctaacctacgaatatgtaaacgttgacattgtggctcgtgcccaactttcaccggaatatctggagaagaatccacagcatacggtgcccaccctggaggatgacggtcactacatctgggattcgcatgccattattgcctatttggtctcgaaatatgccgattccgatgccctatacccgaaagatcctctcaagcgggctgttgtggatcagcggctgcactttgaatccggagtggtctttgccaatggcataaggagcatatcgaagtcagtgctcttccagggacagacgaaagtacccaaggagcgatacgatgccattatcgagatctacgattttgtggaaacttttctcaagggacaggattacattgctggcaatcaactgaccattgcggatttcagtctcgtttcatcggtggcctcccttgaggccttcgtggccttggatacgactaagtatcccaggatcggtgcttggatcaaaaagctggaacagcttccatactacgaggaagccaatggcaagggcgtccgccagttggtggccattttcaagaagaccaatttcacattcgaagcatgatattattttacagtttatatagtcacaataaataattgcttagaaaactctagagcttttgaatttttgtggtgaaataattgatttggacacaaatgaatagaagaggcgagagcaaaaacctaactgactttcttatctactgctctcgcttctcttaattactctctttcgaaattctataaatatagtgactcttcgctgttgacgtttagtaatagacgagactctacccagcgacaagatgcccaaattgatactgtacggcttggaggcaagtccaccagttcgtgccgtcaaattgaccttggctgccctggaggttccctacgaattcgtggaggtaaacactcgggccaaggaaaacttctctgaggagtttctgaagaagaatccacagcacacggtgcccacgttggaggacgatggacattatatctgggactcacatgccattattgcctatctggtgtccaaatacggcaaaacggacagtctctatccgaaagatctcctccagcgtgctgtcgtggatcagcgattgcatttcgagtccggagtgatcttcgctaatgcactgagaagcattaccaagccacttttcgccggtaagcaaacgatgattcccaaggagcgttacgatgcgattattgaggtctatgacttcctggagaaattccttgctggaaatgactacgtcgccggcaatcagcttacgattgccgactttagtatcatatcaactgtgtcctcgttggaggtcttcgtaaaggtggacacgaccaaatatcctcggatagctgcatggttcaagagactccaaaagctgccctactacgaggaggccaacggcaatggtgctcgtacatttgagtccttcatcagagagtataatttcactttcgcatcgaattaaatcatctatacatgctgctaatatatattaaacactttataaataaaataatcgtacagtacaaaaaataaacaaatagaaaatatacatataaaaatactaaagagcacctcgccaggtttttgtcaactctcttgcgaaaatgtgtctctttaacgttctctttccaaatcaaataaatatggcgcctctttggcttctacttttagtactaggctcaacctctagacggcatgtccaagctgattttgtacgggacagaggctagtcctccagttcgggccgccaaattgaccttggccgcccttggcattccctacgaatacgtcaaaataaacaccctggccaaggagaccctttcgcccgagttcttgcggaagaatccccagcatacggtgcccactttagaggacgatggccatttcatctgggactcacacgcaatcagcgcatatctggtgtccaagtatggccagagtgatactctttatccgaaagatctcctccaacgcgctgtggtggaccagcgattgcacttcgagtccggcgtggtctttgtcaacggactgagaggcatcaccaagccgctctttgcgaccggtcagacgacgattcccaaggagcgttacgatgccgtcatagagatttacgactttgtagagacttttctcaccggacacgatttcattgccggtgatcagttgaccatcgcggattttagcctaatcacatcgattaccgcactggcggtattcgtggtcatcgatacagtaaaatacgccaatataactgcgtggatcaagaggattgaggaactaccctattacgaggaggcatgtggcaaaggtgcccgggatttggtgaccctcctcaagaaattcaattttaccttctcaacttaataatttattcttagtatataattgtaataataatgtttaataattgtataaaacattattaagactattcttcaaatattgttatcttatgattttta

SEQ ID NO: 25799 - DNA, 692 bp, DROSOPHILA
agactctacccagcgacaagatgcccaaattgatactgtacggcttggaggcaagtccaccagttcgtgccgtcaaattgaccttggctgccctggaggttccctacgaattcgtggaggtaaacactcgggccaaggaaaacttctctgaggagtttctgaagaagaatccacagcacacggtgcccacgttggaggacgatggacattatatctgggactcacatgccattattgcctatctggtgtccaaatacggcaaaacggacagtctctatccgaaagatctcctccagcgtgctgtcgtggatcagcgattgcatttcgagtccggagtgatcttcgctaatgcactgagaagcattaccaagccacttttcgccggtaagcaaacgatgattcccaaggagcgttacgatgcgattattgaggtctatgacttcctggagaaattccttgctggaaatgactacgtcgccggcaatcagcttacgattgccgactttagtatcatatcaactgtgtcctcgttggaggtcttcgtaaaggtggacacgaccaaatatcctcggatagctgcatggttcaagagactccaaaagctgccctactacgaggaggccaacggcaatggtgctcgtacatttgagtccttcatcagagagtataatttcactttcgcatcgaattaa

SEQ ID NO: 25800 - protein, 223 aa, DROSOPHILA
MPKLILYGLEASPPVRAVKLTLAALEVPYEFVEVNTRAKENFSEEFLKKNPQHTVPTLEDDGHYIWDSHAIIAYLVSKYGKTDSLYPKDLLQRAVVDQRLHFESGVIFANALRSITKPLFAGKQTMIPKERYDAIIEVYDFLEKFLAGNDYVAGNQLTIADFSIISTVSSLEVFVKVDTTKYPRIAAWFKRLQKLPYYEEANGNGARTFESFIREYNFTFASN

SEQ ID NO: 25801 - DNA, 2691 bp, DROSOPHILA
tcgcttctcttaattactctctttcgaaattctataaatatagtgactcttcgctgttgacgtttagtaatagacgagactctacccagcgacaagatgcccaaattgatactgtacggcttggaggcaagtccaccagttcgtgccgtcaaattgaccttggctgccctggaggttccctacgaattcgtggaggtaaacactcgggccaaggaaaacttctctgaggagtttctgaagaagaatccacagcacacggtgcccacgttggaggacgatggacattatatctgggactcacatgccattattgcctatctggtgtccaaatacggcaaaacggacagtctctatccgaaagatctcctccagcgtgctgtcgtggatcagcgattgcatttcgagtccggagtgatcttcgctaatgcactgagaagcattaccaagccacttttcgccggtaagcaaacgatgattcccaaggagcgttacgatgcgattattgaggtctatgacttcctggagaaattccttgctggaaatgactacgtcgccggcaatcagcttacgattgccgactttagtatcatatcaactgtgtcctcgttggaggtcttcgtaaaggtggacacgaccaaatatcctcggatagctgcatggttcaagagactccaaaagctgccctactacgaggaggccaacggcaatggtgctcgtacatttgagtccttcatcagagagtataatttcactttcgcatcgaattaaatcatctatacatgctgctaatatatattaaacactttataaataaaataatcgtacagtacaaaaaataaacaaatagaaaatatacatataaaaatactaaagagcacctcgccaggtttttgtcaactctcttgcgaaaatgtgtctctttaacgttctctttccaaatcaaataaatatggcgcctctttggcttctacttttagtactaggctcaacctctagacggcatgtccaagctgattttgtacgggacagaggctagtcctccagttcgggccgccaaattgaccttggccgcccttggcattccctacgaatacgtcaaaataaacaccctggccaaggagaccctttcgcccgagttcttgcggaagaatccccagcatacggtgcccactttagaggacgatggccatttcatctgggactcacacgcaatcagcgcatatctggtgtccaagtatggccagagtgatactctttatccgaaagatctcctccaacgcgctgtggtggaccagcgattgcacttcgagtccggcgtggtctttgtcaacggactgagaggcatcaccaagccgctctttgcgaccggtcagacgacgattcccaaggagcgttacgatgccgtcatagagatttacgactttgtagagacttttctcaccggacacgatttcattgccggtgatcagttgaccatcgcggattttagcctaatcacatcgattaccgcactggcggtattcgtggtcatcgatacagtaaaatacgccaatataactgcgtggatcaagaggattgaggaactaccctattacgaggaggcatgtggcaaaggtgcccgggatttggtgaccctcctcaagaaattcaattttaccttctcaacttaataatttattcttagtatataattgtaataataatgtttaataattgtataaaacattattaagactattcttcaaatattgttatcttatgatttttattttatgataatagacagttttaaaaatcgccacctgattcggttgtaagaagacaaattaaacaggtcaagtggaagaattttccatcacatttcaaacaaatatgataagacaaaccaaaacacttaacacctcatggagtggctcagtcgaactcgtccatggagattacctaatcgatcctacaagcaaagatagctttgctgaaaatgctgataatagataggtgttttgtcttcaagaacacagaatccctctaaaaatggcatattcaaataaatattatgccaatcagaaggaacgctaattatctcgaacgacaagagtgagtcagcatggaatacgcaagtagcgtatataaattgaaataaaatgagctgtaagttcatccgatcgataattgcgatagtcggagctggtttagtttcaagtcaacagccaaggcgagcggacacctgaagcgatgggaaaattagtactgtacggcgtagaggctagtccgccggtgcgagcatgcaaactgaccctcgacgccctgggccttcagtatgagtataggctggtgaacctgctggccggtgagcacaagacgaaggagttcagcctgaagaatccgcagcacacggtacccgtgctggaggacgatggcaagttcatctgggagagtcacgccatttgcgcttatctggttagacgctatgccaagagtgatgacctgtatcccaaggattacttcaaacgcgcactcgttgatcagcgcctgcactttgagtcgggtgtgttattccagggctgcatccggaacatagccattccgttgttctacaagaacataactgaggtgccgcgttcccagattgatgccatctacgaggcctatgactttctggaagcgttcatcggtaatcaggcttacctctgc

SEQ ID NO: 25802 - DNA, 691 bp, DROSOPHILA
catgtccaagctgattttgtacgggacagaggctagtcctccagttcgggccgccaaattgaccttggccgcccttggcattccctacgaatacgtcaaaataaacaccctggccaaggagaccctttcgcccgagttcttgcggaagaatccccagcatacggtgcccactttagaggacgatggccatttcatctgggactcacacgcaatcagcgcatatctggtgtccaagtatggccagagtgatactctttatccgaaagatctcctccaacgcgctgtggtggaccagcgattgcacttcgagtccggcgtggtctttgtcaacggactgagaggcatcaccaagccgctctttgcgaccggtcagacgacgattcccaaggagcgttacgatgccgtcatagagatttacgactttgtagagacttttctcaccggacacgatttcattgccggtgatcagttgaccatcgcggattttagcctaatcacatcgattaccgcactggcggtattcgtggtcatcgatacagtaaaatacgccaatataactgcgtggatcaagaggattgaggaactaccctattacgaggaggcatgtggcaaaggtgcccgggatttggtgaccctcctcaagaaattcaattttaccttctcaacttaataatttattcttagtatataa

SEQ ID NO: 25803 - protein, 222 aa, DROSOPHILA
MSKLILYGTEASPPVRAAKLTLAALGIPYEYVKINTLAKETLSPEFLRKNPQHTVPTLEDDGHFIWDSHAISAYLVSKYGQSDTLYPKDLLQRAVVDQRLHFESGVVFVNGLRGITKPLFATGQTTIPKERYDAVIEIYDFVETFLTGHDFIAGDQLTIADFSLITSITALAVFVVIDTVKYANITAWIKRIEELPYYEEACGKGARDLVTLLKKFNFTFST

SEQ ID NO: 25804 - DNA, 2686 bp, DROSOPHILA
tcagcgcatatctggtgtccaagtatggccagagtgatactctttatccgaaagatctcctccaacgcgctgtggtggaccagcgattgcacttcgagtccggcgtggtctttgtcaacggactgagaggcatcaccaagccgctctttgcgaccggtcagacgacgattcccaaggagcgttacgatgccgtcatagagatttacgactttgtagagacttttctcaccggacacgatttcattgccggtgatcagttgaccatcgcggattttagcctaatcacatcgattaccgcactggcggtattcgtggtcatcgatacagtaaaatacgccaatataactgcgtggatcaagaggattgaggaactaccctattacgaggaggcatgtggcaaaggtgcccgggatttggtgaccctcctcaagaaattcaattttaccttctcaacttaataatttattcttagtatataattgtaataataatgtttaataattgtataaaacattattaagactattcttcaaatattgttatcttatgatttttattttatgataatagacagttttaaaaatcgccacctgattcggttgtaagaagacaaattaaacaggtcaagtggaagaattttccatcacatttcaaacaaatatgataagacaaaccaaaacacttaacacctcatggagtggctcagtcgaactcgtccatggagattacctaatcgatcctacaagcaaagatagctttgctgaaaatgctgataatagataggtgttttgtcttcaagaacacagaatccctctaaaaatggcatattcaaataaatattatgccaatcagaaggaacgctaattatctcgaacgacaagagtgagtcagcatggaatacgcaagtagcgtatataaattgaaataaaatgagctgtaagttcatccgatcgataattgcgatagtcggagctggtttagtttcaagtcaacagccaaggcgagcggacacctgaagcgatgggaaaattagtactgtacggcgtagaggctagtccgccggtgcgagcatgcaaactgaccctcgacgccctgggccttcagtatgagtataggctggtgaacctgctggccggtgagcacaagacgaaggagttcagcctgaagaatccgcagcacacggtacccgtgctggaggacgatggcaagttcatctgggagagtcacgccatttgcgcttatctggttagacgctatgccaagagtgatgacctgtatcccaaggattacttcaaacgcgcactcgttgatcagcgcctgcactttgagtcgggtgtgttattccagggctgcatccggaacatagccattccgttgttctacaagaacataactgaggtgccgcgttcccagattgatgccatctacgaggcctatgactttctggaagcgttcatcggtaatcaggcttacctctgcggaccggtcataaccatcgccgactacagtgtagtttcctcggtctccagcctagtgggattggccgctatcgatgccaagcgctatcccaagttaaacggctggctagacagaatggccgcacagcccaattaccagtcgctcaatggcaatggggcacagatgttgatcgacatgttcagttcgaagatcacaaagattgtgtaattgtttgcactagcttaaaggttacaaacgcaacgtgttctgattacgtaacaataaagcttctatttgtataaactttacaaaaatgcttttaaataccagctcaattagctggttttttttttcgacacaagtatcacaacttaaagattaaactgcagtaataacagttaatgcaattctacgcacttattcgataggttggatttataaatcaaatattgcacatatatcccgtgttcgtctcttctctctaccactcgatgtcttctgtcaaaggccgctctgaatttagcaaaagttggtgggttaaacatttccagttttcaccatccggctggcttggacatcaaggggccactttgaatgcatcgttttcgttctggaatctttgctagcaagtttcactcactgactagctgtttgtcttgcgcttctccagtgccttccaaaccagtttcatgcgctgcacgcagtcgcgatgctgggactcccacagcagtgtagtaagtcgtccaacggtggccacaccgtccgccgagcttcgaatccactggagcaacagctggtatatcacctatagacgtagacacaaagcaaagtgttattttctgattttatgattgattttctaactcttaaaaatcattaaaatcttctggtactctaacaacagagttgtgacatttatacaccataacttgcaatctaatcagacaaacaagtggaatcactatcagtattatataaaataaatagctcacaataatgtaagctaatttatattatttttttttttaagttgaacaatccattcgtgtcaagcaatgaaatctaacagaaatagtggtatttgagtcattaaattagtctgatgcgtcacaatcatcttagcatagtctgttgttttacatactaatttgagtttgtatgttctgttcttgaatcaacattcaacaacaaataagagaagtttaaacttcaggggccttacctctct

SEQ ID NO: 25805 - DNA, 686 bp, DROSOPHILA
gcgagcggacacctgaagcgatgggaaaattagtactgtacggcgtagaggctagtccgccggtgcgagcatgcaaactgaccctcgacgccctgggccttcagtatgagtataggctggtgaacctgctggccggtgagcacaagacgaaggagttcagcctgaagaatccgcagcacacggtacccgtgctggaggacgatggcaagttcatctgggagagtcacgccatttgcgcttatctggttagacgctatgccaagagtgatgacctgtatcccaaggattacttcaaacgcgcactcgttgatcagcgcctgcactttgagtcgggtgtgttattccagggctgcatccggaacatagccattccgttgttctacaagaacataactgaggtgccgcgttcccagattgatgccatctacgaggcctatgactttctggaagcgttcatcggtaatcaggcttacctctgcggaccggtcataaccatcgccgactacagtgtagtttcctcggtctccagcctagtgggattggccgctatcgatgccaagcgctatcccaagttaaacggctggctagacagaatggccgcacagcccaattaccagtcgctcaatggcaatggggcacagatgttgatcgacatgttcagttcgaagatcacaaagattgtgtaa

SEQ ID NO: 25806 - protein, 221 aa, DROSOPHILA
MGKLVLYGVEASPPVRACKLTLDALGLQYEYRLVNLLAGEHKTKEFSLKNPQHTVPVLEDDGKFIWESHAICAYLVRRYAKSDDLYPKDYFKRALVDQRLHFESGVLFQGCIRNIAIPLFYKNITEVPRSQIDAIYEAYDFLEAFIGNQAYLCGPVITIADYSVVSSVSSLVGLAAIDAKRYPKLNGWLDRMAAQPNYQSLNGNGAQMLIDMFSSKITKIV

SEQ ID NO: 25807 - DNA, 3260 bp, DROSOPHILA
tccccgtgccgcatgtaattggcaattctgtatgatcttgatcaacactaatctacaaatctctttaaatgacacaatgaaaatgctaagatatgcaaaacttacgaaaagcacattccccgcaggaatcttcctttactttctcagtcgatttattatgtcttggcaatcgagtaactacagttcaatccactatacattaactgttgcacaatttatcgctacaaaaaccattacaaaatcaaatggttcggctaaacagacgacgctcttactggctctctcaagcattatttatcataaaattttgaattgtgaaaaattgatgcttgttttgcttttattagttttaagaagtttaacttgtgttaactatgggaaatctttatacaaagttattcgatttaagccccgcccacactctcatgaatagaagtagtaacattttccttgtttcgtagcgtttaaaggggtttgtttcctatatattcgatgatagtagtatcttatcgtgcataggtaattaaataccttctttcaaggtatttattttgaaagcaacgaaaacattatgaagtacgacttgtttttaacaactgtaagctcttcttaatttttttcttcaatatcgataatatttagcgtgtaagtcgtaagctctactaactatgactatgccatagatgcaaggcaatcgttgtgcaatagtttttattttagtaaaacagtgaaattaaaaacagttcgatgacccatgtagttgacttaagtttcaacataaaatagacgcatgcgtttttttgtgttagaaaaattttaaaataaatttaaataaataaatagatttgtaaacttttttctattgtagcttatctgttcttgcccgatagggcatcctttcttgcagtgatatggctctgtgtgaatcggacattaagtcgaacagttgatagtcattaaatctatcgggccttgaaaataaataaaaacattgttgaagctcgttgtcatcaatatcttaaggtggtgctagtattgatatatttgttaatggatttgtatgacggcattgatacgagggctcgatctagccagattgatggatggtcttcgggaataaaaatgttacagacccagctggcagtaaaaatggctgtcaaaaaaccagtgagtatacaatctgccgatatagatcatacaattattaatacaccctatgtagcttatgacgccagtggttaatctaaggtccaaacgccttgcagatccagaagttacatgttttgctccaattactacagttgtatccaaaccattaataagtggtaaagcccttccatccatactggaaaggataaacaggggggactgggacgttgccgatgaatacgatcctcaaaggccaaatgaatatgaaaaacttaaagagaaaagtaatggcagtgacaaaaatcgagcaggcgtaagtgatcgagaagaccgagatgacaaagaaaaagatcgtaaacgtggacgcgtcggtcgtcgagaattttatagagacgaagtctcagcccctaacctgaagctcagcgggtttggccaccggcaaaacgatgatgacatgtacttgccatctccgggccttgtagctaaacagggaggtgccacaatcgctccccctccttccctccaagaaatgtccattgatagtggttgtgaagccactaatactatgccatattctgccagctcggtggccgccaaaattatggcaaaatatgggtttaaggatggtcaaggtctcggaaaatcggagcagggcatggccatagctcttcaagtagagaaaacctccaaacgtggtggacggatcatacacgaaaaagacgtttttctgccacccctagcattgtcgccaccttctattggctcccaaataggaacaagtcccagccacaaggccatgcctcctccccagatggtagacacggcggctgagagtggtgacatcggatacagcattacggagattatgaaatcaccaagcaaggttgttcttctacgcaacatggtaggacccggggacgttgacgaagaattggaacccgaggtaaaagacgaatgcaacaccaagtacggggaagtgaacagtgtaatcattcacgaatcgttcggaactgtgccagaagatgcagttaaaatattcgtagagtttaggcggatcgaaagtgcaattaaaggtttttatacatatgtgaatactttgtttggtaaatagttagcttttatttttctttgcagctgtagtggaccttaatggacgtttttttggaggacgtcaagtgcgagcggggttttacaactatgataagtttaaatgtttccaattacattagaactaatacaactaagattgcatttatttttttctaagttattgatagcctaaaaaatgtttaccgcacagaactagtcttgtaaatttctattaaaaactactttctatcaaacaaaaacattttgaccatatttatgtatatttttattgttggggtcgcttacacagtttaggtaacaaagtggaatacccctggctttagaccttatgctatgttggttggaccaaagacactagaataacaagatgcgtaacgccatacgatttttttgaaaacgattttttcggagctgtttttttacagcaaacagctcatacagtgacagccggcaactgtatgtgtgcacacgtatgctcatgcattgttaatttgacaaaaaatgcccttcactttacaagtttctagactttaaatatttattattttttatcaattgtctccatttacaaaattcctgttttgcatagccttaacgttgttattatttagcttagaaatagtaatagccgaatcaatgcacagtgccgctcaactgaataggttgactatttttaaatccgaaacaaatttgtatgtatgaatagctcagttattaatagctgttaaatagcaaagtttctgatctcttaaatttgtttttatatcattttttttttcaaaaacaacaaaaaatcttcaattttttggcttaactgaataggttttacgcttttgactttactttttgtttgaccgcgtgattgtaaaaagttaaattcttttgtattctaaaatataaattatcttttttaatctttttctcaaatggtccgcggaaaacctttatccgattttgaaaaaggtcaaatcaaaggctatattgaatctggtttaaaacac

SEQ ID NO: 25808 - DNA, 1205 bp, DROSOPHILA
ctcgttgtcatcaatatcttaaggtggtgctagtattgatatatttgttaatggatttgtatgacggcattgatacgagggctcgatctagccagattgatggatggtcttcgggaataaaaatgttacagacccagctggcagtaaaaatggctgtcaaaaaaccacttatgacgccagtggttaatctaaggtccaaacgccttgcagatccagaagttacatgttttgctccaattactacagttgtatccaaaccattaataagtggtaaagcccttccatccatactggaaaggataaacaggggggactgggacgttgccgatgaatacgatcctcaaaggccaaatgaatatgaaaaacttaaagagaaaagtaatggcagtgacaaaaatcgagcaggcgtaagtgatcgagaagaccgagatgacaaagaaaaagatcgtaaacgtggacgcgtcggtcgtcgagaattttatagagacgaagtctcagcccctaacctgaagctcagcgggtttggccaccggcaaaacgatgatgacatgtacttgccatctccgggccttgtagctaaacagggaggtgccacaatcgctccccctccttccctccaagaaatgtccattgatagtggttgtgaagccactaatactatgccatattctgccagctcggtggccgccaaaattatggcaaaatatgggtttaaggatggtcaaggtctcggaaaatcggagcagggcatggccatagctcttcaagtagagaaaacctccaaacgtggtggacggatcatacacgaaaaagacgtttttctgccacccctagcattgtcgccaccttctattggctcccaaataggaacaagtcccagccacaaggccatgcctcctccccagatggtagacacggcggctgagagtggtgacatcggatacagcattacggagattatgaaatcaccaagcaaggttgttcttctacgcaacatggtaggacccggggacgttgacgaagaattggaacccgaggtaaaagacgaatgcaacaccaagtacggggaagtgaacagtgtaatcattcacgaatcgttcggaactgtgccagaagatgcagttaaaatattcgtagagtttaggcggatcgaaagtgcaattaaaggtttttatacatatgtgaatactttgtttggtaaatag

SEQ ID NO: 25809 - protein, 384 aa, DROSOPHILA
MDLYDGIDTRARSSQIDGWSSGIKMLQTQLAVKMAVKKPLMTPVVNLRSKRLADPEVTCFAPITTVVSKPLISGKALPSILERINRGDWDVADEYDPQRPNEYEKLKEKSNGSDKNRAGVSDREDRDDKEKDRKRGRVGRREFYRDEVSAPNLKLSGFGHRQNDDDMYLPSPGLVAKQGGATIAPPPSLQEMSIDSGCEATNTMPYSASSVAAKIMAKYGFKDGQGLGKSEQGMAIALQVEKTSKRGGRIIHEKDVFLPPLALSPPSIGSQIGTSPSHKAMPPPQMVDTAAESGDIGYSITEIMKSPSKVVLLRNMVGPGDVDEELEPEVKDECNTKYGEVNSVIIHESFGTVPEDAVKIFVEFRRIESAIKGFYTYVNTLFGK

SEQ ID NO: 25810 - DNA, 3189 bp, DROSOPHILA
gctttgtttacatcgatagcagctttatggtggcatccttgctcctgatgctgggaaccatcgctttgcatccctgccttttccacgctgtcagtcggcttcagtcctcttgagttcttgctcctattatccaggtgcataccctacttggggccggcgctgattttccaggctcgaactctttttcctgcgcgagtgtacctgctcgaactccttcttctgttcgcgagttgaagattacgatccccgtttcgtctttccccttcccctattagaattcgtctccgacatgaattggtctcctccatgctggctgcttgatcaaaacaatgacggttgggcgccaaaagtaacaagctgtttagttctactcgctacgaattgcagcggcgagctcagagagtttttgtgttcgtcccatcaaatttttgatttgtgtgagtacctgaccaaggagaagacagagtttcagattaagggcgctttattgtagtatttcacggctgactgctgatcgccgtctgctgcgcggcgttgctcctgcgacgccttgccttcatcttcctgtgtgtccctgacaacggaacacgtgcaggatcgaaagggattaggatgtcatgggccagggtatatcgtcaactggttaaggcaacactcggccagggactacccttaccgaccactgactccactgtcccttctgaccaggttcttgtgttatcgtgctccgcggatctctgcattgcaccgttcttcacctggagtgattgtccttgtatgtccgctcactggctaattcccttctacgtcctgcgcgttctcacagaccgttaccttgtcgacgggtgcgcgtttttcactgacgggttgactgttcgcggcgttactcttactttctcactgttcgttcccactcgcgaatctcttgtcgccttgttggtataggtggtcgcggggatcgcgttatttttttgtgcacggtccgctcaggtacaaggccacgttagttcaaggtgcgtcctctttgtgctcgtccaaagtccgcattgttaccgttcgaccttgggccttggccgtccagagctcgagtcaaaggtccagcgcaataccgttagttcacggtctctccactttgtcggggtccaaggtccattattttccgttcgacctggccgcctgacaactctcacattccagccgtcttcgctgttgctaagcagctttcctaagttgtattttttgagagttttaagactcctcacagtattcagctcgcgacgtatgaaatccgcatgtcgtgccctaaaatttagcaacaagttgtatatttatatttattatataaatattcatttttaactatgtatgtatgtttgtatagtttttatgaaatacattttttaaaatgtatatatattttttaaatttattttttaaattacaaaagttttatccacaattttagataaaattcatttgatttattagttgaaataataaacataattttaattctgttatgttgctcacagtctcatgttgaagtatgtctccagtaccattttacaaatattaattataaacaataaaatatatttatgtgaacggttgataataatttaaataacattaagaataaaaacaataatggtcaaggcattaatttttaaatcatttttaaatatgtaacttcgcttcttagatcaatattaatttcggttcgaaaatcgtcttctacgctctcaatttcacgcgaggcggagtaagagcaattttggccgtcacaaacctcttgatattcgaatgtctttgcttagacatcggtagtccccgtgccgcatgtaattggcaattctgtatgatcttgatcaacactaatctacaaatctctttaaatgacacaatgaaaatgctaagatatgcaaaacttacgaaaagcacattccccgcaggaatcttcctttactttctcagtcgatttattatgtcttggcaatcgagtaactacagttcaatccactatacattaactgttgcacaatttatcgctacaaaaaccattacaaaatcaaatggttcggctaaacagacgacgctcttactggctctctcaagcattatttatcataaaattttgaattgtgaaaaattgatgcttgttttgcttttattagttttaagaagtttaacttgtgttaactatgggaaatctttatacaaagttattcgatttaagccccgcccacactctcatgaatagaagtagtaacattttccttgtttcgtagcgtttaaaggggtttgtttcctatatattcgatgatagtagtatcttatcgtgcataggtaattaaataccttctttcaaggtatttattttgaaagcaacgaaaacattatgaagtacgacttgtttttaacaactgtaagctcttcttaatttttttcttcaatatcgataatatttagcgtgtaagtcgtaagctctactaactatgactatgccatagatgcaaggcaatcgttgtgcaatagtttttattttagtaaaacagtgaaattaaaaacagttcgatgacccatgtagttgacttaagtttcaacataaaatagacgcatgcgtttttttgtgttagaaaaattttaaaataaatttaaataaataaatagatttgtaaacttttttctattgtagcttatctgttcttgcccgatagggcatcctttcttgcagtgatatggctctgtgtgaatcggacattaagtcgaacagttgatagtcattaaatctatcgggccttgaaaataaataaaaacattgttgaagctcgttgtcatcaatatcttaaggtggtgctagtattgatatatttgttaatggatttgtatgacggcattgatacgagggctcgatctagccagattgatggatggtcttcgggaataaaaatgttacagacccagctggcagtaaaaatggctgtcaaaaaaccagtgagtatacaatctgccgatatagatcatacaattattaatacaccctatgtagcttatgacgccagtggttaatctaaggtccaaacgccttgcagatccagaagttacatgttttgctccaattactacagttgtatccaaaccattaataagtggtaaagcccttccatccatactggaaaggataaacag

SEQ ID NO: 25811 - DNA, 559 bp, DROSOPHILA
ttaaacttcttaaaactaataaaagcaaaacaagcatcaatttttcacaattcaaaattttatgataaataatgcttgagagagccagtaagagcgtcgtctgtttagccgaaccatttgattttgtaatggtttttgtagcgataaattgtgcaacagttaatgtatagtggattgaactgtagttactcgattgccaagacataataaatcgactgagaaagtaaaggaagattcctgcggggaatgtgcttttcggcacgacatgcggatttcatacgtcgcgagctgaatactgtgaggagtcttaaaactctcaaaaaatacaacttaggaaagctgcttagcaacagcgaagacggctggaatgtgagagttgtcaggcggccaggtcgaacggaaaataatggaccttggaccccgacaaagtggagagaccgtgaactaacggtattgcgctggacctttgactcgagctctggacggccaaggcccaaggtcgaacggtaacaatgcggactttggacgagcacaaagaggacgcaccttgaactaacgt

SEQ ID NO: 25812 - protein, 87 aa, DROSOPHILA
MCFSARHADFIRRELNTVRSLKTLKKYNLGKLLSNSEDGWNVRVVRRPGRTENNGPWTPTKWRDRELTVLRWTFDSSSGRPRPKVER

SEQ ID NO: 25813 - DNA, 9804 bp, DROSOPHILA
atgatcaccgaatggttttagtacgagtatgagctcgcatacaacatcattaaaatctcgctgataagagcgactaatattaaaaacactacatacacttcccagtactaaaccaaaactgcgcaacgaattggcaaaactatcgatgttatatggccgtgatcaccgggagaggggatcgatttccatatagatagagatagagagtcccaccgcaagatagagatacacaaacacaaacactgcgaactcactcacttgactcacttgatttgtttatgattcggcgttaggttcttgaccagtttttgtttttcgatttcggtttcggattcggactgggattctctcgcactcgccgatcttcttcaccgatcgacaactgggcaacgtctgagtcgaaacaggtgggcccaggtcctcttataaacgatcggacacctgtggactgcccacgataatgatgacgagacgactagagagtggaaacgcttaccgaatcactcgaatcggggatttattataaggtcttctaactgggatgctcactggccgaatgattataacaaaaagaaataactttaatttttacttcatttataaaatcatttcatttttatgcaaggcttaactatttctccaatccattttggcccaattaaaattacctatatttatagatacaacatacacaacattgtaacgcaaaatgattcaatatttatttaactcgcttatatatacatatatactttcatatcaactcgtttaatcgtaatctagtaacagatttcatcttaaagtactcgaatgtgtgttatagttggtacatgattaaaaaaaacctttcactgggatcaatgtagttggccattatacctgattatcgagaggcaacaccaattccaatttaacttggttttctacgcgccaagcgaacgcttcagtatcgaagtcaggcacttggtaactaggttctaatcctcggtggtaatcctcctcaaagcttggactgggcctgcggaatgattacgtcacgccaccaggagggtcgctggaatgccccctcattggtcataaattcgttctgcaagttctcgtagagaagtccatccgcccgggcgatgaccgaattcagtgcgaaatcgggcggcgaaatggcatccgctacgctcacggccacgtctttcagtttcaggcagctgtccagcagcagttgacgcactgcagccgagaaatcccgcccagccgcaaagccacccacatagaaggtggtcatgtgcttctccagcagccacatggcatacacgtcgaacagcaggcggagtacggatgcatatggcgcctccactgtcagtgtactaacgtgatccacatagcgcgtcagagcatagtactccgcgtaggccagggacagttcccgagctccggccacctgggagttgtttctcgcctcgaacttactgctgcccgccgccagctgaccctcgatgtgagctgtggtcttggccatcaggtgacacagcagccactcgtagcacctaagggagactgaaggaaaacgaactctttaatcaaacaatcatagtaccttaataatattttatctcaatttaaccaccaatttagaaaatagctcatgaacgtctctctaaaaactactaagatactttttctatctttaagttctaaactcaatagttgttgaaatttgaaggacatctatcttttttgaaacatttatgactaggaggctcttatctacttacactgccagctggctattggagttttctgcgccaaggacgcgtagttgagagccagcaactcgcttcggcgctccaggaacttcacactgccaatgggtgtctccagttccttggcgctccactggcgaagcagccagttggaggcctgttgtcctaggacgttgttatcgccctcataggtgcacagtgggtcgtggtcggtgcgcatctggccaagcttagctgcttgcagatagccatgtcctccgcaggcctctcgcgcttcctggatggcatcccgtgctgcccaggtgatcaaaggcttcgacgacgagatcaacgcgtggatctccgcagcattctgggtctaaaatatggctttcattagatgtgctattagctgcaatataaagataacccaccagaacatcaaatccattggaatccgcctgggaacgcgctatgatctccatataggtgcttgtcagctcttcagtggcaattttttgaacgcaggcagccgccagatagggaaagatgcgatattgctgcggatggattatatatattattcaccaatcaaaatcataaaatataatgaacaataagttattccaacccattcaaatggcagagttatttgacttacatgcagttgatactccagaatggccatttcctcgccatgacgctccgggccaaattgcttcctcactgcggagtaacgaactgcgattacggcggcactgcacagagtattggccgattcctgcattatgccaatgcgtccggcggagaagctctcgagtgcagccccaaggacttttcctggttcggtgaacacactttcgtagaccccctccggagtgacgtcactggtgcgattgagcaggttgtcccggggaattcggtagttggtgaagaccacaaatccattgtcaatgccattcagcccacacttctccccaatatcgccgaccagaactccaggatatgagagcagtgtcttgggatcgcgaatgggaatcaggaagccgtggagcccatgattctggccatcagctgtgtagagattggcaaaagtcatggccaccgtggccgttttacccagatttcccacccaacacttggccgcctcgaagtccggcgtattgatcacaaactcctgggtggtcggatcataggtggccgttgtccggatgctcttcgtgttgctgccatgcgatagctccgtgatggccaggcaggtgataacctcccgattccaggctgcctcaatatatttctggtgcttctcggttcccatggcacgaatggcattgttaaacaggcccacgcctagggctatcttcaccgacaaactgggcgagtagcaggcgagcgcctcgttgatgtacatcagatactttgttttggccgagaagctcaggctctcgatctccttgggcaccaggtccaagtgcttcatgcgattcacctgcatggcgcacaggcgcttctgctcgtccatgggcagtgtgcgggatgggtgggcaaaaagggggtcattctccaggcgacgccacactttgtactacgaaaaaggggacatattaaataggaattcttttaagaatttaataacaggagtaagtgtggtaacattcttagattcagttatatatttgttatacatatgtacgcaaaattactgaaggtaaggtaatatatcaagtatcctaattattcaacaaacttcataacataactcacatgcataactaattatgctatttgaaattcattatgtataaaaattattttgaaaactataatccaaaataaaagtttgttttataacggaaaataaaagtgaacattttatttagcgtgtttttaacgctttataaactataataaactaagattttaatggaagtcgcaaatcgtacgtaacaactacttattggataatgccatcaatttactttcgagactctaaagacattagccataattcagcgatttgataagctgtcacgtaagactgctggaagatattccagcacgttctctttctaagagatagccatccacttaccttaattcgcaatccctgctccttctcgaatatcagtcgcaatcgcttccagtcgaagttggccctcttcctgtaaacggccaatggtccaccgctgggaagatcgggaataaagcttgtgtcctcgctgcccattgtgtgattttgtttgatttgatttcttgaagaagaaaggaaatggcaatgttatcggatcagtggagctgcttataaccaagaggctatagaacgactgcgatcttagccaaacgcttaaatggcccaaaccaaccagttgtctagtcagtcaacaagtggggcactcgaactgttttatctacaagcgtgcaaacgactgaagccgtagaaaggaaaaccctcaagaggtgctggttttgaagccattgttggccagcaaaacagtttagcattcactgttctcaactaactatcatcttatgcacaaagagaagtttcaaaccaatgggaataggcttagtaaagttctgcgcccaaaatgagaacagaatataacagaataattggttttaaaactttatgttctattgaattttgttctaaatatatggatacattaattgctaagctacattagttattagcagcaattcttacaaaagattacttagtcgtcataagtaaactattaaatatacttcaaagcataactgccacaaaactaaattgaaaatttatacatttaatgcatcacttttaacctgatccaaggtcatgtccttgcagtggcaaaatgaggtggtgcggattacgcgccaagtgaagcgcaatctaccgcaccgaaatttccgagagattaactttgatcgcgagaccataaggcaaggaatcacccccctgacctacgatgaggcgcgccgtcttaagggaccagttttcgaggctctggaggatgagttgcgtcgagcaggatgcaccatgctgccggagtttctccactgcctggccaccaaggagaatgctcttttcgagagcctaaatatccgggaacgtctatccgatgactcggaattgctctacggaatggtggatcgactccgggatgccgaactggctgtttgcctgaacaagcaccggggtctcaaaaagtgttttggcctattcttcgagaccatgcagctgctggagccgtatcgtcagaaatacgcatacgccctggtggccctcaatgagcacatcatctcgttgtgccgcaacattgccggccaggaacatgatgccgccgagtacatatcccgcatctactacatctattccatgtacctggtgaacacaggccagcgaacctcggccatcaatttcctacaaattgccatggatctggtgcgtggtcacgtgtggaccgccgaggtgggaatgcccgcaggcagtcttacgctccacgagctggtggcccagaatctcgccaggcagctcctcatccagggcaagtccattgtacgccagcatcccgaggatgcggtggccatggcccgacgagccactgtactaatagccgaaagtaagaaccattctcgatgagtcttaggccttattaatggtcaattaaatccactttcagttggcagggataagaacatggagattttctgtgacacttttctggagcgtgcctactttctaatggagattggtaactttaactcggcgcagcagtgccttgagcagatcaaaacccagatcctggcctgcaccgaatatcgattcgttaagctcaacattaagtactacctgatccaagggcaatgttccgagatgtaagtaaatccaattattgaatacttcaaaattgcataactcctttttaaccgaaagttttgagcacgtggagaaggccacttcgtgttacaagagagctcttcgcttatcccgactctatacccaccgcgatttggaggcagagatacttttgcatctgggaaagatctttgccaaggacacacagatgacaagtatcgctaagaaatgctatgagcatgccaagcgcatctacgtcgactttaacgatctgcacagccgcaagatggccaactatctgcaggccaagttaatggcggatgaaatcacaccactttatatggccatgcttaagtcgtctaccactcgctattgcgcctttttcaacctgcgtcagtggaagaaccgctgtcgtcctttttggaagcgactgggtgacgagatcatcaaacaggaaacggatagcatatactgtctgctggatgaggagaaggaggatcctggtcacgatgtggctccctatgacgatatcgatctcaagacattcaaactggctgagggagatatctaagttagctctgttcttgggaaaagtttattgattactgctcctgatatttcttttaggcaataatacaaaattttcagaacgggcttttaggttggttcaaataacaagttgattttctttcacttattgagctggctgttgtaaacacattctatttacccaatgactaaaattatttacacgcatcagagttgtggaatcccctcgttgaagtactgccataaacggccgagtgtataaatatatggatgattatcaaatcgtgagtgtaatgcaagaatttattgacttccgatgtctgagttatttgatcacgcattcggctgcaatgccttaatgtctgaatgaaaatagaactacctgagccgaagaccacccgtactttcaattacccagaagcagggaacatgaatcgatcatgcgataatatactaactgcaaaggtgaatacgatcaatacggataatctataaataattgtgaagtggcatacaataccttataggtgatacagttatatcagtttaccgccttatctttcaactcgattatgcgtcaacattgtaggtggactttgatttgtccactttttggttctgagaaatcgcttatatttgataaggaaaagtacgaatagtctagtaatagataccgatatcacttggtaaaatccatttgtcattaacaacaacataagtgtgtacacttaatttagaaagatatatttgcaaaaaagggttattaatcacgcgaattcttcaggaaaaggtgataacgccataaatcttttatattcataaaatgttcgggtctggtagcatatttcatttccacacaaaataaaagcatatggccgatccggtatcaacctccagctaattataacaattagcggtaattataccggcaacacggccgtcgcagtgataagttcttattgtctaggttcgggaacttttcgttgacgaaatgagcaatcggcagtaaaccagtttatatgggtttctcagaatgtttagtgctacacttaattagcacgagtcaatctctagttcgcaatctcagttatgtactcgcacccaaaagtcgccgcaatctaaatttttgcgcaatcacgaggaaaccattctccactcgtagttgtttgcttgcactcaccaatttgagagaacgatgttacggcgctttgaataagtaaataagttagaatttttaagcggaaatggaagtcgattaccctaaaaaaggggggtgcgtcagtcgcatgaaacagaaattatgaatgtgcttagtgtggggcatacatatacatatgtaaatccaaacaaacccagaaactgcgatgaagaaacccaaaactgataaagttgcgatggttgtggggttggagcagcactgaacagctggccggccaagtggcagcaaaacttttggcttacgtgataagccaggtagaaatttgtggccaggtgaggatgtaatgagcgaaacccattagtccacccaatcgccattgcgtgccgaacgaaattgtcacaatttgttggacaaccaaccacttttgatgggggtgctgttgtgagtcagccttgaacatgaaaatagccaacgtttatttttttgtatatatgatgtactccctttgaatcaatcaaattgagattgggcgaccctggtgacttttaaatgaattacaatgcaaaatgcagcggctaatttcactcttatttacacacttcccagacaaattagcgcacaatcaacactccgacacaaagggccctccattgtggccaaatcaagtccaattgagactggtatcacgtacagtgaaagcctttcttgatgaacttaagactgcaattgatctttggacacaactaaaaatcgaatgtctcaatgacaataacgttttttaataaacttagtagtataatatttgttttgacgggaatgtacattataaaatatcacaaatggcactataaacagaaaggggaataacttcactcactgtttggttattatctttaaacaatgtttcattttacgaacttgataaccactcatatagaggctataagcagcccgcttttaacgggaatgtcactagagctttcactgtaccgccagcacaccctgtacgcgagcgagctggaattgtttggctaagaaggactcggtttcagtttaccgactgccttctattacatcaccgcgaaaacaacaagtaggtagaaacagtttgggtttggggcggcagagagagagagagagagagaggaagagagagtgatgaaaagaattggagttggaaaatttgggtctgggccacgtgagagatgctctcgatgcatctgtacgcgagccgccaacctgtagcgcttctttgggcccgcccttattgttgtcttctcccgttggaatttcgctatgtgcatatacgaaaatttaacacttttgaccagctgagctcataagaccagagcaattaatccaaatttatacatactctcgtacacacccaccaacgcggaatttaaacagcagcaacaacaccaaccggcacacgaccgtcgagagaactgagaatcgaatccgggcagcgagaaagaactggagaattggggaaaaaacgaaccgacacggccaactgatggaaagtgaatgagcgaagcagagcgagaataacgccgcctgattcacagcaataccaatagtatgggaaccctacggtctttcataggggcgagtcccacatgcacagggagaaaacagaacagatgcttatcgaaagtaacagtacttaatctaccaattggtgtgggatgcaggctacttcttctcataaagagcttgaggtatatatttttggtaggaaatgcacatattgacatccctcaaagccaccataaatgtttattttattttattaatgttattttattttattattattatatttttgtaaataatccctagttggtattattagttatttaaagtattccatagttttcttctactcttcttttactcttgttataatttttctctgtgtaccttatgccctctctcttggggatgtatgctgaatagcgttagttggcgggggtcgcggtggggtgtgggaagtgggtcgatgagagctggcccaggttcttcttctttttctaattctgcctcaatgtcaagtgcctgttgccagagcgagaaggcagcacagcagttgttaaccggccggcatcgttatacagttgtgtgggtgagtacgcatccacgagattcggataaagagagcggcagagatgcgaatggcaatgcgcgatacgagatgcggaaacaaaacattttcagctaaaggaaatttattggcattttctgctttttggtaatactttagatactccactttttggaattttttttttgaaaatctgtaatttgttgatgtatttaatatttttgttaagctatgcatggttatttttctattcttaaagaatagaatataataccctttaaaataactgctgagcgaatggcttttatggcgaatggcagctttaatattattagttttagttaaaataaacttaaacttaaaaagtttaaatccttacccgattaaaatgaaacgatccagtttt

SEQ ID NO: 25814 - DNA, 2227 bp, DROSOPHILA
gccgtgtcggttcgttttttccccaattctccagttctttctcgctgcccggattcgattctcagttctctcgacggtcgtgtgccggttggtgttgttgctgctgtttaaattccgcgttggtggaaatcaaatcaaacaaaatcacacaatgggcagcgaggacacaagctttattcccgatcttcccagcggtggaccattggccgtttacaggaagagggccaacttcgactggaagcgattgcgactgatattcgagaaggagcagggattgcgaattaagtacaaagtgtggcgtcgcctggagaatgaccccctttttgcccacccatcccgcacactgcccatggacgagcagaagcgcctgtgcgccatgcaggtgaatcgcatgaagcacttggacctggtgcccaaggagatcgagagcctgagcttctcggccaaaacaaagtatctgatgtacatcaacgaggcgctcgcctgctactcgcccagtttgtcggtgaagatagccctaggcgtgggcctgtttaacaatgccattcgtgccatgggaaccgagaagcaccagaaatatattgaggcagcctggaatcgggaggttatcacctgcctggccatcacggagctatcgcatggcagcaacacgaagagcatccggacaacggccacctatgatccgaccacccaggagtttgtgatcaatacgccggacttcgaggcggccaagtgttgggtgggaaatctgggtaaaacggccacggtggccatgacttttgccaatctctacacagctgatggccagaatcatgggctccacggcttcctgattcccattcgcgatcccaagacactgctctcatatcctggagttctggtcggcgatattggggagaagtgtgggctgaatggcattgacaatggatttgtggtcttcaccaactaccgaattccccgggacaacctgctcaatcgcaccagtgacgtcactccggagggggtctacgaaagtgtgttcaccgaaccaggaaaagtccttggggctgcactcgagagcttctccgccggacgcattggcataatgcaggaatcggccaatactctgtgcagtgccgccgtaatcgcagttcgttactccgcagtgaggaagcaatttggcccggagcgtcatggcgaggaaatggccattctggagtatcaactgcatcaatatcgcatctttccctatctggcggctgcctgcgttcaaaaaattgccactgaagagctgacaagcacctatatggagatcatagcgcgttcccaggcggattccaatggatttgatgttctgaatgctgcggagatccacgcgttgatctcgtcgtcgaagcctttgatcacctgggcagcacgggatgccatccaggaagcgcgagaggcctgcggaggacatggctatctgcaagcagctaagcttggccagatgcgcaccgaccacgacccactgtgcacctatgagggcgataacaacgtcctaggacaacaggcctccaactggctgcttcgccagtggagcgccaaggaactggagacacccattggcagtgtgaagttcctggagcgccgaagcgagttgctggctctcaactacgcgtccttggcgcagaaaactccaatagccagctggcagttctcccttaggtgctacgagtggctgctgtgtcacctgatggccaagaccacagctcacatcgagggtcagctggcggcgggcagcagtaagttcgaggcgagaaacaactcccaggtggccggagctcgggaactgtccctggcctacgcggagtactatgctctgacgcgctatgtggatcacgttagtacactgacagtggaggcgccatatgcatccgtactccgcctgctgttcgacgtgtatgccatgtggctgctggagaagcacatgaccaccttctatgtgggtggctttgcggctgggcgggatttctcggctgcagtgcgtcaactgctgctggacagctgcctgaaactgaaagacgtggccgtgagcgtagcggatgccatttcgccgcccgatttcgcactgaattcggtcatcgcccgggcggatggacttctctacgagaacttgcagaacgaatttatgaccaatgagggggcattccagcgaccctcctggtggcgtgacgtaatcattccgcaggcccagtccaagctttga

SEQ ID NO: 25815 - protein, 691 aa, DROSOPHILA
MGSEDTSFIPDLPSGGPLAVYRKRANFDWKRLRLIFEKEQGLRIKYKVWRRLENDPLFAHPSRTLPMDEQKRLCAMQVNRMKHLDLVPKEIESLSFSAKTKYLMYINEALACYSPSLSVKIALGVGLFNNAIRAMGTEKHQKYIEAAWNREVITCLAITELSHGSNTKSIRTTATYDPTTQEFVINTPDFEAAKCWVGNLGKTATVAMTFANLYTADGQNHGLHGFLIPIRDPKTLLSYPGVLVGDIGEKCGLNGIDNGFVVFTNYRIPRDNLLNRTSDVTPEGVYESVFTEPGKVLGAALESFSAGRIGIMQESANTLCSAAVIAVRYSAVRKQFGPERHGEEMAILEYQLHQYRIFPYLAAACVQKIATEELTSTYMEIIARSQADSNGFDVLNAAEIHALISSSKPLITWAARDAIQEAREACGGHGYLQAAKLGQMRTDHDPLCTYEGDNNVLGQQASNWLLRQWSAKELETPIGSVKFLERRSELLALNYASLAQKTPIASWQFSLRCYEWLLCHLMAKTTAHIEGQLAAGSSKFEARNNSQVAGARELSLAYAEYYALTRYVDHVSTLTVEAPYASVLRLLFDVYAMWLLEKHMTTFYVGGFAAGRDFSAAVRQLLLDSCLKLKDVAVSVADAISPPDFALNSVIARADGLLYENLQNEFMTNEGAFQRPSWWRDVIIPQAQSKL

SEQ ID NO: 25816 - DNA, 4995 bp, DROSOPHILA
tctgaactagttgatattcgggaaacgagtgcactacctccacagaccacacccaggcaaagggccaaaatcagcagcttattcattttggcaattcgttttagctcttgaccgaaaaatacgttcgacactcgcgatttaaattgtactaatgcaatcgagcgaagggagctccgctttaaagcctcagacggcggtgataagagccacttatgtataactcagtcttgaactgattgatttctgacctagagagaatgccactgatagtacacgtagaattggagctcgcaattggtgcagaaagctgcgagtgatgaaagttaattgcgacatcatcgccctatatagaatattttttatattcagctttgatgatcggcgtggaaccttgctcaagaaagacccagtatatagttgccatgtacgtctgccgacattatcacatttgcgattaattacatatatgtatacaaattatgtttataggtgggaacacaatgctaatgagctcccattgaacttagaaaaaactgcgagcaaggtgaaggaatatatagaaaaaaccttgagcttcaaattaaattcaggaagtactaacatagaactatctaagtggttatggtgggttttccaatttttgtcagcatattgtggttacgaaaataaaaagtcggaaataacagaacagaataatatagaatcaacttcaatgagatagaacacttccggtcacctttgatacgaccatccgtccaatacaaaacgaaaacattgaaacaaattaagtaaatctaatctagcaaactgaattgtaaatactaagcatttatatacctagcaatgccaacagcaacgtcaaaatcaaggtcaatatacaaatgtatatacaaatttgcattttttttttgttttgcctaagccagaaagggagaacgaaactttctaattaaagaaagcttcgctttaagcccccgccgataagaaagtccggcaatttgacaataaaatacacgtatattatttttatattttatacatattcaatggaagcggtttgctttgtcagaccggagtaaatgttagcctagccaccagtggagggtctccgccgatctttctaggagtgcaccgaatacgaggtgatctttccgttgtcgttgaccgtggtctgggctccacgtcgactggttccgtctccgttgctgtggctgaaggacgagaccgagacgcccttgtagccaccaccgctgccaccacctcctccggagctgctggagctggagaacgaggatccaccaccgcttccgccgccaaagcgattcacaatgttgggagaggcctgagaaagagttaaatcagccatttgattatttgagcttataacctatttatataatattttaattacttttaactattcacagatacaacagatactttaaatgtatatccactttgaccgcacaaggcagttggatttcttaccggattggatgggctaatgaaggccgtctggcgatagccattggaaccgatagatccggaagctgatgcatagctgggtgcatagcgatgtgagttgtaggatcccgatccagatccagacccggatccagagctggaactgaagctagagctggtgcctcctctgtaccgattctggcgcactagattgtcgtggtaggcctgttgagcggcgatctgttgctggatgcgactgcgcacaaaatgacattagaataaggaaaaacataccgtgataccgtattagtgattgggattagttaaggactagctacttgtatttacatatcgttgtcgttgacaagagatgcatccgcggatgcataagcattgccagccgtggccagaccagttatagctctacaagaacagatatattcaagcgttaggtttacccatagcccgccgtatcactacccaaagatcccaaacaatctatcccctggatatgatcgatgctcactgttggttggcgaagttctgggccaaaatatgattcgtcagctgctggtggaatagatacggatcgatgatgccaaagttgggtgaagtgccgccatagtcatcgtaatcgtaatagccactaccgccaccaccaccggtacccacatagctgctgtgtccaccgccactgttatagcttcccgtatagccaccggctcctcctccactgctggcataccctccggcgtaaccgccggcatatgctcgtcgtctgcgggtcggagccgtttttgctgaaatggaaaacatcatgtggatgataaaaaatatagagcttgaaaggtaaatttaaatttaaatttgccttaatttattgttactcgtatgtatagcttcattagcctatattattattattacggaaattaggtgcacattagtgggttctcttacctcccgatgactcttcattcagagcactcatcaccacacaaataagtagaaccttccacatatttttatctgggcatttgcgattgaactttggagctgggggtgtaaagaataaaacaatggaatcattaagaactggtttggaaattagtgtaagggaaacttgtttgcgaaacgatgcatatttcgaagcctacgaaatttaatgttttttaaacggaagcgcgaattgattgcctgacatatagacgtctagatggcttagatggcttagatggcttatataagatcccatctagaggtggtgctcacaactgggagctactgcctcattgcctcattgttgccgatactttcacagccattgtcattagccgctcggggcagaatccataaatccgcttgcacaagccggtaatatgcgcgattgtaacgtgcggaataggggatgcactgctgccagtaatcgattcttggatgcctgggcgagggtcattggcttcactgcctccccgttcaactggacacgaagctaaagcctcataggcggcaattacaaccaattcatatatatttctctggcccaacccacaactaattgcccttacacgattttcccataatgaattggcgaaaagaaatcagaatcgggggcacggttttggggggaagaaggcctggccatccgcatcgaaaacaaaaaaccccaaaatgtaaattaatggatctccatatgactgtgtatattattgactctcaattcggcaaacgagagaaagagaagaacgaaccagttctcactaatttgctcggagtttagaaatgtataatgaatatttcagtttgttttgttatattattttgatttccccccatttgccagccatctgtagtatattttcgatgcgccatttatattccaatctgtccaacgttttgcttgtcatttcttacaaaagtttattaagttggcattaagagcggggatttttgttcgcaccaacaattgttgcgatctaattgaataactttaaggctcaggagcaaccggtctaaagatgatttataatttttgttaatacaccaaaatattaacaattaacagctttgtgcacggctcgcttgaaacaaaggaactcgactgagtagcactcccgatgaacgaacgtgttttgtcatttcgcccctgactttgatgatcaccgaatggttttagtacgagtatgagctcgcatacaacatcattaaaatctcgctgataagagcgactaatattaaaaacactacatacacttcccagtactaaaccaaaactgcgcaacgaattggcaaaactatcgatgttatatggccgtgatcaccgggagaggggatcgatttccatatagatagagatagagagtcccaccgcaagatagagatacacaaacacaaacactgcgaactcactcacttgactcacttgatttgtttatgattcggcgttaggttcttgaccagtttttgtttttcgatttcggtttcggattcggactgggattctctcgcactcgccgatcttcttcaccgatcgacaactgggcaacgtctgagtcgaaacaggtgggcccaggtcctcttataaacgatcggacacctgtggactgcccacgataatgatgacgagacgactagagagtggaaacgcttaccgaatcactcgaatcggggatttattataaggtcttctaactgggatgctcactggccgaatgattataacaaaaagaaataactttaatttttacttcatttataaaatcatttcatttttatgcaaggcttaactatttctccaatccattttggcccaattaaaattacctatatttatagatacaacatacacaacattgtaacgcaaaatgattcaatatttatttaactcgcttatatatacatatatactttcatatcaactcgtttaatcgtaatctagtaacagatttcatcttaaagtactcgaatgtgtgttatagttggtacatgattaaaaaaaacctttcactgggatcaatgtagttggccattatacctgattatcgagaggcaacaccaattccaatttaacttggttttctacgcgccaagcgaacgcttcagtatcgaagtcaggcacttggtaactaggttctaatcctcggtggtaatcctcctcaaagcttggactgggcctgcggaatgattacgtcacgccaccaggagggtcgctggaatgccccctcattggtcataaattcgttctgcaagttctcgtagagaagtccatccgcccgggcgatgaccgaattcagtgcgaaatcgggcggcgaaatggcatccgctacgctcacggccacgtctttcagtttcaggcagctgtccagcagcagttgacgcactgcagccgagaaatcccgcccagccgcaaagccacccacatagaaggtggtcatgtgcttctccagcagccacatggcatacacgtcgaacagcaggcggagtacggatgcatatggcgcctccactgtcagtgtactaacgtgatccaca

SEQ ID NO: 25817 - DNA, 1053 bp, DROSOPHILA
atcggtgaagaagatcggcgagtgcgagagaatcccagtccgaatccgaaaccgaaatcgaaaaacaaaaactggtcaagaacctaacgccgaatcataaacaaatcaactccaaagttcaatcgcaaatgcccagataaaaatatgtggaaggttctacttatttgtgtggtgatgagtgctctgaatgaagagtcatcgggagcaaaaacggctccgacccgcagacgacgagcatatgccggcggttacgccggagggtatgccagcagtggaggaggagccggtggctatacgggaagctataacagtggcggtggacacagcagctatgtgggtaccggtggtggtggcggtagtggctattacgattacgatgactatggcggcacttcacccaactttggcatcatcgatccgtatctattccaccagcagctgacgaatcatattttggcccagaacttcgccaaccaacatcgcatccagcaacagatcgccgctcaacaggcctaccacgacaatctagtgcgccagaatcggtacagaggaggcaccagctctagcttcagttccagctctggatccgggtctggatctggatcgggatcctacaactcacatcgctatgcacccagctatgcatcagcttccggatctatcggttccaatggctatcgccagacggccttcattagcccatccaatccggcctctcccaacattgtgaatcgctttggcggcggaagcggtggtggatcctcgttctccagctccagcagctccggaggaggtggtggcagcggtggtggctacaagggcgtctcggtctcgtccttcagccacagcaacggagacggaaccagtcgacgtggagcccagaccacggtcaacgacaacggaaagatcacctcgtattcggtgcactcctagaaagatcggcggagaccctccactggtggctaggctaacatttactccggtctgacaaagcaaaccgcttccattgaatatgtataaaatataaaaataatatacgtgtattttattgtc

SEQ ID NO: 25818 - protein, 262 aa, DROSOPHILA
MWKVLLICVVMSALNEESSGAKTAPTRRRRAYAGGYAGGYASSGGGAGGYTGSYNSGGGHSSYVGTGGGGGSGYYDYDDYGGTSPNFGIIDPYLFHQQLTNHILAQNFANQHRIQQQIAAQQAYHDNLVRQNRYRGGTSSSFSSSSGSGSGSGSGSYNSHRYAPSYASASGSIGSNGYRQTAFISPSNPASPNIVNRFGGGSGGGSSFSSSSSSGGGGGSGGGYKGVSVSSFSHSNGDGTSRRGAQTTVNDNGKITSYSVHS

SEQ ID NO: 25819 - DNA, 4962 bp, DROSOPHILA
tctgaactagttgatattcgggaaacgagtgcactacctccacagaccacacccaggcaaagggccaaaatcagcagcttattcattttggcaattcgttttagctcttgaccgaaaaatacgttcgacactcgcgatttaaattgtactaatgcaatcgagcgaagggagctccgctttaaagcctcagacggcggtgataagagccacttatgtataactcagtcttgaactgattgatttctgacctagagagaatgccactgatagtacacgtagaattggagctcgcaattggtgcagaaagctgcgagtgatgaaagttaattgcgacatcatcgccctatatagaatattttttatattcagctttgatgatcggcgtggaaccttgctcaagaaagacccagtatatagttgccatgtacgtctgccgacattatcacatttgcgattaattacatatatgtatacaaattatgtttataggtgggaacacaatgctaatgagctcccattgaacttagaaaaaactgcgagcaaggtgaaggaatatatagaaaaaaccttgagcttcaaattaaattcaggaagtactaacatagaactatctaagtggttatggtgggttttccaatttttgtcagcatattgtggttacgaaaataaaaagtcggaaataacagaacagaataatatagaatcaacttcaatgagatagaacacttccggtcacctttgatacgaccatccgtccaatacaaaacgaaaacattgaaacaaattaagtaaatctaatctagcaaactgaattgtaaatactaagcatttatatacctagcaatgccaacagcaacgtcaaaatcaaggtcaatatacaaatgtatatacaaatttgcattttttttttgttttgcctaagccagaaagggagaacgaaactttctaattaaagaaagcttcgctttaagcccccgccgataagaaagtccggcaatttgacaataaaatacacgtatattatttttatattttatacatattcaatggaagcggtttgctttgtcagaccggagtaaatgttagcctagccaccagtggagggtctccgccgatctttctaggagtgcaccgaatacgaggtgatctttccgttgtcgttgaccgtggtctgggctccacgtcgactggttccgtctccgttgctgtggctgaaggacgagaccgagacgcccttgtagccaccaccgctgccaccacctcctccggagctgctggagctggagaacgaggatccaccaccgcttccgccgccaaagcgattcacaatgttgggagaggcctgagaaagagttaaatcagccatttgattatttgagcttataacctatttatataatattttaattacttttaactattcacagatacaacagatactttaaatgtatatccactttgaccgcacaaggcagttggatttcttaccggattggatgggctaatgaaggccgtctggcgatagccattggaaccgatagatccggaagctgatgcatagctgggtgcatagcgatgtgagttgtaggatcccgatccagatccagacccggatccagagctggaactgaagctagagctggtgcctcctctgtaccgattctggcgcactagattgtcgtggtaggcctgttgagcggcgatctgttgctggatgcgactgcgcacaaaatgacattagaataaggaaaaacataccgtgataccgtattagtgattgggattagttaaggactagctacttgtatttacatatcgttgtcgttgacaagagatgcatccgcggatgcataagcattgccagccgtggccagaccagttatagctctacaagaacagatatattcaagcgttaggtttacccatagcccgccgtatcactacccaaagatcccaaacaatctatcccctggatatgatcgatgctcactgttggttggcgaagttctgggccaaaatatgattcgtcagctgctggtggaatagatacggatcgatgatgccaaagttgggtgaagtgccgccatagtcatcgtaatcgtaatagccactaccgccaccaccaccggtacccacatagctgctgtgtccaccgccactgttatagcttcccgtatagccaccggctcctcctccactgctggcataccctccggcgtaaccgccggcatatgctcgtcgtctgcgggtcggagccgtttttgctgaaatggaaaacatcatgtggatgataaaaaatatagagcttgaaaggtaaatttaaatttaaatttgccttaatttattgttactcgtatgtatagcttcattagcctatattattattattacggaaattaggtgcacattagtgggttctcttacctcccgatgactcttcattcagagcactcatcaccacacaaataagtagaaccttccacatatttttatctgggcatttgcgattgaactttggagctgggggtgtaaagaataaaacaatggaatcattaagaactggtttggaaattagtgtaagggaaacttgtttgcgaaacgatgcatatttcgaagcctacgaaatttaatgttttttaaacggaagcgcgaattgattgcctgacatatagacgtctagatggcttagatggcttagatggcttatataagatcccatctagaggtggtgctcacaactgggagctactgcctcattgcctcattgttgccgatactttcacagccattgtcattagccgctcggggcagaatccataaatccgcttgcacaagccggtaatatgcgcgattgtaacgtgcggaataggggatgcactgctgccagtaatcgattcttggatgcctgggcgagggtcattggcttcactgcctccccgttcaactggacacgaagctaaagcctcataggcggcaattacaaccaattcatatatatttctctggcccaacccacaactaattgcccttacacgattttcccataatgaattggcgaaaagaaatcagaatcgggggcacggttttggggggaagaaggcctggccatccgcatcgaaaacaaaaaaccccaaaatgtaaattaatggatctccatatgactgtgtatattattgactctcaattcggcaaacgagagaaagagaagaacgaaccagttctcactaatttgctcggagtttagaaatgtataatgaatatttcagtttgttttgttatattattttgatttccccccatttgccagccatctgtagtatattttcgatgcgccatttatattccaatctgtccaacgttttgcttgtcatttcttacaaaagtttattaagttggcattaagagcggggatttttgttcgcaccaacaattgttgcgatctaattgaataactttaaggctcaggagcaaccggtctaaagatgatttataatttttgttaatacaccaaaatattaacaattaacagctttgtgcacggctcgcttgaaacaaaggaactcgactgagtagcactcccgatgaacgaacgtgttttgtcatttcgcccctgactttgatgatcaccgaatggttttagtacgagtatgagctcgcatacaacatcattaaaatctcgctgataagagcgactaatattaaaaacactacatacacttcccagtactaaaccaaaactgcgcaacgaattggcaaaactatcgatgttatatggccgtgatcaccgggagaggggatcgatttccatatagatagagatagagagtcccaccgcaagatagagatacacaaacacaaacactgcgaactcactcacttgactcacttgatttgtttatgattcggcgttaggttcttgaccagtttttgtttttcgatttcggtttcggattcggactgggattctctcgcactcgccgatcttcttcaccgatcgacaactgggcaacgtctgagtcgaaacaggtgggcccaggtcctcttataaacgatcggacacctgtggactgcccacgataatgatgacgagacgactagagagtggaaacgcttaccgaatcactcgaatcggggatttattataaggtcttctaactgggatgctcactggccgaatgattataacaaaaagaaataactttaatttttacttcatttataaaatcatttcatttttatgcaaggcttaactatttctccaatccattttggcccaattaaaattacctatatttatagatacaacatacacaacattgtaacgcaaaatgattcaatatttatttaactcgcttatatatacatatatactttcatatcaactcgtttaatcgtaatctagtaacagatttcatcttaaagtactcgaatgtgtgttatagttggtacatgattaaaaaaaacctttcactgggatcaatgtagttggccattatacctgattatcgagaggcaacaccaattccaatttaacttggttttctacgcgccaagcgaacgcttcagtatcgaagtcaggcacttggtaactaggttctaatcctcggtggtaatcctcctcaaagcttggactgggcctgcggaatgattacgtcacgccaccaggagggtcgctggaatgccccctcattggtcataaattcgttctgcaagttctcgtagagaagtccatccgcccgggcgatgaccgaattcagtgcgaaatcgggcggcgaaatggcatccgctacgctcacggccacgtctttcagtttcaggcagctgtccagcagcagttgacgcactgcagccgagaaatcccgcccagccgcaaagccacccacatagaaggtggtcatgtgcttctccagcagccacatggcatacacgtcgaacagcaggcggagtacggatgcatatggc

SEQ ID NO: 25820 - DNA, 1097 bp, DROSOPHILA
cccagtccgaatccgaaaccgaaatcgaaaaacaaaaactggtcaagaacctaacgccgaatcataaacaaatcaagtctccaaagttcaatcgcaaatgcccagataaaaatatgtggaaggttctacttatttgtgtggtgatgagtgctctgaatgaagagtcatcgggagcaaaaacggctccgacccgcagacgacgagcatatgccggcggttacgccggagggtatgccagcagtggaggaggagccggtggctatacgggaagctataacagtggcggtggacacagcagctatgtgggtaccggtggtggtggcggtagtggctattacgattacgatgactatggcggcacttcacccaactttggcatcatcgatccgtatctattccaccagcagctgacgaatcatattttggcccagaacttcgccaaccaacaagctataactggtctggccacggctggcaatgcttatgcatccgcggatgcatctcttgtcaacgacaacgatattcgcatccagcaacagatcgccgctcaacaggcctaccacgacaatctagtgcgccagaatcggtacagaggaggcaccagctctagcttcagttccagctctggatccgggtctggatctggatcgggatcctacaactcacatcgctatgcacccagctatgcatcagcttccggatctatcggttccaatggctatcgccagacggccttcattagcccatccaatccggcctctcccaacattgtgaatcgctttggcggcggaagcggtggtggatcctcgttctccagctccagcagctccggaggaggtggtggcagcggtggtggctacaagggcgtctcggtctcgtccttcagccacagcaacggagacggaaccagtcgacgtggagcccagaccacggtcaacgacaacggaaagatcacctcgtattcggtgcactcctagaaagatcggcggagaccctccactggtggctaggctaacatttactccggtctgacaaagcaaaccgcttccattgaatatgtataaaatataaaaataatatacgtgtattttattgtc

SEQ ID NO: 25821 - protein, 287 aa, DROSOPHILA
MWKVLLICVVMSALNEESSGAKTAPTRRRRAYAGGYAGGYASSGGGAGGYTGSYNSGGGHSSYVGTGGGGGSGYYDYDDYGGTSPNFGIIDPYLFHQQLTNHILAQNFANQQAITGLATAGNAYASADASLVNDNDIRIQQQIAAQQAYHDNLVRQNRYRGGTSSSFSSSSGSGSGSGSGSYNSHRYAPSYASASGSIGSNGYRQTAFISPSNPASPNIVNRFGGGSGGGSSFSSSSSSGGGGGSGGGYKGVSVSSFSHSNGDGTSRRGAQTTVNDNGKITSYSVHS

SEQ ID NO: 25822 - DNA, 4970 bp, DROSOPHILA
ggaaattacggatttgggcaagcacaagaagcgcgtgggcatccacacggacatcacgttcgaaatcacctccgattcggacgggaacgagaccagttccgctcaacagcagggcgacaagggtgagtggccatcgaaatctgctaacaaactcactttccctcttaaaccaatccaaagggcacagatatacttggatatataccttatcttaattaaaaagaagtacaactactgacaaagcaaaacaaccctatgaaacatgactatcctatatgaatatatagcttattattccattctacttttacataaccgccaacagaggacgccagtgtgccaattttcaagggtcgtggtggcagcgaatcaaagcacaagacccgcaagccatatgatcccaagtcgcagtggaatcccaacttctccggcgagcagcatggctaccagggcgccaatcgaggtggctaccagggctccaatcgcggcgactactatccgcagtactatcacggcaacgtctatgccggcggaagttccgatgcaggcagcatttacaggaacggcgagacctggacgcactacgtcccggtttggaccacggagcgagtgccgcaggagcagggacagatctatcggcggcccagctggaagccctgctactgcatgtcatccacggagttcagacgccgtcgggatagcaaagccagaagagagcagacggatcagcacaacaagggtgtcatcaacagtggggttgtccaggtggtggatggcaagttggagcggcctttctcctgaggaaaagccctccgctttaaccagttttcacaactttgtaaagttaggtaatgcagaaatatatttaaaatagaactttagtttagtctctttagaaatattattttacttatttaaaatattggttggcccaatattttgaaccctttttcgctgacaataacatattcctaattgccatcaaactgttagaaaagaattgtatttaggtaaagaaggcaaaaaggaaattttaataaatttcatatttgtttttgaaaaaatataagtttgggatgactaatcgaattgtggtaagatcacgtggactaccttatcactgctccttagatttttagtagttgtatgacgaaattataaaattcgcaagttagtttcagaatgtattcttatctttaaaaatgtgtaaaatccgtatgaagtcatacattttttcattttttaggtgtaatggcctaacaaaagatttcatttgacatttaaaaaatttattttacgttcacattattttccaacaacagtgcgagctgagtatttcactctctaagaacaggacaggcgtaaaaagttatgggtactgattgatgtagacgctttacgagtgaacactgtgggtgccaatcttgccgttgtcatcgacggaggctgtcaccgcatggtatcccgcccgcttgccattgatatcaacactttcgctctcgccggtgactagatccttgtagttgttgacatggccattggaatcgtactgttggaaagggaaaggaaaaagataattataaaacatacaagtaatgccacctcgtcatcaattgcagcgcaatcacatatgccttcgttttatatataagtaaaataaaacccaccgagttctgggaagaccacttggactgcttctcccactgcttggtacggtagccactgcccaagtttccggctcctgctgataatccggccccaacgctgctagctccaaccacttgaccggtctgtgccgcgttcagtccaagtcccaagttctgctgtccgcttaatagggatccactgagcagcgactgctgtccgccaacctgtccgctcagcagagatccttggctgccgcccaacagagatccactcagtagagctgcgctgttaccggtactggcggagttcagggagctggcagagttcaaagagctagcggagttgaatccaaactgggagccagagttgaaggcggagttgtagccagagttaaagccaccttgtgagccggcggcgtagccacttccagcttgcacctggttggcggatgcggcttgtaaggcagcctgctgacgggcagcttgctgggtttggctgagcagctggctcagctggctgttctgctggaagttctggccataagaactgccaaactgagagttaaaggcggcattgctgccgaagttggtggcggcattgctgccgaagttggtggcggcattgctgccgaagttggaggcagcattgctgccaaaggtggaggcggcattcgatccgtaagtcaaacggctgctggcaactggctgaaccagctgtggtgcggacgcagtggtggtcacctttcgttgatagtagtgtgcggtttgaactgggaccgtctgggtcacctgggtaggctgttcaacgatacgttcctcgtgatgaacgtaacgctgggagccaccgggaatggtgtagaccacctgttgcggggtggacacaatcttctcgtgcctgtaatactcggaagtggggacggactgcacggtttgaactccgctgagcagctgagcactggagtccacggcgtttacgccaccaaagtcaaccttgttgccggcattggcgttatcagcaaactccacattgctgcccacctggtgagcggcggtgctgccgaagttggaggcggagctggtctgaaaggcggcgttgctggagaaggagctaccgaaggaggcagcattctgggcgccaaaggaggcggcattctgggcgccaaagccagcagcattctgagcgccaaaggaggcagcattctggccgccaaaaccggaggcaaagttagagccgaaggaacttccaacaccagcaccaatggtgttcgtaccagcagaaccacccaaagtctcaacggcaccacctaatccgccagcggaggcaccttcggcggattcagtcgcacccacggagtcgtaggagctctcgagttttcccagagcagagtcatcaacctgagcggaggcgccatcgacgccagctccaaagctaccgctataacctccaccgtagccggcgttcttgcgagcctgctccaccgcttgtccgtgggtactgtagtggctgaggattaaggcagttgacaattaatagagagagattgtcattgggtcttttaaaagatcttagaatcaacaattttaaattgtaaaagcaactcaaaataaacaacaaaaatttaattcagcattgatcttagttttgcggtgctaaactaagctatatatttgtattcctttgttgattctagacatatttttctaaaatttaaatttcaaaattttgaagtaccatgtcagccaatgggaatatttcaattttctcgattcagaaaagaaagatcgttaacatttgcaacaaggcacttaccgagagtggaaactgtcacgtttggttctccccaaacttttagatttaaaaaatttaaaaaacaaaccattagaatgtatattaaatgaggcacttcaaattaaaattacctttgttggaaatctgtaatgataaaaagaggaaaatgtattagttaacgtacgcaagaagatttcaaaatcccatttaatcaaaacctaaatacgaaattgatagaaatttaatcactttaagtttttcgtttaaagatatttctcattcactttagaacatatttttatttccaaagagttcactttttaattattatattttattacaacactaatcaagggaaaatagtttgtttgccaggcttgccaggaccacttgtttaattttctgaactagttgatattcgggaaacgagtgcactacctccacagaccacacccaggcaaagggccaaaatcagcagcttattcattttggcaattcgttttagctcttgaccgaaaaatacgttcgacactcgcgatttaaattgtactaatgcaatcgagcgaagggagctccgctttaaagcctcagacggcggtgataagagccacttatgtataactcagtcttgaactgattgatttctgacctagagagaatgccactgatagtacacgtagaattggagctcgcaattggtgcagaaagctgcgagtgatgaaagttaattgcgacatcatcgccctatatagaatattttttatattcagctttgatgatcggcgtggaaccttgctcaagaaagacccagtatatagttgccatgtacgtctgccgacattatcacatttgcgattaattacatatatgtatacaaattatgtttataggtgggaacacaatgctaatgagctcccattgaacttagaaaaaactgcgagcaaggtgaaggaatatatagaaaaaaccttgagcttcaaattaaattcaggaagtactaacatagaactatctaagtggttatggtgggttttccaatttttgtcagcatattgtggttacgaaaataaaaagtcggaaataacagaacagaataatatagaatcaacttcaatgagatagaacacttccggtcacctttgatacgaccatccgtccaatacaaaacgaaaacattgaaacaaattaagtaaatctaatctagcaaactgaattgtaaatactaagcatttatatacctagcaatgccaacagcaacgtcaaaatcaaggtcaatatacaaatgtatatacaaatttgcattttttttttgttttgcctaagccagaaagggagaacgaaactttctaattaaagaaagcttcgctttaagcccccgccgataagaaagtccggcaatttgacaataaaatacacgtatattatttttatattttatacatattcaatggaagcggtttgctttgtcagaccggagtaaatgttagcctagccaccagtggagggtctccgccgatctttctaggagtgcaccg

SEQ ID NO: 25823 - DNA, 2178 bp, DROSOPHILA
cgagtgtcgaacgtatttttcggtcaagagctaaaacgaattgccaaaatgaataagctgctgattttggccctttgcctgggtgtggtctgtggagatttccaacaaagtttggggagaaccaaacgtgacagtttccactctcgccactacagtacccacggacaagcggtggagcaggctcgcaagaacgccggctacggtggaggttatagcggtagctttggagctggcgtcgatggcgcctccgctcaggttgatgactctgctctgggaaaactcgagagctcctacgactccgtgggtgcgactgaatccgccgaaggtgcctccgctggcggattaggtggtgccgttgagactttgggtggttctgctggtacgaacaccattggtgctggtgttggaagttccttcggctctaactttgcctccggttttggcggccagaatgctgcctcctttggcgctcagaatgctgctggctttggcgcccagaatgccgcctcctttggcgcccagaatgctgcctccttcggtagctccttctccagcaacgccgcctttcagaccagctccgcctccaacttcggcagcaccgccgctcaccaggtgggcagcaatgtggagtttgctgataacgccaatgccggcaacaaggttgactttggtggcgtaaacgccgtggactccagtgctcagctgctcagcggagttcaaaccgtgcagtccgtccccacttccgagtattacaggcacgagaagattgtgtccaccccgcaacaggtggtctacaccattcccggtggctcccagcgttacgttcatcacgaggaacgtatcgttgaacagcctacccaggtgacccagacggtcccagttcaaaccgcacactactatcaacgaaaggtgaccaccactgcgtccgcaccacagctggttcagccagttgccagcagccgtttgacttacggatcgaatgccgcctccacctttggcagcaatgctgcctccaacttcggcagcaatgccgccaccaacttcggcagcaatgccgccaccaacttcggcagcaatgccgcctttaactctcagtttggcagttcttatggccagaacttccagcagaacagccagctgagccagctgctcagccaaacccagcaagctgcccgtcagcaggctgccttacaagccgcatccgccaaccaggtgcaagctggaagtggctacgccgccggctcacaaggtggctttaactctggctacaactccgccttcaactctggctcccagtttggattcaactccgctagctctttgaactctgccagctccctgaactccgccagtaccggtaacagcgcagctctactgagtggatctctgttgggcggcagccaaggatctctgctgagcggacaggttggcggacagcagtcgctgctcagtggatccctattaagcggacagcagaacttgggacttggactgaacgcggcacagaccggtcaagtggttggagctagcagcgttggggccggattatcagcaggagccggaaacttgggcagtggctaccgtaccaagcagtgggagaagcagtccaagtggtcttcccagaactcgtacgattccaatggccatgtcaacaactacaaggatctagtcaccggcgagagcgaaagtgttgatatcaatggcaagcgggcgggataccatgcggtgacagcctccgtcgatgacaacggcaagattggcacccacagtgttcactcgtaaagcgtctacatcaatcagtacccataactttttacgcctgtcctgttcttagagagtgaaatactcagctcgcactgttgttggaaaataatgtgaacgtaaaataaattttttaaatgtcaaatgaaatcttttgttaggccattacacctaaaaaatgaaaaaatgtatgacttcatacggattttacacatttttaaagataagaatacattctgaaactaacttgcgaattttataatttcgtcatacaactactaaaaatctaaggagcagtgataaggtagtccacgtgatcttaccacaattcgattagtcatcccaaacttatattttttcaaaaacaaatatgaaatttattaaaatttcctttttgccttctttacctaaatacaa

SEQ ID NO: 25824 - protein, 577 aa, DROSOPHILA
MNKLLILALCLGVVCGDFQQSLGRTKRDSFHSRHYSTHGQAVEQARKNAGYGGGYSGSFGAGVDGASAQVDDSALGKLESSYDSVGATESAEGASAGGLGGAVETLGGSAGTNTIGAGVGSSFGSNFASGFGGQNAASFGAQNAAGFGAQNAASFGAQNAASFGSSFSSNAAFQTSSASNFGSTAAHQVGSNVEFADNANAGNKVDFGGVNAVDSSAQLLSGVQTVQSVPTSEYYRHEKIVSTPQQVVYTIPGGSQRYVHHEERIVEQPTQVTQTVPVQTAHYYQRKVTTTASAPQLVQPVASSRLTYGSNAASTFGSNAASNFGSNAATNFGSNAATNFGSNAAFNSQFGSSYGQNFQQNSQLSQLLSQTQQAARQQAALQAASANQVQAGSGYAAGSQGGFNSGYNSAFNSGSQFGFNSASSLNSASSLNSASTGNSAALLSGSLLGGSQGSLLSGQVGGQQSLLSGSLLSGQQNLGLGLNAAQTGQVVGASSVGAGLSAGAGNLGSGYRTKQWEKQSKWSSQNSYDSNGHVNNYKDLVTGESESVDINGKRAGYHAVTASVDDNGKIGTHSVHS

SEQ ID NO: 25825 - DNA, 3719 bp, DROSOPHILA
cacacatattttctgcaatcagcgagcttacttaaaggccaacaaatactactcaggtaatacagatatgtcttcatctaccagatataagatactttctaaaagtgtccacatagaaggtacaaacgaattcaataagttagtactatttgtattaatattttaaagttgattcaaaatattagaataactcatatgaactcttatgttctatgtgttttgcgagtgttattcgtggaataagttaaatgcaccccactgtgcattcttccgccccgcacagctgatgccccgcccaccaccacccttctcttcaactgctccttcgcagtcacgttttcgttgttgttgcccttttgttgtcgcctttgcgttgtcatctcgtttgcatgttgccatctccctccttcgcccttctcactctctcgacaagctctctcgctacttattgtttttggggagccaaggaatttgagttccaagaaatattcaaaaatattctccaccaagggagataaattgaatgaatgcagcatgtagattttcagactttgttgttgcctttatattttggcgtgtctgctgcttcctattcctttttttttgttttttttttgttttataccaagcgtaaaatttcctaacgaagcaagcgaaagctggttgttgctgctgttgttgtgggcggtttgtttatttgttttactgtttaacaacacctgcggcatgcgcaagagcgagagagagagagagagacagcgagagggagcatctaaattaagcccaaagcaaacaaataaacataattttaaaaggaagtgcgctttcttcgacgaataagtgaatgaaaaactaatgctgtctttttaattggttgacacaaattactcaactgtttattttagagggagaatacaaaaaagagaaatcaataacaaagggcgcgacacaggtcaagaaaaaacactgggaaaaggggttgaaagaggtcgaaactcacctaataaacgcattacttccacgggatttaggaaaacattcaaatgtgcagccacttcgctgcccgagtgcagttgtagcgctgccagcgccagcagcgaaagcacccacattttccggctcattttcaccgtacaatttcttgtggatgcgcttttaccgcatttattcacagattccatcagatattctgttccgtttgccagtttttgcactcttatcacacacggctattcgtaaacaatctcgaacgaatgaccagcacaaaagcgaatccaaagtcgcgggggtggggggagagagagacacggacgccgcgagagagaaagagcgagagtgcgagtgcgacggcgtcgttttagcaccaaaatttcattaaaagcattgtttaaccgggcaattcactttattttggtcttataaataacaattcgactattttttcacgcacatttcattttaaacgttgtttccgcgggttttcttcagtttatgactgttttagctgtctggcagctgcttgttaataatttttcaacttttcccggccgagttacgcagttccttgtggcaatatccttatgcaccactccatggctgtgcagatgatccaatgccatggacagttgcgaggccatcatcacaatttggatggtggtcacagtgcgagcacaagctggatccagcaggaattgctttaagttgcgggtattgttcagagcgggatagaggacaaacggtgtggtgtgatcctcaatggaaacgccgagaaccgagagaattccagggtgagaggcgccatagagcagcattccttcctggagaaggagaagcacctgcatttggctagcatgctgggccaccgttttgaccagaacatcctgagtgtcgttgtaggtgccacgataaactcgtccaaacgttccttcctgcaggagactcgatagtcgtaccctgcagcgctccacggtcaactcggaaattcggcgatgaagctcctccggatgttgctgctctacggaaactggaactttccgtggcaaggaggagccatgaattggagctataatcgaaggcgtcatataagcagccgatcccatggaagactggcagggcggatgggtatttagtctctgaaagctcgaagtcctcatgggctgtcctccgtgttgatgatgctgcctcttgttggctgctcccttgacgcaataggcaatcatgaggagcaggcacacagatcccatggccacagaaacaccaacgaccagggtgatcaatccagtgggtggtaacattacggtctccagcaactggggatcgtccacatcctccgacaaatcctcggcactgtcattcataagacagatcttcttcctccgaaacaccagatgagttacattgttcagtgaccggttgagcaccacttccaggctgacagtcacatccacctccgccgctttcaatccgctgcacttgagggcaatggaccaggtttgtatggtcgtggggatttccccactgtgtgacacattgatcgccggtcgaggaagcacttcctgatcggagctgaccacattgatgctgtagggaaggccacgccccgccagcgactgccaggtgaaactaatgtccttgacattcgccggaactggtacaatgaagttcaaagcgtagttatttatatgaccttcgcgaacgtagtaaacctcagcagagacgcctgaaagtaaaggaaaattctcgattagttatgaaagatacgatgagaacagaaatgtgatgcactgaatgcagggtgtggttgaagtaactgagaaataatcatatcataaatatcaaatccccaacaagctatcgtatttatttttctataaactgaacacgtgcactttccatttcctccttgggaccattaccattaccaatggtcgttgataaaacaaactcatccagtactttgtatgtaaatctatctgaatgcactcagtgcaatgagtttttccagaggcttgtttgctcaacccgatccacagacggtcgccggcaacattttatataaataaacacggacgagcgctcgagttcagggaattccttggaaactattttcgagtttatcatctcttgtatctgtatcttctggaaatctatgtagaacaacagcacgaactggatttagggagaagcggcaatggaacagcgacgatctgaggttggcaaaacaagaacaaggtaagacaaacaaagtaacccatgtgtgtgggggatttgtgccctttacttcgattacctgcctggctgattgcggtttgaccaggccgattctccgagttaatgaagcatctccagtagtgtttttatttgttttagtcttattccctctttttccgagatgtctggccgcgattgccaactcatttggattgttatgacgtcttatgctaatgataatgaggccagcaggtagcttcgaactgattccacggatcgtcctaacctgtctcctgggaccccacaaaccgaatgtgaagtgaagccacattgattgacaacggcactcggccgttgcccaattttcgactgccacttgggggcattcagtgcattcaactttcccccaaataaaactggcaaactgcggcccaggaaataatttacttaaatcgctggaacacccgagaggaggaacgccacgcgcacttcctttgacaactggcaat

SEQ ID NO: 25826 - DNA, 2583 bp, DROSOPHILA
aactcggccgggaaaagttgaaaaattattaacaagcagctgccagacagctaaaacagtcataaactgaagaaaacccgcggaaacaacgtttaaaatgaaatgtgcgtgaaaaaatagtcgaattgttatttataagaccaaaataaagtgaattgcccggttaaacaatgcttttaatgaaattttggtgctaaaacgacgccgtcgcactcgcactctcgctctttctctctcgcggcgtccgtgtctctctctccccccacccccgcgactttggattcgcttttgtgctggtcattcgttcgagattgtttacgaatagccgtgtgtgataagagtgcaaaaactggcaaacggaacagaatatctgatggaatctgtgaataaatgcggtaaaagcgcatccacaagaaattgtacggtgaaaatgagccggaaaatgtgggtgctttcgctgctggcgctggcagcgctacaactgcactcgggcagcgaagtggctgcacatttgaatgttttcctaaatcccgtggaagtaatgcgtttattaggcgtctctgctgaggtttactacgttcgcgaaggtcatataaataactacgctttgaacttcattgtaccagttccggcgaatgtcaaggacattagtttcacctggcagtcgctggcggggcgtggccttccctacagcatcaatgtggtcagctccgatcaggaagtgcttcctcgaccggcgatcaatgtgtcacacagtggggaaatccccacgaccatacaaacctggtccattgccctcaagtgcagcggattgaaagcggcggaggtggatgtgactgtcagcctggaagtggtgctcaaccggtcactgaacaatgtaactcatctggtgtttcggaggaagaagatctgtcttatgaatgacagtgccgaggatttgtcggaggatgtggacgatccccagttgctggagaccgtaatgttaccacccactggattgatcaccctggtcgttggtgtttctgtggccatgggatctgtgtgcctgctcctcatgattgcctattgcgtcaagggagcagccaacaagaggcagcatcatcaacacggaggacagcccatgaggacttcgagctttcagagactaaatacccatccgccctgccagtcttccatgggatcggctgcttatatgacgccttcgattatagctccaattcatggctcctccttgccacggaaagttccagtttccgtagagcagcaacatccggaggagcttcatcgccgaatttccgagttgaccgtggagcgctgcagggtacgactatcgagtctcctgcaggaaggaacgtttggacgagtttatcgtggcacctacaacgacactcaggatgttctggtcaaaacggtggcccagcatgctagccaaatgcaggtgcttctccttctccaggaaggaatgctgctctatggcgcctctcaccctggaattctctcggttctcggcgtttccattgaggatcacaccacaccgtttgtcctctatcccgctctgaacaatacccgcaacttaaagcaattcctgctggatccagcttgtgctcgcactgtgaccaccatccaaattgtgatgatggcctcgcaactgtccatggcattggatcatctgcacagccatggagtggtgcataaggatattgccacaaggaactgcgttattgacgatcagctgagggtgaagctctccgatagctccctgtcccgcgatctcttcccctcggactacaactgcctgggggacagcgaaaacaggccagttaagtggatgtccctggaggcactgcagcacaaacagttctccgaggccagcgattcgtgggccttcggagttctgatgtgggagttgtgcacctccgctaagcaaccctacgccgaggtggatcctttcgagatggagcactatctcaaggacgggtatcgtctggcccagcccttcaactgccccgatgagctgtttacgatcatggcctattgttgggccctgttacctgccgagcggccgaccttcgcccagctgcagtcttgtctctccgaattctattcacaaatcacgcgctatgtctaggacaaaggtcatcaatgtcatccgcatgggaatcggctcttttgaagagttaaggagtttaggcttagttgaataaagtcctctagcttactccactttgttatgacaagatttgccaaatcgaatgtttagcccttccttggtccagcatctgtacatatagtttacacattcagctctttaagtaactatctttaagcttactctacgataaactcaactcttaccacttagatgaaatacatagttcagcttgcacagttctccttgtaatccatcaacactagctaaaacaaaggccgaaatcaaatatagtgatatttataaatagagatagcgatgtctataagattacacatacatatttatgatgcatataatacatgttgtatgtttagcatttttgacaatttaccgtttatacgagagatcaaacatgatatacaaatatatac

SEQ ID NO: 25827 - protein, 565 aa, DROSOPHILA
MSRKMWVLSLLALAALQLHSGSEVAAHLNVFLNPVEVMRLLGVSAEVYYVREGHINNYALNFIVPVPANVKDISFTWQSLAGRGLPYSINVVSSDQEVLPRPAINVSHSGEIPTTIQTWSIALKCSGLKAAEVDVTVSLEVVLNRSLNNVTHLVFRRKKICLMNDSAEDLSEDVDDPQLLETVMLPPTGLITLVVGVSVAMGSVCLLLMIAYCVKGAANKRQHHQHGGQPMRTSSFQRLNTHPPCQSSMGSAAYMTPSIIAPIHGSSLPRKVPVSVEQQHPEELHRRISELTVERCRVRLSSLLQEGTFGRVYRGTYNDTQDVLVKTVAQHASQMQVLLLLQEGMLLYGASHPGILSVLGVSIEDHTTPFVLYPALNNTRNLKQFLLDPACARTVTTIQIVMMASQLSMALDHLHSHGVVHKDIATRNCVIDDQLRVKLSDSSLSRDLFPSDYNCLGDSENRPVKWMSLEALQHKQFSEASDSWAFGVLMWELCTSAKQPYAEVDPFEMEHYLKDGYRLAQPFNCPDELFTIMAYCWALLPAERPTFAQLQSCLSEFYSQITRYV

SEQ ID NO: 25828 - DNA, 3340 bp, DROSOPHILA
gaagaagtgcaaacttttggcagagcacaaattcaaatgtttaagccaattattttgccggtcaaagggattgtttttctagcatatgcataattaacacgatgacatctaaaaactgttttatcgaaattgttttatgcattttcgcatcaattattgaagttgaatctgtcagttagccggcattaaagttgcattgcagcaaaagtgttgagcccaaacccaacttgtgcatttgctgaaaaagcggaggtcgtgtcaagagttcgacaggttaaacgacgaatcgagactcctgtcaataaataattgaaaatcagagccgccggccgaatggtcgactattgttttttgtcaccgtctcttttcggtggtaattaaaaaagtttttccctgctgaaaaatagcaagaaaattttcaattgaccagagagcgggtttttttttttagaccggctaattgtcatgcagagcagtggtaagaggaacatttcccgggctgacgtaattaaaaagccgtcaagcgaagttggcgcagttagcgctaaatgtcgtccagttgatgcacagactctggagcttaagtactggccttccatcccgcctgcagatctctaattaaataagcaagtgtcacatttgtcttgagtgcccgacaattcggtgacttatgatgactgcagagcaggacgcgacgaaagccgctccaggaccccaattcggaccatccacttggacggaggcattgaggagcagcggagaagatttatgaggtaaaagcaattagaaagtggcattaacaaccgaatgcagagctcagcacaattaacaattgccacaagctgcaggagcaggctaagagcagcgaaccatcacacaaagcacttctttctatagaaacaaacaaacgttttaaaagtttcgcttttaataagcttttatagttgtaatagctgtgaggtgtgcctagtcttccctatgaactctttgaattttgatatccaattagcacagcgacttatctctggcttcctcgtgctttatcgagggatcagatgattcgatttcctttacaacgccagttaatatttccacttcgcccatgatggcatccaacaccttgtccaagtcgccgcgagcgggaaacgaatgtacatctaaaataataaaatgaataaattatttaataatagcaagattttttgactaacctcttcgccgtagaaggattcggtgaaggttggtaatcgcatctattgtgcgctccttgtccatgtagttgttgttgatggcgtccttggtcttggccaggatcttctcccatctgaggcactgcactctggactcgttgtaggatcgttccagtttggccagatcgttctttagacccagcacagttagagccgcatcatttgtgatctgcaccatacgctgccgcatgttctcgatgtcctggagcttttgatgctccaacttgttgatctccacttgagccagcactgtagaacaaaaaaaaattaataactttatttcattttataaattagcaatgctcactcagcgcatcacagcgatcggtgcagtcctttggcgagacgaatatgtcggataccttcaccacctcgtcgagcaccttctcgtagggctggaactcctgcacggtggccttgagagcctcccgaaaggccttgagttcgccgatcgagtccttgaagctctcaatgccctcgccgagctccttatggttgagcgtctccgcttgggcggtcttctcggccactctctttttgtccgcgcagtccttgatgaagctgttcacctcgatgaagcgccgcctcagccgctcctggatcttgtacatgttcctcacccgggcggagttcagcttggtctgccgcttggcactggtcagcatctcctcctgcagcttgagcatggcttcgtgctcgcggagattgttcacatatatcagttcgatggagtcgccggcagagtccgagttcggtggaattctacaggaagttacgaataggtcaaataattgataccagatagagacatccttgcaacagtaaattacgaagctgtaaaatttctcaaaaatctcaaactgcactaccaggatcattttaggattgggtacttctctttcagccttttttcagtgtgggattcactacttacacgaagaatttgttctgctgcttagagctgatatagtcccccacggcatcctccggccgcaggtccagatttcccagaacatcgagcttcttggtgggcttcacgcggggcatcttggatctctttgccgaaagtaaaagctcaagtgtacgtttttgttagttttttatatttttttttgctttggttaccgcgatacagcgcggattgtgcgttttgtagtagtagttgtgtgtgctgtgtgcttacttttcaaagtgtgttattgttttgtaataaaaattaacaagacctacttggaacatgttttttatttgggtgacacataaaaacaattggttgccaggaggttcttttattaccgtggcaatggttgagaaggtgtaaccagttttgtgtcatggtaactgcacaatttggtttctttcgaaaaaacaaaataggaagcttcttcggcaagccgaacctaatatactcttgatactcgatgatgattaatttttaatcaacaactatagaattatgatatcttttcaattgtttttacttgatttaacgactggtcgtacttatgaaggaaacgtcagcaattgcataaatatctgaatgtagtaataaaaaatggtttaatccttttatccttgactgtgctgtctgcccatatacatgtagaattactcatcacacatcgttctccaatagatattcccccaatatatatcaatatatttgaaaagattatattttaataggacaagatgccgcgacgtaagcccaccattaagaccgatgtgatcggggatctggacctcagtccagaggtcgccatcgatgactatcgcgtctctcgccagcaggaccaattcttcgtgtaagctaaaagagcaactacaatatgtaagtcatactattaatgaaacttggatggtctaggaaaccgcccaattgggattcggccggggataacatcgagatgctgtacatagccaatctccgggagtacgacgccatgaagcaggttcagatccagctactcaaagatgccaagcggcaagccgcattaaatgtgcagcgcattcgcaagatgtacaagattcaggagcgcctgcgcaaacgcttcgtcgaggtgaatggattcatcaaggattgtgcggac

SEQ ID NO: 25829 - DNA, 531 bp, DROSOPHILA
aaaacgtacacttgagcttttactttcggcaaagagatccaagatgccccgcgtgaagcccaccaagaagctcgatgttctgggaaatctggacctgcggccggaggatgccgtgggggactatatcagctctaagcagcagaacatgcggcagcgtatggtgcagatcacaaatgatgcggctctaactgtgctgggtctaaagaacgatctggccaaactggaacgatcctacaacgagtccagagtgcagtgcctcagatgggagaagatcctggccaagaccaaggacgccatcaacaacaactacatggacaaggagcgcacaatagatgcgattaccaaccttcaccgaatccttctacggcgaagagatgtacattcgtttcccgctcgcggcgacttggacaaggtgttggatgccatcatgggcgaagtggaaatattaactggcgttgtaaaggaaatcgaatcatctgatccctcgataaagcacgaggaagccagagataagtcgctgtgctaattgga

SEQ ID NO: 25830 - protein, 160 aa, DROSOPHILA
MPRVKPTKKLDVLGNLDLRPEDAVGDYISSKQQNMRQRMVQITNDAALTVLGLKNDLAKLERSYNESRVQCLRWEKILAKTKDAINNNYMDKERTIDAITNLHRILLRRRDVHSFPARGDLDKVLDAIMGEVEILTGVVKEIESSDPSIKHEEARDKSLC

SEQ ID NO: 25831 - DNA, 4906 bp, DROSOPHILA
gaggtgaagcctttccttacgcggcgcgtatcgactgaacaatctggaaaatggcagagccgcagaccacaaagatgaacagcgccaggagccagggacccaccggatattgaccctctttcgttttctgcgaaaaagagaagttcagattagtcttgtcacatcttgtatggtgaatatattgtatattgcattaagagattactggaaatcgtcgatgggatggcaacatctaatcagaatttccagaagtgccgataacacgctcatacacacgccagcctccgcacacatacaaacatgcatacatatgaccaataataaaatcaatgacggcgtggcacttttcgccatttgattatcgagcaattctaatcgcaattttactgctatctccactttccccaatcagaatagtttcaattaatagttttaagcgaaacttaccgaggatttgggtacattgccacgcattgtcacatatttgctggccttctcgttagcgacgcgcattctctgtggtggagccattttcttgtgttgttgttgaagcacaatctcactgaaattcgcaaatgaattgtttgttaattgcctattgattgggctgcagcttgcgtgcaattgataacttcgaaatgaaacggaacaagctgtggctttgcagttgcccgagaaaacagcgtacctttcagcccaaaaataacaaaacgaatgagaaagcgacgacacgtatactgccagggctgcactaggatgggctgtaagcgatgcctgccaggggtgcattaacatcaatggagttcgttaaacattttactacgtatataagcacctattttatttaagttagtaattgctcgttaatttgacaaacaaaaccttttgaatataagtatcttatacattacatacaggtgtttttacttttagctagttatctagctatttgaaaccgttattgtcggagcctcggacggtcgcactgagtcacatagtcctcaagcgagcacggttacacctaaacgacgtagctggagaagatcatcaattgcagcgcatgagaggagtggcagttggtgacgaagagatcgatctcatccaattctgagcaggagcggccggaaccatgacgatggacgccaccgccctgccgtcggagctgctcgtgaccccgcagccgctggttggcttctgtgggctggacaccgcccgggtgtcggtgcacaaggccgtttgggaggcgttcagcggcagtttgcagcgcaaggccgccgaccgtgccgccgtgcagtataagctgctgcccccaaactatgagtttccggtggccaaacccaagcgagcatcctacgagtggtaccacccgaagggcatactcaagcggaactggatgctgaagcacctgcacgtcctgccgtcggtggtggtgctgttccaagatatggagtggaatgaccttcagtggacggaaaagcaggtccagtgtgcggcaatcgtgcaggccctcaagaacaccctgcaagaaagaaatacccggctgtgcctggtgctgcttcaaagggcagcgccgcttccacctggcgaagatctcctggccgcagagcgagccgccagtctgacaaacgcttgtggaataaccagcaagatgctgttcattctaccgcatacagagcacctcacaggctacgccctgcgattggagtccgccttcctggatatggcacagtcctattacgccctcatgtccaagcggattcggaaccatcgggatcagctgacggcggctcacacatcgttgaagatccggcatcagttcaaattggggttcgtggcggagatgcggcaggacttcagcactggacaaaagtatgtcctttacaaattttcttgtccatttaactattctttatttgttcgaaggcactatttccaagcctatgccaatctggacgagatacgcatcaatgacggcaattgcctggagattaagactctggcaggatttttgaactataagatctgtcggcttatgtttaagctaaagactcccagggatgccattaaccagttcatcatccatgtggagaaacacaagtctcgagtgggtttcaaggatctggcctttgagcatcatgcctggttaagcacgcagtaagaccgaactgtagatctcctctagatatcctaattaattatccttttattgcagacattccgtattcgctgagctcttttgcgaggccatcaagaacggactgcccgccctacagactcaacatcctggaatctattaccataaagcagcagaatttgtgatgaagcgacgggatgcagccatggaggcctatgctgcgatgcaagcctcctcagaagctacacctacaccgattcagaatcctctgtccctgtacaccgagtttttcggaatccgtgcggtaaagacgggcgatctggtggccgagcaacaagccaatatgcagttatgtgatcaggagcgcagctataaccattcagcggcaatcatagccctgctcagccaggccatggcccagttcaaaatttacaagtgcctcaggtttcgaaagaaactagctatcgacatggcagaggagtacctcaagagcggggatcatgccaaggctttgacgtaagattgtttttcatgttcatatgtgcaagaaaattaattgaacctatttctttcctaagtttgtattccctaatgctgcccgattatcgtcaagagaaatggactacgatattcactgatgttttgcttaaaacactgcgttgtgcgctgctctcgggatctgtagccgactacattgcctgcagcgttgaagcattgtctctgcgccatcaatccgatcagtccgagcgaattctaatactggagaacctttggcaggtgtttcaaggcgtaccacccatgccaaaaactcagttgacgcccgaggcgcaagcgttgtggactagtgcgctggccaacgtgaaatcgcccatacaaattgatttagataaggtcaacgatgtggtggaaatgtgtgccacattcgagcgggttcagttgagcaacgacgacttgctgcagttgcaactgatagtgcggtaagtttagttgtctttccttcttatatgcagctacttagttgtccttgtttttagtgtgctcacggatattcctttgaggatacgcagcttccatgtcattctggccgacgcgggaaatccccagaacagctacaaactggaggcactcaagtatttctgctttcccaccctcacgcagctacgtggccaaaagcagccggatgatgagcaactggagaatccgtcacaagagcccaaaaactttgaaaagaatatgagattggagcccggctcctattaccagcttttctgcagcaccgaagcgcagcagttccacgaaaacactcaactgcgcattgtccgactggaggcccacatggggactgaccaggtagccgccctacttacgtgcagctccaactactcacggcagctgttccgacatcacacgcgcagccgcgatctcgatgacaacgtgacgatcaatcccatttgctacattgcgcccacgtaggtcaaaacgattggtaccggaagctgagatatatttccggacaattgcatgcaaccagcgcatttaatgctctactaaacacggttttctataccagctttcatctggacacgcaaacgaaccttggccatggacatgataacggtttgactgatgacaaggaaatggtggctacaaaaatgctggtcaacgaatactttcctgttgtgaccactgtcagcaatccatacaatgtctatctgcagaatgtgggcgtgcacattagtattcccgtgggtctgaggaatagtggtaagtaagagataaaatgtaatcgaacttatattagaggagcaggttaaattttaattaaattcagatctctaggcctaattaagcatctaaaaattttactattcgggtctacatgcccaaagccttgtcgataaagctcctaacagtcttgacattggtatagactcccggcgaactctttcgtgcgcatccaacgccccacgagacaattccgcatagttgaccctgatagacggcaggtcctccagagtcgccttcgcaggcatccttgacgccaggcactgaggcgcaaaacatggtgttggtgatggttccgcgcagcttatactggctcatgcatgccttacgcggaatgagcgccacatctacgctgcgcacctgcattgaaactgccttgttgcgctccgtaatttgtccccagccagagaccttgatcagatcgcctgccttgaagctggtattgcacagctcaatggtggacactttgggaccgctgatgggagcttttagttttaaaacagccacgtccgaggtgagggtgcgggtgttgtaagcctttggggtataaaccttgtccacaccacttctgacacccgtctccgtaagtctcgttaccccggcaacgactaggatacgagaagcgccaattcccttgacgcagtgggcagcggtgacaacatgctggggggtaaccaatgaaccgccgcacataaagttgccaccgatgcgcaggttcaccaagtagggcacactagcgatgtccaccggtacaccgcccacaatccgactgttggcctcgttgctggccgcccagcaaagtgggatcaggtggagcacgagccatagcgtcgccatcggcttactccatccctcgatatttgccgtatccggtagctgtaactaccaaccgagttttcgtgtcaccgtccagctgggtaaacacttttttgatcgctgttccgactcgaatcgcgcggctctgtgctccgatttatatgcctctta

SEQ ID NO: 25832 - DNA, 2628 bp, DROSOPHILA
ctcaagcgagcacggttacacctaaacgacgtagctggagaagatcatcaattgcagcgcatgagaggagtggcagttggtgacgaagagatcgatctcatccaattctgagcaggagcggccggaaccatgacgatggacgccaccgccctgccgtcggagctgctcgtgaccccgcagccgctggttggcttctgtgggctggacaccgcccgggtgtcggtgcacaaggccgtttgggaggcgttcagcggcagtttgcagcgcaaggccgccgaccgtgccgccgtgcagtataagctgctgcccccaaactatgagtttccggtggccaaacccaagcgagcatcctacgagtggtaccacccgaagggcatactcaagcggaactggatgctgaagcacctgcacgtcctgccgtcggtggtggtgctgttccaagatatggagtggaatgaccttcagtggacggaaaagcaggtccagtgtgcggcaatcgtgcaggccctcaagaacaccctgcaagaaagaaatacccggctgtgcctggtgctgcttcaaagggcagcgccgcttccacctggcgaagatctcctggccgcagagcgagccgccagtctgacaaacgcttgtggaataaccagcaagatgctgttcattctaccgcatacagagcacctcacaggctacgccctgcgattggagtccgccttcctggatatggcacagtcctattacgccctcatgtccaagcggattcggaaccatcgggatcagctgacggcggctcacacatcgttgaagatccggcatcagttcaaattggggttcgtggcggagatgcggcaggacttcagcactggacaaaagtatgtcctttacaaattttcttgtccatttaactattctttatttgttcgaaggcactatttccaagcctatgccaatctggacgagatacgcatcaatgacggcaattgcctggagattaagactctggcaggatttttgaactataagatctgtcggcttatgtttaagctaaagactcccagggatgccattaaccagttcatcatccatgtggagaaacacaagtctcgagtgggtttcaaggatctggcctttgagcatcatgcctggttaagcacgcaacattccgtattcgctgagctcttttgcgaggccatcaagaacggactgcccgccctacagactcaacatcctggaatctattaccataaagcagcagaatttgtgatgaagcgacgggatgcagccatggaggcctatgctgcgatgcaagcctcctcagaagctacacctacaccgattcagaatcctctgtccctgtacaccgagtttttcggaatccgtgcggtaaagacgggcgatctggtggccgagcaacaagccaatatgcagttatgtgatcaggagcgcagctataaccattcagcggcaatcatagccctgctcagccaggccatggcccagttcaaaatttacaagtgcctcaggtttcgaaagaaactagctatcgacatggcagaggagtacctcaagagcggggatcatgccaaggctttgactttgtattccctaatgctgcccgattatcgtcaagagaaatggactacgatattcactgatgttttgcttaaaacactgcgttgtgcgctgctctcgggatctgtagccgactacattgcctgcagcgttgaagcattgtctctgcgccatcaatccgatcagtccgagcgaattctaatactggagaacctttggcaggtgtttcaaggcgtaccacccatgccaaaaactcagttgacgcccgaggcgcaagcgttgtggactagtgcgctggccaacgtgaaatcgcccatacaaattgatttagataaggtcaacgatgtggtggaaatgtgtgccacattcgagcgggttcagttgagcaacgacgacttgctgcagttgcaactgatagtgcgtgtgctcacggatattcctttgaggatacgcagcttccatgtcattctggccgacgcgggaaatccccagaacagctacaaactggaggcactcaagtatttctgctttcccaccctcacgcagctacgtggccaaaagcagccggatgatgagcaactggagaatccgtcacaagagcccaaaaactttgaaaagaatatgagattggagcccggctcctattaccagcttttctgcagcaccgaagcgcagcagttccacgaaaacactcaactgcgcattgtccgactggaggcccacatggggactgaccaggtagccgccctacttacgtgcagctccaactactcacggcagctgttccgacatcacacgcgcagccgcgatctcgatgacaacgtgacgatcaatcccatttgctacattgcgcccacctttcatctggacacgcaaacgaaccttggccatggacatgataacggtttgactgatgacaaggaaatggtggctacaaaaatgctggtcaacgaatactttcctgttgtgaccactgtcagcaatccatacaatgtctatctgcagaatgtgggcgtgcacattagtattcccgtgggtctgaggaatagtggtaagtaa

SEQ ID NO: 25833 - protein, 830 aa, DROSOPHILA
MDATALPSELLVTPQPLVGFCGLDTARVSVHKAVWEAFSGSLQRKAADRAAVQYKLLPPNYEFPVAKPKRASYEWYHPKGILKRNWMLKHLHVLPSVVVLFQDMEWNDLQWTEKQVQCAAIVQALKNTLQERNTRLCLVLLQRAAPLPPGEDLLAAERAASLTNACGITSKMLFILPHTEHLTGYALRLESAFLDMAQSYYALMSKRIRNHRDQLTAAHTSLKIRHQFKLGFVAEMRQDFSTGQKYVLYKFSCPFNYSLFVRRHYFQAYANLDEIRINDGNCLEIKTLAGFLNYKICRLMFKLKTPRDAINQFIIHVEKHKSRVGFKDLAFEHHAWLSTQHSVFAELFCEAIKNGLPALQTQHPGIYYHKAAEFVMKRRDAAMEAYAAMQASSEATPTPIQNPLSLYTEFFGIRAVKTGDLVAEQQANMQLCDQERSYNHSAAIIALLSQAMAQFKIYKCLRFRKKLAIDMAEEYLKSGDHAKALTLYSLMLPDYRQEKWTTIFTDVLLKTLRCALLSGSVADYIACSVEALSLRHQSDQSERILILENLWQVFQGVPPMPKTQLTPEAQALWTSALANVKSPIQIDLDKVNDVVEMCATFERVQLSNDDLLQLQLIVRVLTDIPLRIRSFHVILADAGNPQNSYKLEALKYFCFPTLTQLRGQKQPDDEQLENPSQEPKNFEKNMRLEPGSYYQLFCSTEAQQFHENTQLRIVRLEAHMGTDQVAALLTCSSNYSRQLFRHHTRSRDLDDNVTINPICYIAPTFHLDTQTNLGHGHDNGLTDDKEMVATKMLVNEYFPVVTTVSNPYNVYLQNVGVHISIPVGLRNSGK

SEQ ID NO: 25834 - DNA, 5508 bp, DROSOPHILA
gcgtgctcaaaagctttgcgggcgttctgtttcgacccacgctgccgctggacaagatgctggctatacgcaacctcggctttggcaatcccctcaagatatatctctcctacaagaagcccattgggcgttggctaaagggaagcctgcggccactgggaacgcttctgaatccttccgtggagcagcaacccgaacgcaactggacgcagcaggtcgtggagatcagccaggtgcccagcagtcagcatgtgctggaggtgcatgtgggtggcggatactacgaggagatcgagaagctgcccgatgaggagctgctggagcagataactggtctgctaaggcgctgcgtgagcagtcacctggtgccgtacccacaggaactgctgcgttccaactggagtacgtcggcctgctacctcggcggtcgtccttacttctccaccaacagcagtgcccgggatgtccagcgactggccgctccgctgggcgagaagtcgcccggtctgctctttgctggggatgcaacctcgttgagaggctttggaaccattgatgccgccaggtccagtggcatccgagaagcccaacgcattattgactactatctgaaaagcgtgcactgcggttaagtgcaatgggaaatccgaatgggctgctaaattgtacagtgtatatcaacacgaaaactagtcaaaatttatagttacaattcgtttgtatttttaagcagaatacatttgttttaattaggcgcataacgttaacaataaaaatcatgaacaacatcaatgatacaatgataggatactataaatataatgtagcgatggacgaaccatcttttgttgcgatgtaaattccctaaacatgtcgcaagtggaaagtgtatggtctgttccgggttccaagtcacaatgcattatatatcatactggtccaatttaagtttactatattaatttatatactaaacacggaacagacctgcacaaccactttactgctcctgttccatctcgtcggcagcggcgctgacctccttccacgagtactccatgtcctcggactgggtgaatcgcgagcaaatggccatgcgcaggaagtagacatccttgatcttggcgggaaccaagtggatgtggccgcgtccattgattcgcttgagaagagcttcgttccgctcgttgctgcccttcagccggaagcagaccaatcccatattgatctcggcggccagttcaaatctggagtccgccacgcagagatccccgaactgcttggcaaagttgcagtgtctgcggatgtgggcctggagattctcgacaccgtacagccggaggacgaaccagagcttcagtgccctgaatcgccgtccaagtgggatttgccagtgacgatagtccggagctgatccctgcatgtcgtgcttcaggtaaagagggtccacattgaacgcgttgaccacccaactgggatccttcagccacatggccgagcagtcaaagttcaccagcatccatttgtgtggattgaaattgaaagagtctgctgattcgatgcccttcatcaggtggcgatactcggggcaaatgaaagcggatccggcataggcagcgtccacatggatccacaaattgtgcttgtttcccaccggtccacactcatccaagtagtcgaaggcgcaggagttggtggtgcccagggtgaccaccgcgtagaagggaatcaaaccctcggccacatcctgttcgatggccttttccagggcagcaccacgcattctgtgattctcggactgcacggaacggagctttactccgcccagaagaccagcccgctccacggatgagtgagcctggtccgagcagtagcccaccaacttgcccaagatggtgtgctcatcccactccggatggagctccttcacctccttcaacttcttggccttggctcccagcagagccaccagtgtggactcactggccgtgccctggatgacaccgccacccttgccgcccgaacaggccaggaactctgccggcagctccagcatcttgcccagccaatccatcatgaccacctcgagttccgtgcacgcgggactggcgatccacgtgaatccgatgcaggcaatcgctccactcagcatgtccgcaacgatcgctggatacgagttggccgtggggaagtaggcatgaaacttgggactgtgccagtgtgtcacgcccggcatgatgactcgctcgatgtcctgcatcacatcctgccacttctccggcttctcgggcgcagcatccggaatcaatggcttcaggtagccaggcttcacttccggcagaacgcgcctgtaattgcgaaaattgcgttagcttctgattgcattttggcgcccattcagtaaaagctccttgctaattggctgcgaaactcagttagccaacaaaggcatcaggaatcattggggttgaaggacacccatccaaccacccccaacttgttgccactgccatgaaaatcaatacgaatatgtagcaaattgctatgggaacagaatatagatagagaggcaatgctgataatgatggtgggattttctatcctttcaattaaaaggaagtactactaagaggtgaaaaaagaaaataaaaagataatttctctatatatatgtatcttcaattaacaaagattcgtttaaaaagttatctaactaagaaaatagttttgaaacttcaatgtcgaaggaactttaataaagcaaaatgaattattatattacgctctacttaagcttgattttcaattaaccattaatttcagcgactgtcgatgggcaaacaaactcagcagctgtagtaagaaaattgtttacttagctgactttgattttcaaggtaatggaaacgaagccgttagaagaattgcccaagaatagtgaaatacccgaattgcttttggccaaggcgttagcagtgcaattatatctatactcgtatacatgaaaaacgaccttgacacgccaactcaacaaagccatttaattaattagttttcggcccaagagcagcgaaagtacttggccctcgagctaatgggaaggtcgcctcaaccccctaaacaaaatgatatatatatatagatatatatagcaatggaaatgtccgatcggtgcgactttcccgtgactaatctcaaaacgtgtgcgaaatgtcattcacttgcccggggattcgaatcgagcagaacgaactttcgattcgaacgtaaaatgctgaggtcaagcgactgattctgataccatataaatgaaattcatacgctaaattaagtttaattcaagctaattgagtagggagtcttaatctggctcacctttcgcgtatattctccagatattcggctataaagtcgaccattgtcttggcaaaatccttgaactccggcgcctccatgtcgatcttgatgtggatgcaaaagtatttggttatcagacgtgcataattgttggctctatacctaaacccaatagacataccgaaaccttgggatccagcttatccggcgaaatgttagctttaccattaccatcagtttgttttgttggaattgtgttactaatgggtatgtggctcatttcagagatttacttttcgtttgacttttgcaatgatatgaactcgaatggttagagctaatatgaaagaatgtgcgattattgaaagtgttattaatagaagtgcgtttttgaagatagtgctaatcagtgcagcagctcaaacaaaaaatgctatcgctgcaaacacgacaaatgaacgacattgaatactaattacttgataggcaaaacgatgatgataatagttataataataaggtattaaggtattaatagtttaaagcgttttcccatcgagtgcgctgcttaagtataggctgtgaattagtatggtaattagaatgtttaatgcattcttgcattaatcaagactgctttattttttttttttttctaaattccaattttaacaacgtaaacaagttggcattgagacgacgacttgttgccagctaaaatcttattttaatagatacacaaaagcatgcagataccgaaagccgagaaaagcttaagcactatagaattcggggcccgaactatcaaattgaaccgaagcaaggctatagtatatgcccagttttagatacacattacgtatacgcagcgttagccccgaaatgaatctttcgcatgcacatgcactcattatgttggccaagcacttcaggcagctgaggctgttgaggagccacactttcgtctctcaccgttgcactttagttaactgcttttaattgtttgcacttgttgccgagctttacttccgttccgaactaaatctttgctccaagttcagtttgccctcctggtttagaacagctaatatttatttgctgatatttcgatgctgatatttcggtgctgattgctgtgcgcttggcgttctcctcttaactgagcgctgcccgctcttggccatggcttttaaagcccgtccagcagcgctgccaattccgcaggaccggttcaatcgcagtccgcagccgctgaacttcgaatcgcagccgctgtcgtaaaaacaaattcagctctcgtttgatttgtgcacgttttttgacacttttttggaacatgcattaattgggcgctgaatcagtaactggatatcaaaggctttattttccatggatttatttagaatttaaaaaaatatatatatatacatacatgcaagctattacattttatttgccagctctgtgaacttaatttgattatttttgaaattagtttgagaacctagtgatatttaaaacagcaagcaaaacattttgaattctactcacgtgcttcccaactcgaatttgtggaaagagagcgatctcgtcaggaatcccccaattatgagtcactcgaaacagggtttttcttggactccccgaagaaaaaatcacgcaaaaaaatgtaaacaaagttatattcgtaggaaagacaagaaattgattaagccgtggaatggcacgctttacgcgcatcttggaaaccggttattagagcaccacatatgacgtgctttttgaaccgctcatggaattgtgacgtcaaataatccaatgctctcactcactttcgcattgtgctaggggaagtgggctaggttgagccttttgagcgggcagttccgcatacactgagaaaaattcaaaattactatagaaagctaacgacttttggatgccagttacttggccggaatttcaaaattcagttgaaatatcaatagaaattggcaagaaacaataaatatgtggcttaaatgtttatgccaaatatatcgagagatataatacaaaaattcaaaatatttttcaaaactgttttcgtgaccgttttttttttttaaagttcccaaaatctcgaagtttatacggacagacaaacatggg

SEQ ID NO: 25835 - DNA, 1613 bp, DROSOPHILA
agaacgccaagcgcacagcaatcagcaccgaaatatcagcatcgaaatatcagcaaataaatattagctgttctaaaccaggagggcaaactgaacttggagcaaagatttagttcggaacggaagtaaagctcggcaacaagtgcaaacaattaaaagcagttaactaaagtgcaacgatcgacatggaggcgccggagttcaaggattttgccaagacaatggtcgactttatagccgaatatctggagaatatacgcgaaaggcgcgttctgccggaagtgaagcctggctacctgaagccattgattccggatgctgcgcccgagaagccggagaagtggcaggatgtgatgcaggacatcgagcgagtcatcatgccgggcgtgacacactggcacagtcccaagtttcatgcctacttccccacggccaactcgtatccagcgatcgttgcggacatgctgagtggagcgattgcctgcatcggattcacgtggatcgccagtcccgcgtgcacggaactcgaggtggtcatgatggattggctgggcaagatgctggagctgccggcagagttcctggcctgttcgggcggcaagggtggcggtgtcatccagggcacggccagtgagtccacactggtggctctgctgggagccaaggccaagaagttgaaggaggtgaaggagctccatccggagtgggatgagcacaccatcttgggcaagttggtgggctactgctcggaccaggctcactcatccgtggagcgggctggtcttctgggcggagtaaagctccgttccgtgcagtccgagaatcacagaatgcgtggtgctgccctggaaaaggccatcgaacaggatgtggccgagggtttgattcccttctacgcggtggtcaccctgggcaccaccaactcctgcgccttcgactacttggatgagtgtggaccggtgggaaacaagcacaatttgtggatccatgtggacgctgcctatgccggatccgctttcatttgccccgagtatcgccacctgatgaagggcatcgaatcagcagactctttcaatttcaatccacacaaatggatgctggtgaactttgactgctcggccatgtggctgaaggatcccagttgggtggtcaacgcgttcaatgtggaccctctttacctgaagcacgacatgcagggatcagctccggactatcgtcactggcaaatcccacttggacggcgattcagggcactgaagctctggttcgtcctccggctgtacggtgtcgagaatctccaggcccacatccgcagacactgcaactttgccaagcagttcggggatctctgcgtggcggactccagatttgaactggccgccgagatcaatatgggattggtctgcttccggctgaagggcagcaacgagcggaacgaagctcttctcaagcgaatcaatggacgcggccacatccacttggttcccgccaagatcaaggatgtctacttcctgcgcatggccatttgctcgcgattcacccagtccgaggacatggagtactcgtggaaggaggtcagcgccgctgccgacgagatggaacaggagcagtaa

SEQ ID NO: 25836 - protein, 475 aa, DROSOPHILA
MEAPEFKDFAKTMVDFIAEYLENIRERRVLPEVKPGYLKPLIPDAAPEKPEKWQDVMQDIERVIMPGVTHWHSPKFHAYFPTANSYPAIVADMLSGAIACIGFTWIASPACTELEVVMMDWLGKMLELPAEFLACSGGKGGGVIQGTASESTLVALLGAKAKKLKEVKELHPEWDEHTILGKLVGYCSDQAHSSVERAGLLGGVKLRSVQSENHRMRGAALEKAIEQDVAEGLIPFYAVVTLGTTNSCAFDYLDECGPVGNKHNLWIHVDAAYAGSAFICPEYRHLMKGIESADSFNFNPHKWMLVNFDCSAMWLKDPSWVVNAFNVDPLYLKHDMQGSAPDYRHWQIPLGRRFRALKLWFVLRLYGVENLQAHIRRHCNFAKQFGDLCVADSRFELAAEINMGLVCFRLKGSNERNEALLKRINGRGHIHLVPAKIKDVYFLRMAICSRFTQSEDMEYSWKEVSAAADEMEQEQ

SEQ ID NO: 25837 - DNA, 2613 bp, DROSOPHILA
tagatattgggaatttttttgaattttctttcaataagtaaatttaattttatttcacagaggtaaagcttatgccgcaggtgctgcagcagcttgatgctggcacacctttcattcccaaagaattgctggccacggagcccagtaaagaaaaactggattcgtggagtgcacagattcgagatgttcatcgcactggctcagaaagcaccccagataattacatggatgtaagtgtcgtccaattaggtgcttacataatcataagctggtaatttatttcagctctgttcgatttactacttcgtgtttccggccctgagggtggtccattcccgacacgcgtacgcggctggagctccagtatatttctatcgatatgacttcgactccgaggagctcatttttccgtaccgcattatgcggttgggacgcggtgtcaagggggtcagccatgccgacgatttgagctaccaattcagcagcctgctggctcgccggttgccgaaggaaagtcgcgagtacaggaacatcgaacgaaccgtgggcatctggacccagtttgctgccacgggtaatccctacagcgagaagatcaacggtatggacactctgaccattgatccagttcgcaaatccgacgaggtcatcaagtgcctcaacatcagtgatgacctgaagttcatcgatctgcctgagtggcccaaattgaaggtctgggagagcctctatgacgacaacaaagatttattgttttaaatttaacttactgttctgtacagcctaacaaagaagtctctagaaactgtaaataggtcaaaatgctttataaaatatattctgcaattggattgttttgctttataactagtttgcccaatgattgcatgtggatgagaaatcctagtttaggtgagatttaaaaatatatatttctatttatctctatatttacctcagtttacgccatttatttaaatgcttgataacttcttaataagtttgaatataaaaacaatgttcgacatgcccttttgactttactgtcaatagcaataggaaaattaaatttttagacttttttaaattaacaagtttttttccgagatctagggaaaacaaaggaaaggaactctgatcccgttgatagaatggctgccactcgtcgtctgacacgggaactctccgatctggttgaggccaagatgagcactctgcgcaacatcgagagtagcgatgagtccctgctgatgtggacgggtcttttggttccggaaaaggcgccctacaacaagggcgccttccgcatcgaaatcaacttcccgccccagtatccctttatgccaccaaagatcctattcaagacgaaaatctatcaccccaacgtggatgagaagggggaggtgtgcctgcccatcatcagcacagacaactggaagcccacaacgcgcacagagcaggtgctccaggccctggtagccatcgtccacaacccggagccagaacatccgcttcgttctgacctggccgaggagttcgtaagggagcacaagaagttcatgaagacggccgaagagttcaccaagaagaatgcggagaagcgaccagagtgaagtcagccgcagctcacatttatttgtatatcaaaattatatatagtttggaccatcaattaaaacttgtcagacataagttgtccatattttgaatgttcgctaagatatatgtatggcgcattaaatggacggtaattcgataaaaaaaatgggcaagaaaaaaagtacagttaaaaagaaattcaaaatatttttcaaaattgaggtaaaaaaattgtggccgttggtaagcgtggaatacatgttgttggtttattgctacaatcgtagccaactcttggctacttggcggtgattgtggccggtgtctagcaatctactaaagaaaacttgtgcttcagcgcctgtagaatctgcatgcttgatttcccatttctagccattatagttcccgagttcactcggatattgatcctatatatgtacacatataattgatacctattacttgatatacccctttgtctacgagtaacgaatttaatcaaattacattaatgtatcattaacagtaacaacaggcaaccgcatttggcaatatcgtattggtaattatagcaatcatatttacctaatacagttacacatatacgcataagctatcaaatattgaccacattcatcactttggacgtcaggtagtccacgtagtgacgaagcgtaccagtagcgtctgcgaaggataataacatactttcatatatacacgataataaaagtctgctgccgattatagcgagtaccaatagatatataccaatagaacacaaaaactaaaggaattgtaaaacaagcctttgaaaagcctagaatacgattctgggctagtgttgacgtacgaaatatattacaaaattctatctgtaaacacggttttaataaaatccatgtaagagtattaccaaagacattagaacattattctagtgtcttaatactaaacactaggttttaggaaaattttttttagtaaatgtttggtcggtttgtttgtgtg

SEQ ID NO: 25838 - DNA, 502 bp, DROSOPHILA
gtttgaatataaaaacaatgttcgacatgcccttttgactatggctgccactcgtcgtctgacacgggaactctccgatctggttgaggccaagatgagcactctgcgcaacatcgagagtagcgatgagtccctgctgatgtggacgggtcttttggttccggaaaaggcgccctacaacaagggcgccttccgcatcgaaatcaacttcccgccccagtatccctttatgccaccaaagatcctattcaagacgaaaatctatcaccccaacgtggatgagaagggggaggtgtgcctgcccatcatcagcacagacaactggaagcccacaacgcgcacagagcaggtgctccaggccctggtagccatcgtccacaacccggagccagaacatccgcttcgttctgacctggccgaggagttcgtaagggagcacaagaagttcatgaagacggccgaagagttcaccaagaagaatgcggagaagcgaccagagtga

SEQ ID NO: 25839 - protein, 153 aa, DROSOPHILA
MAATRRLTRELSDLVEAKMSTLRNIESSDESLLMWTGLLVPEKAPYNKGAFRIEINFPPQYPFMPPKILFKTKIYHPNVDEKGEVCLPIISTDNWKPTTRTEQVLQALVAIVHNPEPEHPLRSDLAEEFVREHKKFMKTAEEFTKKNAEKRPE

SEQ ID NO: 25840 - DNA, 2727 bp, DROSOPHILA
cagaaggcaaatgagcaagtttcacagaatatagattaagacagctgtgctcgctctcttttgagagagaggaacatagcataggggaatgcaaaatcaagagcaatttataagagcgataaataaaataagtcatatttatgatgagctgctgctgtctgcggtctgcatagccaaacaatttattgtttccgcaaatttcctcatggaaaaaacttagtccgcccaccgttttgtggagaggaaaactcactctaacaatatatttccgcactaaaaaaattctcaccgcaggttaaaattttttccaacaaaacgaactttccacgatttgactccacgacggtttgattagaaataaaatagaacggaaactcaagctggggtctaggccatcagcggaaatcctgattagctgaaagtcactccatttacgatataaattaatcgcaaacaatcctggtgcagctgataaagagatgtatctcgtttagtatattcccgatccatagtactgcatttaatatgaccctaaactagaatcccaaagctaagctcaagcttcctaagcttcagagtttctaacataacagcttcagtcgccaataaaatctttaaagaagttctcgtgactttcaagacaagtcagtttagaagcacaattcgaattcccatttcgatttgctacatgtgcgaccttttggaaaataaaataaaagatattagcttgtacaaaacaaggatgcttaaatggtgaccccgacgcttgaatttcgataatggtacgcataacaacagccgaaacctaacctgcttactacaaccttgaggatcacatcacatggacacatcacatgaaaagaaaaaaggtcgtgattaagcaattaaaacattttatatttaaccgttttttaatggttgtccaattgccatttgctagaatgtattcgaagataatgtagtttggggcttttatgttaaatattttctttagtattacatttaatctgatatttattaatagtgaatattttgttggatttaaatatatgaattggtgattgaactgaaggtgttggaatatagcacttatgttgtgttcgttctacgagctaagaagcctttgggacttggctcggggataataatacctctccattccatacccttctacgtaagaagggtaaagactcaggtaaccatatcataaaagcatctaatttattaagttctctgaagttcattgtcgtgcttcgcaccaaaaaatgtgtcagagtacataaacccgacatccaacgagttagatccgtgcggactccatttaatataaataacatacaaataataccaggagtgatcgaattgttttacaaataagggtaaattaaaattaaaaacttatttcagattgctctgttttaaaatatatgtcagtgatagttctaacaaaaaagttaatgtagctatagcagatcctaatatccagacaattataaatcccgcaaagtttgacattccaagcgggactggaccaatatctttagttcctgtcattgtttcttgaacttgttgttgtatcttcagatttaagttatcggcaacaactcgatattcccagtatttatcgaaaccagacgaatgccagctatatatcagagtatttaatttatcgaggaggggccaaagtctgggaacaaaagccaccgtatattgaaaataaatatcgtccttcattataactaactggtcaatcgcttgaggccccaaatagtttccgatagcaaagtgacctacagaacaagaaaaatataatattggttcccgtcattaatttttgttgttaccgaatggcagacgctccacagtaaatccaatgcgcatatgctggtcctgtgctaagcgtagcaactcatcgtcgctatagatgtgaaaattgtacaatatatccttcactaatgcctttcatagaaagaaacgtatgcttctaagatgatattgatcttcattaaaacacttacctcatcagaagcgcgtatggccgagacccatgcctctgagttggccgcccactgtaatcggtgaaatcgcaagcgggtgacagtgtcggctgcctcgtccatgctaggaattgtcaatatactagcaaggccgccaccatatatgctggttattattaaatcattaaggaagcaggcaaagagtagtacacgaactgtcagtgaatatgccttgctgtttcctgattgcgatatgaaaagtttaaaggtggtacatactccaaagcttgtacaagtccaccagccctctcggtagccaggcagtacatacagcgcctgctcacttttatatgctaaaaccaatcctgtggcttctgcacatagacataatagaattgcagcccataaagtttctttgaaaggctctaagggaaggtaccaactagtcaaccgcaaaggcgctggtacaagacacgttattccagaacgtacaagatacatagaaaggtctaagtatgtgtaatcttcgtaccacgagtacatagctccaatgcatatatctgctttacgattaataagcataccaagagcaccatctccagacatatttggataaactttgccccaatcatttgcggcagctacaaaaataataaagaaggttccttataacaacagatcaaaaaacaatttttgggttacttttttcaacaagcttgaaataaaaagc

SEQ ID NO: 25841 - DNA, 727 bp, DROSOPHILA
acgatatttattttcaatatacggtggcttttgttcccagactttggcccctcctcgataaattaaatactctgatatatagctggcattcgtctggtttcgataaatactgggaatatcgagttgttgccgataacttaaatctgaagatacaacaacaagttcaagaaacaatgacaggaactaaagatattggtccagtcccgcttggaatgtcaaactttgcgggatttataattgtctggatattaggatctgctatagctacattaacttttttgttagaactatcactgacatatattttaaaacagagcaatctgaaataagtttttaattttaatttacccttatttgtaaaacaattcgatcactcctggtattatttgtatgttatttatattaaatggagtccgcacggatctaactcgttggatgtcgggtttatgtactctgacacattttttggtgcgaagcacgacaatgaacttcagagaacttaataaattagatgcttttatgatatggttacctgagtctttacccttcttacgtagaagggtatggaatggagaggtattattatccccgagccaagtcccaaaggcttcttagctcgtagaacgaacacaacataagtgctatattccaacaccttcagttcaatcaccaattcatatatttaaatccaacaaaatattcactattaataaatatcagattaaat

SEQ ID NO: 25842 - protein, 74 aa, DROSOPHILA
MLFILNGVRTDLTRWMSGLCTLTHFLVRSTTMNFRELNKLDAFMIWLPESLPFLRRRVWNGEVLLSPSQVPKAS

SEQ ID NO: 25843 - DNA, 2322 bp, DROSOPHILA
tctcgatctaaaattcgagagagcctggagccacctctagagccacggcgaaaaagtctgtgtggcaaaaaatcgtatggcgttacgcatcttgctattctagtgtctttgcttttactctacgagtaacggatataaatagtataatatatataaatattagtaagatctaaatatgtatttaaaaagttcgaatttattgcattaagagctgcaaagtgtcaagattactgataataggaaagtctattaagtcagaacataatactctgtaagggacatgcaactcatagttagatctacaatgatttaagataaggggtatatagttcctcgtgaatctacgtgggacagagaagttaagccgtctaaccaagtcgggactctcaacttcaccacgaataagcttacaaataaagactgttccaaacatcgttctactgttagccagggaagataaattaattaaaagtagtctactgaaagaaaaaaagtagaagtgaaaattaaaaaaggtaatataaagtttcaaatttcgatttgaatctgcccacccgtcatttgcttgatgggggccttcgtggcccttgtgagagccagttaatatgagggtcttcggacgtcgtacacggattcactccagccttcaccagattcttgattttagaaatccaatacttcgatcggatcaggtgtactattaattgactaccgccgtgcagagtaatctggtgagcaaattggattgggaggcaagacagtcgtatcagtcatattgtgggcttctggaggcattgcggcggccgcatactcttaaaaagccgtattggtccatgaaaggaaacggactggtcactggaaggggccttttatctgccagatgtttctgctgttggccgtatgctcggtactgcgtaatggataccagagctctttctgactctcggatgccttcactagtgggcccatcaatccgtgatgttctattgttgcctctattcttaccacacccatctgggaacgcggatctggttgagttcggaatactcatttaagaacgattgccacctatgactcatttcgttgggaggcttatcgtcccagcctaagtcttgcaaccaaatctcttgcattaacattttggaatgttagtccaaatcccggcaggatcgaataacctgacgatttgggacaaaacttctcgcattgtataggagtgtgccaaagctattgcaggagagttaaaatagaattcgtcggactttgccctccaccaaataccgagcgtcttgtccgtgctttcggcaacgatatcgatgaagaagaaggtgctatatcgctatgaagaaggtgctccgccgggacgtcttgtggcttgacgtccaacgtagacccggaggaacattgggctgcttgcaactctcaaatggaactgtgggctttattcacggaactcgccctgccaaaacgttatcgacactttgacatcctctgccagctgaaggtaactgtttgctatccgagacttcgggatatctccttccttatttcggaaaagaattcttcgaaaagggtatgtttcgggtcgacccagatctgacgataccttttttttaatgtccgcactgaagacgttttgaaaataccgccacttccggatatggatcgttagatccaggaatgcaccagcatgaaggatattatttaagctggttccatttgccgacggacttgaagcgttaaatacaacgcgaagctttgtggtgatttcgggcttaactcccgcatgatgaggaagataatatttcggagaattatcagtcgacggcacttctttcatatgacacagatccaggtactcctgaatcacgctgtcatattgattggttttttaggggaatgtctcatttcaaacaattctcgtttctaaaaaactgaactagagcaatggacttcaaatatcctaaattcgagccggaattgtcggggtacctcctgcttgcgtccttcttggtagtttggatgaagttactttcgcaataggatttagactcatttaccattttgactagtcaatcctccacctcccagaacttgctgagaagtatgtcgagcaaatcaggatcgcttattttgtgcacttgagtcgggaaggatgcgacccgtttctggttactattgccatagttgcttgaccatccattattatggacggtaaaatattattaataatattatatgatatatgatataataaaataatattatttaaatattatttaataatatttacattattaaatacaaattttaagggaacca

SEQ ID NO: 25844 - DNA, 322 bp, DROSOPHILA
cttcatcgatatcgttgccgaaagcacggacaagacgctcggtatttggtggagggcaaagtccgacgaattctattttaactctcctgcaatagctttggcacactcctatacaatgcgagaagttttgtcccaaatcgtcaggttattcgatcctgccgggatttggactaacattccaaaatgttaatgcaagagatttggttgcaagacttaggctgggacgataagcctcccaacgaaatgagtcataggtggcaatcgttcttaaatgagtattccgaactcaaccagatccgcgttcccagatgggtgtggtaag

SEQ ID NO: 25845 - protein, 45 aa, DROSOPHILA
MLMQEIWLQDLGWDDKPPNEMSHRWQSFLNEYSELNQIRVPRWVW

SEQ ID NO: 25846 - DNA, 4216 bp, DROSOPHILA
aagactggcaaaagaatggggattgtcagcgttgctcacaagcaaaccgctccagccgcaattccgggcaccttcatagtccatatccaacttgttgccaatgtgaagggcctgctccgctggaatttgcaatctctgcagcggaatttcgaagataccgcgttcgggcttcataacaccggcttcgtaggaagtcagaatgaaatcgaatttgccggcaaagcccatggcgtccaggacttgtggcagtgacgaatcgaaattggagatgatgcccacacatttgccggcatttcggacgttctgcaccaactcctgggcaccattcacgtgactccaacaggcgctggtccgaaaaacggaaattagccgctggccgatcttctccagcttctcgggcgccagaccgtggtccacgcagctaaaggttcgagccaccagctgaagccaccaacgctgccaatccaatcccggcgagtaacggccaaagtttggatgttcgctgctcatcgccttgaattgctggcgaaagcattgttccaatcggcggcgatccactccggtgaccccgaactcctctgccgtctgatggtactggcgaaggggatcctccaggcgaagcagcgtgtccgttacatcgaaggtcaccaggcgaaagcgtttcaaattcgcaacaaattgcgaagtcaacgacattttggccaacagtgtggtattgtttgtccactagatattacgtatatgcatttggtatattttaattttcgaaaaacctccaaaaacacatttgcttagttgagaatcgtttattgaattaaatgaagatgcttttcttcattttaaagttacagattttctacttgtatgaagagtttatttttttttttgaatacaaacaattatttggaaatgccgcaaaaatacattgcctaaattctggtatttttcgcaacaactgtactgtgtgtatttgtcggcatatatttgctgcccgccggcgggcacactaagccaaacgaaaataattttgttacaaaaaaaatcaacaaatcgtattgttaaatggccgtgcgaacacgaacgaccataaatccgccgcagcgctcgatttcaaatcaaatcctcgaggcagtcggtagttaataataccgcagagcggccagatcgggggatatctaccatccatatccgtgtatcctccaactagagatcggagcaaatagtggaggagatcccgaatagatccggagttacgtgattcccggcgacacggatacgattctggctgggattgggctattggaattggtgtactgctaacggcggatcatcgatgcaacaatgaatgttcacaagcggccacgtctgaatatggaattcggctcctccaccagcaataccaacacttccacatccccgtcctccgtaaatatcagcaatgcgaatccaacagctggacctggcctcatgaccattaccaatcaccacaccgctgatttgtcagaggccctggtccacagttcctttgccaatggtcagcaaagtctgattctcaccagcgacacgggaaatccgctgatgaatagccaaggtgctcagatatttctcaccatttgcggagacgagaactcggacgattcgcaggagtactatacgattaaacaggaaccgggatgtgatctagatatccattcgctgctgcctagcaatttgcagctgcccaacaatctgcagctgcccactggctgtgagatatatttggtcaaggaaaccggcagcttaatgggtgagccgccgacgaaggcggccatcaagctggaactagatacgctaagcgaaaagccgctccttccatctgttacaacttcctccagcacacagtccgcggtaataaccgcccagaccgtgaatcctcccattccaggtaacatcaacaccaccaccagcaccactagcaccaccaccaccaccagtgtcctgtatggctcccatggcaatggtcatggccatggccatgctcacgcccaagcccgatcccagccagaatcagctggccaaacaccatccagcaaactggaggcgtacaagaaacgcgatgataaacgtcgtgccacgcacaacgaggtcgaacgccggcgccgcgacaagatcaacagctggatcttcaagctcaaggagatgctgcccagtctgagctccagctccagtttcagcgaggccagcacgagtcccagcaccagcggaagtacgagtaccaacggaagtagccattccaaaggcaatgccagcagttccagcggacgagcgccgcccaatgactccaaatcgcagatcctgatcaaggcatgcgagtacatcaagagcatgcagggcgagattgacacgtgagtggagacgggtttgtaggggggaaaccactgaatcagaaatccacaaatattgtccgctataagttgctgtactacagttatatatacagctatataacttttttgacttgttaatggtcttaaaaaatgagtttgcttatagatcttaatcaactccattcgctcaattgagcttacatcatgtatcgatcgcatacggttaggaataaagttacccaaagggcggacacttgatctttcccactttttccgtagaaatgcgtacttaaagtgctgatatagggctggtgttatctttttgcaaaacaaaatccccattttggagcggttctttttcgccactatctcgtgcaatatgagctggactctcgaatgtccctgtgtcactcaagtcttgaacacaacactctctcacactgatcgaatgcggtttccacccaaacaaaacccaacaaaatcatacaaagccaatcaaacacctgatccaccgattcaccgatcaccaaacataaacaaaccaattactcaactttgtctatccccaccaataaacaggctgcgcgactgtctaagggagacggatagcctaagggccagcaaccaggcgctgcgcgaggaacttgatcgcctgaagcgtcagcagcagctccaggaacgcttccacacggccggcggaagatcgacgtttaatgttaccctaaattcgctgaacagttccgcgaccagtgatctattcgagggaatcgatacgacacccaatctggccgccgtctcgtcgctgggattcggcaagcgtggcctgctgatcagcgattttgatgagtaaacaaaatctgcctgcgaaataggagtggatagacaaaaaaaaaaaaaaaaaaaatagaaatgaaaaacatatgggtggaccgattgggttgctggttacgggaataaacaaatatggaggcggcggatggacaagccctggcgccttcaacaaacatatacgcccatccaccaaagaatgacgtgcaacgtacacgcaacgcaacacacgcagtacaataaacggacatgacgagtgattccttgttatcgccgctctgttatatgttatataagaaaagcagcatatattacatatgtgtatcgatatgtgtatatggttatgtatatggctatgtatatgcatgtacatatatgcagtcgaacttgggtgactcaagccaagttgttggcctaaccgctttgacaaaaagctgttctcaattgagtttaattaacgagccacggcacaacacagctgcttttgtatgttatatgtatctgttattggtattattcctaaccaacccccccctccaaaaagtgagcgcccaaaaagaaaaaaaacaaatcatgaaaataacgatcgaacgaatttttgtaccacccccatgccgcgatcattatcatattttgtttagagtcttggaatattagatcacaaacaaatattgttgataagaagctttaaagcacgttctgttcttccatgtttttttttttcgtattacattatgtttaagatatacgtaggtatagttgttttgatttgcgcagcgaatctagaactataacttagccatgtttcaaacaaactctttgtgttcattcaagagaattcactatgtattcactttcaacaagagattgttgtatttaaatcgaaatatgtttttcaaaaatatcaatattgaaatattagcaaagtacagcgcaagataagtataagtataagtaatttcttgctgaaagtgaaagtggaaactgaagtggttaacaaagttttcgatttgttgttatac

SEQ ID NO: 25847 - DNA, 1655 bp, DROSOPHILA
ggcacactaagccaaacgaaaataattttgttacaaaaaaaatcaacaaatcgtattgttaaatggccgtgcgaacacgaacgaccataaatccgccgcagcgctcgatttcaaatcaaatcctcgaggcagtcggtagttaataataccgcagagcggccagatcgggggatatctaccatccatatccgtgtatcctccaactagagatcggagcaaatagtggaggagatcccgaatagatccggagttacgtgattcccggcgacacggatacgattctggctgggattgggctattggaattggtgtactgctaacggcggatcatcgatgcaacaatgaatgttcacaagcggccacgtctgaatatggaattcggctcctccaccagcaataccaacacttccacatccccgtcctccgtaaatatcagcaatgcgaatccaacagctggacctggcctcatgaccattaccaatcaccacaccgctgatttgtcagaggccctggtccacagttcctttgccaatggtcagcaaagtctgattctcaccagcgacacgggaaatccgctgatgaatagccaaggtgctcagatatttctcaccatttgcggagacgagaactcggacgattcgcaggagtactatacgattaaacaggaaccgggatgtgatctagatatccattcgctgctgcctagcaatttgcagctgcccaacaatctgcagctgcccactggctgtgagatatatttggtcaaggaaaccggcagcttaatgggtgagccgccgacgaaggcggccatcaagctggaactagatacgctaagcgaaaagccgctccttccatctgttacaacttcctccagcacacagtccgcggtaataaccgcccagaccgtgaatcctcccattccaggtaacatcaacaccaccaccagcaccactagcaccaccaccaccaccagtgtcctgtatggctcccatggcaatggtcatggccatggccatgctcacgcccaagcccgatcccagccagaatcagctggccaaacaccatccagcaaactggaggcgtacaagaaacgcgatgataaacgtcgtgccacgcacaacgaggtcgaacgccggcgccgcgacaagatcaacagctggatcttcaagctcaaggagatgctgcccagtctgagctccagctccagtttcagcgaggccagcacgagtcccagcaccagcggaagtacgagtaccaacggaagtagccattccaaaggcaatgccagcagttccagcggacgagcgccgcccaatgactccaaatcgcagatcctgatcaaggcatgcgagtacatcaagagcatgcagggcgagattgacacgctgcgcgactgtctaagggagacggatagcctaagggccagcaaccaggcgctgcgcgaggaacttgatcgcctgaagcgtcagcagcagctccaggaacgcttccacacggccggcggaagatcgacgtttaatgttaccctaaattcgctgaacagttccgcgaccagtgatctattcgagggaatcgatacgacacccaatctggccgccgtctcgtcgctgggattcggcaagcgtggcctgctgatcagcgattttgatgagtaa

SEQ ID NO: 25848 - protein, 437 aa, DROSOPHILA
MNVHKRPRLNMEFGSSTSNTNTSTSPSSVNISNANPTAGPGLMTITNHHTADLSEALVHSSFANGQQSLILTSDTGNPLMNSQGAQIFLTICGDENSDDSQEYYTIKQEPGCDLDIHSLLPSNLQLPNNLQLPTGCEIYLVKETGSLMGEPPTKAAIKLELDTLSEKPLLPSVTTSSSTQSAVITAQTVNPPIPGNINTTTSTTSTTTTTSVLYGSHGNGHGHGHAHAQARSQPESAGQTPSSKLEAYKKRDDKRRATHNEVERRRRDKINSWIFKLKEMLPSLSSSSSFSEASTSPSTSGSTSTNGSSHSKGNASSSSGRAPPNDSKSQILIKACEYIKSMQGEIDTLRDCLRETDSLRASNQALREELDRLKRQQQLQERFHTAGGRSTFNVTLNSLNSSATSDLFEGIDTTPNLAAVSSLGFGKRGLLISDFDE

SEQ ID NO: 25849 - DNA, 7942 bp, DROSOPHILA
aagctgttgcgggcacacgatttaaacacacggttggtttccttttttattttactatttttccttccaaattctatcgccatgccaaatataactttaaaatatacaccagactcaccatgggcatcaatactccgagctaatcaacagccaattccgtttttgcaatgacagcataagacatgctccggtaatcggatttttttcaaattcgacttaagcaatcttgatttcgttttgaaggtggtctggggttcgcaaaaattttcttgctgctcagtaactgacttatttattttgtcaaaaccaaacaaggtaaaaaatgtctttaatattgcatttgcgtgttttgaagaaagtagaacccagaaaatggtttttgcattcaatagaaaatagctggtaaagctgttttacagacaatagaattgccaccttttcagagtttttatttcggtgttcggtattactttttcacttcatttagactatttaagccatcaaattagtggaattatttacgaacaccaccttataaatgcattcttttataatttacaagtatttgtacctgcattttgcgtttcaccaacagtatggcagccttcgccataacttttggcaacgtacttgtcgaccccttgagagtatgtatttgttgccgacggcaacaaatgaggtcaaatgaggtgaggtcagaaatattttcatttgaaatattttttaaaactaagtggcagaagaagcaattcaagctttacacacaacgtaagactcccgccacacctgaaaatatgcaacatttacttaaatttgtaaacagagcaaccattctgtaaacattcctttatagtacaataagcaaatctgtaaatattttttaaataattgtaagtaatgttgtaacttaagtaaatattaaagaagttcgaccgaaagcgccttcagctatgaccgatatctatataaacataagtttatatcttttgtatgcaacgtaccaatgaataaataaaactttaaaatatattccccgattaaaacatattccccaggtcgaggcaaacgttttcctttattttgcctgtagcaagttgacttctttccattcggtaaatatttgtgttttttttttaagtagcaaactaaggatgtaagtaccaacctgggcttgcgtaaacaaaactcttcgctttcttctttgtgctaaaggaaactgtagcggttttgaatcgcttacactgcaagctgctagtccactcatgtttcccatatgactcattgttccactggctgatgaactcattaggcgtgaaactgaaatatttaataataatgctaatttatttattcctatttattatacaaaaatataaagagaaggcagataagctaaatgaagaaagatatttttaaagctgagaggctaaatgggcgcttatggccatatcaactcggccgttgacaataatcactaatatattagctttatatggccgcaatcgttttatttagtgcgttacaaagttttgatttaaatcattactcatttcatatttatttcctttcaatttctttcaaaaacaagagagaatactacagtcgagtttcccgtctatcagttactcagctagtgtgaacgcgaacgcgaacattcataatttttctggaatatcgatagatattggggaataaaatgagaaaaaattaaaaaatggtcccaaagtgtgggcgggatcgcttttattgctcctttaggtcgttagagtgaccatggaaaaagttgttttgggcaaatcaatagaaaaagtattaaaatattataaaaaaatttccaaaaatttaaaaaaaatgtgggcatggcagttttaagtgtgtggcaataagttttttggcaaaacgatagaaatttacaagactaataaaattatgaaaatgtatcgaaaaaattttctaaaatgattgcgtgccagttttgggcgcctttagggcgttagagtgggcgtggctaacagtttttttttacaagactaataaaaatgtgaaaaaatatcaacacattttgcaaaagtgtgggcgtggcagttttgtgcggtttgtgggcgtaagagtgggcttgacaacatcgatcaacacgcttgtgcagcgtctttgtctctagaatcggtatgcttaatcccaaccttctagcttttatacactttcatacggacagacagacagacattcgggtagagggaaatggccaactcgactttggctattgatcctaatcaagaatatatgtatatacttccttttacgcttccttctacctggtatgcctcttacttcacgagtaacggttataacaagagaaaacgctatagtcgagtttctttctttccgattatcaagtacccgttacttcgctagtgggagtgtgaaaaagaaatgttaacatttttctggcatatcgataggaatttttttttactttgtggccaagtaacaaaatggtaaacaaccaaatttgtctatgtgggcgttagagtaggcgtggcaacgatctgaaaccaacttgcatatcgtggacgtcatctacatgcttaattttactttctagcgtttataacattagacactcatggcaagatctactctggtaatctttatcaagaatattttatggtcagaaacgcttttttctaaaagagccgccatatacatatagacatataaatatgtattttgacaaagtaagcgctgcacattttatcagtgtaactttaaaatgctttgatatggtagtattgattcgtttttatttgttttgtgtttgtaatattaacttaaaaattaacaaacgaatattttttcatggaaaatgaaaaatatacaataaaatgtatgaaatatgattattttttgtattggcatactcttctgacaagaccaaattactaaaaaaataagtttaaataaatctgaagataaggataattaaaacagcatataacatatacatctaaattggcattaataaagtttttgagtcggatgaatccaccaactgttcttagatgttctgaatattacttaaagctggcattaaggtgtccagattaaaaaggtaacgctaacatcctgggttatttttcgggttttgtgacatgaagcgtaataagaagaagcgaaagaagctaagatcaacctatctcaagaaggaaatgcattttcgtttggggtcgtgaaatattgtccttggttcatccaagccggagatccggaccaagtcactctacgcccacaagtcacttttgaaaaatgttttgctatttttttgatagtttttttagacttttaagttctatcgattttaaatttttaattttttctcattttatcccctaatactcagccatcagctggatatctgattgtggggaactcgactatagctctctctcttgtttgcatttaaatattaatccacactttcgaataatttctctctcttttcccgttttatttgtcttgcaaattcctatagatatccaaaaatattatagaccgctcacttcacaaattgatcaaaactgtcaaacctattctattgctaagcaaacaaaataataggaatttttcagcgtttgtggattatgttaccgttttcatatatatatcattacgagaactgccttccacagtgatgagatgttaatcaatccgtatttttaacaagagttatgcaaagtgaagtgttctacaccgccctacaacctttttactaaaatccatatatcctctgcatgggtatacaatacctttgcatgatatatttccaattatatgggcctttacacatctgtctgcgtaattccttgtcgcaaaccataaaatgctaaatgaaatcaaaattcacaacgaatatgtatatgaatatctttctacctccaaagaactgggtaagctagagtaattttcgtcaattgcgggttcgaaatttaaaaacaataaaaaatgagattgttgaaatgagatacttaacaaataattgtttttatttaaagccctgaaccaagagtaaattattcagagatataactgttatttaaaactatgttcaaactatataactattatttgttcaaattctaatttaaaagtgaaagttttaacactgttaaacgaatcgtaaaaacgtcgtgtcaaaaaagggcggcagtcttaatttaaaataatttttgctcgctaatgttcaaacaaaaatgatgtagctattaatgtttatattattaatacattttgaaatttccacaactatgtctctgatatatgtacgtataggaataaaagagttcgtcgcttttttttctagtgatttctctatttttagtagctttgtaaatagtaagaaaattgttatatcgcctacgggaccgattgacctattttttttgacatattattataccactaattagcattctatattcattatttttataaaaacctgtatcaatcttaaatataccaaacacattttgacaacgcccacaactgccaaaaactttaaggtccactcttttgtaaattgttttgattttattaattttttatcgatattaagttgaaacaaataactggcaagtaacaaacagcatatccgttattttgcagttattcaaaaaatgtaaatgattttcctttaagctgctaaagagtgtaactaggagggttatactctatttcaggtaaaaaggcgatcggaaaaagcaattgaatttaaaattatttcgttgtcattgtttacttaagaaatggaaagatgattgttgatttttgcttttatgaccctactcccaaagaggttattattgttgaatggtatataaacacaaataaccttatttggatgtatgtatgaatatattttttgtatagatctctgtaaatatatttataattgtgtatgtaggtgtataagcgattccaaggaaaaataaaatgcacttcatctactaaagattttcatgaccaacgggcaaaccttgatttacccgtttacattcattttaagctagtatgctgtaaatgaaattaaaatcaaattatattacttgtaacacatattttatgcaattaattttttatggtgaaaattttcatagtctttcaatgaactcaattagtttatataacttagaatcagatcaaacggtacagttttgttaagcattagacgaggatttaatacattttttttatttatttattaagaacaatttggtatgacaacaaagaaaaagcacgtcaaatgttccttcctaacactttaaaaagcagtaaagcattaggcctaatatttttaaaaacaattttggtgtttcttctgcgtgacaagttcatgttgcagtcagatctttcaaaaagtactttcgtccatcgtactatcgttaaagcgataataccatacaaaaaacaaagttcgaattcttaattaaaaaattgttttcaataatcgattctgggatgtttgaggtcgggttccaccatactctggtttcattaatacacctaatactagaacagaatgtaagtggtagaagaatgcgttactgatcgttaaatgtatatattattctgatcagctcattcgatctgttaatgtccgtttttctttataattttcgagagctcgtcgagataatacgacgttgtagattctaagaacgtctatcagtcaaaccgcgcctacaagccgcccaaagctatcacttttgagaaatgtttataccatgttactcgtatattgaagggatattcttgattcgttgataaacaggtaaacaggtctagtttcacaagacaagtttgtttcagatgtttccaaaaaaaatgtttatattttatttcatttgttgttgttttaaattttatcttttgcagtaacacattttgggcacgtccacaataacgcccgcaaaccgcccaatactatcatgtcatagttagatatgtacattagatggcaaaaccagtaaacaaatctgtaatctgcgtcctttatataaacatcgtatcttttgtattttttaatgattctgatcaatacatattttatttggtctaaaatgcttttcaacgaatctggtatactctttcactatacgagtaataggtatgcgaacatacatcccaggaatttcactaactgagttttggctatcttatattcgaggaaatagaagttcttaatgtataaagacacaaaggctatgacatcacaggatgggtagcaatacatgtatgtacgagtatagccgcctctctctcacctctatggctatctcttacctatttgttcagaaactggtaaatcgggataaggttttctcataatttcctataaaaggaattcttatctattcataaaaaacttttaaatgcttaatgttagcttaaaattaaaaaaaatcttgttggaatacttctttaaagttacttttctttaagtttacttttaatgtcgaagccaaaaagtaactttttactaaaaagtatacttaaaagatataatatatatatatacaatttttaaaatttatgaatatatatatattatgaccgctatatatagcggccagacgcagggcctattcagcgttattgaaaaatttgaaaaattttataatatcaatttaattgaatttaattcgttagaaaactaactgatctgtaattagctatcgcttattttaaattaaaggaaccgggcctaagtcttaaaataatttactgtgtaatatatttatcggcaatgtgaatctatagaacttttagtatattgtcccatacttacttgcaaatcttgggtcgttagctgttgatccgtaccacgatgcagaatttctcatgtcagtgtagtgaccagccagagataggttatcggtaggtccgcaataggtctgtacacctgggctgtgatataaggttcccatagcgtacggattcgccatagttgatgtagttaatgttccaggagaattaatactgctgctactagagtttgatctgaaagcagtttacagtaatgtgtaatattctctcaaattagttgtctactaaaaagtattagcattaaacatatttcgactgaattaaatactatttggacagtattatagttttgttactatttaaacttgtttttatatgattagaaatcatattttataatatttttatataacttttactcgtcgagtgaaaggttaaatttcattcgttaaatgtcatgtaacgcatatgctgcgaacgtttatttcagaacgtagccatgcattctaaaagaaaacttttaaaaaatgttttgattgtaagtcgtacaaataagtaagtaaaataaattaattagtttactttcactcttgcagtaaaggggaaaatttgaatcaaagaaaagtatgaaacatgtaacaagggcacaaataggcaaaacaaataataaaacgaaacaaatctaaactttattcaaaagtgtgtcatggcaacgttctgaaacaaacgttctcactatagacgtcatcaaaatctacatatctagtctcagcgttcaagcttcaatgtttttagagacgcttcgctctaacttttacatacatttcaacaaaactagtatacatattactatatgagtttctcaaaaaaaattagaaaacagattcttctttaatcgcttcgttgagttagtctttgtcatttaaaacgttttaaaataatatattcggtcgtttaaatatatacacgaaatttttttattataagaacgcccatagctttaaggcaactttcggtatgaaaatttaataaagtttaaaaaattaataaactaataacaagggattttaggtcctaaggaggccagaatagactaattaattatcctattaagtccaaa

SEQ ID NO: 25850 - DNA, 415 bp, DROSOPHILA
cggacctaccgataacctatctctggctggtcactacactgacatgagaaattctgcatcgtggtacggatcaacagctaacgacccaagatttgcaatttcacgcctaatgagttcatcagccagtggaacaatgagtcatatgggaaacatgagtggactagcagcttgcagtgtaagcgattcaaaaccgctacagtttcctttagcacaaagaagaaagcgaagagttttgtttacgcaagcccaggttggtacttacatccttagtttgctacttaaaaaaaaaacacaaatatttaccgaatggaaagaagtcaacttgctacaggcaaaataaaggaaaacgtttgcctcgacctggggaatatgttttaatcggggaatatattttaaagttttatttattcattgg

SEQ ID NO: 25851 - protein, 98 aa, DROSOPHILA
MRNSASWYGSTANDPRFAISRLMSSSASGTMSHMGNMSGLAACSVSDSKPLQFPLAQRRKRRVLFTQAQVGTYILSLLLKKKTQIFTEWKEVNLLQAK

SEQ ID NO: 25852 - DNA, 4239 bp, DROSOPHILA
aaatagggattggcatccgtggtgatgaatgtacgcctccagtccacgtgcacgccgatccgcttgagatcctgcaccgccagcggtgggaagtagttaagccagtgttcggcattggcaaagtccttgatttcctcgtccttcagtccgagactctgcataatttgccattggtatttggcagcgccggttttggcaaccgctttgctcttctttcccttggacttgtccttgggcacctcggatgcggcttctgcggcaacggggaccacttcctcggtctcggggaactgtggtggaaagccgaactgctccagttcgcgcgttaacttgtccgcacaagccttgatgggcatgccggtgcagtggaatccgaagggccagagtacgcgccgtcccttcaggcgatggtagcgcatcgagtactccgcctttgacaacgagaaggtgtggcccaggtggaggcgtccgttcatgtagggaaacggaaaggtcacgaagaacttctctgcctgccgcttctttggggccgtcggcgcgtccgactcgtgcactcgctccgcctcccatcgctgctgcacctcccgctcgatcttctgtagatactccaccttaaaggtgcccttgcgctcggttgtggcctgttatggtaaaaaaagtaaacttattagcatattaattgcctttcaaatgcagaaatgccgcggccaattgcatcagccggctcgtcctcgtggcagttcctgtgactcatcgatttatgggggattcccattcccgggccaatgctcaccatagcttagttctcaatgatattcgtaattgtttagaacaatttcttcattcaaatcgtggcactagcaaaaaacttaatatgtttcgagcagtgcaacgtgttgcggccagtgtggcagcagaataggcggcgcaaaatactgactattaaaatacaaattttaattcatttcataattttatataacatgcctcatatttatagaatttaataattaaaaattaaaagaattagttggaaaacatttaacaggcgtgtgcttattgggaataccgaattgcattcaaactaaaaggcactaacgcgttttattcttcaatctgcacgcgactgtcacactaaccatttaacctagtttttttttcttaattagtgtgaaaagttttaggacatttaaataaattataacttaagtgaaccgactagattacgccatcgtactacccccaagatgcgaccagtatttgccttcctgctcctggcgctcatctgcttcgccagcactaagtcggagagcgacttcgaggaagacgacagtgatgattttgccgaattcgacgacggcaatttttacgctgagccagcggccaagaatgcagattcgttctccggaggagcaggatccagccacggcgagtcccgcgacgatccgcctgccaaggagccgcggaagcaagcacaaaaccaggagagcgacgaggaggacggccttgtcgaggatgacgatgagtttgagcacttccaggtaaacaaagtcggctgttcgatgagaagaggtcaaatgcggttaggaactttgatcaagaatatgcccagtgaaatgtaactaggctttcctataggtggccttgtgttcctttacttccttcataaaatacttggtcataagggtgcataaagaaccattgggaacatttaatacattgcttttaaacagctttcaccatgatgacatggaattttgccgtaccttactttaaatcttctttaatgtgaagtgcttctacaaatctgtaatcgttagatagtcattgaattatgtaacgtagaaagcagttgtagtttatacactttgtcggaaccctcataacttgtacttcgaaatcagggaaccacgggttcaccaaaagagcaaaggtgtaacaagaaattatttatacctacaattgacttaaacctatttccaggatgaggaagagttcgagggctacgatggcggagactccaaggatccgcccatcgaccaaaaggttgagccaaaactgaacataccaaacatccctctgcacttccgcacccactgggactcctactggatggagatgctcatggtggcagggttgttggcctacttcgccaacttctttgcgggaaaggccaaaaacgcgcgtttggcgcagctttggttcagtacccacagagccctgctggatgagaacttcgccttggtcggagacgatggcaaggcggagaacgagaatccgggactgataaaggagagcgagagtctttatactctctggtgctccggcaggacctgttgcgaaggcatgctcgtcgagctgaagatgatcaagcgacaggatctggtctccttggtggcgggactaatgcgcccacagctggaccaggcccacatcaaaattgaactcacacgcggtgtaatggatgcctttgtatttgcagttggtaccaaaaagacaattaccaagctcttcaaagagtatacggatctggtaagagaatgcaatacaagtaaccatgccttagcttaacattgctccttcttgcgaacagagcaagttctgtagtctagtcggcaagccggaggatcgctacaatgtacccaccggctttggcgtgctctccgaaattccggaggccacgtccgccatcctcgagtcacgtattatcactgcacttaacaagtaccaaagctatatcgattacctgcacatctcggaccagttcagtgggcccatccagcaggaagagggtggcaccctcaagcagcccgaaaccaaggccgtgcttctcgcaggcttcaatttgccgaagcacgccgaaatggagaccattaagccgttgttattgttgatcttttatttaatggagcgtttaaagacctatcgcatgtccaaggaggtaatttagtacgcttatttagtttcaacttgcgattaatttgttgtgacaattccagggcaaagccaagtcggacaaaaaccgtcagcgcgtggaggaggagttcttgaagagcacccatgccgcccgcgccgaggctgccgctcagagacgtgaggataagcgtaagcaggagaaggagcgcattctggccgacgaggacccagagaagcagcgccgttgggaggctaaggagcagaagcgccaggccaagaggaatgcgcccaagatgaagagactggccgtcaaatccctgtagatttgtttcaattgtgccatttgccgcaaggagcgcacctcattaacgtacacaaaccgaccatttgtagatgttcctctcaaatgccagaataaagcaatatctatttgtttcctatggagcgccaaaacaaaaacctcagttgtgccaacttaatctggatcatacaaagtactacactgtttaaatgcagataagcagcctatctcttcgttgagcaagataagttttgtaaccttaatctataaaatgaattaggttaaatacttcaacgatataaaaggaacgcaagtatttgccaaaatacttatatatttattgaaatatttaaaattttcgttacaaaatgatttatatgctttgtgaatggttttcgaacgcaagctacattatctttcacagacaccttatgctgaatatgcatgtgaattcgaaatggttccgaatctcttcccatttagcacttgacggggaagcagttttcgttggacacatatgcgatgtgattgcgcagcgttttgatctgcttctgggcggcatcgaagctgtaggagagtgtgttcagttgaccctgcatctcgcggatgacagcctcccgatcgttgaccgacagcgaggcagttgctcggcactgagccaactccttctcaagccgattgatctgttcctgttgctgggacttgatcagctcggcccgttccttggtgccggctatgatcttggcggattcagttcgcagagtgtccagatcgtcttgggtggacttgagctgttcgcagaagagatccctctgtcggagaagctcctccagttcattcctggcctgagtcagttccatttggcactgggccagctgaggtcgcacatcgacgttgggttgctgctccatctgcgtcttgcaggccttgagctccttgcagaccaccaccagtttcgtctgcatctcatccttctccttgcaaacctgggccagcttcagctgctcgttctctaagagctt

SEQ ID NO: 25853 - DNA, 1678 bp, DROSOPHILA
aatttaataattaaaaattaaaagaattagttggaaaacatttaacaggcgtgtgcttattgggaataccgaattgcattcaaactaaaaggcactaacgcgttttattcttcaatctgcacgcgactgtcacactaaccatttaacctagtttttttttcttaattagtgtgaaaagttttaggacatttaaataaattataacttaagtgaaccgactagattacgccatcgtactacccccaagatgcgaccagtatttgccttcctgctcctggcgctcatctgcttcgccagcactaagtcggagagcgacttcgaggaagacgacagtgatgattttgccgaattcgacgacggcaatttttacgctgagccagcggccaagaatgcagattcgttctccggaggagcaggatccagccacggcgagtcccgcgacgatccgcctgccaaggagccgcggaagcaagcacaaaaccaggagagcgacgaggaggacggccttgtcgaggatgacgatgagtttgagcacttccaggatgaggaagagttcgagggctacgatggcggagactccaaggatccgcccatcgaccaaaaggttgagccaaaactgaacataccaaacatccctctgcacttccgcacccactgggactcctactggatggagatgctcatggtggcagggttgttggcctacttcgccaacttctttgcgggaaaggccaaaaacgcgcgtttggcgcagctttggttcagtacccacagagccctgctggatgagaacttcgccttggtcggagacgatggcaaggcggagaacgagaatccgggactgataaaggagagcgagagtctttatactctctggtgctccggcaggacctgttgcgaaggcatgctcgtcgagctgaagatgatcaagcgacaggatctggtctccttggtggcgggactaatgcgcccacagctggaccaggcccacatcaaaattgaactcacacgcggtgtaatggatgcctttgtatttgcagttggtaccaaaaagacaattaccaagctcttcaaagagtatacggatctgagcaagttctgtagtctagtcggcaagccggaggatcgctacaatgtacccaccggctttggcgtgctctccgaaattccggaggccacgtccgccatcctcgagtcacgtattatcactgcacttaacaagtaccaaagctatatcgattacctgcacatctcggaccagttcagtgggcccatccagcaggaagagggtggcaccctcaagcagcccgaaaccaaggccgtgcttctcgcaggcttcaatttgccgaagcacgccgaaatggagaccattaagccgttgttattgttgatcttttatttaatggagcgtttaaagacctatcgcatgtccaaggagggcaaagccaagtcggacaaaaaccgtcagcgcgtggaggaggagttcttgaagagcacccatgccgcccgcgccgaggctgccgctcagagacgtgaggataagcgtaagcaggagaaggagcgcattctggccgacgaggacccagagaagcagcgccgttgggaggctaaggagcagaagcgccaggccaagaggaatgcgcccaagatgaagagactggccgtcaaatccctgtag

SEQ ID NO: 25854 - protein, 476 aa, DROSOPHILA
MRPVFAFLLLALICFASTKSESDFEEDDSDDFAEFDDGNFYAEPAAKNADSFSGGAGSSHGESRDDPPAKEPRKQAQNQESDEEDGLVEDDDEFEHFQDEEEFEGYDGGDSKDPPIDQKVEPKLNIPNIPLHFRTHWDSYWMEMLMVAGLLAYFANFFAGKAKNARLAQLWFSTHRALLDENFALVGDDGKAENENPGLIKESESLYTLWCSGRTCCEGMLVELKMIKRQDLVSLVAGLMRPQLDQAHIKIELTRGVMDAFVFAVGTKKTITKLFKEYTDLSKFCSLVGKPEDRYNVPTGFGVLSEIPEATSAILESRIITALNKYQSYIDYLHISDQFSGPIQQEEGGTLKQPETKAVLLAGFNLPKHAEMETIKPLLLLIFYLMERLKTYRMSKEGKAKSDKNRQRVEEEFLKSTHAARAEAAAQRREDKRKQEKERILADEDPEKQRRWEAKEQKRQAKRNAPKMKRLAVKSL

SEQ ID NO: 25855 - DNA, 2311 bp, DROSOPHILA
tcctgtataagtacatttcttgccgatcgtgataacgtactaaacttaaatggctccacgtgtaaagttatgaccttttgtcgtgtctacacaatgtacgcgaattacactctcagtgggtgctctttggacagcgtaaaaggggttgatgatcttggtgtgctcctgaaccataaacttcaattttcagaccatatttcggcttttgttaataaggctaggggtgtgcttggttttataaaaaggtggtcaaaggaatttgacgatccttgcatgaccaaatccttattcatttctctagtccgtccgatgagtatagatcacctatttggagtcctcaatacccagttcgttagaactgtattgaatgggtccaaaatacttcttactatttccctagctgcgcctaaattgggatgcaaacctttttttatctctttatttcagtagactacttttaattaatataccttccctagctaaccgtagaacgatgattggaacagtctttatttgtaagcttatttgtggtggagttgatagtccacggctgtgtcaggtcagtcgaataaaattctctgtttcaagtatgttcactaatatttacacaccaatcattgaagatgatttaaagtttcagtgacaaaatttccatcgtttattttgtcaaaatacttatgacgacttatgtaggtccaggaccgtaattataagattcccctttagtcagatgagagtttagggttagagatttggaggtttgtgtaagagattgcccacgatgtgactactatgcaataaacttttggttacccacttataactttttcatgtgggaagcttaatgaaaatgaatgacgccgaaagaaaacggatttttgtagtataaaaaaaaatttaatgtaaatgcttattttcacaaaatttgtttgataatggtgcgatcgtctctagtcttttattacgttaaagggtgttttgattcgatatgcatggttgtttacctcgtagaaaggagtttaaaaggactatcgaatatatcatttatcgtattgttagctggagtgaaccatagtggagcacatatatggttcattttcaaaatgtataccttttcactcttaacacagtctctcctaaaccatttacgtttttcaaaatctgtatcctgtaatttcttcttgttgtataaattttgtgtaatgtttaactcacctgcgtcggggttaagtgaataagactagccaggtgttctcgttctggagctgaaagatatctctgctgcttaaatcttctttcaagttcatacacctaaaattggtaaagcaaaattaaaattaatttcgattttaagaaagtgatgaatattgttaagccaagagccggcaatattctgtgcaagctgtctcggccaaagttaaaaatagactaacccagcataaaccatgacaaacttctaaactgtcacattggcagtttgtggcaattttccaaagcaagcttatactccgtggacgtttcacgaatatacatgcttttctaacttgctaatttttattgacggtcatacatatgcgtacatatgtatgtatgtacatacatagatatcttaacgaatctagtatacactgtaaccttatgagtaatgggtataactatggttttgactttaaatattttttaccttgaagaaagtattatcatattggtcagaagattgctaatttcagactcgtggttgggtttgagaagagagtcgtgtggggcgactaagaaataagagagagaaaaatggcaacaaaatccattctcaaagttatcagaaagtaatcgatgtttaattcgatgagtttcgattaaattatttgctgatctttttgtgcaaaaagttaaggttaaatgcagtgtgaaaaacgcgacgaacaataggaccctcttcttattgagttcgaactagaaaaagcccttcccttctagagcgtgcacttaaatactcttctgaagggtgcacaatatacatactcttattatatatgtatactcttattaacaactacagcctagtacagtaactagtttgcaatggtacaagtttctacgcaaatgttgatttatagtgaaaatttttttttttaattcatataggcaattgtattataattattaaagacgttacttaggccaaataacagaaaacgtttgcctcgtctcattactcaactatcaggagtcctgcaaatatgtattaaagttgcatttatttattggtacattgtacagaaaagtatctatttacatgttacaatagata

SEQ ID NO: 25856 - DNA, 311 bp, DROSOPHILA
gtgtatgaacttgaaagaagatttaagcagcagagatatctttcagctccagaacgagaacacctggctagtcttattcacttaaccccgacgcaggtgagttaaacattacacaaaatttatacaacaagaagaaattacaggatacagattttgaaaaacgtaaatggtttaggagagactgtgttaagagtgaaaaggtatacattttgaaaatgaaccatatatgtgctccactatggttcactccagctaacaatacgataaatgatatattcgatagtccttttaaactcctttctacgaggtaa

SEQ ID NO: 25857 - protein, 26 aa, DROSOPHILA
MNLKEDLSSRDIFQLQNENTWLVLFT

SEQ ID NO: 25858 - DNA, 11394 bp, DROSOPHILA
atcatcaatgggctggctgtgatgctgtcctttttcgtgggctaccgatacgccctgaagcgaggcgatgccaaggactccgtcaccgagggagcggcgaccccgttctcgcaggaatcttcggtgtctagcggttccgaggcttcagtttcggataaggtgagaaggaaagccctcggtaggcattcaatggccccaatccacctagtactctgaacttgttgtagacccaaatgcatcattgaacgcatacacttggggtcacaataatagcagtgccattttttgttgtacggtagaagttttcaaaagtcctactttacatagtttaaagtatgattttttaacataagtatatagcacatacacattataataatataataccaacgctaattttctaaacattgcagggctatggaggcttgaacgacaactttaagatggtcctggtggtgcgcaacgatctcaagatgggcaagggcaaaattgccgcccagtgtggccacggagcggtgggtgcttaccagcgggcggtggtcaggacgcctcgactactgcggtcgtgggagaactgcggttgcgccaagatagccgttcgcgtggagagcgaggcggagctgatggccatcaagaaggaggccgagagacagcaactgaacacgtgtctcatccgcgacgccggtcgcacacaaatagaggccaactccaagactgtgctggccgtgggtccagcggctgccgccgacatcgaccgggttaccggccacctgaaattgctgtaagatccgcacttcggaaactctcacaggccattggcattactaattcactcaagtgcaacccgacaattcacaaagcaatacggcgcaccggtggagcggttgaaagattaaggccaccgggtggaggacgactgtgacatgcaagctaagctaagatttacgttattacattaactgtgaaccgagctattaaacattaaacgattgacagtccggcctggaactgcaaagctccgaagcgtttttgtaggggttcaagtggtaaaatcctagctcaagtaattaagtccctgtagagtatttcctttttccaaaactattgtgttttggtaaatcctttactaacatatatttgaaaaatgaaatgtgtctactcattaagattatatctagcttcccacagtatttggtctatttcttttcagaaaatatcagggtcttttgaaaagtaatggtgacacttgtttgtttctaggcattatttaaagttatgaaaattatattttaaaaacatattttgaattagatttcataaattgtaaagtgtataattaaaaacatattggcatgaaaaggaaatattttttcagagaacatattgtagtatttcaaaatccgttaaaacaatgcattgtaaaaagtgtataaaattgtttcacagcgaagctcaatcctattattaaatcgacgttttattttctaacaactaacaattattccctatcactaaaaagtccaggcataatcattgtctccctgcggcgtctgttgctgctgcagttgctctgattgcattggtggcatcacttggtgctgcaactgctccatttcctgcacttgttggaagtccagttgcggtggttgctggtagtcgagagtcgtgggctcgttggacgaatccaccatgtatatctgcgactgcgatgctgcctgtcccatctgctggtgctgcaaggcgtaatccccgtcgtcgaagacctcctttttgatacgcactcgagaaccatcgtcttcctcgtcactctccgaaatatccagatcatcatcgatgcccattccgttgttcatggtattgacaggcatttccggcgccatttgcatggccattgaagcgtccattcctaagtctgcaccggaagcggcacttgtgctggcttcggcgggattgtaaggcccattatcatcctgctcgtgcgataggaagttggtgaaagcaccctgcaagctgctgggctcgccgaggctctggcgctgcttgtgcatggcgaggaaatctgagggatcgtagttggggtccacatccatggattcatctgaaatgtttttgaaaacacgcattagaaagagcgtactcaaagtcctaatcatatatgggattaaaggtgtggggacatggacatcgagggcacaacacaaacacgaagtaaggataataaagaccttgctgctgttgagcatagtagccgcccacgccactcaactgcaccattgcttcggccacctgctggctgtcatcctcgccgatcggctcctctgcttaggtgatttgggtaaaatcagaaacagaaaaaatccaaacagtcagcgaattaaagtgttttctagattagtattaatcctcaaagcgcgtgccaagaaccgtattaaacataaagaagtgacaatttttaatggaatttaattgtgaataaacgataaagggtattagataacccaccgccaaactatcagtttggaaaatttgtttttcttaaataatttggcaatttagaatttaaagaacaagccaaattatcatatgcggttctcgtctaagaatgaacataagtaagcaggccttagtatgaatgtacccacctgccatctggtgagcctctaggtcaatctctgtcttgatgttcttggggtcaaacatgccatccatggcatcggcaggcgcattgatacgttcgccctgatctaaaatgctcgccgcattgttctcgtcttcggagacctcctggaagtcctcctcctcgtcgtcgtcctcgtcatctgtggagcattggagatctaacggaaaccaaataattttaataacatatctttaattttgatcggagaccaaatactgaaaaatatcaaatcatatttaatatgttcgaaaacgtagaatgaaattataacctaatctacaattaagcaaaatgttagctactaagatcaggatctacgaatagtgctagttagtcatttaagctcgaatatccaaatcaaaaatgtggtgcgtgtaaaagctgtggaacggtcagtaaatttgggtttggttttgttgtgttgtgtttgaaaacaagatgcaagtgagtagttgtgaggtggctcgcaggcttagtttcaattagtcggcgattagaggcttaccttcatccaggaagtaagcttgcgtgtgactcatgtttgaggcaaggctgtccttcctcggacgcccccgaccacgcttaaccggattctgggatttgactagaaaaaggtaaaagtttttgcaattcgttggtggcaacagtgaaatgtttgcagtcttggccctaattgatacatcttggtacatatgtatgtgaaaaagatttccctttttagttattaaacatcagttcactggccctactaaatcttaatgtttttaatagaaagaactgaaaaagttgaccaatttaacattttaaattaacaattcgaacaaaaccaaagacaattcgcaaatatttaaacgcaatttaaattatcgcagatatggcttaaatctatatactatatatggatccaaatatttatacattacaaattctaagtatgtaagaatagagcattttacaattccataagctttctagacatatatatttaagtgcatgcatggccatcatgcccaatacctaaatatctacatgaatgtctatacaatgaatctgattccatccattcggaagatcagtgttattgcgcttaaattaaattgaattaagtctgggattagtataagcataaggatcctttcggattcgtgattaccataaccgaagtttctgaattcgaaatgtaaagacagaatgatcaataccaatagttctttagaggtccacaaaagagtaaatgtataaatgtgtatgtatgaagttctagtaaagtgccacaggatccttgacctatcgatcaggcgtaataaaatagtaactgaagcccaagcccacttaccctcctccacggggtcgcgctgcttgcggggcctaccccttccgcgcttcacctcaccaggaccaggaggagctggttttcgcaccgccggcgccgtatgtgacgaaccggcctcggcgcccatgctgcgatggatagagttcgatgaggaggcatgccccccatgaccctcgacgtcgatgtagtcatctccgggtgaactggccctactgccacggtcaaagttgtaatcatcattgccccaggcttcatcaaactctggtgcattttccctagcacgctcctgcgtcttagctatgttattttccaactggccgcagtgctccgaaaactagtttaaagcaatatttttgtaagaacaacggcaacaacaaatatacagaacaacagatacctacctcaattaactgggtttgggcatactcaagtatcttctttgagaacttggtgtagcgggtgtcactgccgttgtactgctcacagttggtggcgatcaactcgatatcagccagatactcggcacgactgtgatagcgatgagctgttttaaaagcgatgattagtattcacgagcgattggcatttgttgccaatggataggtaaaagcttaccttcaatgtttttgccgatagtttcgaggtccatgggtcgcttgataaccgtgtagtagtccttaacctgtttcttgttgacaggcttaaggaaaggccagctctctggtaattgcttaatctgcgagtgcagcttgtcaaagataaaggagagtgccacttggtcatcgtcgtccagcagcgggttaattgccttctcgaggcgcatcagtttgtcttcgcgctctgcgagcaattcaaaacaactgctgaacatgcgttgggcagccaaggtgtatgcactctgcggtccattgtagatcagcgagttgtccacaatctgcttgagatcctcgaggaacatctcgcgactcgtgtagcgcctttggcgaatatactccctcatcgtttgcagatccatgggcttggtcaccacgcggtagtagtcgggaaccttttttgcgcttaccgggaacaggaatggcgatacatctggcatagatcgcagctcattatggataatctccaggatagaggacagtaccacaacggggtccgtgcgcctgcgattggccgttttattgtgtcgctgcagatagtcacaatgaagatcgccacccactctgcgtttcttcttgcccatcgcatctcggggaaccttcaaggtgaaaccagagctagatccgctgcgacgcttgccatcatcaccaccatgacgcttgagaatcttactgctgagcgttactttggtgccatcgacattcacaagatcatcgtcatccattgtcatctccttttcgctctgttcgtcaaaatcgtcagccagagatgggttcgactgggacagactgctttgcatgccagaatacaagggacaggctttgtttgtgcgcatgtgaccaacctgtccacaggcgccgcacttcagctttaggtctggcttaagcttgaacttcttgcgcgaagggctgacctccttgtagccgctatcccgctccttgtgcgaatgaccgcccgagctcttaggatcacccaaggaagtgggcatgccacctggctgaagcttctggttctgggccagctgcgccaggcgttcgcgctcctggttgcgcttgatgcgacgtagctgctcctgaatgcgtctcttttcgcgcttcatctcctccttctgctgctcatctagcgttgcgaactgcttgatgaactgctcgtccttagtggtgcgaatcttgatgtaggcgtcgataactggttgccgccgcacagtctccacgcgagtatattccttgccatcgttacctctaaaggtacgcgtaatgcgaaggatcctgccctggttgttggttgccagcatttgctgtcccggatcatcctttcctttggctcccttggctcctccactaccacttggtccgccgtgttcttcgtcaagctggcgaagcaactcctgacgctccagctcttcacgttcccttgacaattgcgtcgaggttttcttgtttgacagcatgttctcaagattcttgccaagttcttcgagatcagattcctcagaggccgaggactctgcctcatctgtggacagcacctcagagctggccagcactctgttttgcagatcgaatatgcgctggcactcttccttataacgctcctgatgctctgcaatggagaaccggttgccacgagaaaacttatccattccctcttcaccggccttggccttttctgtggacagggtgcgcaccacgtcaatgacctcccagcgggaaagctttttgatctcctcctcgggcaccttgaactgccgcaacagctcttttgcacgctggagtggcagacgacgcaaatctgcatctgttcctgtgaccgaacgtttaggctgcgactcttgctcctccttggtttgctgtgaaagtgattgtaagaaaaaatatgaacataaagttagttttatatttttctgttaaatatattaccgtgggcttgtttggcactcgaacatatgaaaatccctctccacatcccgttggatcggctggaccactcaactggagtaaacactttccccgcatggcttggatatatgcgcgagtcgtgttccaaggagccacctttacttcgtcgtcaagcttcagctgcgcctcctcgtcgtcatcttcctgaggtgcgaacaaaaacttttctccatacccagcatcctgaaaccagaaaaaataaaatatagagctcagcagaacaagtaagattaaacaagacttcgcaaacacatacctttaagcgttgttccgccgctatcatgctgaagtacgcgcaacactgctcaggtgacaccatggctcggatctcctcctcggatggaaggcgaaactctggctttataacccaccaattggagtccatgcctgttcgcttgaagtcagcgcactgctttaaacgcttgcggatgctgctctcggaatgagcgggaaaagcctgttttatatcgtccattcgaatgcggcgcgggttgtcgcgacttttccagaacaggcggtaaataaacacctgaccaaacaaacaaattgttagcaattgaaagacagattagatctttggacttgcctgcagaaagtcacgggtgaagttgttggcccttttggaattcggaccgggtacctcgtacagcggacactcctgacccacggtgtatattgaattcaccgaccgtatccagtagttgttccgcgtgcgaatgacgaggaaatcgttgtgagccatcttatgtggataaataggcgctcggtacatgttgttctcaatcgcctgtatgcactggccaggatgcaggatgcccaggaagggacttgtgtgcgcaaaggccacttctccataaacaaaatcctgcggcccactgtccttctcagccttacgcttgtagtagttctttatcttggagcacatgcccacctggtttatcagaggcggatgctcttcgcagaactcggctagtacgatgtctccgtcccttccgcttaaatcctctgggttgcgcataaagaagacgtctccgccaccggaggcaatgcgctccacttcgcgctgcttcgccttctttgcgatggtcttcagcagtgggaagacaggatgagggatagactgggccattggcccgtgggagtacttctttaggggggggcgatggaaggcgcggagcttcatcgggcccatgtgcgtaggcacaaacggagctcgcagctctaccaccggagtcgagtgttgaataagattaccgcccaccttaagtcgtagggtgggttctgtcttcggtgtgtagtaactgaaagggaattaaaatctgcattctgcatccattattatattaagagacttacgtgtcattggatatgttaaaggggtcacggtcaggacttttgggtggcggcggaggtgtgtcctccgcaagcacgttgatcacacccgccttgccaagtaggatcttagacttttttacgtgaggatgcggtatcttgatcttaggtggaggacccgtgctcttattgattttagagggatctatgtcatcaggaatacccaaaatgatgttttcgtcgttgggatccaaagtgagtaccttcggcttgggcaccttgctcacttgctgggcatcccagattacctcgtcctcccacttgtagtatattagctcctcattttcaactggaaaaaggctataccaggtgtcatcaggtgcctccgctggctttgcttgagcactaaaatcgattgaaatattagtgtaaaatacgtatgaattcaactttcaattaattacttttgctgggcctttttgcttgatgctcccgaaccctgcttggagcttccacttcccacgggcatagacggtttgcccggctggctaaaggcgccagccgttctcgacccgctcgagggcaaccatccggctgcatttgtctttgagttaagcttttggagcacctttgccttgatgtcgttaccgtcccagaccacgtcgtcttcccaatgcagctgggagaccatgagaaaggcatcatccgcaatgcttggatcttcgacatcatcttctggactctttacacggcgttcatctttgagttgcggctgagacgaggtgcttgctgcctttgtcttgaagccatagttgaacccctctccagagtcgggcacctctagcatatcataccaaatctgtgcaggcccgaaccgccagtcagccacctttggcttctgatcgctgttctcgccgttgtccggtccttctggacgcacatcctcgctgttgaagtcgcccagcaatttgtcctcgtcgtcggacatgcactccgctggcgttggctctgcagcatagtgcagactgaagccccgctttcgtggctcctcagtatcgcttggagagtccgaaccaccagtgtttgtcgtctgaaatggtttacgaaaagtttcctggtgatcccgtcccgtttaaaagtactctgatcttctaccttctgatccctggattgatttcgcttgcggcggcgtttgcgcacgtgtcgccagatctggggcaaactcgtgggtttaccgggtccgaagagacgggagaagcgtagcaccttttggggacgaaagtccggaaagagctcacgcacatccacattctggtacttggacggcagtatgtctgccagtggtgtgtccagcttccgatccgcatcttaaaggaatgaccattgacaaaaaaattctattgttttcaaataatttttaccctttgaatcggtagatttggaatcgtcactgggactagatgcatcatttgacttggccggttcctcgatgccgccgccagagccggagcgcattggtgcacttggtggaggcattagttccttgtcgtccttagctgcaacaaaatgtgagttattctctctgtatagcaataggtctgaacccaacctgagcggtgcaaaagtaatcgtgtcactttgacaggaattgcatagacctttaaaaatttgagcaatatcctctcctaccagtgttaactggttaaattaaatgtcatcaaaccgttgtagattacggtcttacttactcaacttggcctctaccttggaggcgggaatggcgtcttctaagtcatcataagtgcttgtttcttcgggcggagtgcgtgggcagtcctcggataactcggtgatgtcagagtagtcaatggcatcgtcctgagcctttacggcgccatcctcccttttaacgcccgctttgagcgcatcaaaggcactcattccttcgctggcactgacggctgacggtctggcgtcctcctcttcctcgtcatccgacggaggctcggcttccttgagatcgataacctcgagcagcatagaatccagacccaatctgaaagtaatccatacgcaatatgaatggaaatgtaattaaaagtgtcttatatcttgtgaattaagatatatttgaatgataccgggtttacatatgtatgtacaagcatgtgtactcacttggaaagggaaccaatgttttcccggagctccgcatcgaaaccggtgcccccgcgcccctctccgtcgtcatcttgcagcagtctgccctcggagtcgatgttgccgaaaagaatgccggtcaagtccaatccattgccgatcgatccctcatcgtcgctgttgtcagattccatctccatttctatgggcttgcaatgtttacgcggctaaagtatattttcttcgacggagtgtaattgcatttttcacacgcgtaagtgtgaccgtcgatggacaaagcaaagatgcctcatggctccccactggcaccagaaaatccgcgattagatttggacaagggttgggagcttgggaaggtcaattgcgttttgtaccgaaggttagtgtccaacaaaaagggctctgtaatatttttaattggcaattttgtaccatgtatggcatacgtggatttttattaaaaaatatatattcctttgatattcgtacatttcatttgtataattatatatttctgaatagaacttctgtaaacaccattaacacgatcacttttgttcagcttctatcaaaatataactttattcagccaaaaatagtttattcaacgctcattggagaaaaaatgggcatacataagcactacaatgccaatttagaattacagttctcagacctacatttgtgttacggttttgtaacgttgaaggagctatatttctctattgttgttcagattttacagaaatctgtagcaaacaatcataactacttcagatagcaaaaacttaaaccatcaatttttatatatttcttattattcattttttattataaatatatatatgtttattttcagaagtctcttcttaacttggttttactcaaacgattttaccaactgcgctttctctagctgagaatcgttttaatgataatctcgaagagactatccacaactttgggatttgtactgtcacaaattgtcatatttgtaccaaagaactgcatgggaatgtaggatttttatatgcaggctttgaactatttgaacggattaaaggaagagtacgctgagctcacaaatttagtcaccttcaagaatccgatcctgaaacttttacatcaaatgaatctatggtttttcaatagattttcgttataaaatgtatttctgatgattaaaccggctgaaaattcgttttcatggcttaaactctaaagaatcattttaattcaaggcagcatttctctag

SEQ ID NO: 25859 - DNA, 6786 bp, DROSOPHILA
tacgcgtgtgaaaaatgcaattacactccgtcgaagaaaatatactttagccgcgtaaacattgcaagcccatagaaatggagatggaatctgacaacagcgacgatgagggatcgatcggcaatggattggacttgaccggcattcttttcggcaacatcgactccgagggcagactgctgcaagatgacgacggagaggggcgcgggggcaccggtttcgatgcggagctccgggaaaacattggttccctttccaaattgggtctggattctatgctgctcgaggttatcgatctcaaggaagccgagcctccgtcggatgacgaggaagaggaggacgccagaccgtcagccgtcagtgccagcgaaggaatgagtgcctttgatgcgctcaaagcgggcgttaaaagggaggatggcgccgtaaaggctcaggacgatgccattgactactctgacatcaccgagttatccgaggactgcccacgcactccgcccgaagaaacaagcacttatgatgacttagaagacgccattcccgcctccaaggtagaggccaagttgactaaggacgacaaggaactaatgcctccaccaagtgcaccaatgcgctccggctctggcggcggcatcgaggaaccggccaagtcaaatgatgcatctagtcccagtgacgattccaaatctaccgattcaaaggatgcggatcggaagctggacacaccactggcagacatactgccgtccaagtaccagaatgtggatgtgcgtgagctctttccggactttcgtccccaaaaggtgctacgcttctcccgtctcttcggacccggtaaacccacgagtttgccccagatctggcgacacgtgcgcaaacgccgccgcaagcgaaatcaatccagggatcagaagacgacaaacactggtggttcggactctccaagcgatactgaggagccacgaaagcggggcttcagtctgcactatgctgcagagccaacgccagcggagtgcatgtccgacgacgaggacaaattgctgggcgacttcaacagcgaggatgtgcgtccagaaggaccggacaacggcgagaacagcgatcagaagccaaaggtggctgactggcggttcgggcctgcacagatttggtatgatatgctagaggtgcccgactctggagaggggttcaactatggcttcaagacaaaggcagcaagcacctcgtctcagccgcaactcaaagatgaacgccgtgtaaagagtccagaagatgatgtcgaagatccaagcattgcggatgatgcctttctcatggtctcccagctgcattgggaagacgacgtggtctgggacggtaacgacatcaaggcaaaggtgctccaaaagcttaactcaaagacaaatgcagccggatggttgccctcgagcgggtcgagaacggctggcgcctttagccagccgggcaaaccgtctatgcccgtgggaagtggaagctccaagcagggttcgggagcatcaagcaaaaaggcccagcaaaatgctcaagcaaagccagcggaggcacctgatgacacctggtatagcctttttccagttgaaaatgaggagctaatatactacaagtgggaggacgaggtaatctgggatgcccagcaagtgagcaaggtgcccaagccgaaggtactcactttggatcccaacgacgaaaacatcattttgggtattcctgatgacatagatccctctaaaatcaataagagcacgggtcctccacctaagatcaagataccgcatcctcacgtaaaaaagtctaagatcctacttggcaaggcgggtgtgatcaacgtgcttgcggaggacacacctccgccgccacccaaaagtcctgaccgtgacccctttaacatatccaatgacacttactacacaccgaagacagaacccaccctacgacttaaggtgggcggtaatcttattcaacactcgactccggtggtagagctgcgagctccgtttgtgcctacgcacatgggcccgatgaagctccgcgccttccatcgcccccccctaaagaagtactcccacgggccaatggcccagtctatccctcatcctgtcttcccactgctgaagaccatcgcaaagaaggcgaagcagcgcgaagtggagcgcattgcctccggtggcggagacgtcttctttatgcgcaacccagaggatttaagcggaagggacggagacatcgtactagccgagttctgcgaagagcatccgcctctgataaaccaggtgggcatgtgctccaagataaagaactactacaagcgtaaggctgagaaggacagtgggccgcaggattttgtttatggagaagtggcctttgcgcacacaagtcccttcctgggcatcctgcatcctggccagtgcatacaggcgattgagaacaacatgtaccgagcgcctatttatccacataagatggctcacaacgatttcctcgtcattcgcacgcggaacaactactggatacggtcggtgaattcaatatacaccgtgggtcaggagtgtccgctgtacgaggtacccggtccgaattccaaaagggccaacaacttcacccgtgactttctgcaggtgtttatttaccgcctgttctggaaaagtcgcgacaacccgcgccgcattcgaatggacgatataaaacaggcttttcccgctcattccgagagcagcatccgcaagcgtttaaagcagtgcgctgacttcaagcgaacaggcatggactccaattggtgggttataaagccagagtttcgccttccatccgaggaggagatccgagccatggtgtcacctgagcagtgttgcgcgtacttcagcatgatagcggcggaacaacgcttaaaggatgctgggtatggagaaaagtttttgttcgcacctcaggaagatgacgacgaggaggcgcagctgaagcttgacgacgaagtaaaggtggctccttggaacacgactcgcgcatatatccaagccatgcggggaaagtgtttactccagttgagtggtccagccgatccaacgggatgtggagagggattttcatatgttcgagtgccaaacaagcccacgcaaaccaaggaggagcaagagtcgcagcctaaacgttcggtcacaggaacagatgcagatttgcgtcgtctgccactccagcgtgcaaaagagctgttgcggcagttcaaggtgcccgaggaggagatcaaaaagctttcccgctgggaggtcattgacgtggtgcgcaccctgtccacagaaaaggccaaggccggtgaagagggaatggataagttttctcgtggcaaccggttctccattgcagagcatcaggagcgttataaggaagagtgccagcgcatattcgatctgcaaaacagagtgctggccagctctgaggtgctgtccacagatgaggcagagtcctcggcctctgaggaatctgatctcgaagaacttggcaagaatcttgagaacatgctgtcaaacaagaaaacctcgacgcaattgtcaagggaacgtgaagagctggagcgtcaggagttgcttcgccagcttgacgaagaacacggcggaccaagtggtagtggaggagccaagggagccaaaggaaaggatgatccgggacagcaaatgctggcaaccaacaaccagggcaggatccttcgcattacgcgtacctttagaggtaacgatggcaaggaatatactcgcgtggagactgtgcggcggcaaccagttatcgacgcctacatcaagattcgcaccactaaggacgagcagttcatcaagcagttcgcaacgctagatgagcagcagaaggaggagatgaagcgcgaaaagagacgcattcaggagcagctacgtcgcatcaagcgcaaccaggagcgcgaacgcctggcgcagctggcccagaaccagaagcttcagccaggtggcatgcccacttccttgggtgatcctaagagctcgggcggtcattcgcacaaggagcgggatagcggctacaaggaggtcagcccttcgcgcaagaagttcaagcttaagccagacctaaagctgaagtgcggcgcctgtggacaggttggtcacatgcgcacaaacaaagcctgtcccttgtattctggcatgcaaagcagtctgtcccagtcgaacccatctctggctgacgattttgacgaacagagcgaaaaggagatgacaatggatgacgatgatcttgtgaatgtcgatggcaccaaagtaacgctcagcagtaagattctcaagcgtcatggtggtgatgatggcaagcgtcgcagcggatctagctctggtttcaccttgaaggttccccgagatgcgatgggcaagaagaaacgcagagtgggtggcgatcttcattgtgactatctgcagcgacacaataaaacggccaatcgcaggcgcacggaccccgttgtggtactgtcctctatcctggagattatccataatgagctgcgatctatgccagatgtatcgccattcctgttcccggtaagcgcaaaaaaggttcccgactactaccgcgtggtgaccaagcccatggatctgcaaacgatgagggagtatattcgccaaaggcgctacacgagtcgcgagatgttcctcgaggatctcaagcagattgtggacaactcgctgatctacaatggaccgcagagtgcatacaccttggctgcccaacgcatgttcagcagttgttttgaattgctcgcagagcgcgaagacaaactgatgcgcctcgagaaggcaattaacccgctgctggacgacgatgaccaagtggcactctcctttatctttgacaagctgcactcgcagattaagcaattaccagagagctggcctttccttaagcctgtcaacaagaaacaggttaaggactactacacggttatcaagcgacccatggacctcgaaactatcggcaaaaacattgaagctcatcgctatcacagtcgtgccgagtatctggctgatatcgagttgatcgccaccaactgtgagcagtacaacggcagtgacacccgctacaccaagttctcaaagaagatacttgagtatgcccaaacccagttaattgagttttcggagcactgcggccagttggaaaataacatagctaagacgcaggagcgtgctagggaaaatgcaccagagtttgatgaagcctggggcaatgatgattacaactttgaccgtggcagtagggccagttcacccggagatgactacatcgacgtcgagggtcatggggggcatgcctcctcatcgaactctatccatcgcagcatgggcgccgaggccggttcgtcacatacggcgccggcggtgcgaaaaccagctcctcctggtcctggtgaggtgaagcgcggaaggggtaggccccgcaagcagcgcgaccccgtggaggaggatctccaatgctccacagatgacgaggacgacgacgaggaggaggacttccaggaggtctccgaagacgagaacaatgcggcgagcattttagatcagggcgaacgtatcaatgcgcctgccgatgccatggatggcatgtttgaccccaagaacatcaagacagagattgacctagaggctcaccagatggcagatgaatccatggatgtggaccccaactacgatccctcagatttcctcgccatgcacaagcagcgccagagcctcggcgagcccagcagcttgcagggtgctttcaccaacttcctatcgcacgagcaggatgataatgggccttacaatcccgccgaagccagcacaagtgccgcttccggtgcagacttaggaatggacgcttcaatggccatgcaaatggcgccggaaatgcctgtcaataccatgaacaacggaatgggcatcgatgatgatctggatatttcggagagtgacgaggaagacgatggttctcgagtgcgtatcaaaaaggaggtcttcgacgacggggattacgccttgcagcaccagcagatgggacaggcagcatcgcagtcgcagatatacatggtggattcgtccaacgagcccacgactctcgactaccagcaaccaccgcaactggacttccaacaagtgcaggaaatggagcagttgcagcaccaagtgatgccaccaatgcaatcagagcaactgcagcagcaacagacgccgcagggagacaatgattatgcctggactttttagtgatagggaataattgttagttgttagaaaataaaacgtcgatttaataataggattgagcttcgctgtgaaacaattttatacactttttacaatgcattgttttaacggattttgaaatactacaatatgttctctgaaaaaatatttccttttcatgccaatatgtttttaattatacactttacaatttatgaaatctaattcaaaatatgtttttaaaatataattttcataactttaaataatgcctagaaacaaacaagtgtcaccattacttttcaaaagaccctgatattttctgaaaagaaatagaccaaatactgtgggaagctagatataatcttaatgagtagacacatttcatttttcaaatatatgttagtaaaggatttaccaaaacacaatagttttggaaaaaggaaatactctacagggacttaattacttgagctaggattttaccacttgaacccctacaaaaacgcttcggagctttgcagttccaggc

SEQ ID NO: 25860 - protein, 2065 aa, DROSOPHILA
MEMESDNSDDEGSIGNGLDLTGILFGNIDSEGRLLQDDDGEGRGGTGFDAELRENIGSLSKLGLDSMLLEVIDLKEAEPPSDDEEEEDARPSAVSASEGMSAFDALKAGVKREDGAVKAQDDAIDYSDITELSEDCPRTPPEETSTYDDLEDAIPASKVEAKLTKDDKELMPPPSAPMRSGSGGGIEEPAKSNDASSPSDDSKSTDSKDADRKLDTPLADILPSKYQNVDVRELFPDFRPQKVLRFSRLFGPGKPTSLPQIWRHVRKRRRKRNQSRDQKTTNTGGSDSPSDTEEPRKRGFSLHYAAEPTPAECMSDDEDKLLGDFNSEDVRPEGPDNGENSDQKPKVADWRFGPAQIWYDMLEVPDSGEGFNYGFKTKAASTSSQPQLKDERRVKSPEDDVEDPSIADDAFLMVSQLHWEDDVVWDGNDIKAKVLQKLNSKTNAAGWLPSSGSRTAGAFSQPGKPSMPVGSGSSKQGSGASSKKAQQNAQAKPAEAPDDTWYSLFPVENEELIYYKWEDEVIWDAQQVSKVPKPKVLTLDPNDENIILGIPDDIDPSKINKSTGPPPKIKIPHPHVKKSKILLGKAGVINVLAEDTPPPPPKSPDRDPFNISNDTYYTPKTEPTLRLKVGGNLIQHSTPVVELRAPFVPTHMGPMKLRAFHRPPLKKYSHGPMAQSIPHPVFPLLKTIAKKAKQREVERIASGGGDVFFMRNPEDLSGRDGDIVLAEFCEEHPPLINQVGMCSKIKNYYKRKAEKDSGPQDFVYGEVAFAHTSPFLGILHPGQCIQAIENNMYRAPIYPHKMAHNDFLVIRTRNNYWIRSVNSIYTVGQECPLYEVPGPNSKRANNFTRDFLQVFIYRLFWKSRDNPRRIRMDDIKQAFPAHSESSIRKRLKQCADFKRTGMDSNWWVIKPEFRLPSEEEIRAMVSPEQCCAYFSMIAAEQRLKDAGYGEKFLFAPQEDDDEEAQLKLDDEVKVAPWNTTRAYIQAMRGKCLLQLSGPADPTGCGEGFSYVRVPNKPTQTKEEQESQPKRSVTGTDADLRRLPLQRAKELLRQFKVPEEEIKKLSRWEVIDVVRTLSTEKAKAGEEGMDKFSRGNRFSIAEHQERYKEECQRIFDLQNRVLASSEVLSTDEAESSASEESDLEELGKNLENMLSNKKTSTQLSREREELERQELLRQLDEEHGGPSGSGGAKGAKGKDDPGQQMLATNNQGRILRITRTFRGNDGKEYTRVETVRRQPVIDAYIKIRTTKDEQFIKQFATLDEQQKEEMKREKRRIQEQLRRIKRNQERERLAQLAQNQKLQPGGMPTSLGDPKSSGGHSHKERDSGYKEVSPSRKKFKLKPDLKLKCGACGQVGHMRTNKACPLYSGMQSSLSQSNPSLADDFDEQSEKEMTMDDDDLVNVDGTKVTLSSKILKRHGGDDGKRRSGSSSGFTLKVPRDAMGKKKRRVGGDLHCDYLQRHNKTANRRRTDPVVVLSSILEIIHNELRSMPDVSPFLFPVSAKKVPDYYRVVTKPMDLQTMREYIRQRRYTSREMFLEDLKQIVDNSLIYNGPQSAYTLAAQRMFSSCFELLAEREDKLMRLEKAINPLLDDDDQVALSFIFDKLHSQIKQLPESWPFLKPVNKKQVKDYYTVIKRPMDLETIGKNIEAHRYHSRAEYLADIELIATNCEQYNGSDTRYTKFSKKILEYAQTQLIEFSEHCGQLENNIAKTQERARENAPEFDEAWGNDDYNFDRGSRASSPGDDYIDVEGHGGHASSSNSIHRSMGAEAGSSHTAPAVRKPAPPGPGEVKRGRGRPRKQRDPVEEDLQCSTDDEDDDEEEDFQEVSEDENNAASILDQGERINAPADAMDGMFDPKNIKTEIDLEAHQMADESMDVDPNYDPSDFLAMHKQRQSLGEPSSLQGAFTNFLSHEQDDNGPYNPAEASTSAASGADLGMDASMAMQMAPEMPVNTMNNGMGIDDDLDISESDEEDDGSRVRIKKEVFDDGDYALQHQQMGQAASQSQIYMVDSSNEPTTLDYQQPPQLDFQQVQEMEQLQHQVMPPMQSEQLQQQQTPQGDNDYAWTF

SEQ ID NO: 25861 - DNA, 6495 bp, DROSOPHILA
gtaaaaactaacaaaaagaaacgaaccaaaaggaaagaaagagtagagccaccaacacaagagaaatggacagaatccattttcttttgcgatgaaccgtttttttacacgattttttttttctttttttttggcgcagattacggcacccacatatgtatatcccgtatatgtacatatatgggcgacgtgggcgattttcgtattaaatacttaccactcgagagcgcaatggtgcactcctgcggatccaccgtgtacaggcggccctcgtatcgaatgtccgccttggaaatgaggctgattttggagcccaactccggtaatcccccgctcatcttgaactacttcgatgcttcactgcgcactcacgccgaaaatacaaactattattaaatgtttctgccaacaggcacacgaatttctctgtcaaaagcaaacaattatagcgagcgcgacgacaacgatttctcgacggtttcagtctctgctcttttactttttttccgtctttttttcacacgcaattgcgttccagttccagggcgaatttgcggccaatcgccttctagccgcgtttgctttatcaagctgtgtttttgcacaagtgcgacaagcgcttttccaatgtctgtgatgctgcacacacggctccaaatgtgaaaattgcaattttcgatgcacaaatctttgctccgtccgtctgcgaaaacctacccgtcgaaaatgaacgatgcatacgagcgagagcctcgacggtgttggaaagcgcggttgtatagcagcggcggcggcagcgaaataataataataactgtttatgtgcaaaactgtgcaaaatataaaaggggacgcttcaaaaggttgccaaaagtaaataagactatttcattatttatccgttctctgtttgcattaaaattcaaattttatcctctttcacagggcagccctacttgcaaccctaaatacaactctggaaagtgagcacgcatccctggctcttcggcttccctcggcgcatttttttcaaagcgaaacggcagaaaaatgctctggcattttacggatttctaattgtattatttatgtgagaaaattgcaaataaaagtgagtccatcatgccacccaagatggagccgattagcgtgcgcaccgcgcgtctgaacaacctgattctgggcaaaggagctggcgtctgtgcgaagcccgctggaagcgcctccggatcaggtattcccgcctccaccaggagaagcattgtacccgtgagcaccactagcgccgccgtggccgaggccatctgccgcgagggactcctggacgccttctgtctgctgtacaacgagtgcgacaaggatacgctgaagaagcgcgatcgcaacatcgccgagtttgtcaacaaatgtgagtcaactgcattggtcagcagggttttcggatggagtatctaccattctatagaaatggaactcagaagccacatttttacttcctcgggtcagagaatctacttttgctaatcatattccattattaaagcccacaaaattattgggagtagaatctcttatagatttacctgtatgttccggtttccctccttgaaaatagagctcatgcctagttacccattatattactatctaatttcctactccagttcgtcccatcatagaggagacccgcaaactcagggtcaacgcagatgacttcctcatcaagacgcttattggccaaggatactttggcaacgttcacctggtggtggagcggcaaaccaacgacatatacgccatgaagaagatcaaaaagtcggtggtgacgacgtcacaagtcaaggaggagcgcgatatcatgtccattcgcaactctgaatggctaatcaatctgcagtatgcctttcaggtttgttatttccacattttcgcatatttcagtacttgaattaacttatcacttaggataacgacaatctgtacctggtcatggagtacatgcccggcggagaccttctcagcttgatgtcacgccacggccctttcgatgaggacttggctcgtttctatctggccgagctcacagtggccctgcacacattgcacgagatgggctatgtgcatcgggatataaagcctgaaaatatactgattgatcgttttggccatattaaactggctgatttcggtaatgccgctgccttggatcgcgatggccatgtgctgagtttgtcgccggtgggaacaccggattacatagctccagagctgctgcaaaccatatccacctacaagctgtccaagtcgatgcacgatgtgagtagaattgtacgatcgcagagtttggtttggaaagttcatagctaaaacaagaactcattttgtaggtcagctgcgattattggtccatgggcattataggatatgagttaatatgcgagacaacaccttttcacgaggacaatgtacacgagacatactccaagattctctcccattgcgaggagagtcaccttaaagagctcatcagctttcccgccgacttgaaggtgtctgttaactatagaaatcttattgagtcactggtcacaaatccttcgaagcgattgtcctatgagcgcattaagaatcaccccttctttagcgaaattccgtggggttccattcgctcgcaggttccaccgattataccaactgttaggtctgacgatgatacctccaatttcgaggacggaattcgtcataagactcgcagagaacagggagttgctaaaaagtcccttacgactaacatgaaatcgaatgatttcagtggcaaggatctgccattcattgggtacagttttgtgcacatggaaaagtcggcaatttccgctaccaccgatgaaaagcttcaggagaagctaaaggaactgctgcagaaactgaagactagagagaacgagatttccatgctgaaacaagatcttctgcgggctcagcaatcgctgaggaagaccgataacaaatctcaggtggtagccgatgctaaaatggaaattaagaagctgcaacagattatcaaggagaaaacaatggagcttaccacttgcaagacgcaaattaagacactccaaagttcggccaaaatagacgaggaaatgtggtccaagaaggaagccactatcaccgatctccttcgccttaatcgacaaaagtacgaagaagccaagatcgcttcggagcaacgatatgagaaacaattggcggacaaaaagcaagagctggcatccacgctgcaaaagttagatgcccgtgagttggagttcaatgccaagttcgaagagtgcaagcatttgtccatgaagttgcaaaactacaaggatatgctgcagcagatcaaggagcagaatctcaagtccgagacaaaccatgaggagcagaggcgccaaatggccgaattgtatgagcaaaagctaacagatctccggaaaaaggttcgcgactcgcaggatacaaaccgccgcatgacaatggagataaaggaaatacgcaccgagctggacgagtccatatcctccagcaagtccacccaagaagcgaagaacgctaccgagcggaatatcgaagaaattctgcggcgtctgaacgaggagatcgcctccaataatgagcttcatgcggaaaaggtcaaactggagacgaagctgcagctgaaggaaaatgaaactcaagaagttagagccgaatgtcatcgacttgagagggaattgcaggtaggtggttattcatctgcattggttaattcaatcactgcaatattgagtaaaaaaaaattatataaaaagaaatcttagcaggctgtgaatgtttgtgtttttattttgtgtcaaacttaaagtcttaatgatttttaatgaagcatatagctttcgattgaatcgatgaatatagaaacctaaagatatgtaatttgtaaatatactttatgaattaatttaaactagcttgccgaatgtcgctgtcagctggctgaatcctcactagccacccaggtttccccctacgaaactgcgcctggatctttgaccgaactgaatgccattgaggatcaacttcgcgccgacttgttagccgccaaagagagtgaaaaccatcagaagggacgcgccgatcaactgcagacgctggttaccaaactggagcaaatgctggagcgcttcaacgagcagagtctttcacccacgaaatcgcactcatcgcgtaagcaagaaggtgaaaccgttggtgatatgctcgagcggcaaaacgagaagctggaggataaattggcagcagtgcgagagcagatgattgtggaacgtcaggcagcgcgtacagcgaatctatcgctctggaaggtggagaaacagctcgaggaagctttgtccgagaagaagttactggcgcgtcgcatggaactcacagaggatcggattaaaaaggtgcagaacgcaagcgatgaagcgcagagaatgctcaagacgtcacaggaggaaactcgccagcgggagtctcgcatcgaggagctgaagcaggaactggcggccgccaaaagggatgtcctcaaggagcaccgccaatgggaaaaggccgagcaggagcgcatgaagtgcaagtcggagataatcgagcacttggccaatgtgcacagattagaacaacaggagacggaattgcgccagaaactcaggcaaatccaatcgcgatttgatggtgtaactttggaacagaagaataccattcgagaactgcaggaggagcgagaaaagagcaggaaagcgaatgactcttgtttggtcttacagaaggagctgaaacaactcaccgataacttccagaggttgaagtacgcttgtagcattaccgacagccagctaactgaggtggagaccatgctaaaatcggagcaggaacgaaataaatcccagaaatctcaacttgatacccttcatgagaaactcagagagcgcaacgatcaattaactgatctacgaaagcaactaactacggtggaatcggaaaagcgtctggcggagcagcgtgctcaagtgttggcatcggaaatcgatgaacttcgtctcaatctcaaggagcagcagaagaagctggtggcgcagcaggatcagttggtggagcagactaacgcactgtttgccacccaagagagagctgaacttttggatgggcaaaatgccaattacgaagcccaaactgcggattcgaatcgcgaaatggttagtttgaaggaggaaaatgctagaattctcagcgagctgttccacaagaaggaggaggttggcaatcttcaggcggagataaggggcttggagtctgcgcaagccaacttgcacgcagagatcgattcccttcaggacactttggccgagaaggagcagttctacgtgcagcgggacattaaatcgaatgccacacttgcgcagcacaaaaagctgattgactaccttcaggtatagctagtttatatatattctttttaagagaatagttaatgagattaaaaacatttttgtatttatattttagctcaaagttgaggacctatccgccaagaagaaaaagacattggcggacaaacttttcggttctagccacacaaacaaggagaacgtgtcacccaatgacgtggaatcttccattctgtatcgcgctctaaaggaggaactgaagcgagaacaaaagatgaacagcttgctgaaggagcagttggctcagttgaatggtgggatttctttagatttcgcttgatgtttgtatctaattgtatatttcctttaggaactgcaaccttgcgctctccacgcaaatctgcagctgttaatggcgactccgatgcacccaaacagagacccgtaagcattgctgccttgccacgttctccacagaagcagcagcagcccctgaagcgcaccaccagccaggtggagctgaagacgacggcggagaaaccgactaaagtaaccattgagaaccaggctcatcaccgtttcgaactggccctgcaggagtccaaggtggatgccgtcaactgtgtagtttgcgaaaaggccgtcgttgccggttcgccgttctggaaatgcaaggagtgcaaagatgttacgcatcgcaagtgtcgctccaatgttcagagccattgcggatccaccaagccgactgcaccgtcagccgatgatcttagcagtattcaatctgtctccagcttgactttggatagcgtagatgttgcgggtggtacaaccagcggtggcgagtacattggatcgctggtctacagttcggatggtgcagaagatcaggcacggaaggagatcgaagtgaactgcgcctttgaagtggccgagcagcaaatactcctattgggctgtaacacgggactgtatgcgtatcacttggactcgcagcgattggtgcacatttctggtctcgaatcggtgagctgcatgtccatttgcaagc

SEQ ID NO: 25862 - DNA, 3881 bp, DROSOPHILA
gctcttcggcttccctcggcgcatttttttcaaagcgaaacggcagaaaaatgctctggcattttacggatttctaattgtattatttatgtgagaaaattgcaaataaaagtgagtccatcatgccacccaagatggagccgattagcgtgcgcaccgcgcgtctgaacaacctgattctgggcaaaggagctggcgtctgtgcgaagcccgctggaagcgcctccggatcaggtattcccgcctccaccaggagaagcattgtacccgtgagcaccactagcgccgccgtggccgaggccatctgccgcgagggactcctggacgccttctgtctgctgtacaacgagtgcgacaaggatacgctgaagaagcgcgatcgcaacatcgccgagtttgtcaacaaatttcgtcccatcatagaggagacccgcaaactcagggtcaacgcagatgacttcctcatcaagacgcttattggccaaggatactttggcaacgttcacctggtggtggagcggcaaaccaacgacatatacgccatgaagaagatcaaaaagtcggtggtgacgacgtcacaagtcaaggaggagcgcgatatcatgtccattcgcaactctgaatggctaatcaatctgcagtatgcctttcaggataacgacaatctgtacctggtcatggagtacatgcccggcggagaccttctcagcttgatgtcacgccacggccctttcgatgaggacttggctcgtttctatctggccgagctcacagtggccctgcacacattgcacgagatgggctatgtgcatcgggatataaagcctgaaaatatactgattgatcgttttggccatattaaactggctgatttcggtaatgccgctgccttggatcgcgatggccatgtgctgagtttgtcgccggtgggaacaccggattacatagctccagagctgctgcaaaccatatccacctacaagctgtccaagtcgatgcacgatgtcagctgcgattattggtccatgggcattataggatatgagttaatatgcgagacaacaccttttcacgaggacaatgtacacgagacatactccaagattctctcccattgcgaggagagtcaccttaaagagctcatcagctttcccgccgacttgaaggtgtctgttaactatagaaatcttattgagtcactggtcacaaatccttcgaagcgattgtcctatgagcgcattaagaatcaccccttctttagcgaaattccgtggggttccattcgctcgcaggttccaccgattataccaactgttaggtctgacgatgatacctccaatttcgaggacggaattcgtcataagactcgcagagaacagggagttgctaaaaagtcccttacgactaacatgaaatcgaatgatttcagtggcaaggatctgccattcattgggtacagttttgtgcacatggaaaagtcggcaatttccgctaccaccgatgaaaagcttcaggagaagctaaaggaactgctgcagaaactgaagactagagagaacgagatttccatgctgaaacaagatcttctgcgggctcagcaatcgctgaggaagaccgataacaaatctcaggtggtagccgatgctaaaatggaaattaagaagctgcaacagattatcaaggagaaaacaatggagcttaccacttgcaagacgcaaattaagacactccaaagttcggccaaaatagacgaggaaatgtggtccaagaaggaagccactatcaccgatctccttcgccttaatcgacaaaagtacgaagaagccaagatcgcttcggagcaacgatatgagaaacaattggcggacaaaaagcaagagctggcatccacgctgcaaaagttagatgcccgtgagttggagttcaatgccaagttcgaagagtgcaagcatttgtccatgaagttgcaaaactacaaggatatgctgcagcagatcaaggagcagaatctcaagtccgagacaaaccatgaggagcagaggcgccaaatggccgaattgtatgagcaaaagctaacagatctccggaaaaaggttcgcgactcgcaggatacaaaccgccgcatgacaatggagataaaggaaatacgcaccgagctggacgagtccatatcctccagcaagtccacccaagaagcgaagaacgctaccgagcggaatatcgaagaaattctgcggcgtctgaacgaggagatcgcctccaataatgagcttcatgcggaaaaggtcaaactggagacgaagctgcagctgaaggaaaatgaaactcaagaagttagagccgaatgtcatcgacttgagagggaattgcagcttgccgaatgtcgctgtcagctggctgaatcctcactagccacccaggtttccccctacgaaactgcgcctggatctttgaccgaactgaatgccattgaggatcaacttcgcgccgacttgttagccgccaaagagagtgaaaaccatcagaagggacgcgccgatcaactgcagacgctggttaccaaactggagcaaatgctggagcgcttcaacgagcagagtctttcacccacgaaatcgcactcatcgcgtaagcaagaaggtgaaaccgttggtgatatgctcgagcggcaaaacgagaagctggaggataaattggcagcagtgcgagagcagatgattgtggaacgtcaggcagcgcgtacagcgaatctatcgctctggaaggtggagaaacagctcgaggaagctttgtccgagaagaagttactggcgcgtcgcatggaactcacagaggatcggattaaaaaggtgcagaacgcaagcgatgaagcgcagagaatgctcaagacgtcacaggaggaaactcgccagcgggagtctcgcatcgaggagctgaagcaggaactggcggccgccaaaagggatgtcctcaaggagcaccgccaatgggaaaaggccgagcaggagcgcatgaagtgcaagtcggagataatcgagcacttggccaatgtgcacagattagaacaacaggagacggaattgcgccagaaactcaggcaaatccaatcgcgatttgatggtgtaactttggaacagaagaataccattcgagaactgcaggaggagcgagaaaagagcaggaaagcgaatgactcttgtttggtcttacagaaggagctgaaacaactcaccgataacttccagaggttgaagtacgcttgtagcattaccgacagccagctaactgaggtggagaccatgctaaaatcggagcaggaacgaaataaatcccagaaatctcaacttgatacccttcatgagaaactcagagagcgcaacgatcaattaactgatctacgaaagcaactaactacggtggaatcggaaaagcgtctggcggagcagcgtgctcaagtgttggcatcggaaatcgatgaacttcgtctcaatctcaaggagcagcagaagaagctggtggcgcagcaggatcagttggtggagcagactaacgcactgtttgccacccaagagagagctgaacttttggatgggcaaaatgccaattacgaagcccaaactgcggattcgaatcgcgaaatggttagtttgaaggaggaaaatgctagaattctcagcgagctgttccacaagaaggaggaggttggcaatcttcaggcggagataaggggcttggagtctgcgcaagccaacttgcacgcagagatcgattcccttcaggacactttggccgagaaggagcagttctacgtgcagcgggacattaaatcgaatgccacacttgcgcagcacaaaaagctgattgactaccttcaggtatag

SEQ ID NO: 25863 - protein, 1252 aa, DROSOPHILA
MPPKMEPISVRTARLNNLILGKGAGVCAKPAGSASGSGIPASTRRSIVPVSTTSAAVAEAICREGLLDAFCLLYNECDKDTLKKRDRNIAEFVNKFRPIIEETRKLRVNADDFLIKTLIGQGYFGNVHLVVERQTNDIYAMKKIKKSVVTTSQVKEERDIMSIRNSEWLINLQYAFQDNDNLYLVMEYMPGGDLLSLMSRHGPFDEDLARFYLAELTVALHTLHEMGYVHRDIKPENILIDRFGHIKLADFGNAAALDRDGHVLSLSPVGTPDYIAPELLQTISTYKLSKSMHDVSCDYWSMGIIGYELICETTPFHEDNVHETYSKILSHCEESHLKELISFPADLKVSVNYRNLIESLVTNPSKRLSYERIKNHPFFSEIPWGSIRSQVPPIIPTVRSDDDTSNFEDGIRHKTRREQGVAKKSLTTNMKSNDFSGKDLPFIGYSFVHMEKSAISATTDEKLQEKLKELLQKLKTRENEISMLKQDLLRAQQSLRKTDNKSQVVADAKMEIKKLQQIIKEKTMELTTCKTQIKTLQSSAKIDEEMWSKKEATITDLLRLNRQKYEEAKIASEQRYEKQLADKKQELASTLQKLDARELEFNAKFEECKHLSMKLQNYKDMLQQIKEQNLKSETNHEEQRRQMAELYEQKLTDLRKKVRDSQDTNRRMTMEIKEIRTELDESISSSKSTQEAKNATERNIEEILRRLNEEIASNNELHAEKVKLETKLQLKENETQEVRAECHRLERELQLAECRCQLAESSLATQVSPYETAPGSLTELNAIEDQLRADLLAAKESENHQKGRADQLQTLVTKLEQMLERFNEQSLSPTKSHSSRKQEGETVGDMLERQNEKLEDKLAAVREQMIVERQAARTANLSLWKVEKQLEEALSEKKLLARRMELTEDRIKKVQNASDEAQRMLKTSQEETRQRESRIEELKQELAAAKRDVLKEHRQWEKAEQERMKCKSEIIEHLANVHRLEQQETELRQKLRQIQSRFDGVTLEQKNTIRELQEEREKSRKANDSCLVLQKELKQLTDNFQRLKYACSITDSQLTEVETMLKSEQERNKSQKSQLDTLHEKLRERNDQLTDLRKQLTTVESEKRLAEQRAQVLASEIDELRLNLKEQQKKLVAQQDQLVEQTNALFATQERAELLDGQNANYEAQTADSNREMVSLKEENARILSELFHKKEEVGNLQAEIRGLESAQANLHAEIDSLQDTLAEKEQFYVQRDIKSNATLAQHKKLIDYLQV

SEQ ID NO: 25864 - DNA, 9431 bp, DROSOPHILA
gtcttgcacttgttttgcatgatttaacgccttcgttaatgaaacacataattaatgaatttgtaaaaatatgttttaaattgaaatgaaatcataattaagcgaaacaaaattaatattattataaacaagagagaatgtcatagtcgagtttcccgactatcaaataccagttactcagctagtgtgaatgcgaacgcgaaatttcattatttttctgggatatcgatagatattggggaaaaatataagaaaaatttttaaaattgttcaaaagtgcgagctcaaccattttggctgctttagggcgtttaagtgggcgtcgaaaaaagttttatggcaaatcgattaaaatttaatcaactaataaaattatgaaaaaatattcaacaatttttcaaaaatgtgaacgtggcagttttaagtagtttgtgggcgttagagtgggcgtagcaaagagttttttgagaaatcgacaagactaataaaactattgaaaaatatcgaaaagtttttcaaaaatatgggcgtggcagtttttgggcggttctagggcgttagaacgggcgtgggaaacatttttcttggaaatcgatagacgtttacaagactaaaaaaaatttttaaaatatcaacacatttatcaaaagtgtgggcgtggaagttttattcggtttgtgggcgctagagtggacgtgggtcaaaaaacatgtgctgcgtctttgtctctagcacctgtatgctgaatctcttctagcttttatagttcctgagatttcgtcgttcatacggacagacggacagatcgactcggctactgatcctgatcaagaatatacaatatatactttattttactgtatgagtaacgggtataaatttatggattttttgttctgaagcgctggatttcagagcactgtaaagtggtacatgcattttgaaagcatagtcgtgtaagtcatttgggcttaaaatgcattagtctagttgttagcttttagactccttgctgatatatgttgactatgattgggagatgattaagtacgacaaaatgacagaaaaataatgtttgcttgggcactaagtagcgggataacggccacagaggactgggccaggggcggtcttcaatgaactgacaacgcaccttgcgaattgctcccggagtagtttgtgttgtggtttgatcgtcgtgcgaaatggtgcgtaatatgggcggaccctcgtactccccgtcactgtctagcgaactggagcgcgtctcaattccttgcctttaaaattaaaatacaaaatattagggtcaataatttgattagattttatcagaaacttaagctcactgaaggaagaaatcgatgttgacgtagttagaggtcctgcctggagattcgggatccgctacattaggcaaaggcaaaatgctgctcccaggcgtcgacaaatcatcgcgactggatgaggatccggtgcggccgggcttaataaaaacgtattctccgtcgccgttgtcgagcggtacgctatcatagtacggttcacactccgctaaagctccgcccgctgccgccgactgttgggaagccaccgcctttgcactttccgaacttagcgaagacacgctttcgtagctcttgatctgcttggaataaaaaccggcttccgttagattacttataaaaagagaactcaattcccgtacaaagtgtaaatttgtgggggagtgacctaattaaaaaacgatatttcctcaaacctaattaagaaagtctgagcttaccacctccgatatgccttgtgatgtcagcgactccttggaccctacactacgctggttggcacccgattcccgcgattccgttccaatgtccgcatcgacagcctgcaggcacgatctcctctctagactgctagtggagctgctgtccgccattgccagttttccggttttacttagactaccagttggcgaggcaccaactccggttcgtccaggagtcaacgatcgcccaggcgtggaggaagtgcgtcctaggctaccacagccagaaggcgacgagtcgttcctcctcgtttgttccaggctgtctgccttgcttaccatcttacgaccgagctcctccattaattcaggattgtttacgttcacaaatttactaagctccggtgtggttttccgttttgccgagtacttggaatccaaattatcagatgatttctgacgtagtatatcagacggcttgatgttccgctccagcgaattgcccaggctgtcaatgcagagactgccgcttgaactgcttggcatcgtgttgatcatatatgtctcccttttgggcgaagacgatagctgctggctgggaatggtagggggctcaactcgccgaatattctttggcggaggtctgagaaaagaagaataagaggcataagtaggattgagtattcctagtataataggaactaggccttaacttaatgtttgtccttgcgtgatatgcttaatttactactttttctcacctgggtggcattttcttcttggcctctacgtgggcagcgtacgatgtgagcgatggcgaaagcggtggagcggtggcctccgaatatcgagaaaatgtggatggtggagtgggttgctgctgcggttcaccgatccccgatgacgaggtagttccatcagcgctttctttgtctttggcctctttgacctgaatgacagtaacgtattgtgacgtcgacttgcgcagcggtttatcgatatcgacatcgttttctagacgccctcctgccacgttatccggctgggcttttaaagacgccgccaattccgtgatgcactgctgcagggccccatcggtgtcctcactattactatccttgcatttgtcttcttcccgctttaaatacagctcccctgttcgtttgccgtccgccgtgatctgagtggagtgaagtggaccgctcaccttttccgatccgatcccacctataacggcatttgtgtgtgttgtgtatttgttgtctgggttgagcgacaggcgatccttgtccttggcgccagtggaagaaggagactcgcgcagatttaaactagatttctgtgaataaatataagaggaagtgaccaagtcagtgaatgaatatagtaatctttgaaacaatcataaacgatcttaactaactcgttgaggagaagtaaacctctttgaatttgcatcttagaaaatatagatacagaatgacttaggaaataagctaggcggtggtttgatatttacaaaataattaaatgcatttattaataaattggggaaagtgttctttaagtttaaaaaacgttcaatattatacaaaaggagccggtatggaaattcgaatacatacataaaaacattacgtatggattttttactatgcggaaattgacaataggctaagatatacttgtttcctctaaaggtagatgtttaataattaatattcgatacaatttcggccagtttcctctgtctgggtgtaatatagtggtaaataaatataaaattcccacaagagtacaaactcctctggaactacattattttatccgttacatgtagagtaagaattaatactaaaatttttttgaaaagtgtgtaacaggtatttcggaccacagcacgcctattgactgagtaaaagtggattgttagtcaagaaatttgactatagcgttctttctttgtctggataattttggtgttattttttattgagactccaagagcacaaagcatttaatttcgtttaattttattgcaagtcgagcctttctctatattaaatatgcaaacgccaacaaacttggttgaatctcaaacgccgttgcgtgcgttgaatctgccacattgttttttcctcattatttagatttaaaaattacacgggtgagcagcagaaacaaacctataaccaaacaataaaaataaataaatgagaaagcaccagccatacaaggcgcttattaccaagaagtgaaaaatgtccaaccaaaaattgtttgcttatcgaggtggatatccatatccaagtgggtggttggttaaatgagagcggagaaatgaagaaagcgtgcaatttaaagcccaaaaaggtcgacagctagagctgtagagaaaattggaagctccgtttttttggtggtatttcttaattctttggtttcaagatagtatatacacttatagataaaagagacctaacgatataggcacggattctacgtgtatgcgcgtagttatatagaattttgcgataagtattttattgatttcaacttgtcataatacagctaaaattgttgtagcttatgtagcgttttccatttttaagttcgttatgttgtatatataatatctgcagtagagatctcgttctcaacaaattactcttacgcacccctctggaccataatttaaacttctccttaaaggaagccatgcttaaaattcagcgccactttgttgagctatttttcctttgatatggtataaaaattgattgaattgaatgggaaattaggggttaacaaagacgaagtgtctatgactgggagataggttttgattcaagcgaaaacacgttaacaaacacttgcgcggaaatgaaaaaaaagctcggtacttagctcttgaacgtacaaaaaattttaatagtttacgtaatgccttgttattgtagcttttatgttttttcaaattaggctattaaacaggcggttatccgtaacacatatataaatggaactttttaactatatttacagatatttttaaattttatgtatattatttatgtatgaatgacgcgtattcgtatacgtccattcgtccgtcccgtcactgttattcacccaaaactatactgacgacaatatatgcgacgccagcagcaacgctagaaacctaaagaaaataaaactcacacacgcccgacaatcccgccttctgtataaaaaaaactgctggtgtgggtagataagggtcaccatttgagatattaaaacgagtgctaaaagtggtagagctcatggacaacgcacacgtaagcgcaattttttaactaaataaatcaaatactgtaccttgctcaattaaatgtttaataagtgttctgacttaaactcagctaaagtttgagtccttttaaaattaaaaaaagctacattgacagtcacgttattataaaaaaaaacaagagataatgctatagtcgatttcccctactaacagatacccgttatcatttttctggttatcgataaatattggtgaataaaatgagaaaactattttaaaactgttcaaaagtgtaggaaaggcagttttgggcggtttcgagcgttaaaatgagcatggcaaacagtgctttagcaaatcgatagaaatttacaagactataaatatcacaacatttttgctgtggctatgtttttagaatctgtatgattaatctcaacgttctagcttttataattcctgagatcgagacgttcggacggacagacgaacagggtcagaccgactcggctattgatcctgatcaaaaatatatatactttatatggttggaaacgcttcctcggacctcttactctaccacttttactttacgagtaaagggtataaaaataccttaccaaagctgaacgcctagtaagaaaatatctacgtaggaatgaaacgcaccagtagattgtgcaagggtaactagtatatatatacactatagtcaagttcctcgactatcagttagtgaactagtggggtcgaaaagttaaaattacatttcttttaataattcaataaaaaaaagataaaatgatttttagaaattaagcgagtgcctgctttttgcagcttgtcggtgatatagaaagaaaatgccaacatgttattgaatgattgtaagaaattagaaaaatatatgatgaaatacaaaataagcaaaagagagagatattgttgagttcctcgattagcaaatatctgttcttcgatctgatctttctgttacatactccttttactgtacgagtagcgggtataaaaataataatctgctgttcttgtctgataaaaataggtgatacaccaatcggaacttaccacagaactaaaagagtgcacaccaatccaactttaaatatcttaatttcccacgccaattgtttttaatcccctgaagctagagacttgtgtatgtcgctgacaatccattttgcacgctttacactctttttttgtctaaatattgaatattcaaaatattcattaacttacaaaggaataataatacttgatggcaaaaatggataacagaacgattacttgttgaattggtagacactagcttctgacttcgttaaaaagtattttgtttcattaaacaggtatttagataattattttgtttctaaataagttttaattgatatatatatacttacaaaatctttgtccagattagtgttgctttcttcttgtgtagctccattggtggtgctgctgcagttgctgttattgctgctagcacaactaccgctagcagcctcaaagagtgcctttggatccccgccagaaacgcgataccgttccacgtcggacagcagacgctctagatactccacatagagcgtctcctgctcaagctccttgcttagctcattaatgcgcactttgtgtcgctcgagactagcccgaacatcttgttcccatgcatcggatagagagctttgcggaaatcgctgcatccacagacgctggaagtcatcgaaaacgctcatgttggtgcaagctccttcttcgggtgcttgcttttatattaaccgttttccttattaattgaaaaatgctgatgattattattcaagatgatgacgcggagaggccgttgttgccttttatataagaacaagcaccagctgtgcgttgtcgcctttttcccctgcaagaaattgtgtatgttaagtaaaagtgtccgtatttgaattttcagttaaacttttaaaaatcgtttcaaataagcagttacatacaaccacagaatgagtatcataaagagtgcctttgaggggcatttgtgaaaactgttggcagtcctagattctatagcacttaccaataatgaaaatgtcatgaaaaccgtgtatcaagcacgccatattgatttaagcattaaacaatcatcgaaaaatcgttagaataagtttatttcttgggcttttatataaatatttaaagtattttataaaccaaaagttatgtgtaatacccgtttaaagaggcaaaaagaatttaagttcatactcgaaatctagttttggtctttgcttggtgttacaaaacttaattattcgaggcatacaccgttagcacataatatttaaatatttttagatcattacaatactaacagtaaaagatatatattttgattttatcaagacgtatttaacatgggaaggacagataaatatattcttagcggtttaaaaatatatatattaaaatgcccagaaaaggtaaacattaagatttccaatggttttccagtggtttaaaaattttataagtttgcacttgcacttggttcggttttttttttttttttgtattattttgtcttttttgttgttgttgtccagttgcaggtgcgacagtagcactgttgcctttagaacccttgacaatcctatcgtgtttcgctcccttgtacttgttttaatttttatcccttgtgccaaaatagttttttccttgatacctatacaaatagtttacgagtgcagtcacatgagtttgcgagatactctcggtttttgttatttatcaaaattacaacaaaagcgtagcacaagcatatagtgcacagacgcacaaaaaaaatgattcctttgatcaatgttatttttcttttgtggtttatatttaccctacaccttattacacttgtcttcttttgtcttttctctttttagaaacaaaatcagtgggcgttgcagcagcaaaaaattcaatttatacacgttccacttaaaaatagttgtggtttattacacgcaaagatgtatttttgtgttttattccgtttaatatacaattaaattccgctcagaacaaatttggatacacaactttatttaatttacttcaaagcgaacacacaaatacatttgcatatgtacagcataagcggttttgacattggtgtgcgtaaaactcggctttgcttttcctttggaatttcttgttttcctaatcaccacttacgtttcattttcgaacacgggttttattcaccattcctacaatttattttcacattgaatggactttaacaattagacaaaacagaaatattttcgcagatttccagcgaagccgattttacaaaaaaaaaatatcgtttatcgattgcatgtggacgttagaggtggactagccactatcgccagtatcgatgtgtgctcgaaaaaatactaaaacaccaaaaatttataacttaaatggaaaaaaaatgttctctaataaccatttgttaattttaggcttagtatgcttttgcttgaataccaattaataatcggctctttatagcattaaaatactaaaacaccaaaaatttataacttaaatggaaaaaaatgttctctaataaccatttgttaattttaggcttagtatgcttttgcttgaataccaattaataatcggctctttatagcattaatattaattaaagttgccagaattctattacttgtttttaggtaaataatttaagaagtaaaactaattatgtgtcattaaacattctaaatacaaggttaaagtccagcagacattccattcaggttttacccttacgctttcctattttcagcctaaaaaacgttttagatcgaccttaagtcggcttatcaccagctgccagataaaataatacgttatacaattaagtcgctacttctgattttacttctttagttcttgccggcctcttagtcagacaaaactttctatttctgacgcttcacagttttggatatggactctaacggcttacattaaggcgatggactcttgtcttatctccaattaaaaaccagataacgggatggatatataaagcgccctataccgcgcaatttccatttaattagttctcttcttggtattcttatagtttttaggttgttcaatttaagttcgtagtttaaggatacacacaataaatgtcgtaagttcctaatggtatgaattaaaaaagctgtaaataattattaagtttactgcgagaggatgaacatatagagtgcatattcctttgacttaattcttttgccaaaacaaatcttattattcaaaggtatctatgatata

SEQ ID NO: 25865 - DNA, 2389 bp, DROSOPHILA
ggcttcgctggaaatctgcgaaaatatttctgttttgtctaattgttaaagtccattcaatgtgaaaataaattgtaggaatggtgaataaaacccgtgttcgaaaatgaaacgggaaaaaggcgacaacgcacagctggtgcttgttcttatataaaaggcaacaacggcctctccgcgtcatcatcttgaataataatcatcagcatttttcaattaataaggaaaacggttaatataaaagcaagcacccgaagaaggagcttgcaccaacatgagcgttttcgatgacttccagcgtctgtggatgcagcgatttccgcaaagctctctatccgatgcatgggaacaagatgttcgggctagtctcgagcgacacaaagtgcgcattaatgagctaagcaaggagcttgagcaggagacgctctatgtggagtatctagagcgtctgctgtccgacgtggaacggtatcgcgtttctggcggggatccaaaggcactctttgaggctgctagcggtagttgtgctagcagcaataacagcaactgcagcagcaccaccaatggagctacacaagaagaaagcaacactaatctggacaaagattttaaatctagtttaaatctgcgcgagtctccttcttccactggcgccaaggacaaggatcgcctgtcgctcaacccagacaacaaatacacaacacacacaaatgccgttataggtgggatcggatcggaaaaggtgagcggtccacttcactccactcagatcacggcggacggcaaacgaacaggggagctgtatttaaagcgggaagaagacaaatgcaaggatagtaatagtgaggacaccgatggggccctgcagcagtgcatcacggaattggcggcgtctttaaaagcccagccggataacgtggcaggagggcgtctagaaaacgatgtcgatatcgataaaccgctgcgcaagtcgacgtcacaatacgttactgtcattcaggtcaaagaggccaaagacaaagaaagcgctgatggaactacctcgtcatcggggatcggtgaaccgcagcagcaacccactccaccatccacattttctcgatattcggaggccaccgctccaccgctttcgccatcgctcacatcgtacgctgcccacgtagaggccaagaagaaaatgccacccagacctccgccaaagaatattcggcgagttgagccccctaccattcccagccagcagctatcgtcttcgcccaaaagggagacatatatgatcaacacgatgccaagcagttcaagcggcagtctctgcattgacagcctgggcaattcgctggagcggaacatcaagccgtctgatatactacgtcagaaatcatctgataatttggattccaagtactcggcaaaacggaaaaccacaccggagcttagtaaatttgtgaacgtaaacaatcctgaattaatggaggagctcggtcgtaagatggtaagcaaggcagacagcctggaacaaacgaggaggaacgactcgtcgccttctggctgtggtagcctaggacgcacttcctccacgcctgggcgatcgttgactcctggacgaaccggagttggtgcctcgccaactggtagtctaagtaaaaccggaaaactggcaatggcggacagcagctccactagcagtctagagaggagatcgtgcctgcaggctgtcgatgcggacattggaacggaatcgcgggaatcgggtgccaaccagcgtagtgtagggtccaaggagtcgctgacatcacaaggcatatcggaggtgatcaagagctacgaaagcgtgtcttcgctaagttcggaaagtgcaaaggcggtggcttcccaacagtcggcggcagcgggcggagctttagcggagtgtgaaccgtactatgatagcgtaccgctcgacaacggcgacggagaatacgtttttattaagcccggccgcaccggatcctcatccagtcgcgatgatttgtcgacgcctgggagcagcattttgcctttgcctaatgtagcggatcccgaatctccaggcaggacctctaactacgtcaacatcgatttcttccttcagcaaggaattgagacgcgctccagttcgctagacagtgacggggagtacgagggtccgcccatattacgcaccatttcgcacgacgatcaaaccacaacacaaactactccgggagcaattcgcaaggtgcgttgtcagttcattgaagaccgcccctggcccagtcctctgtggccgttatcccgctacttagtgcccaagcaaacattatttttctgtcattttgtcgtacttaatcatctcccaatcatagtcaacatatatcagcaaggagtctaa

SEQ ID NO: 25866 - protein, 704 aa, DROSOPHILA
MSVFDDFQRLWMQRFPQSSLSDAWEQDVRASLERHKVRINELSKELEQETLYVEYLERLLSDVERYRVSGGDPKALFEAASGSCASSNNSNCSSTTNGATQEESNTNLDKDFKSSLNLRESPSSTGAKDKDRLSLNPDNKYTTHTNAVIGGIGSEKVSGPLHSTQITADGKRTGELYLKREEDKCKDSNSEDTDGALQQCITELAASLKAQPDNVAGGRLENDVDIDKPLRKSTSQYVTVIQVKEAKDKESADGTTSSSGIGEPQQQPTPPSTFSRYSEATAPPLSPSLTSYAAHVEAKKKMPPRPPPKNIRRVEPPTIPSQQLSSSPKRETYMINTMPSSSSGSLCIDSLGNSLERNIKPSDILRQKSSDNLDSKYSAKRKTTPELSKFVNVNNPELMEELGRKMVSKADSLEQTRRNDSSPSGCGSLGRTSSTPGRSLTPGRTGVGASPTGSLSKTGKLAMADSSSTSSLERRSCLQAVDADIGTESRESGANQRSVGSKESLTSQGISEVIKSYESVSSLSSESAKAVASQQSAAAGGALAECEPYYDSVPLDNGDGEYVFIKPGRTGSSSSRDDLSTPGSSILPLPNVADPESPGRTSNYVNIDFFLQQGIETRSSSLDSDGEYEGPPILRTISHDDQTTTQTTPGAIRKVRCQFIEDRPWPSPLWPLSRYLVPKQTLFFCHFVVLNHLPIIVNIYQQGV

SEQ ID NO: 25867 - DNA, 2890 bp, DROSOPHILA
gtaaaaaagcgtagcaaactagttgggcaacggaaaaggatgtggctgctgcgatggcgatggcgatggccaatggcaattggaattgcaaggacaacgccaacggctgctgctaggcactgctatgccacgaaatcgagcggccggttgaagccacccttgcgattcatgtactggcggtactttcgcttgaggattacatgcacttctccgacatcgttgccctcgaccttcctgttcttggtggtgtcgaacgtgcagaatcccattgtcttcagcatctcgacctcttccggcgatttaccctccaggtccgcctcgttgatcttgggccggtcggcagctgtggccgccgcattgttcctcgtcgtccttcgcgacgtcgatggtccggagctgctgttgccgccgctgcttccgccgccgcctcctcctcctcctcctccggcgaccctcgaccgcgatctgcaaattatgaatgtgtgtgcatagtgagtggtgagtgttctatagatttcgtttgagtgacaggaccgaccagttgattgcattcgaattgcaacgagcctgggaaataactggggcgaccttgggcgttgtgcacccgattgtgcaatatgaagttttaattacgcgaaatgcgacacttctcaaccggtcggttggcttcattaaagaccatatttacgtctcgattttggcaatcatctgaagacccaaaataaccggcttgtatatgcatatgctagagaatttcattctaagatttaaaatcaagctcaagatccctctaaaatccattctgaatccatttatatacctaacagacaatattcctctattcctctagcttatatctcaaaaacttccattggaaaatagctaattgatgcttgcagctcccagactttgttttagtttcgtgttttgtatttcttaaatgaaatgtagaagataacagataatccttatatcaagtagaaagtggggaaagtttcgcttaggacatgtcctcgatgagggccgcacgcagcttggtcgtcactgtggcgggctgtgcctggttaagcttgaagacgctctcgatcacggagatctctgtggccgtggtgttcatgcccacgaaggagagccagtcgttgacgaccatgccggcggcgagtacttcgctgccccggttcactgttccggccacgaggggaacctgcagcagggacgacagttcgtcctggtcctgaatgctcgtcttgggatgcaccatgccgccctggttgctcagcacggcgtaagagcccaccagtgagttgtcggcaatggtctggcggaagacctctactttgagcacgtccgcgatgatctcctcggtctccttgtccagatccgggtgcaccagggccacataatcattgcaggcgataacgttgcccagcgcggacaggcgctcctccacacgataaatcttcacggcgtctggcaggctgttacgcaggtgttgcagctcctcgtcggtggtggagttgggcaccagcaggccgttgcggttgcccacggtgaggcggccgatgatccggcagccgcccacattcgcatgcaccaccgggatggtgtcgcccagctccgcctcgaaggcgctgtagaaggtctcggatccaccgatggccaccaggcagtatgtgttggttagtttagtgaagacgccgatgtcgtcgttgttctcgaattggacgcgtagagccattttctctgtatttacgtggatcctcttttcctgctggttactctcttttcggatttactggcctgactgagcctgctgccggatgagttctggattctgtttatatgtccggaaatcaatttaaatgtcgtgatgaaattcgcacaatttcgcttcacgtggtaatttttttttgatgttgggacgccagagctgcatagccatcgattggctgcctatcgaagtgtgggtctatcgatactcgtgggtaaataaacaagttctgaacggcgatttcgggggtttgaggggtcaattgtcccctgtgttggaatgtgttcctaaatctacacaaacactccctaagcttatcctaaacttataaatattggttgctatttaaaccccatttcacggttatccagcacgcccctgaactgtgacccacatccccgattttagtgactagttttatacttatcgtggttggcatttggtacactacactttcttattcacctagatcgccgactccgcgcacggtcgcgctcccgttcccgctcccgatctcggctgcgactgcggtcgcgatcccgttcccggtcgcggcgaccggcgcctccagatccggatcctccggctggcgctactccgatggcctcccgctcccgggaacggcgctccctgcgcttcttccgctcggatcgctccttctcgcgtctcctgtgcgccggcgaggcgggacttcggctgcggcccatggctccgtttcggtctctgcttgtgtggcggtttgagtgattgatgatggtttgcctgcagtggatttgagcggatgttagactccatgtactccaattgcaccgcacgcatcccgcttaccgttgcactaggctgtgtctagcattatttgggcgacaccggcggtgggtaaaaacgcgctaacttaaaactaaaaccaaataaacaacgcgcgttatctcgccgcgacgccgaaacggaatgaggaatgcagaatgcggatgatgatgcgagggatgcgatgcaagggcaaaacatggccacctatcggatatcgattgatggtcgattttatcttcgataaaaatgtatcctatgtatatcgcataccgaatgtttaaatcgatctgtttccttttgaatatgaactat

SEQ ID NO: 25868 - DNA, 890 bp, DROSOPHILA
cgaaattgtgcgaatttcatcacgacatttaaattgatttccggacatataaacagaatccagaactcatccggcagcaggctcagtcaggccagtaaatccgaaaagagagtaaccagcaggaaaagaggatccacgtaaatacagagaaaatggctctacgcgtccaattcgagaacaacgacgacatcggcgtcttcactaaactaaccaacacatactgcctggtggccatcggtggatccgagaccttctacagcgccttcgaggcggagctgggcgacaccatcccggtggtgcatgcgaatgtgggcggctgccggatcatcggccgcctcaccgtgggcaaccgcaacggcctgctggtgcccaactccaccaccgacgaggagctgcaacacctgcgtaacagcctgccagacgccgtgaagatttatcgtgtggaggagcgcctgtccgcgctgggcaacgttatcgcctgcaatgattatgtggccctggtgcacccggatctggacaaggagaccgaggagatcatcgcggacgtgctcaaagtagaggtcttccgccagaccattgccgacaactcactggtgggctcttacgccgtgctgagcaaccagggcggcatggtgcatcccaagacgagcattcaggaccaggacgaactgtcgtccctgctgcaggttcccctcgtggccggaacagtgaaccggggcagcgaagtactcgccgccggcatggtcgtcaacgactggctctccttcgtgggcatgaacaccacggccacagagatctccgtgatcgagagcgtcttcaagcttaaccaggcacagcccgccacagtgacgaccaagctgcgtgcggccctcatcgaggacatgtcctaa

SEQ ID NO: 25869 - protein, 245 aa, DROSOPHILA
MALRVQFENNDDIGVFTKLTNTYCLVAIGGSETFYSAFEAELGDTIPVVHANVGGCRIIGRLTVGNRNGLLVPNSTTDEELQHLRNSLPDAVKIYRVEERLSALGNVIACNDYVALVHPDLDKETEEIIADVLKVEVFRQTIADNSLVGSYAVLSNQGGMVHPKTSIQDQDELSSLLQVPLVAGTVNRGSEVLAAGMVVNDWLSFVGMNTTATEISVIESVFKLNQAQPATVTTKLRAALIEDMS

SEQ ID NO: 25870 - DNA, 4142 bp, DROSOPHILA
tcgagtgtgaaccgcaaggcgcccaccagttacaccaaagttgtggtcaaggacatgactcgggccgagatgatcatcaaggtggtgatgacgccggtacagccgccggcgcacttcactcagcaagtgcttaagctgctgccagacattaccattgcggagtaccaaaagattctggatatgaaggcggtcaaacgtgtggatcaactgcaactgattgatcttttcaagcacacggcatctgcagcggctgtgagtggcttaatagagccaactactggagaggaggagacccaaggtgcagaaacagtagtcgcaacttcggggaccacagacgatgctgaaacctcagcagtaccaactgaaacaacaacggcaacttcctcaacccccaaacgagcctttatcttcagcgtgggcagctttacgggaagcgcagataaaaatgccgatggaagttcccagacgggcatcagaaagctggaaaacctactgaaaaagcgcttcccctagttaatatacggctacatcttgagaaatcattccactaagttagctttagtttgacaatatcggttaatgattagttgcttaatttattaggtctatccggtttatatggttggtatgttttaagacagctatggaacattcgattttgtattattcgcaatccatccgcctattttaaatattttttattaaatgtctggcttctgttaaacaaaatggaaaacgtttgtttttgtttgctatggaaagcacctggtatttattgcaaagataaagtaaatacgtacatacatgaatttgtaaaatttgtttcgtaaagggtatattttagttataacagtcgattacagcgtttgatatcgataagcgctcgataacaatacgctgaaaacagggttgcccgttgttgatagccctgaaaattgtaaacaaacgactaggtaagccacaaaaatcattttaaccaacgttttatacgattaaatgattccagggcgatggagaacgtgtgtcagtgctgcaaggtacgaccgggcttgtcggtcaaacgcggtggctcgcttccgaaaaccctttgcctgcagtgcctgcatatggacacatttggcaccaagcataagggaccaaggcccgaaacccaaattaacgacaaggttcacttagaaatgtccataaacggcgaagacggcctgccggagcatcctttatatccagaagtgcaactggtagttaaggaggaggacgctctaattaagaagaaggttatcgaggaaaaccacatacataatgaggagatcataggagcgagcaacatagtagacgtagaggttcatgagaatcatcgcgcaaataacgacgtgatcctcatacaggattccttcgctgaggaggtaattcttgaggatcatcccgcaaataacgacgtgatcatcatacaggattccgtcgctgaggaggagctccccgtaattaaggaggaggctattgaaggggaggacttgcagggagaatactttataataacagaatgtctggaagagccagcaatcggaagctgtcgcgtttgcttggaacagtctgacaacttaaccaatatatttgatgacgcgcatcagtacggaattccgattgccacgatactctctcagtacacaggaatgccagttgagaaaggcgattcattttctgaatatatctgtgtaacttgtctggatgttgtgaaaaatgcattcgatgatttagagtctaaagaaaatactatccagatgtaccgacaacctaaagaggagatcattgacatagattcaattccagtaaaaaacaagccagttgattatgaagttactgggaagccacctcacagatgccctcagtgcccaaagatattcttactcgccgccaaacttcaagctcacattcggactcataatgaaacgcgtaccaccgagcctccacggctgaaatgtcccatgtgtccaagtatatatatgaaacgcggatgtcttgaagcccatatgtggattcatagggcctctgatgaaagagaatcagagttggagcctccgtacaggtgccctcactgtccaaaactgttcctttactccagctttcttgaaattcacattcagacacatgaggatgtctctcagagactgtctcggaagtcatcgcacaagtgcgcgcagtgtgcagatgtattctcagacgtgtccagccttaaagaccacgtaaaaatccacgcgggggaacgaacgttcaaatgtcccctctgcctgatgtcctttcaagaagaaagtaacctaaagagtcacgattgtgctcacactcgtttcaagtgccacaagtgttccaagtttttcgaaagtcagaattatctagattttcacttcaagaaaagtcacacgacgaaaggtccgttcaagtgcataaagtgccagcaaacttttcaaaaaagaaacggtcttaaagaacacatcagttcgcaggtttgcgtacaatttctccggagtaagtctcctggacaaatattcccttgtcccaaatgcccgaaaaaatttagcatagaagacaattatcaaatgcaccacgccactcacaagaaagtaaagactgttatcgagaggcacaactgtacacagtgcaaaaagtcctatcaaaataaaaaacttcttaccaagcacattttgagtcacaaccggtgtgtccactgctcgatgtcctttacgagcaaatatcttctggagcagcacacttgttcccagagttaccaattaaatgggagcaggggtcgcaaaaatcctaatttgaactacaacgaatgcgaggagtccaacgaaagtgatttggaaccatagcataaatattataatatctatataagaaaacccccacaagcaaataaacagaaccagtttgaatttgtattttgttacttcatttattgtatgtttgacttcttagcttttaaacataaacttatttgactatgttgaaagttggattctcatgtttatgttcgcgttcatggtactaatgacttatgcgttcgcttaggcaactaactacgtgctacaacttaaactaggtttgcggtcgctgcggctgctccgaatttaacactatttacatgcaacttatggtctaagtgattttgagcgtatggtctagtttgaagatcttttgaaagtgatcgcatcgcgcgcaataatacaaatctctaaacaaaagacttaagacacaaacttaggcgtactttaatggatgaattgtatgagctctcaatgtatttctatgcgtaattatgctttggtttaattccagcactgcaaaaacctaaacaaatcgaatatgactatgacgcagtggcccagcggacggcattccaaggccagttagcgcctgccggccaacatcgcccgaagctgccgctgagactgaacaggctagactacgctaggctagaggggatttactcataaatttaaatacacagtatttacacaagtcgagtaaatgtctacggtactaatggtcctccttagacggccactatcttgctgggatccactttcacgcgcagaaacacggtatcgcccttgatgaagggtcggctgtgcagcagttcgtgggagatgaagcgtgggaagccgaatcctagctgatctggttcgttggacggcctctggaagttctcccaggtgggatcggggacgaaggattccgccacgcctccctggccactttgggcgccctgttcgaacagtgtgaaggtgatggagtgcgagaatggccacttgagcagagcatcgtactctcccggcaggacctttatgtagacggagacgtgcgtgttttccccaggtccattgccattgaggaacatcgacgcctgcagcttgtatccatactgggaggtgtagaacgggggtgagactagctccaggccatccttgcccctcgcttcggccatcttagccgaccagtcggtgatcttccacaacagagtgcctgtgtagttgatggacagcttggacaccgccgacttgagcatctggatctgctgaccctggcgcgagctgagggccaccatcagcgagagatgagcggcggcgttgctctccagatgggcc

SEQ ID NO: 25871 - DNA, 2142 bp, DROSOPHILA
ttccagggcgatggagaacgtgtgtcagtgctgcaaggtacgaccgggcttgtcggtcaaacgcggtggctcgcttccgaaaaccctttgcctgcagtgcctgcatatggacacatttggcaccaagcataagggaccaaggcccgaaacccaaattaacgacaaggttcacttagaaatgtccataaacggcgaagacggcctgccggagcatcctttatatccagaagtgcaactggtagttaaggaggaggacgctctaattaagaagaaggttatcgaggaaaaccacatacataatgaggagatcataggagcgagcaacatagtagacgtagaggttcatgagaatcatcgcgcaaataacgacgtgatcctcatacaggattccttcgctgaggaggtaattcttgaggatcatcccgcaaataacgacgtgatcatcatacaggattccgtcgctgaggaggagctccccgtaattaaggaggaggctattgaaggggaggacttgcagggagaatactttataataacagaatgtctggaagagccagcaatcggaagctgtcgcgtttgcttggaacagtctgacaacttaaccaatatatttgatgacgcgcatcagtacggaattccgattgccacgatactctctcagtacacaggaatgccagttgagaaaggcgattcattttctgaatatatctgtgtaacttgtctggatgttgtgaaaaatgcattcgatgatttagagtctaaagaaaatactatccagatgtaccgacaacctaaagaggagatcattgacatagattcaattccagtaaaaaacaagccagttgattatgaagttactgggaagccacctcacagatgccctcagtgcccaaagatattcttactcgccgccaaacttcaagctcacattcggactcataatgaaacgcgtaccaccgagcctccacggctgaaatgtcccatgtgtccaagtatatatatgaaacgcggatgtcttgaagcccatatgtggattcatagggcctctgatgaaagagaatcagagttggagcctccgtacaggtgccctcactgtccaaaactgttcctttactccagctttcttgaaattcacattcagacacatgaggatgtctctcagagactgtctcggaagtcatcgcacaagtgcgcgcagtgtgcagatgtattctcagacgtgtccagccttaaagaccacgtaaaaatccacgcgggggaacgaacgttcaaatgtcccctctgcctgatgtcctttcaagaagaaagtaacctaaagagtcacgattgtgctcacactcgtttcaagtgccacaagtgttccaagtttttcgaaagtcagaattatctagattttcacttcaagaaaagtcacacgacgaaaggtccgttcaagtgcataaagtgccagcaaacttttcaaaaaagaaacggtcttaaagaacacatcagttcgcaggtttgcgtacaatttctccggagtaagtctcctggacaaatattcccttgtcccaaatgcccgaaaaaatttagcatagaagacaattatcaaatgcaccacgccactcacaagaaagtaaagactgttatcgagaggcacaactgtacacagtgcaaaaagtcctatcaaaataaaaaacttcttaccaagcacattttgagtcacaaccggtgtgtccactgctcgatgtcctttacgagcaaatatcttctggagcagcacacttgttcccagagttaccaattaaatgggagcaggggtcgcaaaaatcctaatttgaactacaacgaatgcgaggagtccaacgaaagtgatttggaaccatagcataaatattataatatctatataagaaaacccccacaagcaaataaacagaaccagtttgaatttgtattttgttacttcatttattgtatgtttgacttcttagcttttaaacataaacttatttgactatgttgaaagttggattctcatgtttatgttcgcgttcatggtactaatgacttatgcgttcgcttaggcaactaactacgtgctacaacttaaactaggtttgcggtcgctgcggctgctccgaatttaacactatttacatg

SEQ ID NO: 25872 - protein, 618 aa, DROSOPHILA
MENVCQCCKVRPGLSVKRGGSLPKTLCLQCLHMDTFGTKHKGPRPETQINDKVHLEMSINGEDGLPEHPLYPEVQLVVKEEDALIKKKVIEENHIHNEEIIGASNIVDVEVHENHRANNDVILIQDSFAEEVILEDHPANNDVIIIQDSVAEEELPVIKEEAIEGEDLQGEYFIITECLEEPAIGSCRVCLEQSDNLTNIFDDAHQYGIPIATILSQYTGMPVEKGDSFSEYICVTCLDVVKNAFDDLESKENTIQMYRQPKEEIIDIDSIPVKNKPVDYEVTGKPPHRCPQCPKIFLLAAKLQAHIRTHNETRTTEPPRLKCPMCPSIYMKRGCLEAHMWIHRASDERESELEPPYRCPHCPKLFLYSSFLEIHIQTHEDVSQRLSRKSSHKCAQCADVFSDVSSLKDHVKIHAGERTFKCPLCLMSFQEESNLKSHDCAHTRFKCHKCSKFFESQNYLDFHFKKSHTTKGPFKCIKCQQTFQKRNGLKEHISSQVCVQFLRSKSPGQIFPCPKCPKKFSIEDNYQMHHATHKKVKTVIERHNCTQCKKSYQNKKLLTKHILSHNRCVHCSMSFTSKYLLEQHTCSQSYQLNGSRGRKNPNLNYNECEESNESDLEP

SEQ ID NO: 25873 - DNA, 2068 bp, DROSOPHILA
tttatgtgtattttaacagaaaattctaaactggcatctaatctggcaagtgaaagtgattacgacacaagtcttttcattcatgcagcaactgtttctgctagaaaagaatacaagaacgacgttgcctctgttcttaaagaatcttttaaaataccagaacttccaagcgaatcgaggatgcaaattcaatggcaaaaaccaactcctctttcagcaaatgaagctctatcttatctcctagaaaacacgctgacaaaacagcaatatataaaaatttcggtcttattgcgatataactttttaactatacagtacaatgagcttaacaaacccagcatatttgcgagtcgagtctttttttagcatttaagttcagttccattttatattcaataaactctattatttcttcggtacgccagaaggctagtgatttaaagaggaaagtttctctcaacataaattctagctctagcatactggacactgaggttgcaagaggcagccgcttcctctcagcaagtgcagcagcgcgtctagctcctcgcaccgctgaagatctggaggaaggaaatttaattaatttatatattctagatcaggatcaatagccgagtcgatctggctatgtccgtctgaccgtatgaacgagatcccacgacctacaaccgcccaaaacggacacgcccacatttttgaaaaagttttggatattttttatagttttattagtgttttaattttttagtagtttcatttgaaatgggtacaatttcttgttccttgtccagttggttctatagcttgtaagctcgtaaatgcgcttgataataattaataaacaaaattaataattatagcaaaatcactaacgctttgcagccagtatggccagctttctttacggcttgataatcacaataaaaagctactttcccgctgtggtaacaagaccacgtgctttgcattgtagtcgccggatgcagtaattctcttacctaatgaattaaagaacttaaaaaaattttccttaaagattgggaagtaaagtgtacaaaccgagtgagaccgctgccagactggactcttaagcatttaaaagagtgagggagagctcgggagagaggcaagcttagataacgaaagataatggtgcacagcggaggtgccgtagaactaaattgtgtctccaaagttgtcatgtagccgttgaaagcgtggcttttgtcactgccctcttcgtcaatctttttggtgaccttagcgcaccaactcgaatccatctcttcataatgcaggctgcggttgtatgtgctgatgctggacacacatcgagcttgccgcccgctggtctgcagctcatcgtcatccgcatcttccgccaccagagctgactgctcctcgtttttccatttgctaaacttctcggcgagaatgtattccagcggcaaagtcaacaggccaggcaggtttaacaagccaaagaactggatcgttaaatcctcaatatccctaatagtgcccaagtgccatcagtcagccgaccagatcgcacagacataaagatgcgccatccaccgcgcatacgcccgagttaccgcctcagcattcaccccggcggtcccccaccaaagtcgcctcgacaaccagaggtctaagggggtgtgataggttcaacaagtagtacggtattttggtagttgatgaaatagacttggctctggagctcagagcttctgctctgcttgaaatggtttattcgaataatcaaagtgtgctgaagttgggttcagctaacccgcacatacattgcttatatctatgtattcttacttacatttatacatatacatatgtatgcagaaggcattgaccacttgagctgcaaagtgcatgctcagcattcccacgctccgcgatcgggcttatgtataagcgttagatcgtattactggggcgctggagtgcttacgtagtttttggtggtctttttgtatatttgtatatttatatttattatgacaaagtgtcacaatgtattgacgctatgttatacccaatcatt

SEQ ID NO: 25874 - DNA, 515 bp, DROSOPHILA
ggatattgaggatttaacgatccagttctttggcttgttaaacctgcctggcctgttgactttgccgctggaatacattctcgccgagaagtttagcaaatggaaaaacgaggagcagtcagctctggtggcggaagatgcggatgacgatgagctgcagaccagcgggcggcaagctcgatgtgtgtccagcatcagcacatacaaccgcagcctgcattatgaagagatggattcgagttggtgcgctaaggtcaccaaaaagattgacgaagagggcagtgacaaaagccacgctttcaacggctacatgacaactttggagacacaatttagttctacggcacctccgctgtgcaccattatctttcgttatctaagcttgcctctctcccgagctctccctcactcttttaaatgcttaagagtccagtctggcagcggtctcactcggtttgtacactttacttcccaatctttaaggaaaatttttttaagttctttaattcattagg

SEQ ID NO: 25875 - protein, 94 aa, DROSOPHILA
MDSSWCAKVTKKIDEEGSDKSHAFNGYMTTLETQFSSTAPPLCTIIFRYLSLPLSRALPHSFKCLRVQSGSGLTRFVHFTSQSLRKIFLSSLIH

SEQ ID NO: 25876 - DNA, 4109 bp, DROSOPHILA
atttaacttattatcgtttatatttttttttagaacttttgaagtacaccgccatacgttgggcgccaattaaaattgttactgtttaattatttaaaaaatcatttttattttgttacaatttaatattgttttggaaataaactttttcacttatactattacaaaaatctttttattgcttatccttaatttgaaactgttcacgatctcatcccgaatcagactgaacttctaaatcttaatcttgatccaattaacctcggaagcttttgattcgaactttttgaacttacagttatgtctaggataaaaactttatgctgaagtgatttccaagcattgtgaaattgaaatttgctgattgatgcagtttgattgaagcgcattaagttgatcatggcttggtctccaagtggaggttgtgttaactttaattttggttatttatcaggtggctaagtgttggcgacaaaaacaagggcaaaggcagtgttggcgacaaaaaaagggtaagggcagcctaagtgttggcgacaaatataagaacaaaggaaacgctgtggagattcgagttagaaatttgtttatcaactggggcagagtgctatatttacgggttggataacttgcatgttattggttaatcgtgattattcgctttcagacaacgatataggattccaaactgatagaatccaaagaagcttatgccatgtaaaatatcttaccctaagagctccggcaacgacaagaaccgatttgattgctcgtagaccccagtcataatgatcttgctttgataataactccttgcatagggtgtatagtgttataaattttcgagccagcaaacgggcttcttgaaatccttcggccaccaacatgatttcgctaattaaggcaaagtcgggaacaaccattgcacaaggtcggtataaggctttaaggttttcaggcaactccgctcgccctgcatatcctggattcatagttataaaaactccaacggttgtgcgcaaagcaatatgctctcctaaaaaactgaaggtttgctttttgctctttatggcatcctgaatacacttaacctgaacagcaacaacagataatacctctactgaaatacggttaaactcgtcaaagcagccccaagcacctgtttgagccaaccccttgtggatatctccaatggacttgtaatccatttgttctgagcagttaaacacgtaaaccatcatacccaaagctcgcccaagatctttagtggtttccgtttttcctgttccagcgggtcccgctggagcccctcccattaccaggtgcagtgactgcgttaaagttatatagcaacgatctgtgagtggcgtgattacaagacggggtgtatttccaagatattcgtagtcgtaacggaactgagcatcacaaatgttagcgaaacaatcatctatcttcggatcccaccgatgtcttaattggctttgccactggaaggctgtttgcacttcaacctttttcgctataatagttccaacaacatcacgactgtgcacatctattgtacatatagtcattattttctgtcgctcggcagctgttaggtcacctaaaagtaaaattattaagttgtttagctgggtaatttgttttttattatagtccttcaatgcattttcatagcgctgttgaaccttagcaaaagcatcgtttgtttcagtagtccacatgatttgggtgccgacaagagctggctgcgcaggccactcgaatatccacacatgtcggggcttatggtcataaaatgttaaggagcgctttagctgatcccttagggtatcacgcatcttatcagttattctattgagccacacctcaaccttcccactgcaatcgcaattttcgaggaaggggtacatattcctccagctctttagcaaccataccggctgcatttttagatccggaaatgagatttaattttcccatcgagtcgtaaagtttggtaaggtgccgtgcaacaagagcaggattgtttccgttcgacaatatatcaagaagatcagctgatgaaacaaaatagaatcgaggatatgataagcgctttgtttccaaataatcatttaaagctttttcacatagtaatagcattttaagtagtatttccaagtgttcatagagtttactgccagatcggtttgttgacctcactacattgcggtccgcgttcatctgagcaagtagcgccttaaactctttatcaatgtaatcaaaacgtctcgagtcttctggtagctgtgatcgaatatcttctgagccaatgaaaatactctccaagtattgccacttacgttgcacttcaaaccacgaacctataatctggtctgcattggaaagtctattttgccatagtcgaacttcgtgttcgaagaatgcaatatactttgaagatgccatattttgtaactgaccttgatgatcctctaaagtctcgattaactcctcagatgcctttaaaagtttaatactagtgcggtcatgaatatctgtaccaaactccattgtgccccaagcagttgctatatctcggagctgtttttccatagccatctcttttaccgatttatcgacaatattttttacttcttcctcatattcgtgtaaattaagatcaatcaagtctttcaaagtcgtagagtcgtccatactaaactttactttcgtggtctgcataagttctatccagtgacggtcacgtatcgcaggattttgtagctcagtgacggctcgcaatgatgtcataaggttcttgagggaagcctccataaaaataaatggttcccaagttcgcatagctttatcaaggccccttagttcgcgaccaaactttttacactcttggtccatgttttcaatgtctattttcttccaaggagtctttttccagtcattaattgtggactgtattgttattgcaaaatcccacattattttaacgagcttaaggtcaaacctgcaaagttcgattttcacaggatctggaccttgtaattcaaacaggacggcggactcggctaagctcctttgacgttcttcaagcgccactaattccaagtctgactcgtcgataagttcgtagcagcttaagcacggtacaaagaagaattttttcgacagaaacttttttctatatgtattggccatgttgtcgcaaagcagaattcgtttttcaattaaatctacttgatagctttgtatgggtgcaattagttgttttgttgtagctgcaagtcgctttactttcatccaggcatctggcagctcattaatctgcgctaactcagtgtctttgaactcgtaattgtattgccgaagtaagtcaataatttccttaagtggatcaaacattgagtcataaatacattgtttttcgttaatttgatttaaaacggataaaattttgactaacccctcaaaatcgtccttttgcaattctatcttgagaactatattggcctcatccacaaagtcttgaagttcctataactaaagatatgaaaaattgaaaacaaagaaaataaattaccttcagggaattcttaacacggttaattaaatccaatttaaaaaggctaatccattgtccaacttgacttaggacggctaccttaaagccagtcatattcaagcgcaaaaacacaaaaaaatcttcataggtttcccaggttcgtatttgatcttgtaactcaatgaacttatccaactgttccttatagacagaaagtgggggatattccaatcctaaaagcttaacccctgagctaccttccaggtcagcctctgcgtcacgttcgtctagggttaaattacgaccaaatttttttacttcagataaatacgttgatttgtcccaaatccacaaactagaaaattccataaatcctttgccatggacacgcaccgcctgaagggcgagctttattttgttcataatttcaacgcgctgcttatctagctcagatttgtcctgcagctcatctattaacaatttaaaatacagataaaatacattattcaaatatcaagtaacataccatagaagctgtaag

SEQ ID NO: 25877 - DNA, 3261 bp, DROSOPHILA
atgagctgcaggacaaatctgagctagataagcagcgcgttgaaattatgaacaaaataaagctcgcccttcaggcggtgcgtgtccatggcaaaggatttatggaattttctagtttgtggatttgggacaaatcaacgtatttatctgaagtaaaaaaatttggtcgtaatttaaccctagacgaacgtgacgcagaggctgacctggaaggtagctcaggggttaagcttttaggattggaatatcccccactttctgtctataaggaacagttggataagttcattgagttacaagatcaaatacgaacctgggaaacctatgaagatttttttgtgtttttgcgcttgaatatgactggctttaaggtagccgtcctaagtcaagttggacaatggattagcctttttaaattggatttaattaaccgtgttaagaattccctgaaggaacttcaagactttgtggatgaggccaatatagttctcaagatagaattgcaaaaggacgattttgaggggttagtcaaaattttatccgttttaaatcaaattaacgaaaaacaatgtatttatgactcaatgtttgatccacttaaggaaattattgacttacttcggcaatacaattacgagttcaaagacactgagttagcgcagattaatgagctgccagatgcctggatgaaagtaaagcgacttgcagctacaacaaaacaactaattgcacccatacaaagctatcaagtagatttaattgaaaaacgaattctgctttgcgacaacatggccaatacatatagaaaaaagtttctgtcgaaaaaattcttctttgtaccgtgcttaagctgctacgaacttatcgacgagtcagacttggaattagtggcgcttgaagaacgtcaaaggagcttagccgagtccgccgtcctgtttgaattacaaggtccagatcctgtgaaaatcgaactttgcaggtttgaccttaagctcgttaaaataatgtgggattttgcaataacaatacagtccacaattaatgactggaaaaagactccttggaagaaaatagacattgaaaacatggaccaagagtgtaaaaagtttggtcgcgaactaaggggccttgataaagctatgcgaacttgggaaccatttatttttatggaggcttccctcaagaaccttatgacatcattgcgagccgtcactgagctacaaaatcctgcgatacgtgaccgtcactggatagaacttatgcagaccacgaaagtaaagtttagtatggacgactctacgactttgaaagacttgattgatcttaatttacacgaatatgaggaagaagtaaaaaatattgtcgataaatcggtaaaagagatggctatggaaaaacagctccgagatatagcaactgcttggggcacaatggagtttggtacagatattcatgaccgcactagtattaaacttttaaaggcatctgaggagttaatcgagactttagaggatcatcaaggtcagttacaaaatatggcatcttcaaagtatattgcattcttcgaacacgaagttcgactatggcaaaatagactttccaatgcagaccagattataggttcgtggtttgaagtgcaacgtaagtggcaatacttggagagtattttcattggctcagaagatattcgatcacagctaccagaagactcgagacgttttgattacattgataaagagtttaaggcgctacttgctcagatgaacgcggaccgcaatgtagtgaggtcaacaaaccgatctggcagtaaactctatgaacacttggaaatactacttaaaatgctattactatgtgaaaaagctttaaatgattatttggaaacaaagcgcttatcatatcctcgattctattttgtttcatcagctgatcttcttgatatattgtcgaacggaaacaatcctgctcttgttgcacggcaccttaccaaactttacgactcgatgggaaaattaaatctcatttccggatctaaaaatgcagccggtatggttgctaaagagctggaggaatatgtaccccttcctcgaaaattgcgattgcagtgggaaggttgaggtgtggctcaatagaataactgataagatgcgtgataccctaagggatcagctaaagcgctccttaacattttatgaccataagccccgacatgtgtggatattcgagtggcctgcgcagccagctcttgtcggcacccaaatcatgtggactactgaaacaaacgatgcttttgctaaggttcaacagcgctatgaaaatgcattgaaggactataataaaaaacaaattacccagctaaacaacttaataattttacttttaggtgacctaacagctgccgagcgacagaaaataatgactatatgtacaatagatgtgcacagtcgtgatgttgttggaactattatagcgaaaaaggttgaagtgcaaacagccttccagtggcaaagccaattaagacatcggtgggatccgaagatagatgattgtttcgctaacatttgtgatgctcagttccgttacgactacgaatatcttggaaatacaccccgtcttgtaatcacgccactcacagatcgttgctatataactttaacgcagtcactgcacctggtaatgggaggggctccagcgggacccgctggaacaggaaaaacggaaaccactaaagatcttgggcgagctttgggtatgatggtttacgtgtttaactgctcagaacaaatggattacaagtccattggagatatccacaaggggttggctcaaacaggtgcttggggctgctttgacgagtttaaccgtatttcagtagaggtattatctgttgttgctgttcaggttaagtgtattcaggatgccataaagagcaaaaagcaaaccttcagttttttaggagagcatattgctttgcgcacaaccgttggagtttttataactatgaatccaggatatgcagggcgagcggagttgcctgaaaaccttaaagccttataccgaccttgtgcaatggttgttcccgactttgccttaattagcgaaatcatgttggtggccgaaggatttcaagaagcccgtttgctggctcgaaaatttataacactatacaccctatgcaaggagttattatcaaagcaagatcattatgactggggtctacgagcaatcaaatcggttcttgtcgttgccggagctcttagg

SEQ ID NO: 25878 - protein, 689 aa, DROSOPHILA
MNKIKLALQAVRVHGKGFMEFSSLWIWDKSTYLSEVKKFGRNLTLDERDAEADLEGSSGVKLLGLEYPPLSVYKEQLDKFIELQDQIRTWETYEDFFVFLRLNMTGFKVAVLSQVGQWISLFKLDLINRVKNSLKELQDFVDEANIVLKIELQKDDFEGLVKILSVLNQINEKQCIYDSMFDPLKEIIDLLRQYNYEFKDTELAQINELPDAWMKVKRLAATTKQLIAPIQSYQVDLIEKRILLCDNMANTYRKKFLSKKFFFVPCLSCYELIDESDLELVALEERQRSLAESAVLFELQGPDPVKIELCRFDLKLVKIMWDFAITIQSTINDWKKTPWKKIDIENMDQECKKFGRELRGLDKAMRTWEPFIFMEASLKNLMTSLRAVTELQNPAIRDRHWIELMQTTKVKFSMDDSTTLKDLIDLNLHEYEEEVKNIVDKSVKEMAMEKQLRDIATAWGTMEFGTDIHDRTSIKLLKASEELIETLEDHQGQLQNMASSKYIAFFEHEVRLWQNRLSNADQIIGSWFEVQRKWQYLESIFIGSEDIRSQLPEDSRRFDYIDKEFKALLAQMNADRNVVRSTNRSGSKLYEHLEILLKMLLLCEKALNDYLETKRLSYPRFYFVSSADLLDILSNGNNPALVARHLTKLYDSMGKLNLISGSKNAAGMVAKELEEYVPLPRKLRLQWEG

SEQ ID NO: 25879 - DNA, 3927 bp, DROSOPHILA
gcctgccgattgcgctgcacccgctggaacacgctccacggttgtctgccccccgataccgaaccggattcctcggacgcggttgctccgctagttggggtcggtggagtgacagcgctaatgggattgtgcaatcgctccatctccacttggcagtgatcggccacctgactgcgcttgatcttcacgtcgcatgtgggacagatcacgtcgtcgtcgctgtttctgctcaagtgctgggcgaagttctcgccgttggacaccgtgtccgtagccatcgattcctcggatccaccgcggactcttaagggtaaacgaagttaaaagattctgtagtcggattttgttttgttcgataatctctgtccaagccacgcgacgccgatttcttacgttctcgtacggtggaaaacggtcacactgatttcgttatttttcgtgtcagtggaagtggtcattgcgatatacatcgtaaaaccgttacaaaagcgccaagcacagtgattaatatgcttaagcaataattaaaattttattcacttaaaaatatctttataataattgattatttgtttgaattccgtgttaattaaaacttcaaagtttgcattttgcattccaacaactcttttgaccttaagtcttacaataaaataattaaacgtactgatttcttaatttttactctactctggttggtcttaatacagcaatatatatatattatcagattgcgttgtttacatgcccgatataacatgtgacagatagtgtctctccctcactgttaggaaatttttataaagcacagcccccgctttgataaaagtttaaacatccgaaatgtaagctattttaatttcctttcttcgttaaattaaataatttgacggtaaatgtaaattaactgatagttccatggcactttatcgctatcgagaaatgcccagccaaaacgatagtatcgagacaacatcgatttaagttccagctctatgagggaagcaaaacattattattttcgtcgtttttattttttgattatatagaaaagtcagtggtcgaggaacatgtgaaagtggaaaagcgacagagcttttcaagcagagtgtaagtgcatacaggttgaacccaaaaccgacgcatatttttgcgaaagtgcaaagcagacggcgagagtgtgaaaaggcagcgaaaagagaatagagaaaaaatatagcagccagtttctcctgggcgtgagtgtgtgtgcgtgtgccatattgttaaataaggcaaatatagtaaaataaacgtagaaaaaacagcaacaactatgcatcagcagtaccagcagcagcaacaacaacagcagcagggtaaccttgttggctacaacaacaaaatgaacgtcttgcccaattacacgctcagcggaatgagctcctttgatgccgaatcgctgccagattattcagaatttgattccgaatcggtaaccctggactattacaaggaaaggtatattcctgaactcaaacagatcgcattttgttttgcttccgttcttccgcatagcacacaacacacacacacacatatataaacatacgtgtatacgaattccctcgcccttgccattgttgttgttttgcatttggccgtttgccccaattttgcctgccgttaccgttacgttctatatagcaattaaccgttatgatcctgttgccatgccactcattcacacacacacactcacacacacaaagtcggtactcgctcatctgcgaaatgtgtttttgtttttattccacatttctagccgctatatgtaaaactatatttatctccgtctagcccgtcgaaatatcttgagatacattagacgcaacatctacttacacaaacatatgcatctttgtttgcgtatctgaagatattaaaattggcagggaatcgtgcgaattaggcataatatgcagttttaacgaaattttgatacacttcctatttgttagcaactattgagcaagatcgataataagaagactctgttttataatatttgttcaaaatttcatttcaagatgctgatattttttttacaaacgtacataaattgtcacaagtctgacctattctattgtactctcagttagggtataacaatggaatgcgaatggataattagcatgtcggtatttccagcattcaaaatgcttagttgcagtccgccttgcagcataatttatgtggggactgcacctcatcaccccagcttccgtcttttgtcattgagccaaaatacgccccccaatgatgactgaaatattccgtcgcgtttttgtctggcacaatagagcgatttcaatttaaacaatcccaaactcattcaactgtaccaacgcattgttttgtaaattgcgtcagttaatacaaaacatacatactacattgatgtctacaattctggtcaaaatagtatagctaaagtttattctgctctcaaccaaattctgatcctattttttttgcatatcaatgctaaatctaaagttcaatagttgttgttcattacacatgataatagaatgataatagttaaaaacctaaaaatttgagcactaccgtagttttaattgtcgcgttgatgcagttcgattggaataaaccccataatagttagccattgtctttgtcgatattgttgctcgagttgtttttgcatgttgctgctgcttacttaactgtcttgatgtaaacaatcatgttgtacaaaccatgtgcgccagtcggtctaatcgaatgtcaccaatttctctatttcccgtcccgctaacaaacaaatcccccctctttgacaatacagatgttgaacgggctgcttccgccagcaatttgaaattgaaaacgcattggataaaccttagcgcgcaaaccaaaagcaataaaacgccaattgaagcatttatattagattgttaaagccaaccggcgtagcatttacttgcctgccccaaaaaagtaaaaaaaaacaaaaagaaaagaaaagaaacccttccaacatcccactaagcaaaactaaccaagaaacgcattgaaacgcattccaattagtagctgcgggcagcacattgcctgcatatacatagtcgataaggtgagtttggctggcctaataagccggtaaaaatacccctacccccgcaattaatcacaattatcatgcgcgcagtgttctacgtccaccagcggagaaaatggcgccgaccacgacgattgagaccatcacaatcacgaggccgctgaaggtatgcatttggcctaaagtttcggaaacgtttacagattgcaccgactgatttctctgccctcacaggtgattgcatttatctgcggcgtcatcgtggtggccctcatgattatggctctggcgtccacagattggttaatggcctcagactggcggcaaggtctctttgtgcactgcatcgaggatgattcggtgccgccgctgccattcaatatccaggatccgccaggatgctactggacccgcgatgtcggtatgtattgcatgaagaaacagcaatcttaagctcgaatttaacatataattcgtataatgtcccttaggctacattaaggccacagccgctctgtgcatcatcacgctgataacggacgtcattgccacagtactgacaggtctgggcctccggacgcagaatcataatctaaagtataagttctatcgtatagcagtattggtgatgcttgtatcctgtgagtaactagctgaacttatgtcagaatcacatgttaaatataactttttcgcagtgctggccgtattgtccgccttgatcgtatatccagtatgctttgccggcgaactaaccatgggtatggtagcctgaaaccttgatgttgaacttctttcca

SEQ ID NO: 25880 - DNA, 576 bp, DROSOPHILA
ggaagcaaaacattattattttcgtcgtttttattttttgattatatagaaaagtcagtggtcgaggaacatgtgaaagtggaaaagcgacagagcttttcaagcagagtgtaagtgcatacaggttgaacccaaaaccgacgcatatttttgcgaaagtgcaaagcagacggcgagagtgtgaaaaggcagcgaaaagagaatagagaaaaaatatagcagccagtttctcctgggcgtgagtgtgtgtgcgtgtgccatattgttaaataaggcaaatatagtaaaataaacgtagaaaaaacagcaacaactatgcatcagcagtaccagcagcagcaacaacaacagcagcagggtaaccttgttggctacaacaacaaaatgaacgtcttgcccaattacacgctcagcggaatgagctcctttgatgccgaatcgctgccagattattcagaatttgattccgaatcggtaaccctggactattacaaggaaagatgttgaacgggctgcttccgccagcaatttgaaattgaaaacgcattggataaaccttagcgcgcaaaccaaaag

SEQ ID NO: 25881 - protein, 40 aa, DROSOPHILA
MNVLPNYTLSGMSSFDAESLPDYSEFDSESVTLDYYKERC

SEQ ID NO: 25882 - DNA, 4458 bp, DROSOPHILA
ctccacatgtttgcagtgtgacaaatgtgtaaactgttctcagtgtacaaatgtatgaatgtaattatttgaattaaatttcaaggattgtctgaaacgtcgaacgaaaatgggagttttcaatttccgagaaaaccaattgaaaatacaagtaagagcagtgatttcaatatatccggcaagtttattgatgtaattaaagataggtttgattttatacgttgctgttcatcttgaataaaacaaactgtaaatattcaacacacacattctgcttgatctcttatttatcatctatacttattctctcctctgtacacatcaacatctggttttgttttgctatcacattgaattgttacatttatagtagtagttgctgcatgttgcctgcttaaaatctttaaaacacgttctaaatttcatctgaaacatgtaggtatacacgccaattaacaagtgtatcccatatcctgtagctatagcttctgatccaagagtttgttctgtttgttggttggtttgtatgttgcttgtgttatgttgggtgtgttatgtttggtgtgttgtgtccaaagggtcaaaagggtccaagggatgtagaagcacacatttcgtttgtaaactttcggtgaacttgaagtgaatcaacattttcgacatcgaagcgccttttttgttttgttgttttgtttttacaaaattaaacttaaaattgcttgcgcttctcgtaactacacattaatttagtagttgttgcttagttccttgttctctctcttgtttttactctcgccagtgttctttttgtttgctttttttttttgagttcacgaaatacgtaatgcattttaaaatatatagaaataatatttgtatacatataggtatatatctgcttcatctgttcacgtatagtaaaatatatgtataatgtatatatattgtatatatatagatctgtatgcactatgcctaaccacggctatccacttttcgcttaatcctcggtagtagtttctgtagtagtagtagtagtatttgtatcctgcagctcttcgagagttggaatatcgtcttgtagttttagcacttgtaaccttgggttatagtgcccggctaaataatatgtatcattgttatcgtatatggattgatattgcttcgaatcggcaccgaacttctcgaagtaactgccaaactgcagcacctcacaccgatgcgaaatggtctgcacatcgttctcatcctcgtgcggcgattcaaaaagagcaccctattgaaagtaaataagttaataatattcataacttcgtcaggtaattcaatgttctggcttaccggaaatttcaattttggacagccggtcgtctcctccggatgatagaaccacgccacacgcaccaccttgttgcccgtggttgtttcccacatggactcaatgcgtccgatatagggtcgatctggtctgcccgtcgatagaaatactgcactgtccccgacctgcaatgcagcaccgaatatgaaaaatcaaaattaaatacaataattgcattgaaatatgagcatgtgcacttaccgtgatagtctcctttccccttttgattgttttgtaaaattgctttctggcgcgtcccttgacgcccgccttgcgataggcggtaccataccaaccccatagctgccgttccggcaggaaggccgcaatcttgctgcttcccttggagttgttatgctcgaccagatcgtcgcccttggcctgtgagcgaaaatttgattatttcaaccctttcattagggaacggacaaccctttccgtttacagctattgccattgttttctaatcaaataattcggattgtgtaatacaaatattatttttaccattcccaaaactcaaatgctgaacaagggaatcactaaaaaagtttattggcaattagcatttactgattgcaaagtcgggtgttttgctaccagattttgtaaatatttgcgttttcatttaagtgaataaaattggcataaatggtaaacagaaaagggtttatcaaaaagaaaagggcaaaggttattgctgccgctcacctcatcggatatctctgacatgagattggatgcggactcctcctcctccatctccagctgctctgtcttcactttgacctccaccttaacgcgacttgaggtcgctgatgacatctctgtggaaggagcctctgtcgcttcctgtcctgccgcagagtagtcctgctggactacctgttgctcctgctcttcgctgccattcttgcggtgatgcttcttgtgcttcttgcgtttcttgtgcttatggtgcttacgagcggcgtcttcggcactgacaccatcgcccaaggcagcggcatcagctccaccattggttgccgtggccggactaacgccattttgagctttggacatcttcttgaggctcttcttcaggcgcttcttctcactgcgctgcgtgaacaactccatagttgccgccagcgatgtggtgttatcgctactcatccccaggctatgatggctgtgcgaatcctcgcagccgggcacggtcaagtggtcctgagtgactccgccaggtccactttcacccccgcgcagagcgcttcgcttctgcttgcctactgagtagaggggattatcgttgtactctgttccaatgggttaagtgggattgtcgggcagaaggaacgaaaataacaaagtagtaaataaggaggcacgtacacaagaaactaatgtttggatagagggttggggagtaagcctgtcgtgtccacgggcacagatggtgccgggcttacagtttgacacccacgaaagtgcaaaatgaacacacacctgctatgggataatcgctgaggagcatacggatgttctgcaagcggatcctgccgctgtcgccatcgtcgaactctacgcttacgaagtccggcgctgttgtagccgcattcgtagcgctgctggccgttccatcgacgacctgctcggagtcgatggcacgtcctggataaaggcatcggtactgctgactccagtaggcgcacaggcgcgtgcctactggtacactctccacgctcttcggagctacctcgaggatctttaaagataataatcataaatatgtttgtatcaattgcttaggaatcaagtattcactcaccgtatccttgagtatatcctcgcgcgacattacatgcgacttgttgccacgctctccatccaatgtgattgaatacacatctggcggccgcaatggcttcattacacccgcatagaaaagaccacccatgtccgtgaggacacgtgtctcatcgcgatacaggtgctcgctggtcagctgaagctcgcgatcaatggcgctaaatcgccgctttgcctccgtggccgctgtctgctctccagcggcgccgacggtgctcgccttcatcttgcgctgcttccgcgcggaagccacctgcttggtggatggtgagccggaggtggaagtcgaagaggtagttggtgcaatggcaacggccgcgtccaatgcgctgggttccaggcggacaaacgacgaggtactcggtgagctgctgcttggcaagggattgggctccggttgggattgctgtagggacggcggtggggggaaggagtgcgtcttgtccgggaatcgcaaaaaactagacgcctgaaggttactgctcgaaaactttgggaacttgtaatcgcgcaacggggatgaagttctgaaaaatacaaatagtattaggttaagggtaacatgactttggagtaaaccacttaccccaggacactggacagcgtcatctgtggctgttgcagagctgaagatggctgcaccgcctgttgcgatgcctgctgctgttgcagttcgagctgctgcttggagcacttcttcttctttttgtgcttggaaatctcatccagcttccgtttcttcttgcgatactgccgcgttattttcgccagtcgcatacgcatactattgtccatgatgctaaacacctcctggccaaagcgctgcgcatagctgggatccacggcgtggagggcattgcgtagctccgactgcagctgatcgtcctgcaggtccagatcctcctcggccggagcggagaactgctggcggctgctgctgtggtggcgcttcttcttgcttttcttgctgcaacgtgccgacttgcggctgtcgctgcctgaggacttggaatgtttgtgcttcttgcgcttcacaggagtcagttcggcaacgataccagccgacgtggttggcagctcgatgccctgcatcgaggggaatccgggcgagcttaatggcatctgaaaggaggatgttgaggaggggaagacggaaccctgcgattgcccaaaggcataacaggacttggcctcgaaaatgggcggcgtcgcagctgtcgttccca

SEQ ID NO: 25883 - DNA, 1734 bp, DROSOPHILA
atgaaggcgagcaccgtcggcgccgctggagagcagacagcggccacggaggcaaagcggcgatttagcgccattgatcgcgagcttcagctgaccagcgagcacctgtatcgcgatgagacacgtgtcctcacggacatgggtggtcttttctatgcgggtgtaatgaagccattgcggccgccagatgtgtattcaatcacattggatggagagcgtggcaacaagtcgcatgtaatgtcgcgcgaggatatactcaaggatacgatcctcgaggtagctccgaagagcgtggagagtgtaccagtaggcacgcgcctgtgcgcctactggagtcagcagtaccgatgcctttatccaggacgtgccatcgactccgagcaggtcgtcgatggaacggccagcagcgctacgaatgcggctacaacagcgccggacttcgtaagcgtagagttcgacgatggcgacagcggcaggatccgcttgcagaacatccgtatgctcctcagcgattatcccatagcagagtacaacgataatcccctctactcagtaggcaagcagaagcgaagcgctctgcgcgggggtgaaagtggacctggcggagtcactcaggaccacttgaccgtgcccggctgcgaggattcgcacagccatcatagcctggggatgagtagcgataacaccacatcgctggcggcaactatggagttgttcacgcagcgcagtgagaagaagcgcctgaagaagagcctcaagaagatgtccaaagctcaaaatggcgttagtccggccacggcaaccaatggtggagctgatgccgctgccttgggcgatggtgtcagtgccgaagacgccgctcgtaagcaccataagcacaagaaacgcaagaagcacaagaagcatcaccgcaagaatggcagcgaagagcaggagcaacaggtagtccagcaggactactctgcggcaggacaggaagcgacagaggctccttccacagagatgtcatcagcgacctcaagtcgcgttaaggtggaggtcaaagtgaagacagagcagctggagatggaggaggaggagtccgcatccaatctcatgtcagagatatccgatgaggccaagggcgacgatctggtcgagcataacaactccaagggaagcagcaagattgcggccttcctgccggaacggcagctatggggttggtatggtaccgcctatcgcaaggcgggcgtcaagggacgcgccagaaagcaattttacaaaacaatcaaaaggggaaaggagactatcacggtcggggacagtgcagtatttctatcgacgggcagaccagatcgaccctatatcggacgcattgagtccatgtgggaaacaaccacgggcaacaaggtggtgcgtgtggcgtggttctatcatccggaggagacgaccggctgtccaaaattgaaatttccgggtgctctttttgaatcgccgcacgaggatgagaacgatgtgcagaccatttcgcatcggtgtgaggtgctgcagtttggcagttacttcgagaagttcggtgccgattcgaagcaatatcaatccatatacgataacaatgatacatattatttagccgggcactataacccaaggttacaagtgctaaaactacaagacgatattccaactctcgaagagctgcaggatacaaatactactactactactacagaaactactaccgaggattaa

SEQ ID NO: 25884 - protein, 577 aa, DROSOPHILA
MKASTVGAAGEQTAATEAKRRFSAIDRELQLTSEHLYRDETRVLTDMGGLFYAGVMKPLRPPDVYSITLDGERGNKSHVMSREDILKDTILEVAPKSVESVPVGTRLCAYWSQQYRCLYPGRAIDSEQVVDGTASSATNAATTAPDFVSVEFDDGDSGRIRLQNIRMLLSDYPIAEYNDNPLYSVGKQKRSALRGGESGPGGVTQDHLTVPGCEDSHSHHSLGMSSDNTTSLAATMELFTQRSEKKRLKKSLKKMSKAQNGVSPATATNGGADAAALGDGVSAEDAARKHHKHKKRKKHKKHHRKNGSEEQEQQVVQQDYSAAGQEATEAPSTEMSSATSSRVKVEVKVKTEQLEMEEEESASNLMSEISDEAKGDDLVEHNNSKGSSKIAAFLPERQLWGWYGTAYRKAGVKGRARKQFYKTIKRGKETITVGDSAVFLSTGRPDRPYIGRIESMWETTTGNKVVRVAWFYHPEETTGCPKLKFPGALFESPHEDENDVQTISHRCEVLQFGSYFEKFGADSKQYQSIYDNNDTYYLAGHYNPRLQVLKLQDDIPTLEELQDTNTTTTTTETTTED

SEQ ID NO: 25885 - DNA, 2649 bp, DROSOPHILA
ttttgttatttcagttggctcgccaagtgatcgaatatttaggggacgttggctcgccacagagatagatatagatatagactttggaacatgatgctgtgcttaaataacagctaagctctatcaaaggtacatttggaatttgacattaatgtgtgtgtgtgtagaatgtatatgttactatatatgtgagattgccctaccaaaaataaggcaatatttcagatcatcccatcgcccatcggctttgatttccgttctggcctggcaatccctttctcacctcgccaggacgtcgtcgccctgtggcagtctaaccgtgtggatcttacggtgcagcgccatcattttagactttctcatttcactaatgtttttgacggcttctattttataagaccgtgtacgtactctgactgtgcagttcttttacatgctgtacgtatctctttaattccctttttgctcacggcttgagaccaaggttcagcgaccttacattcctcatggtgcatcatacttgtatacgtcaaaggtcctgcatccattctggctgttgcgaataatgttattttttcgtgtttgcgctgggacatctgtactctccctggacctgtaccgtttcgcacgcagtcgcggatcgctcgaattccggagcatctgatagcccccacttccttccggaggcgagctcctagatcggtacgggcctcccatctcaatcgtgcgcacgtattctttccctcctccatgatctgcgtgtgtcacttattcaaaaccatctgtcgtagccctcttagggtggcgaccctagctctttcgatcctgtagcggctcgatctcgggcccaatcgcgtgttccaactaccgccgaaacacagccagattcgccttgagagtataagcagctgtattctcacggtcctttctatttgttccttgctgtcccgtttgtcgatcatttcgccgagaaagtgtttcagcaacaaagtcaacagacccggcaggtttgaccagatcgcatgcccataaatatgcgccgtggatccatcggatatacgtcggatatagtaagacacattcttcggttcaatatgcagtcatgcaaaaggatcagctccttctccaccacctgtgcttcacctctgagcatttctcgaccgtatccactgggggcagtttggttggccggcatctggtgcggatgatggtgcagcggatgctgatgtgggtgtggatgctggcaaggttgcagttgcaagggctgtttctgcattgcctgtcctgggaacatcgtgccgctgagtggctcttggcccacttgttgacccacactttgtgaaggtggctgtggcatggcgtaaggtggttaaactatttcaccgggtcctacttgtggcaatcctggagatggaacgccaccgtggaatgcctattgagacgatagttgtttaactctttcttgttgttgctatagctgctgttgggccggcatgccgggcattctattctgctggcttggtcccgaggagattattcagttgtcctgcgatatatgtttctgtccaccgcttttcggtgcaccattggcaccctgtcctgaagcaccgtggtggtgggtggacccatgttgacccagttggcatagcctccagcaaatttcctgagtgaacgatgctgttggccacaatttcacgaagcaatgccgtcacaaaagttgattaggggtatattttcgagttattattgcaaagtttttaattggcaactctgtatatttttagaagtcattttttaaagtcacattgcaaaatatattcttaaaaagatttatatgctgataggaaatttatgcgaactacttttggacatagtcttgattatagtgaataaaataacaataatctataaatattaaaattactacatgctgattatcctatttaacacactaatatttgtatatacataccgcttcaaaatatgatcttcttttaaaaacaacaacatggtgaacaacagaagaaactcttattgcatcccagtctaaagagtgaaacacacgccagaaaaacaaccaaaaagatgtaatcaacgcaactgttgcatacgaagtgagcgcaggccgttgagatcccgcatttgtgagtatccagggtgtacgtgttgatggtatggtcccagatggcttgttagtcttttcttgaccatattgttttggatgataaatgtttactgaaaatagtgtatttgagaaaacttagataaattatgtatgaagacacatgagagaacgctgtagttttgtttctcgactataagatacccaatactatagttttactattagtctatacactattagtcttattgggagaaaatggatgcatcgcagttttgggcgttctgtgtgcgactatcaaacattcattaaacaaacttgtgatgcgggtatgtctagctttaatagttccttttgtctgcaagttcatatggacggacggtttgacatgggcaaatcgactcgtttatcaatcctgaataataatacaaggatggattattactaaaaaaaagtcctaacgtaacattaagtataagtatatataaattgtaaattttgcaaatggactgtagatcgtctatatc

SEQ ID NO: 25886 - DNA, 548 bp, DROSOPHILA
gctatgccaactgggtcaacatgggtccacccaccaccacggtgcttcaggacagggtgccaatggtgcaccgaaaagcgcagaatagaatgcccggcatgccggcccaacagcagctatagcaacaacaagaaagagttaaacaactatcgtctcaataggcattccacggtggcgttccatctccaggattgccacaaccaccttcacaaagtgtgggtcaacaagtgggccaagagccactcagcggcacgatgttcccaggacaggcaatgcagaaacagcccttgcaactgcaaccttgccagcatccacacccacatcagcatccgctgcaccatcatccgcaccagatgccggccaaccaaactgcccccagtggatacggtcgagaaatgctcagaggtgaagcacaggtggtggagaaggagctgatccttttgcatgactgcatattgaaccgaagaatgtgtcttactatatccgacgtatatccgatggatccacggcgcatatttatgggcatgcgatctggtcaaacctgccgg

SEQ ID NO: 25887 - protein, 143 aa, DROSOPHILA
MPTGSTWVHPPPRCFRTGCQWCTEKRRIECPACRPNSSYSNNKKELNNYRLNRHSTVAFHLQDCHNHLHKVWVNKWAKSHSAARCSQDRQCRNSPCNCNLASIHTHISIRCTIIRTRCRPTKLPPVDTVEKCSEVKHRWWRRS

SEQ ID NO: 25888 - DNA, 3902 bp, DROSOPHILA
atagtattgccttaaaggtaaacacttttggtttttagatctccgcaggatgtggacgtctatacgggtgcacttagtgagccgccactggatggagctatttttggtccgttgctcagctgcatggtttccgaccagttcctacgcctcaaactaggtgactcccattggtacgaacggaaaatgggcccacagaagttcaccaaaggtgagagtccttggaagtcctattttctcattaagaatcgtgtttatcctgattcataagctcaattggcggagatctacaagaccagtctggccgccatcatttgtcgcaactcagatggaatcacccgagtgagggagcatgttatgcagagactgcgcgatggaggtaatccccatgtggattgccaggacctggagggattccatttcaatttcgaaccctggtccgagaagcaacagccccaggatcttcatagtgccggcataagcaggggatccacttcggtgcgagtaatgtccaaggcaaatcatcaagcccacaacgtaaccctacatattgataaaggaatctagttagaaacaagattcaattttgattaggaaggatttaatattaaatattataaaaaacatatacttctaaaccggttccttctattttaaaatagagttgctatgctaaagttagttaactaaacagcagcccatcataaatcaacaataagtcaacgaattctaagattataaatcaacttttaagtattttgtatataataattgttagcttataacataagagctttgttttgcatttcaccattaatataaagctgtcatcaagactatcaatgtagctttgttcatttagaattcttcgctgtaaagaattaagagaacgttactgccaaagagaacaaataatcgacgaatttcagcgcatataagtggaggctctccagtttgatagtcagttatatattgactttcgcagagaaagggtggatttaaaaaaaagaaaaggtgcactacttcgactatgttttcgctgattttattggccgtaacgctattgactttggcgtggttctatctgaagcgccactatgagtactgggagcgacgcggatttccatttgaaaaacactccgggattccattcggttgcttggacagtgtgtggcggcaggagaagagcatgggcttggccatctacgatgtgtatgtgaagagtaaagagcgcgtcttgggcatttatttgctcttccgtccggctgttttgatcagagacgccgatctggctcgccgtgttctggcccaggatttcgccagtttccacgatcgcggcgtttacgttgatgaggaacgggatcccctgtcggccaatatcttctcgcttcgcggtcagagctggcgatcgatgaggcacatgttgtcgccatgtttcacatccggaaagttgaagagcatgttcagcacatccgaggatattggtgacaagatggtggcccatctgcaaaaggagctgccggaggagggcttcaaggaggtggacataaagaaagtgatgcaaaactatgccattgacattatagcctcgactatctttggcttggatgtaaatagcttcgaaaatcctgataacaagttccgtaaactggtgtcgttggccagagccaataatagattcaatgccatgttcggcatgatgatcttcctggtgccctcgtaagtaataagtgagagtgagttttgctatggtgtgtctaatggatgttcttgtaggatagcacagttcctattcagaataggttttaaaaatccagttggcctggccatgttgcagattgtcaaggaaaccgttgagtatcgcgagaaacatggaatagtgcgcaaggatctgttgcagttgctcattcagctgaggaataccggcaagatagacgagaatgacgagaagtcctttagcattcagaagacacccgatggtaagtcataatacaagttaaattctaatcaagatagattgagtggtttaacgttttcaggtcatattaaaaccatatccttggaggccatcaccgctcaggcttttatattctacatcgctggtcaggagaccaccggatcgactgcagcctttaccatctacgagctggctcagtatccagagctactgaagcgcctgcaggatgaagtggacgagacactggccaaaaacgacggaaagatcacctacgattccctgaacaagatggaatttttggacctgtgtgtgcaggaaaccattcgcaaatatccgggtcttcccattctgaatcgtgaatgcacccaggactacacagtacccgacaccaaccacgtcattccgaagggaacgccagttgtgatctccctgtacggcattcaccatgatgcagagtacttcccggatcccgagacctatgatcccgaacgcttctcggaggagagtcgcaattataatcccactgcattcatgccgtttggcgagggtcccaggatttgcattgcccagaggatgggtcgtattaactccaaactggccatcatcaagatcctacagaacttcaatgtcgaggtgatgagcaggagcgaaatagagttcgagaacagtggcattgccttgattcccaaacatggagtgcgagtgcgtttgtccaaaagagtgcctaaattatcataaaaattacaattgcaatgatgaaatacaatagttaagtggctagcaaatcactccgattatttggaatgataagagattaccgtcagataaaaaacaaaaagtgtacaataaattcattatcaaatcattaattaatatttaaattcgaaaataacttttatgaattaacatagtttcttgttataataatgttacttttaactcgctctctatttataggtattatgtaaattataaagttgaaatgaatatgtgtgttttgttaatttatttgctaaagttgcctaggtgcaatccatctgtttgctgttgaaataccttttatgattgtccttatcgttatcataagtatgcaatgatacgagaaccaactgcgattaccaattactaatgtcaccaagagatagcatagggtaacatattgtatattcagtgtggtaaaaataatgaactttctaaaccgttttctataatcagatgtattaccaataaatacaatagaccagaaaacaacaaaaagtgaggtcaacaatttttattgaatgcaatgccagtgctgtggaattcttcacaattcaaggagtcatggataaagatagtatgtacaataacaaaagcagtgtgctaaccgtccagtcaatttgctttccagaaatccgactattccgataattccgatttatccgattatttcgatttatttgctttcgcgctcctccaattgctgcatctccttttcattttgcaacattttctgtttgttcttttgccgaaagatttccttgctggcttctttgatggcctcgaagattttggcctgcgacatgatttgcttttgaacattttccacagctggctcggcattgatatcgatcaaatcacttagaccttcggataaatactcattgttatagggtttctcttcgacttcgttgcgtttgaatagcgagaatggcggatacgagggatacgtacgctttcgtccacagcctgtaaatcgtccggattgtaatggatattattatatattgtattaaaattacctgtaaatgcattgcaaaacggtcgcttctcgtacttccattgtataacgccacttagcttgtgctgcaaataagacgataaattatatttatatcaaaactaatcaggtaacaactatttaattaggtatgtaaatgaacgttaaacaatgcgtcgcgttatcaac

SEQ ID NO: 25889 - DNA, 1785 bp, DROSOPHILA
aaaaagaaaaggtgcactacttcgactatgttttcgctgattttattggccgtaacgctattgactttggcgtggttctatctgaagcgccactatgagtactgggagcgacgcggatttccatttgaaaaacactccgggattccattcggttgcttggacagtgtgtggcggcaggagaagagcatgggcttggccatctacgatgtgtatgtgaagagtaaagagcgcgtcttgggcatttatttgctcttccgtccggctgttttgatcagagacgccgatctggctcgccgtgttctggcccaggatttcgccagtttccacgatcgcggcgtttacgttgatgaggaacgggatcccctgtcggccaatatcttctcgcttcgcggtcagagctggcgatcgatgaggcacatgttgtcgccatgtttcacatccggaaagttgaagagcatgttcagcacatccgaggatattggtgacaagatggtggcccatctgcaaaaggagctgccggaggagggcttcaaggaggtggacataaagaaagtgatgcaaaactatgccattgacattatagcctcgactatctttggcttggatgtaaatagcttcgaaaatcctgataacaagttccgtaaactggtgtcgttggccagagccaataatagattcaatgccatgttcggcatgatgatcttcctggtgccctcgatagcacagttcctattcagaataggttttaaaaatccagttggcctggccatgttgcagattgtcaaggaaaccgttgagtatcgcgagaaacatggaatagtgcgcaaggatctgttgcagttgctcattcagctgaggaataccggcaagatagacgagaatgacgagaagtcctttagcattcagaagacacccgatggtcatattaaaaccatatccttggaggccatcaccgctcaggcttttatattctacatcgctggtcaggagaccaccggatcgactgcagcctttaccatctacgagctggctcagtatccagagctactgaagcgcctgcaggatgaagtggacgagacactggccaaaaacgacggaaagatcacctacgattccctgaacaagatggaatttttggacctgtgtgtgcaggaaaccattcgcaaatatccgggtcttcccattctgaatcgtgaatgcacccaggactacacagtacccgacaccaaccacgtcattccgaagggaacgccagttgtgatctccctgtacggcattcaccatgatgcagagtacttcccggatcccgagacctatgatcccgaacgcttctcggaggagagtcgcaattataatcccactgcattcatgccgtttggcgagggtcccaggatttgcattgcccagaggatgggtcgtattaactccaaactggccatcatcaagatcctacagaacttcaatgtcgaggtgatgagcaggagcgaaatagagttcgagaacagtggcattgccttgattcccaaacatggagtgcgagtgcgtttgtccaaaagagtgcctaaattatcataaaaattacaattgcaatgatgaaatacaatagttaagtggctagcaaatcactccgattatttggaatgataagagattaccgtcagataaaaaacaaaaagtgtacaataaattcattatcaaatcattaattaatatttaaattcgaaaataacttttatgaattaacatagtttcttgttataataatgttacttttaactcgctctc

SEQ ID NO: 25890 - protein, 515 aa, DROSOPHILA
MFSLILLAVTLLTLAWFYLKRHYEYWERRGFPFEKHSGIPFGCLDSVWRQEKSMGLAIYDVYVKSKERVLGIYLLFRPAVLIRDADLARRVLAQDFASFHDRGVYVDEERDPLSANIFSLRGQSWRSMRHMLSPCFTSGKLKSMFSTSEDIGDKMVAHLQKELPEEGFKEVDIKKVMQNYAIDIIASTIFGLDVNSFENPDNKFRKLVSLARANNRFNAMFGMMIFLVPSIAQFLFRIGFKNPVGLAMLQIVKETVEYREKHGIVRKDLLQLLIQLRNTGKIDENDEKSFSIQKTPDGHIKTISLEAITAQAFIFYIAGQETTGSTAAFTIYELAQYPELLKRLQDEVDETLAKNDGKITYDSLNKMEFLDLCVQETIRKYPGLPILNRECTQDYTVPDTNHVIPKGTPVVISLYGIHHDAEYFPDPETYDPERFSEESRNYNPTAFMPFGEGPRICIAQRMGRINSKLAIIKILQNFNVEVMSRSEIEFENSGIALIPKHGVRVRLSKRVPKLS

SEQ ID NO: 25891 - DNA, 3540 bp, DROSOPHILA
ttaggtagagcttaaagagagcactgcaattgtccttcttccttctacctattgtatccttttcaacactcttggttcaattatatattatatccattctccttatatccatcctcaaatttttactaacaataatatacaagttttaagattgttaaattattttctttcagagaataattgagtcttatgttgagaagaggcaaggaacaacctatggacccccaaatcagcgggctatgacaatatttattgatgacattaacatgcccgtcataaacgaatggggagatcaaattacaaacgaaattgtgaggcagatgattgaacagcgtgggttttattccttggagcggccaggcgatttttcgacaataatggacattcaaatgctttctgctatgatacatccagggggaggcagaaatgatatcccaaaccgattaaagcgtcatttatgcatttttaattgtacattacctagcaataattccatggatcaaatatttaaaagtattggcgccggatattttagccctgataggtttggagatgaggtagtttgaagtcataccacttctagtaccattaactaggatcttctggcaaaatgtcaaggcaaaaatgttacccactccagccaattttcattatgtgtttaatctgcgagatctttcccgaatctgggaaggtattctcaaagtcaaacacgaagagtgcaaatcggtggatcaaattttaaagctttggtgccatgagtgtacgagagttatatcagatcgtttcacagctgaaaaggataaaatttggttttcaagtaaaatgatatctgatgctgaattaaatataaaggaattcatggaattctacccagaagagcccacttactgggttgactttttgagagatgcaccagaaggtcaagaagaagaggacgaagaaatgtcttttgagccccctaaaatatatgaagaaattccaaggttattaaaattatttaattatttatttgttcccgctcctgacagatcttatttaatactctgattttgaataatattaactaaatacaaacaagatgttgtcatcgataaagaagttataaagatttaaatttcttcaaacaaagatatcttagttccaaactttaaataactaatgataaatagtttatattagataatgtctgtctccaatattgtgcctaatcttaataaacaaccttttccgtttttatttacaattttatttttaatagttttgattttgtaaggtcaaaagtattggtattcatgtctcagtttaatgaatatatacgaggatataatatggatctcgttttctttatggatgcattaaaacaccttatgattgtttccagaataataagtaatccaagaggaaacgctttacttgttggtgttggagggtccggaaaacaaagcttgacaagactatcatcttttatagctggctataaattttttcaaatgactttaactcggtcctataacactggaaatctaaccgaagacttaaaatttttgtatcgaacggccggccttgatggaaatggcatgacttttattttcactgccaatgaaattaaagaagaatcatttttagaatttatcaataacattttgagttctggtgaaattgctaacctttttgctaaagatgagcttgatgaaatgtatagcgagctaattccagttatgaaaaaacaccaacctcgtcgaccagctacgcaagacaatctgtatgacttttttatttctcgtgcccgctataatcttcatatagctctctgcttttctccagttggagagaaatttcgaatgcgatcattaaagtttcccggccttatatccggttgtgttatagactggtttcaaaaatggccggaagatgctcgtatcgcagtatcgcgccattatctgactgattatcaaattgtgtgtagtgaaaaagttaaggatcaggttattgacatcatgagttggatacatgaatcagtacaagaaacttgtttaagttattacgatcggtttcggagagttacatttgtgacgccaaagtcattaatatcatttctagaaagttataagttattatataaagacaaacaggatcatattgttataatgtcagagcgaatgagttctggattggataaacttgatgaagcaggtgcatctgttgctattcttaaaaaagatttgattgaaatgaacaaggttattgctcttgcaagtgaagaagcagaagacgttttggccaccgttgaacaatccaaagctgcagctgaaatagtaaaagtggaagtggccgaaaaaaagggccaagcggaagttcttgtaaaaaacatttcagcagtaaaacatgtggccgaagctaaattagaaaaagctcttccggcattggaggaagcagaagctgctcttaaaactattaaagcggctgatattgccactgtcagaaaattgggaaaacccccttatcttataacgttaataatggactgtgtgtgtattttatttagaagaaaagtaaaacctattcgacctgatacggaaaaagcttttatacaaagttcttgggacgaatcccttaaagttatgtctgatacaagttttttgagaaaaatagtagagtaccctactgatttaattaacgccgaaatggtcgatatgatggtgccctattttcagtatccgtaagttaaaaacaaaaattaaaaataaaatcaacccagaattttatatagtgtgtaaataaataaattaacgcaaatgctaaatagcaaaatgaggaaaatgtgcatttataaaatttgctaattataattatttcccctctaagagaaggaaacaaaaagtttaaaattggtgcactgacataaaatagctcatacaatgcctcatccaatttcatagagggttagtttttttgagagtgtctcaagtattaactattttcaaatataacttttttacgaatatgagttatatattatcaaattttattatttggttgattttgtctttaagcaaaattcgtcaaaaaatcatagatagcatttgggatttccatttaaacaatgcactatggcatatggcgttttttggcagtccaaatttttatgtcaatatatcgtcctttaacaattattttctaatagaaaattgatcatataaataaaaacaaaattgactgaaagcttcacttaatcgttttatgagcttttaaaggtgaagtggtaaccaactgattgagagaatgcaattcccgtcaaattattttcttattattgcacgtggtacgatcgtcaatacgcagacataaattatagtatagtaactatagtatgaaaaataaaggcaaaggaatgttgtttttaacgtatgtagttaatatatgtgtagttgtactgtttttgtgttgtgtaacatccaattttttttattttaacagaaaattctaacgtgtcccctgtttttcgtgaagtaacactaattttctgacaatttctcacaa

SEQ ID NO: 25892 - DNA, 1548 bp, DROSOPHILA
atgacaatatttattgatgacattaacatgcccgtcataaacgaatggggagatcaaattacaaacgaaattgtgaggcagatgattgaacagcgtgggttttattccttggagcggccaggcgatttttcgacaataatggacattcaaatgctttctgctatgatacatccagggggaggcagaaatgatatcccaaaccgattaaagcgtcatttatgcatttttaattgtacattacctagcaataattccatggatcaaatatttgattttgtaaggtcaaaagtattggtattcatgtctcagtttaatgaatatatacgaggatataatatggatctcgttttctttatggatgcattaaaacaccttatgattgtttccagaataataagtaatccaagaggaaacgctttacttgttggtgttggagggtccggaaaacaaagcttgacaagactatcatcttttatagctggctataaattttttcaaatgactttaactcggtcctataacactggaaatctaaccgaagacttaaaatttttgtatcgaacggccggccttgatggaaatggcatgacttttattttcactgccaatgaaattaaagaagaatcatttttagaatttatcaataacattttgagttctggtgaaattgctaacctttttgctaaagatgagcttgatgaaatgtatagcgagctaattccagttatgaaaaaacaccaacctcgtcgaccagctacgcaagacaatctgtatgacttttttatttctcgtgcccgctataatcttcatatagctctctgcttttctccagttggagagaaatttcgaatgcgatcattaaagtttcccggccttatatccggttgtgttatagactggtttcaaaaatggccggaagatgctcgtatcgcagtatcgcgccattatctgactgattatcaaattgtgtgtagtgaaaaagttaaggatcaggttattgacatcatgagttggatacatgaatcagtacaagaaacttgtttaagttattacgatcggtttcggagagttacatttgtgacgccaaagtcattaatatcatttctagaaagttataagttattatataaagacaaacaggatcatattgttataatgtcagagcgaatgagttctggattggataaacttgatgaagcaggtgcatctgttgctattcttaaaaaagatttgattgaaatgaacaaggttattgctcttgcaagtgaagaagcagaagacgttttggccaccgttgaacaatccaaagctgcagctgaaatagtaaaagtggaagtggccgaaaaaaagggccaagcggaagttcttgtaaaaaacatttcagcagtaaaacatgtggccgaagctaaattagaaaaagctcttccggcattggaggaagcagaagctgctcttaaaactattaaagcggctgatattgccactgtcagaaaattgggaaaacccccttatcttataacgttaataatggactgtgtgtgtatttta

SEQ ID NO: 25893 - protein, 507 aa, DROSOPHILA
MPVINEWGDQITNEIVRQMIEQRGFYSLERPGDFSTIMDIQMLSAMIHPGGGRNDIPNRLKRHLCIFNCTLPSNNSMDQIFDFVRSKVLVFMSQFNEYIRGYNMDLVFFMDALKHLMIVSRIISNPRGNALLVGVGGSGKQSLTRLSSFIAGYKFFQMTLTRSYNTGNLTEDLKFLYRTAGLDGNGMTFIFTANEIKEESFLEFINNILSSGEIANLFAKDELDEMYSELIPVMKKHQPRRPATQDNLYDFFISRARYNLHIALCFSPVGEKFRMRSLKFPGLISGCVIDWFQKWPEDARIAVSRHYLTDYQIVCSEKVKDQVIDIMSWIHESVQETCLSYYDRFRRVTFVTPKSLISFLESYKLLYKDKQDHIVIMSERMSSGLDKLDEAGASVAILKKDLIEMNKVIALASEEAEDVLATVEQSKAAAEIVKVEVAEKKGQAEVLVKNISAVKHVAEAKLEKALPALEEAEAALKTIKAADIATVRKLGKPPYLITLIMDCVCIL

SEQ ID NO: 25894 - DNA, 23620 bp, DROSOPHILA
tataactttatggctcaatacgcctgagaagccgacaagcggaagtgttcatttaggttcgagttagcttcgctgcgtgcccgcctccacaatgttctactcaaactggaatcgggttgcataatgcagtaaaagatagatggatatgaaatccagacgctagcttttggtaaggcgcatccatctagccgcgctcttatcctatccgctatccatgttaattagccaggtctcatgtctctgtgtggtggctccgcctcttcttcgtctaatttgtgtgctcgccatcatcaacagctgcggctacgactgcgggttcgttgacttcgccgtgtagtggagtggagtgcagcattgattgacagtggacatgcgcccggggaactattttgtttatcttaatattcctccaaacaagttccaaccgattgatgagttcatgtatgcgagctgcgaactgaactaggcgatcaaattgtaccccagttgaaaaccaagctggtcatgatgaataaaatttaagacataaatcattcgctataattcttcgttatttccttttaagaactaaactgaaataaacctttatagaaacttcccttcgccaaaagaattgctaaattctttcaaaaaaggaatgattcaattaaatgaaatgtctattaccagtcgttttgaaactgttgaaaagtcataaaaataaagtgactaagagcctaatgaaagactacactcgattccctactctttccggctttcccaacatctacaaaattaattagttccccgcgcacactcttccaaactcttccaaaacgtgcctttaattgagggctattgaaccttgcacaatattttcataattcgggagaagatctatcttgaggatagcgcgaggagggcgatcttagtgagctgggagcttgggaggctgcggctaaatgccatttatagccacaaatgtgaactgaagctggcgacgacgttggtgggttgcataatggcgcatccgcgtcgtcgtcggtttggctgtctagcccaatagcatttggcgcgtctaggcggctaattaggatttagaaaacaccatcaaatttagaaatgcacccgaaataaactgaacgcaactctgcaggctgctgacggcggtggagtagggataataaatggaataaatgcgtgaaaatgtgccccgaaccacgccgatccgaaaataaactcaatgtacatgcccccacaccgccgaactactgcttcagttgaagttgcgccgacaaaatgttgaccccaatttaacttaattttcgtgtctgctttgtttgttttccatcttttcgcagagccgccatgagaatggcaatggcggaggagaagagggaggagccaaaggagtgggccacgatctggaggcggatgttgcggatgccagtcagccggagcgcgtatggctggtgcaccgcggtggtttcactgccgccatccgtctgccgactgcgtcttctggccgggatgaggagaacaagctaagcctgcgcctcctgcataatggggagcagctgaccgtcgacgaggacgatgtcgagaagcagaacagccccgccctggaccttgtcgaggacatctgcgagctgaagtatctgaacgaggcgtccgtgctccattgcctgcgtcagcgatacgccagcaatctcatccacaccaaggcggggcccacgctgctcgtggtcaatcccatggcaccgctgtccctgtactccgagaaggtagctaccaactggttactggccagagcgggttatttatcggctgctgtctttcgttcgtaggttgtctccatgttccgcggctgcaagacggaggatatgccgccccacgtctattcactggcccagaccgcctacaggagcctggtcgagacgcggcgcgaccagagcttgatattcatgggccgatctggttctggcaaatccactagcttcaagcatgcactcaactacctggcgttggcagctggtatgcgtttccacagtcttattgtcgtggttgctcctactcacactcgcgttgcagttgcatttgttgtttgttttccttttggccgtaggctgcgggctgctggctggcccagtttgcgcgggccacaccaaaatccaatctgcgttcgattggctcatttgcattgttggccaagaaatgcagctgcaattagacaagcctcaaattcggttcaattgttagatttatcacccaaaaaggcgaaaagtctaatagaaatgtaaattgccaagctacatattaatgatttgcaatttggtttagatagatatgaacaaaatctgcttttttcgcataaaacatttgtattttgtttagtaatttgaatatcatattttaatataaaatgttgaaaccagtttcatcaacgatgtttttaggaaaaaaaaaagccacagcttttacctattattaattcatcttttatgatttcattgagaactgaaataacaacaagggatattggacgcttatgtgcacaaatgagatttttgttttgttaaattcaattcaaaagctatttgttcttaaaacttttttcctttttgtatttaggtgcctataataattttataaacgcggagaaggtcaatgccctgtgcaccattctggaggcttttggaaatacgaaaacttgcctaaactcgaatgccacgcggatgacgcagctgttaagcctggatttcgatcaaaccggccagattgcatctgcctcattgcaagtaagtttttctttaatacatacaatcaagtggtttaaatgcctggtttctcgcctaggttctcctcccagaaagacaacgagctggccgacgacttggtcatgaacatagcttccacatcatgacgagacttttggctggcgctgctggcttgctacagaaggagctgcacctggagaacataacctctgaggacagccatccttttatatcgttatcccaaaagctggaagatcggcatcgagctgccaatgactttatgcgcactgttcaggcctttgagacgctgaacattgatgcgaaggcggtacgtgggatctggagcattttggcggccatttaccatctgggcattgctggcgtcacaaaactgggcactggctccacagcccgaactcagtttgccaatcccacggccgcccgaaaggcctcgggcttgttgggcgtgaatctggaggatctgtcatcagctgcctttggtcttacccaaccaaacgcccccaatggcggtctgagtccatcgaaatcgcccacctcggacactggacacgaatgggcctgggaatgtctcgaggcgttggtcattggtctatattcggaggccttggctgcagtggtggcattgatcaatcgtcagatctgcacatcgtcccacaccatagcctcaattatgctaattgacacgcccggcttccaaaatccagccagctgtggccagcaagtgggtgctactctagcggatctgcgtcacaactatctacaggagcgtctacagatgctcttccatcacaccacactggtggctccccgcgatcgctacgcccaggagctggtagaaatcgagatggacctggcatcggagtgtcatccgggaccgttgatctcgcttatcgacaaggcacctcagaatcatgtagtgcgctcgtcccagcgagatttgcgagagcatgatcgtcgaggaatgttgtggtgagtacaatgctttaatagtttaaacttcaaaattcacggcaaccatttatgttctaggctactggatgaggaagctatctaccccaactccaacgatgacacattccttgaacgtttgttctcccactacggtgaccgggaacatcatagcctgctgcgcaaatgtgcaggtccgcgacaatttgtactccaccatctgcaaggcaccaatcccgttctctacgctgtcgatggatgggtgcgtcatagccgggagcacccaggtattcggaatgctgtatccctactacaggacagcagtcgggaggagatcaatcgcctatatatcggctcactgactcgaggatcgggagcaatggtgttttgtggctcttttgctggactggaaggcactcagtcacttcgtcgcgtgtccagtattcgccgctccttcacaacggccggagtaaagcgaaactccataatgctgcaggtgaagttcacagtggatggaattatcgacactttgcgccgcactggaactcactttgtgcactgctatctgctgcaacataacgcaggcaaacataccaagtacaccgccaatggatcgcccagctcagctgccggtcaggtgtccagcgaggaggaaatggtcaacgtgccactgttaaggagtcaggtgcgccaacgatcagatcataattgataacacatatttaattattttcctaattgcttagctacgtggttcacaagtcctagaagcggctcgcttgcatcgccttggttttcccgaatcagtgccattgttggaatttgtcaggcgtttcgggcttttggccggggatttggctagcaataaggatgtgagcgtggagcagatattagctgtcaatgaactggatgtggccagctatcgcataggacccagccaggtgagttctaaattatatcttctttgttgaagtttacaagcatttgccgagaacttttttcaaaaaaagctttaaatagaatagcatacacccaataactattagagcgcacatgtttagttaacggcctccatattaataattataaaatccaaatttaaaaaaatcaattatgtgcaatatttatttgctttatataattagatattgcagtttctaattgcgctagcagttagtccaacaggtttttataaatgtgtattaaatatatttcgtctcgattgctgattttgatggaattgacagcggcagtcgatgaaccagtttgactgaagcctctctgtcttctcccccctcaatggtggcttttgataccacgtttctataagattaattactctcagtcgaaggcaactcccatctaattgtttttactcacgcgtaataaggttggttattccgaagagttgacattgacttaacacgttcgttcaatagttaatgaaaatcaagacggaccaaataataggctgagtttaattacctccataaacctgcggagtgatccacttttatttaagatgtaccgaatgattacttaaatgtaaaataatttttgactaattcgaattctttgggtggatagattcttgtttaagtctaggcttatttatattaaaaaaaaaacatcactttttggtctgtagcaatcgtggtttcctttgatctggatctagccaattgaacgccggtttgctgtctcccgaatagtggacggccggggtcgtttaatgtggaccagcccatcgctggtgccatacggagactgcggccgtgtgctcagataaaagatacctcttttggggactgccggttcaccgcccatgaactcgttgccggtgcatgtattgactgcatatttttcgctgcctccgacgttgcagttgcaggtggccgatagcaccgatttcgctgagctgcagcgcaatgcggcaaatgatttcggttgccggactgactcggcaaagtagaacatggccgcgaagtggtcgcagacaaaatcaaactccgtggccgtggcgttgggacaatgtggctgcccgaggccccagttggcaaagaaggaggcatgactgagcttagtactcggattgccgagcagcgttagatccgtgtgaattgactccacatacagggcatcgttgacgtccagcctctcttcgggtcccaggctgagttgagtgagaccagcgggatccaaggcgaaaatagcaccaaggcgatgcggccttaacagctttccagtcaatccagagatgtgactgccggcgctgtgcccaatcatatagatttgctcgtagggaactcctgtgttgtcatgaagaaaccgcaacattttggccacattggcagctatcgacggaagctgcttagacacacgtggatagctgatgtccaacgactggcgactccagtccagaattatgacgttgtaattgccccgggacaggtaggcatccttgatggcagcattcgagcaggtgacactctttcccgcccagccatgaatggagaccctaagaaaaaaaaacacataacgtttaatagtgatctagcaatgaaaactagccacaaaaacttacctaactggccatttcggattgaagtgcgagttccttagcatggtcagatctcctggtcgcagcagttgacgctcctccggattgaggggcgtataaagatcgtaccgcagcagctttgtttgcgaaggacggggccttccgaggatgacgccagcctcagtggtaatcatgccttggattacatccgaaatggacacttcgcacttaccgggagcataggcaaagtagtcaactgacgcatccgctgaaagggcagacgaggcaaaagctgcttatagaacatatatatcggattgatgcgttcagaacttacttcccgctgcgccaaggagcagcaggcacgtccacagcaaccagtgtgatatatgcattcccgttaacgagcccataaaccgcactggccaaagccaaaagcctgatgaaaattcacgtcgatgcgtcaattaaaattcacttaagtgcgatttaaggtgttcagttgtttctcgaaattctgccacaattcgcgatccaaattttatcactcgctcgcgccgctcactaaaagaacgttaaatttctgagccgggcagagctgatctgagctgggctaacctgtcgtgcacctccgaatcgttacaagcctcgaaccgaagtattgctaaattctaaacggaggcttggttaaataaagcccgctgcgttctgcctctgccgccggcgaccggcaagggcggcctaccagcggcggcagcagaggcagcagagcggtcactgtcatgatgaacgaccactaactggttggaacggcgggctggtcagtgccggtacaccagtgcagtccacctatcgcggcttttgcagtggctgaaagatgcagtttttgtgtctaagtgcaggcaaacacttcacagattgtcaataaagggatgctgagatggatgctggctttaaccaccttttcaaccatagacagtgctacatagtgggtcaataggctttcactgagcactcggctcttcataagttattaatttatgcattgattataaacgtctgtgctagcataatatattcgacacgcatatctttaactgatttacagtttcgggtcgataacgccatcaccagttggttgatctctgccagttgcccgcttatataagttcacctgagatatcattaataataattggaaaatgatcgcactctgagtcaataatatgatctgtcatttcgcaagggattgtccattacaacatgatggcttggaatggattaaataaattaaataattgcacgctatataatagaaataatacgttaatgtattctagcctgcatcttacagaaattattagccattagttgttaattatttgataaatcagaactagattttgcagttagaccagtcgctttttgtactcgttttagatcacattccaattaataaaatgaggttggtaaacagaagccccgggcctggggagtcgttgatcccacttagaactctacacttccacacatttcacctgccccagacgaaatgcggctgagattttggggactgggccaaaagatcccaagtgggttagggttcagctgtgttttgccaaccatttagcagtaaacttgcgtttacgacttgccttgctcttcctctttgaatttttggctaaaactcattcatgctcatgcttacatgtatatagatttctttaaagatcgttaaacccgtgcgtggcgttgccattgtcgtgtgtactgatctcgcgccgacttgttacaaaaagtttattgacaggatttacgttttaaggcaaacacataatgtgtgcttattgttattatgattatctcaaacgaaacgaaacgagactcaacgaaatccgttggcattgttccgtcaatttgtccagcaaattttgttgttactttcaatctaatcgagaaattaccttggaattcgatggctgccatttgtcagtcaacagatattgaaacgttttcaaactgctgcagtcttctgtaattgctgatggcatgcgaacaatcaccggcttgtcaggatcctttcattaaccgggacttaccctgcaattattgtattaaatgggcacctctcaatcatcacgatccctttctaggtggatccaccacagcagcgttcacattttgaggaaacctcaaactggttactcatctccagtttgggcccagtcgaagtaagcatgactttgctaaatgactctttcaccaaagttgtaggcattttcttcagcttctaatcgaattagaattgattaaagcatttgaataatttatgcctaaattaagactaattcacatcgctgcttgtgatgttacttccctaaaatatcgtaagcgtaaactagaatttcgcgtcttatttcgtatgtgagatattttaaattcgcacctggcatactactatatattatttgttgagaacaaaagctctgattttttgagggttatttttaaaatagaagggtttgattttatggcagctaatcgatttgcctaataagtttgttttaattaaatgataaacttccacttgactcttataaatattacaattttgacaaaattccacttgtttactatatgttgacaaccgagagtgcctggttctaaagtcctgtcaaccggtgtctagcctgtctgggaagatatcggttacgtgcaacatctttggattcactcggttgcccgcatggggtttttatttcctgttctcagcggtgcaactgtgaatcgaactgtgcttttcgactggtcagtggtagtcggtgcccagtggccagtgaagtgatcgtaataaagcaactttgacgtcacttacagagattccagtttgctcgtcttccccatcgactctttctcctctcgacgatgacgctggatactttcacggtcaagttcatctcggcattgttgcctgtcgcggggtatagaattcccccccagatgtaatctctgcgcctggaatgtgggctccagatggacagggcttcgctgcatttcagtcggactttgcgaatggaaatcgcctgagctctcgtcgagatgtggtcggataaaagtgcagtttgtttgccgttgagtggcaacgcgagtgtcgccgcatcatttcgcaacagtgctcaaatcctgaacctattctatggcgaggggcatgaggattttgtggtgccgcagccaatcctgggactgctgaccatcggctgtgctatcgcctgcgtccgtatagtacgtacgggaaagtgtccaaatccaaatccgagtccgaaaccaataccgattcccccgattatgattacgaacacacgcacggcggcgttgtcgccccgccgactttcaccaaaaatgaaaaagaaagaaagaaaaaacggcaaccaaaacaaaaatcgaaaatgacgttgcaacctgcattcgcctcactgggaaaccacatttgaccagtgcacattaaagtttttttttcttttctttttaaaccaaagtgaaatttccagcgttcgctttcattagaaatggggagtggtccgcggctgatggctgtctgcctgcctgccgaaaatgattatgtaactcgattgaggcgggttctgtcaacgccacagaggtatggactaggggggaaatacctattaaattagctctcccattcgaatggatgggaaaatataagatgaagcccgaaccgaaccaaaagcgttcattaacgcctccctttggaagggggcgcggctggtgtttttagctttaatctgcaggccccagacgagccctgcatacatatatgtacgtatgtatgtatatatgtacatatgtatatatgtacatatgtaaactagtttttaattatgaaacaataaccaggaagctgccagatatgcgtttcgaacggaccgcaggccgtgtaatcccatcgacatttgtcggacttgtttacttcggttatgtttcttgtaattgcctcgaaagcggtaagttaagggaagccccaatgacatcgttacagcagcttctgtcacgatcatggtaatgatgactatgactgcgggggatcaaggatttcctgatcttcaactgcgacgtgcaattgttttcacagattttgtcgatactagcagggttgtaataaaatgttgtctgaggtcgctgtaaattgaacacaatgttcaatggaataaatttcgcaactaataaaagtcaacattaatcgttcatatttgaaatttcattcattttttttttattcacagttacagaaaatgaagcattgttgcttctacgtatttgtgatttgtttgttattaatttttgccacacacacaattagagagttactgatgaaaatcatttatattttattatgcttgtcctaggttttagcttatattaagttaagctgcttgattcgtctgaagcgcctatagttagttggtgaattaaataacaaggccttataaaagaccattacaatttaccaggttatagaacctgctctggttaacgacctttcatccatgttgcaacctctggagtctagaccagtgcagcctaaaccaatatttatttgtccccaatgaacatggcacttttgccccactcatccgtcgatctcattgaatcttttgtgaggcacacagggcatgtccaattgctggcaatgaaaaggcaaaatggaataacaaataagtagccgagggcagttccagacctagtccattgcctcacttgtttcgcttttcttttgtgattgccttgatggcgatgatgtgactaattatgctgggtagccgcaagtcgagcatgtgtggccaattgttgttgctggtaattagcatcattggtccagccggaggatcggtgatttgttggtggttggtgtggggtcgctgctcggtggctctttggtttggttgcattcactcgcccctttccctcggccaattaccaacggccgcgacctcagccaagtttgtgtttttgttggtgcttcgagctgtgtttatgtgccagccgtttctcgataagccactttcgaatgcagagccagcatttggcttggactcggacacgggctcgggctgcgtctgtttggccagccaattcagttgcgtcgccgagcccgaagagaaaacaccttaccacatccgagagtcccagtagctgccgcccaagccgtgaaagtggtggccaatcagtcagtcagtcgccttcgagtatcgaaaaggaaactgcaatttattgcgaaattatatgcacttttacttgccgctgtcgtcagtcgctggaccattgctttacataattccgcaatgtacaagcacacggtcaagtccaagttgagccaggtgcgcagtaacccgccaccccctgccgctgcctcgccaacaacacacaaacatggattgggggcaggcaagaagttcttctccaatatacgccacaaaatcgaggataatttgacgcccaagttgagtggaaaactatattacaaaggcagcaagcacaccagatccatgagtgcactctgcacggtggatggcggatgtgtgggtgggaagtatacgccgaaggttgtgcccacaagtcccgtaccacttcaaatgcccagccagatgagcagcagtgtgtgcagctatgtggacagcgatgaggaaagtcacctgagcctgagtctcaatttggcgcagcagtcgctcgaggatgagatcttcgcagagctagagaaggtggcacacgatgagagcaaactgaacgaggtgcttcaaagctttgaccagatactaaacgagtatccacctttggagggaattatattagctcctcaagaggagctgcccgctccaccggcggagttcagcgatcgccagccaatgttgtcaaagtcacacagtactctaagcatgggcaggactaggatgcaggtgtaccagtccccggaattggcgggatctgtgttgctactacgcggagccggaggcgattccagatacaactccctgagtgatcttagcggcagcaggataccggtacgcaaacaatcgagtctgcgcaagcgcagcgaaagtttttgcctcgagcaaccggtttgctccaggacatccagtaagcagcgcactcggtccatgctgacccttaatacagctgcacctgtaggatcaaccattccgaatgctgtagccatgccgaagcgagcaaactccagcctcgaaaagagacacataactgccagaccagcggccaggagagcaaactccaccctgaaaccgggtgggataaagccaaaatcgcccaatgcaaacagcgatgaactgctcgtgaagtgtttggccaaaggacaggagatcctgcgtcaggtggagagcatgagtgccaagcccaagaggagcaccagtcggggagtaaccaaggagcactcgcagttggtgaagaacaagaagaagctacagaagctgcattacgccaacgaggagaagatgggcagacccaaacttgagtcctgcaagattataccgccgaaactaggggaaacatccgacaaaaatcaggaactactcgtaaaagttgtccaggatataaagatcacaccacaacagaatctaaagaaacccacaaaggaaatccgcgcagagcaagaagaggattctgatgattcgggacacataagcaacacacagctctccacatccacgagcaactccaccggtagcctttgtgaatctgaaggcgatgaagcggaggatcaaccgccggatgcaaaaagctgtaccaaatccaacaagatcgcggagcttttacagaaattcgaagcagctgcggcggctgggaaaaaaagtgccaccgccacgatgcactgccccactgtggtggccagcaaggtggtggcccaggtgcaagctgtgagctgcattcagacacaggtggagatctatcccacctacacgaaagaggtaactatgcggctgcactgacttggcagcggcagcgccgatcccgcttccgatcctccccagccactccaatttatgctctcagctgcatctactgcactgcacctgtctatatctaactctatccaacttatgctgtatatggaataaatatttattgtacaaatcacttgctatggatttatcttaccacctctcctctggcactatccctttcctttaaccgccttagtattgctttccggggtcctaacatctggtttctggagcacgcttgcactttatatattttttgggggatatagagatattttattaatgctactatgtattttgtatttgcctctttcttcatttcctatagtaatattcttatcgttcagctaaactttctctttgcctaaaaaattagaattatcagttggctgaatcccagacaagctctttatcgctcagtaccaaccactccctgtgtccgaatggacgcatccgagtgtccaggcatccgaccaaaaacaaatgattactgttccacacacaatcaacactggctggcacaagaccgtttagtttgccatttcacattggtttactttcatttttgtctacgtgccgggcataattaaaatttcgagaaaatagtttctcggctcggtcgcgaattcggtgttgactgacagagacggcctgagatgggggccacacctcggaggtgcgtctttcagcagctaatttgtatgggaacccggtggccctaagtatgctaaacacatatgcgatggattcaaccgtcgactttgtgcatttccacctgcatgatccgccattaggagggcattattccagtgtggtctttactatatggcaatatcttgtttacaatttcgttttcattgcccgcgtctgccggcgacgttgcttcttctcactttcacacctgtcagagtgcggcatctttttgcacacaggtgttcaaattgctcataatttgaatttcccccttgtgccgttccattaatctgcattatctgagctaagttagcccacagcccaccttgaccttcactgggaatgggaatgatgtgatttcgtttttcgatttctcacttttcgctcgactcttaattttatgatgaacttaataattgaggggataccggttaacctattgttagttcgtcttaaataacgtaaccaattattagaatgaaactctattgacaattttttaattactcgagattatgtgctccatttcgggttaaagtgctgatgatgaattataaacaaattactcatttttggttaacatttcatttgtgtttctggtactcgccgacagcacaactatgaaatgttttgattgtgaattgtaaacaaattaccactgagtaacgaatgaatttcatatacaattgctaaagatctatttaaaactttttatatttgcatatatatttattttgtgttatattgttaactaaatacttcgtgaaattttgtatgcaagagcaatttgatcgttttattgaaaataaaataataattaaagcataaaatagttacttacaatctcatacttatgaaaaaaaaaacattgtttatttcagatcctcttccgctcaggagttcttagtgaactggaagccaagcgcgatgtcctgctctcagatcgcattatacagctgcaagcattttgccgcggctacttggcacgcaagaagatgtcccaacgaagggtccaggtaaataagacctatctatatattccgagagtatagtaatccatataatcgattccctcaggaactggcagtgcgttgcattcaacgcaatgtgaaggcattccttgccgttcgcgactggccgtggtggcgtctcctggtgcgggtcactcccctgctcaacgttcatcgcaccgaggagcagctgaagacggctaacgaggagctcctaatgctgcgagccaagctggagaagatcgagtgtgatcgcagtgaggtcaaggcagaaaaccaaaagctggaagccaaggtaaatatcaaaaattctgatcgacatgtgttttcgagtggggttgcaattaaaattgcgccatatgacatgacaagtcatctgcgagatcatgtttgcgttggcagtgcttggatatctggggcgccaaaagaaaatgaatgcttaatatatttagctagtattgcagtggaggttcctcatcgagaaacagattctgttgcaagaaaaataagtatttatagaagaatgggtttatagcatcaagttaatatttaatataatcgtgaacattcatttacaaaaatgatgttgagtgcagtaatacaatatttacatgatcctactttactttctaagtaagacaaatgtttaatcaattaaagatggattccctttccctaagtcaaagtaatcaagatgcacatttcgccagtgaatttccattctctttcatttcaattatttcgtttttaaagtgggttaaaaatagcattttgggcattgaacaccaaactgactctgactctcagagtctgtgcgagcgtacatattctggtggagatggacggatgggatgggatgtggatacttaggcaatgtttcgcacaaatcgcacaccagaatagccagatgtatttttaaacgctctaaaagatcattaataatactttgtcgcgcaacagttgagttgcagctgggatgcgattaaatttacataatactgccaaagattaccaaattatgggatcaacagttggtcgaaatcaaaagacatccgcagattatgtgatagacggaactgcttcgatattgcaattgacttggctcgaatggcgcctcttctctccgtcgtgagaaatagagatttatctggctattggttcgccaaaatgggagagccaaattgccggtgagcttttctgctggccagaaccaagcgaaatccgtacgcatcacttagttgccgagaaaacgtcgcgttcgcaagaggcccgtagcgccgtgtccggaagattcgatgtgatccgatccgagcccaaccgatccgatcagatctgtctcgatccgtttccccgccgtgcgtgcgtgaagaatcgctgccaagagcaataaaaagccagcgaaaacaaaggaaaatctgaaaagctggcaatttaaagcgcgcgcgtgctgaggccaaaataaatgcagcaacaacaagccacagaaaaattcagtccgagataaatttaaattgcatcaacggtctcaagtttttgacagcccctagcataatataatccccaccgacacacgaaaaccaactacaccaaaaaccaactcgattggtataacgaaaaacgagacataaatttcgaaatttgcgaacagaaacgaaaatccgacaaatattggccaaggaaatttgcacagaaacaaaccatcgagccaaaaaaccccaaaacgaaacccactagccccctcagccccgcttgcactaatccgaacccatgcctcccctgtcgcctgctaatgaggctactgctgaaattgcagcttcaggtgaggagaatgcaggacctgtagaatcggaccgattggaaaaggagaagttcttggctcgcgtactagcagccatgaacggcggccctagatcaggaaacctcgcctccaacaacagcagcggttcatcgttgaactctacgttgagtggatctgcccctctggcacgcccacccaaaccacctgccagtcaagccaggaaacagctccgtctgctgcccaagcagcgggagcagagtcctgtgctgagcaatggccacacaacacgttccacactgagtcaccagcacaccaccaacaaatacacactgaaatccactggtggcaatgccggcagctcgacgctttcatcgtccttgctgggtaataaggactctgaaataccgtacgaggtctcgctgaaactgccactgaatcctcccacaggagcggacagtgaccgtcatcgcctagtaaaccgttcgcccagtccggccctttccgtgtcgtcgcgatgctcaacacagtcccagtcatcgatctccaacttcacctccaactcaagactgcagacgccaccgagaagggtcttcccgcagagttacacgcgcggatcgggtggagtcgatccctacgaaatgcgacagttggaaagttcccctgtggtatttgatggcaatctctcctttgtgctcggatgccaaaggcagccggtgtatcagtcgatgcgtgcttcgccctcttttgaggatccgcgtacatcatccgcttatctgagtgagaagatacagaatttcctaaagcgcacagatcatgtacaggaggagtggaccgctatgtccaggaggacgcgaagaatcaacagcaatagtggtcgtgcaggaggatctgaaagtcgctgcactaccccaggcagcacctgttcgggatacgatgactacgataccatctcgctaatagagcgtcagcgagagaggaacagcatggagcgctgcggatcggtgggacgcactcgctcctcgcagaacatcttgaccaaggcctttcaactggccaaacagcttccccatacgccaacgtcgcgtgggaattcggttgcccgggatcgggagtcatctgtggccaccattagtcttacaaccggggacaatgacgatgatgatgatcgcaccattcgtgaggaggatgatgaggtatcagttgcgccaaccttgagcttgtcgctgacacaatttcccgcctctctactattaaatctgttgttgagtgggggtgatgatgtctcctcttcataaatattaaattcctaaacaaacacaaaacacaccggccattggatggggcttccatgctgacattgacagcggcgaagctcctccgccatcccccacacctgagtagtacaaggatctatttttggaatcgaatactgtgtgaatcacacgttcaaatttttttgggcgataggaaaatattccatattcatattcatttttttttcgttttgtggcaaaatagaataaatcaaatgtttatgtggtctggatacattcaaaattagttctccatggtattttctggaaattgttttatttggaagattcttagatcttaggatcacatatttatgtgggcattgaaccgaccttcagcattttattaagtcgatttagatattgtggcatacaaataagattaaactctggtacttttcttgacagatatgctttgatctgtggtttagtaaatgatccttcacaatgagtaatttctttgtcactttttgtgatctaaaatccatttaccagcgcttcattttagtttttaccaatgattctctagtatatttaacgtcatgtgaatgacaaaagaatacagatgacatcaatgaaatgtatagaaatattttttttaatattttaatattgatggagttattcgtatttttctaaataaacattttttatatttaggaagaattttgtctttaatagatacatcaaattaaaaacttttgtgcatcaattcgtttgctcacattatctcggcactccggcaatgttttgttaataatgatttcaattgtttggacacaagttagtcagaaaacaaaatcgttaagctcaagtataaagtcagataaactctgtgaaaaactagcgcacaatcatgaatgtgttacatctttcgaaatcaatttctttgcagctatccgagctgacggtggacctggccgaggagcgatccacggctcatatagctaccgagcggctggaggcggaaaccgccgaacgcttgaagctggagaaggagctgggcgatcaaaccaacaaggtgaagaaccttcaggagacgacggagaagctggaaatggagctgatatgcgccaagtccgatctgaatggcatctctgaggacgaggatgcagagaacgaggatggggtcggcggcggcgtctacaagcttaagtacgagcgggtggccagggagctggagttcaccaaaaggcggttacacacgcagcatgagcacgatctggaacagctggtcgcgctcaagaagcatttggagatgaaggtcggttaacatgattcgtaatatctttaccacggaagtgtaatatgttccaccccgccatttcagctttccgatgcctacgaagaagttgtggaacaacgtcaggttgtgggccaatggaagcgcaaggcacagaagatgaccaacgagatgaacgatctgcgcatgctgctcgaggagcaaaatgcgcgcaacaatttgctcgagaagaagcagcgcaagttcgacgccgagtgccagtccctgcaggatgcagtgcgtcaggagcgacaggccaaagagcgctacggtcgcgaaaaggacgtcctgcaggccgagaagttcacactggagcaaacgctggcggtaagtggttgctgcaacatagtttcatttactcttggcaacatgttgataatagtctcgagcaacatttctcgaacactagtcagcagatatatacattttcttagcgaattaaaatcagttattaatccataacattggaattaaaaaaaaaaaaaaaaaaaaaaaaccaggtaaattatttccatatttttgtgtcataaatgtaaattggaaaattaatatatttaagaaaacactggttgctcagtgtttgagcaaggtgcgcacattgcagtcgagatacagatagagatactggatatctccgactcagaaactcgttcggctcgtttgcccatgcacattctgaggcactgcgctccacggtctacctagactactgcctacctgcccacaccgatcatctgagacgtgtacgcatgtgcgaccgctctcttgcattgttccatacccagacgatatgtttatagttctgggttctcgattcttggagtttcatgtttttatcggcctgtactcgagacactctctgcctgtctccggccgtctctgtatttgtatctcttgtcggccttttggtcacacatttgtggatcttcgctttgctgctttcttctcggttccgctcgacagtagctcgaagaacgtcaacgtgcgatatctggagtatatagtgtgttacgattcctccgtctccgtctgtcccggtggctctctgttccgattgttcggactggaaaaataaattaaaacgttggcggcgttctcattacgctttcgatactcataattagctggaagaggaagagcctctatgaagggcgataactgaactggtcactgcgatttagatagcacaaaccgagggtcagaggcacaagaacagaaattcccaggccagtacagccatgagtttccgctactcaactcggctgattcaagtgagtctgaataggcactgatccgagctgtaaactccagaaaacagaagcaatttagctgactaaatgagcacaagctacctttattactaagtggcttatatcgtagtgaaactatacagtttacaacgaagatcgtagtttttaagaaataagtagacgtttgttaaggtaccataacaaaattaggacattgtagttacttgttccaattattaattctggctttatttactcttcaggacacccgtctggatcttgaattcaaggaggagaaacttgcatcgctacagcgcgagctggaggagatgacctttggtggcggcaccgaggaggagttcgcccaactgcggcgctccaaaaatgaaacagagcgtcgggccaaggaacaggaggaagaactggacgagatggccggtcagatacagctgctcgaacaagccaagcttcgcctggagatgaccctggaaacaatgcgcaaagaagcgcgccgtgagtcccagcagcgcgacgaagagctggaagaagtacgcggtaacggctacaagaagattaaagcccttgaatgccagctggaaactgagcacgaggagcggactctgctgctgcgcgagaagcacgagctagagcgacgtctctcctccatggaggatcgcgatcgtgttgatcgcgatgccgaggaagcgctcaaccaaaaactgcgacgcgatcttcgcaaatacaaggccctgctcaaggacgcccagacacagttggagcggcttaaggctgacacgcctggcaagacgcttataagacaactgcgtaatcaactggaggatgccgaatctgctcgttcgctggctatgaaagcgcgacaaactgcggaagccgaacttactgaagtgcaggccatgttcgatgagtcgcatcgagctaggaatgacgcggaggagcgagccaatgccgcacacagagatcgggctgagctgcaggcccagatcgaggagaacgaggaggagctgggcgagctgatgaagaagtacagcgccacggtaaagcaactaaatacagagcaaatcaacgtatccgaggctgagtttaaactcaatgaaatggaagcagagcgcaataacctcaaggagcaggtggccgagctgcagcaccgactggacaacgttgagaacttgggggatccatctatggccatgatgtccaagcggtaagataaggtagctcatgtttataacaaactttatttattttattttgtttatggaacagactggagctgcgcaccaaggaattagagtctcgactggaactagagcaggccactcgggctcgccttgaagtgcaggtgaaccgtcacaaagaggctctggaaaaactgcagaacgaggtgacgcagtcaaagatgcgtgagatgcaggcccaggatgtaatcaaaaaatcgcaaaagagtctgcgcgacatgcgcgaagagttccacgctgtctccagccgcgagcaggagtcgctcacaaggcgcaaggacctggagaagaaggtggagcaaatggagtcggagggagcggcgcttaaaaacgatctacgactggctttacagcgaatagctgatctacagcaggcaatggaggaagagggcgaggaggagctgagcgaaaggtaactgaatgaatgaacacttaaccttggaatggtaataattatatttaatccattgcagtgatgaaagcctcagttcggtgggctctatcagtgatctggaagatcgacttcggccagttcatgtaaaacgcagctcacagcagtccttgaacggcagcatcggcggcggaggcggaagcgttgtcagctccacccgcaccgtggtgttcgaaaaggacgacaacagcccgaggtacgctgataacgaagtcaactcgaacagcagaaagcagcacaagcattaaaggcccaagcacacagcgtagactcactcaccctctaattatctgacttttaatatgcctatcgctagttagctagtctgtaaggtctgttgctatttgccggcttatctaatttaaataattaaaccatacatgcaaaccatccgcctcaatccacatccaccaacgaccccaaaaaccaactcaacaacccctgccgacacttaaacgctgcaattctcgaacgactaccgccaattcaaacaaaatcataagaaccgaaacgaaacgccccaaaacaaacgatgcgtgtaaatatgttaatgcgtatgtgacaaaaaccaaaacacacaaaatttcctaactccgctccgctctgatccgctgtaccgcccccgctccgctccgcaacaacaacaacaacaacccgaccctcccaatccgcgtgtgtgtgcgtgtaaacaattagctttttcttattgtagaataacagtgacgtcgccatcgtcgccacacattcataagctggcactggcggccaaagccataccggccaacaaaccggacacaaaacctgcagcgtctactaggatggagttaacagtgccagcgggccagcataatggtcataatgcctagctggccaagcagtagatccatccattgtacggggcatgtccatctggggctgcagcttgtaatttgtaatttttattttttggatatttattagttgtttatgattattattttattactgtttagttcaatacgtttaactatttattatcgaaatatagctacatgataatatttaatataaaacccaataggcatttgaaaacaatgctgagttgtagttaatttaatttgcgcgacagtccctatacaaaaagtgattaacatgttttatctctctcaaaaacaaaaaaacaaaaacgaaactgaactaacacctatagaatatagtccattatcctatagcaaacttaaataaaattagttaaacgcgtttcaaaat

SEQ ID NO: 25895 - DNA, 4941 bp, DROSOPHILA
atggcgcatccgcgtcgtcgtcgtcagccggagcgcgtatggctggtgcaccgcggtggtttcactgccgccatccgtctgccgactgcgtcttctggccgggatgaggagaacaagctaagcctgcgcctcctgcataatggggagcagctgaccgtcgacgaggacgatgtcgagaagcagaacagccccgccctggaccttgtcgaggacatctgcgagctgaagtatctgaacgaggcgtccgtgctccattgcctgcgtcagcgatacgccagcaatctcatccacaccaaggcggggcccacgctgctcgtggtcaatcccatggcaccgctgtccctgtactccgagaaggttgtctccatgttccgcggctgcaagacggaggatatgccgccccacgtctattcactggcccagaccgcctacaggagcctggtcgagacgcggcgcgaccagagcttgatattcatgggccgatctggttctggcaaatccactagcttcaagcatgcactcaactacctggcgttggcagctggtgcctataataattttataaacgcggagaaggtcaatgccctgtgcaccattctggaggcttttggaaatacgaaaacttgcctaaactcgaatgccacgcggatgacgcagctgttaagcctggatttcgatcaaaccggccagattgcatctgcctcattgcaagttctcctcccagaaagacaacgagctggccgacgacttggtcatgaacatagcttccacatcatgacgagacttttggctggcgctgctggcttgctacagaaggagctgcacctggagaacataacctctgaggacagccatccttttatatcgttatcccaaaagctggaagatcggcatcgagctgccaatgactttatgcgcactgttcaggcctttgagacgctgaacattgatgcgaaggcggtacgtgggatctggagcattttggcggccatttaccatctgggcattgctggcgtcacaaaactgggcactggctccacagcccgaactcagtttgccaatcccacggccgcccgaaaggcctcgggcttgttgggcgtgaatctggaggatctgtcatcagctgcctttggtcttacccaaccaaacgcccccaatggcggtctgagtccatcgaaatcgcccacctcggacactggacacgaatgggcctgggaatgtctcgaggcgttggtcattggtctatattcggaggccttggctgcagtggtggcattgatcaatcgtcagatctgcacatcgtcccacaccatagcctcaattatgctaattgacacgcccggcttccaaaatccagccagctgtggccagcaagtgggtgctactctagcggatctgcgtcacaactatctacaggagcgtctacagatgctcttccatcacaccacactggtggctccccgcgatcgctacgcccaggagctggtagaaatcgagatggacctggcatcggagtgtcatccgggaccgttgatctcgcttatcgacaaggcacctcagaatcatgtagtgcgctcgtcccagcgagatttgcgagagcatgatcgtcgaggaatgttgtggctactggatgaggaagctatctaccccaactccaacgatgacacattccttgaacgtttgttctcccactacggtgaccgggaacatcatagcctgctgcgcaaatgtgcaggtccgcgacaatttgtactccaccatctgcaaggcaccaatcccgttctctacgctgtcgatggatgggtgcgtcatagccgggagcacccaggtattcggaatgctgtatccctactacaggacagcagtcgggaggagatcaatcgcctatatatcggctcactgactcgaggatcgggagcaatggtgttttgtggctcttttgctggactggaaggcactcagtcacttcgtcgcgtgtccagtattcgccgctccttcacaacggccggagtaaagcgaaactccataatgctgcaggtgaagttcacagtggatggaattatcgacactttgcgccgcactggaactcactttgtgcactgctatctgctgcaacataacgcaggcaaacataccaagtacaccgccaatggatcgcccagctcagctgccggtcaggtgtccagcgaggaggaaatggtcaacgtgccactgttaaggagtcagctacgtggttcacaagtcctagaagcggctcgcttgcatcgccttggttttcccgaatcagtgccattgttggaatttgtcaggcgtttcgggcttttggccggggatttggctagcaataaggatgtgagcgtggagcagatattagctgtcaatgaactggatgtggccagctatcgcataggacccagccagcagatcctcttccgctcaggagttcttagtgaactggaagccaagcgcgatgtcctgctctcagatcgcattatacagctgcaagcattttgccgcggctacttggcacgcaagaagatgtcccaacgaagggtccaggaactggcagtgcgttgcattcaacgcaatgtgaaggcattccttgccgttcgcgactggccgtggtggcgtctcctggtgcgggtcactcccctgctcaacgttcatcgcaccgaggagcagctgaagacggctaacgaggagctcctaatgctgcgagccaagctggagaagatcgagtgtgatcgcagtgaggtcaaggcagaaaaccaaaagctggaagccaagctatccgagctgacggtggacctggccgaggagcgatccacggctcatatagctaccgagcggctggaggcggaaaccgccgaacgcttgaagctggagaaggagctgggcgatcaaaccaacaaggtgaagaaccttcaggagacgacggagaagctggaaatggagctgatatgcgccaagtccgatctgaatggcatctctgaggacgaggatgcagagaacgaggatggggtcggcggcggcgtctacaagcttaagtacgagcgggtggccagggagctggagttcaccaaaaggcggttacacacgcagcatgagcacgatctggaacagctggtcgcgctcaagaagcatttggagatgaagctttccgatgcctacgaagaagttgtggaacaacgtcaggttgtgggccaatggaagcgcaaggcacagaagatgaccaacgagatgaacgatctgcgcatgctgctcgaggagcaaaatgcgcgcaacaatttgctcgagaagaagcagcgcaagttcgacgccgagtgccagtccctgcaggatgcagtgcgtcaggagcgacaggccaaagagcgctacggtcgcgaaaaggacgtcctgcaggccgagaagttcacactggagcaaacgctggcggacacccgtctggatcttgaattcaaggaggagaaacttgcatcgctacagcgcgagctggaggagatgacctttggtggcggcaccgaggaggagttcgcccaactgcggcgctccaaaaatgaaacagagcgtcgggccaaggaacaggaggaagaactggacgagatggccggtcagatacagctgctcgaacaagccaagcttcgcctggagatgaccctggaaacaatgcgcaaagaagcgcgccgtgagtcccagcagcgcgacgaagagctggaagaagtacgcggtaacggctacaagaagattaaagcccttgaatgccagctggaaactgagcacgaggagcggactctgctgctgcgcgagaagcacgagctagagcgacgtctctcctccatggaggatcgcgatcgtgccctgctcaaggacgcccagacacagttggagcggcttaaggctgacacgcctggcaagacgcttataagacaactgcgtaatcaactggaggatgccgaatctgctcgttcgctggctatgaaagcgcgacaaactgcggaagccgaacttactgaagtgcaggccatgttcgatgagtcgcatcgagctaggaatgacgcggaggagcgagccaatgccgcacacagagatcgggctgagctgcaggcccagatcgaggagaacgaggaggagctgggcgagctgatgaagaagtacagcgccacggtaaagcaactaaatacagagcaaatcaacgtatccgaggctgagtttaaactcaatgaaatggaagcagagcgcaataacctcaaggagcaggtggccgagctgcagcaccgactggacaacgttgagaacttgggggatccatctatggccatgatgtccaagcgactggagctgcgcaccaaggaattagagtctcgactggaactagagcaggccactcgggctcgccttgaagtgcaggtgaaccgtcacaaagaggctctggaaaaactgcagaacgaggtgacgcagtcaaagatgcgtgagatgcaggcccaggatgtaatcaaaaaatcgcaaaagagtctgcgcgacatgcgcgaagagttccacgctgtctccagccgcgagcaggagtcgctcacaaggcgcaaggacctggagaagaaggtggagcaaatggagtcggagggagcggcgcttaaaaacgatctacgactggctttacagcgaatagctgatctacagcaggcaatggaggaagagggcgaggaggagctgagcgaaagtgatgaaagcctcagttcggtgggctctatcagtgatctggaagatcgacttcggccagttcatgtaaaacgcagctcacagcagtccttgaacggcagcatcggcggcggaggcggaagcgttgtcagctccacccgcaccgtggtgttcgaaaaggacgacaacagcccgaggtacgctgataacgaagtcaactcgaacagcagaaagcagcacaagcattaa

SEQ ID NO: 25896 - protein, 1646 aa, DROSOPHILA
MAHPRRRRQPERVWLVHRGGFTAAIRLPTASSGRDEENKLSLRLLHNGEQLTVDEDDVEKQNSPALDLVEDICELKYLNEASVLHCLRQRYASNLIHTKAGPTLLVVNPMAPLSLYSEKVVSMFRGCKTEDMPPHVYSLAQTAYRSLVETRRDQSLIFMGRSGSGKSTSFKHALNYLALAAGAYNNFINAEKVNALCTILEAFGNTKTCLNSNATRMTQLLSLDFDQTGQIASASLQVLLPERQRAGRRLGHEHSFHIMTRLLAGAAGLLQKELHLENITSEDSHPFISLSQKLEDRHRAANDFMRTVQAFETLNIDAKAVRGIWSILAAIYHLGIAGVTKLGTGSTARTQFANPTAARKASGLLGVNLEDLSSAAFGLTQPNAPNGGLSPSKSPTSDTGHEWAWECLEALVIGLYSEALAAVVALINRQICTSSHTIASIMLIDTPGFQNPASCGQQVGATLADLRHNYLQERLQMLFHHTTLVAPRDRYAQELVEIEMDLASECHPGPLISLIDKAPQNHVVRSSQRDLREHDRRGMLWLLDEEAIYPNSNDDTFLERLFSHYGDREHHSLLRKCAGPRQFVLHHLQGTNPVLYAVDGWVRHSREHPGIRNAVSLLQDSSREEINRLYIGSLTRGSGAMVFCGSFAGLEGTQSLRRVSSIRRSFTTAGVKRNSIMLQVKFTVDGIIDTLRRTGTHFVHCYLLQHNAGKHTKYTANGSPSSAAGQVSSEEEMVNVPLLRSQLRGSQVLEAARLHRLGFPESVPLLEFVRRFGLLAGDLASNKDVSVEQILAVNELDVASYRIGPSQQILFRSGVLSELEAKRDVLLSDRIIQLQAFCRGYLARKKMSQRRVQELAVRCIQRNVKAFLAVRDWPWWRLLVRVTPLLNVHRTEEQLKTANEELLMLRAKLEKIECDRSEVKAENQKLEAKLSELTVDLAEERSTAHIATERLEAETAERLKLEKELGDQTNKVKNLQETTEKLEMELICAKSDLNGISEDEDAENEDGVGGGVYKLKYERVARELEFTKRRLHTQHEHDLEQLVALKKHLEMKLSDAYEEVVEQRQVVGQWKRKAQKMTNEMNDLRMLLEEQNARNNLLEKKQRKFDAECQSLQDAVRQERQAKERYGREKDVLQAEKFTLEQTLADTRLDLEFKEEKLASLQRELEEMTFGGGTEEEFAQLRRSKNETERRAKEQEEELDEMAGQIQLLEQAKLRLEMTLETMRKEARRESQQRDEELEEVRGNGYKKIKALECQLETEHEERTLLLREKHELERRLSSMEDRDRALLKDAQTQLERLKADTPGKTLIRQLRNQLEDAESARSLAMKARQTAEAELTEVQAMFDESHRARNDAEERANAAHRDRAELQAQIEENEEELGELMKKYSATVKQLNTEQINVSEAEFKLNEMEAERNNLKEQVAELQHRLDNVENLGDPSMAMMSKRLELRTKELESRLELEQATRARLEVQVNRHKEALEKLQNEVTQSKMREMQAQDVIKKSQKSLRDMREEFHAVSSREQESLTRRKDLEKKVEQMESEGAALKNDLRLALQRIADLQQAMEEEGEEELSESDESLSSVGSISDLEDRLRPVHVKRSSQQSLNGSIGGGGGSVVSSTRTVVFEKDDNSPRYADNEVNSNSRKQHKH

SEQ ID NO: 25897 - DNA, 3337 bp, DROSOPHILA
actgccggaaaatcataggcagttggagcagatcttcaatacagccgtgggtgcaatgaagcggcgttatggaactcggtacactggaggaaatgtgtacgatgccatatatccggcagctggttccagtatggattgggcttatggggtgctcaacgttaagtactcctttacctacgagctacgaccgtctgggtatagtttctggacaggatttagattgcccgccgcccaaattataccaacgggtcaggagaccacagattcgttggtggaaatgattaaggctgctgctcaaatcgagggttacaaaattgagtagaagagagagcttacgacgtttttgttgataagatatgaatgaaaagatctgttacttctgaaaaaaactaaacgtaagcatgttttgattaaaaagataacttggacaagctgataagatgaaaagtccaaattggcttaaaaagttttgggtaaaaaaaatgatttgattatatattatcaattttgcggactgaaatgttagtttgtggaacagaatgacttgtcaaagttagaatataaacaaaagctagagcttataaatttggtttaatgatgaatataactaatactaaaaatgtaatttataaatttcaaatattaagacaacgcttttttgaaattcttttaaagagttggcataattaaacttagccactatcacacacacttaacatttcacctgccagacttcggaattatttaatgatgaaatgtcacttcttaaagagctcaagacgtcatgaaccgagagcaggtcgggaattatagtgatttaaaacctgcagccgttaagacggcgataattttgtacaccgattactccaatatttactgcccaagcaattgtcaaaggcagtcgcggaccgtaaattagattcggataatgaattgtggaagctcttatcgaaggcctataaaaggaagtggctagccgagtgttggctcaaaccaacgacaacgatgtcgctgaacaagtgccttctattcgccctcctggccatcgtggccagcgcatccgtgagcgcggaacgtgttcgctatgacaactaccgcatgtacaaggtcaactcggagaatgccaagcaactggaggtgctgaaggatctcgagggatccagcgactcaatcatgttcttggatggcgttcatctggttggtgccgatattcagataatcgtggctccccacaaggtgcccgacttcctggagattctgggcaagtctgaaatcaagtatgagctgcaatcgcgcgatgtgcaaaagtctctggacgagatcgacgagaaggtcgctatcaagggacgtgccaccaccgcctacaactgggcccagtactacgaactcgacgacacctatgcctggctccagtccctggcccagacgaatcccggagtggtcaccctcattgagggcggcaagacctaccagggacgctccatcctcggtgttaagatcaccaagggaggtgagaccataaacggcaaggccaagcccggcatcttcctggaggccggtatccatgcccgcgagtggattgctccagctgccgccacctttatcatcaaccaactgctgacctccgaggtggagaacatcaaggaattggccgagaactacacctggtacgtcctgccccacgccaatcccgatggctatgtctacacccacaccacgaatcgcttgtggcgcaagacccgtactccctacggcagctgcttcggcgccgatcccaacaggaactggggcttccactggaacgaggtgggtgccagcagcagtgcctgctccgatacctacgccggaccttccgctttctctgagatcgagacactgtcactgtccaagttcattgagggactgaagggcaaggtccagctgtacctctcgctgcatgcctactcccaatacctgctgtatccctatggacacacctctgatctgcctgacaatgtggccgactttgagaaggtcttcgatgcctccattgcagccgtgaacaagcgttacggtaccacgtacactggaggcaacatttacgatgccatctacccagcggctggtgccagtgtggactgggcctacggaacccaggatgtgcgcatggccttctgctatgaactgcgtccctcgtcgacctcctacctcaccggattcaagcttcccgccgagcaaatcgtacccgccagcgaggagctgcttgactccatcgtggccatggccaccgaggtcaagagcctgggctactttgactaagcgacactaataaagtactcacagcttttcggcataactacgaagcaggcgtccattgattttgtttgaggtgcataccccaaccgccggaaaggggctattggctacgtgcaccaggtctggggccatatggatctcggtgggctgcaccagatactccaggatgaggtcagcgatcacgatgtgggtgtaaatcataatggcggtgaggaaagccagccagatagctctgcaagtgggagataggtagctaaaggtaatgggataaggccaacttttttaaacattgagttggaattcgaacaagaagatacattccatgaagagatatccatcaaagcacaaattatatagacatttgcttagtttatcaagtttgtttagtttatctcagtctacatatacaatgtcttaaccacttcagtggtgctctaggccgacagtataagcaaagacactagaataacaagaattctagtgtctttggtataagccctttaaactcacttggcatatcgaacgggtgtatgatagagaaacggatgcagaccattgatgtaactctgacgcagaaactctcggaacaggcgccgatagtaggactcctccactcgagccattgtgtttgaagagtgcacgagttcaggcgatttatatagtgctaggtacttttgtagtgccactttgagctactgctcatcaatcagagctctaatgaaagtgtgtcaagtggagtgcaatgatggggtgtgtgcgaagatggctgggaactgccactctactcccggttgatgtagttgaaaactggacggaaggtaagaaagtatatgaactcgaatgccgtcactatgctgaatcccataattagtcccagcaagccgccaaatgaggctgtcaaaggaagtatgctaatcaataatctaacgcttatttaaacatttgttagcatacccaaggcggacagccagttctgaaatatgtccgttcgatatctggtgctcattagatcgctgaaaaacacatggagtagtatcctatc

SEQ ID NO: 25898 - DNA, 1337 bp, DROSOPHILA
caacgatgtcgctgaacaagtgccttctattcgccctcctggccatcgtggccagcgcatccgtgagcgcggaacgtgttcgctatgacaactaccgcatgtacaaggtcaactcggagaatgccaagcaactggaggtgctgaaggatctcgagggatccagcgactcaatcatgttcttggatggcgttcatctggttggtgccgatattcagataatcgtggctccccacaaggtgcccgacttcctggagattctgggcaagtctgaaatcaagtatgagctgcaatcgcgcgatgtgcaaaagtctctggacgagatcgacgagaaggtcgctatcaagggacgtgccaccaccgcctacaactgggcccagtactacgaactcgacgacacctatgcctggctccagtccctggcccagacgaatcccggagtggtcaccctcattgagggcggcaagacctaccagggacgctccatcctcggtgttaagatcaccaagggaggtgagaccataaacggcaaggccaagcccggcatcttcctggaggccggtatccatgcccgcgagtggattgctccagctgccgccacctttatcatcaaccaactgctgacctccgaggtggagaacatcaaggaattggccgagaactacacctggtacgtcctgccccacgccaatcccgatggctatgtctacacccacaccacgaatcgcttgtggcgcaagacccgtactccctacggcagctgcttcggcgccgatcccaacaggaactggggcttccactggaacgaggtgggtgccagcagcagtgcctgctccgatacctacgccggaccttccgctttctctgagatcgagacactgtcactgtccaagttcattgagggactgaagggcaaggtccagctgtacctctcgctgcatgcctactcccaatacctgctgtatccctatggacacacctctgatctgcctgacaatgtggccgactttgagaaggtcttcgatgcctccattgcagccgtgaacaagcgttacggtaccacgtacactggaggcaacatttacgatgccatctacccagcggctggtgccagtgtggactgggcctacggaacccaggatgtgcgcatggccttctgctatgaactgcgtccctcgtcgacctcctacctcaccggattcaagcttcccgccgagcaaatcgtacccgccagcgaggagctgcttgactccatcgtggccatggccaccgaggtcaagagcctgggctactttgactaagcgacactaataaagtactcacagcttttcggcataact

SEQ ID NO: 25899 - protein, 430 aa, DROSOPHILA
MSLNKCLLFALLAIVASASVSAERVRYDNYRMYKVNSENAKQLEVLKDLEGSSDSIMFLDGVHLVGADIQIIVAPHKVPDFLEILGKSEIKYELQSRDVQKSLDEIDEKVAIKGRATTAYNWAQYYELDDTYAWLQSLAQTNPGVVTLIEGGKTYQGRSILGVKITKGGETINGKAKPGIFLEAGIHAREWIAPAAATFIINQLLTSEVENIKELAENYTWYVLPHANPDGYVYTHTTNRLWRKTRTPYGSCFGADPNRNWGFHWNEVGASSSACSDTYAGPSAFSEIETLSLSKFIEGLKGKVQLYLSLHAYSQYLLYPYGHTSDLPDNVADFEKVFDASIAAVNKRYGTTYTGGNIYDAIYPAAGASVDWAYGTQDVRMAFCYELRPSSTSYLTGFKLPAEQIVPASEELLDSIVAMATEVKSLGYFD

SEQ ID NO: 25900 - DNA, 5015 bp, DROSOPHILA
gttatcatggtataattaatatttaatatattcttgctgttgttttcttttgcccatttctatgtgttataggtatagtatagtaataggtgatgaagcagaacatgatgtgtgctggtaaaagtttgtaaacttgttctattgcatcgatgcgagacttgtggaagtactaatgtgcgacgaggtgcccaacgtggaggccatgtctccttggtagctgaactgtggcggtgaaaccaaaaattggatgagcatacagaaccccactttaaatgttttcaactagatcttacctgcgggaaaagcggctcttcggctatggagcccaacgggccagtgggatccggcggcgtcaactccacactctctcccgtaaactccttgtcgaagtaccttgtatccgtatcggatgtcacctgaggcttgaaaggcggcggtatctacggtaagcattttaaattcgattaatatatacgaataggtaactgacagatttactgtgccctacttttttcaacactagatctgtccagttaatactcgcaaagaatggatgtgcttgtatctccttgacatcatcctttccacctcccaaacgctttttgggatccttagctagaaggcctgctaacagatttttcgcctcatctgtgatattacgcgggaattttacctcctccaccaaaatcaatgtaaagagcacatcatgatcacgattgtaaaacggaagacgaccacagatctgtaaggaattatttttgtttttaatacttgttaatagtatttgcagatgcaacaaactcaccatctcgtacatgaccacgccagtgccccaccagtccaccgcttggccataatcattgtcatctaatacttccggagctaggtattccggtgtaccgcagaaggttttcgttgtgcggccgtaggtgatgtcctccttgcacagaccgaagtctgcgacctttatgtgaccatctttgtccagcaaaagattttccagctttaagtcgcgataaattatgccctgtgaatgcagatagcccagagcagaaatgatctctgccccatagaaacgtgttcgatcctcagtaaatatgcgttcgtggcttaaatgccaaaagagctcgccaccgttcacgtactgcatcacaaaacacaggcggtcgttggtttgaaacgaatatttgagtgactgcaaaacagggaagacatatattagttttttaacgtaaattatatattactagcaatacttacaatgaggaacggatgatttgtggacttgagcacacgactctcggtcagggtatgggccacctcgtccttttggataataacttcctttttaagaattttgatcgcgtacagcttggcggtagccttctcgcgacacaaaataaccttaccaaaggtgcccttgccgagcaccttgaggaactcaaaattctccaaagtctacaaggagataagatggagtcagctcgatcacgcccttggtcaatgaccaggtgagtggtacttaccactttcttaacgccgctgctattacaagtcgttccctgtacggagaactgctcggaaagctcgtcctcggcaatggtggccatgtccacgtctgtcatgtctgtctgttcagatggcgtcatagccacctcacccacatctatgagccggctggatacgttgcgaatggcctccgtccactgctggcgctctaattctgattcgacggcaaatgtcctttcgattaccgtggtccattgcaggccgcggatgatgaaggtgaatggcttgggccgatcgacggtcatgatctggcagccgcgcaccgtaaagttgttgagcaggaagtccgatggcgtgctggcactatctgccggcttgctgcggtaacccatcagtcttccatcggagtggagcacgaagtagcgctggcgccagttctttatgtgctcgcccctcttcatcagccacccctcctttacgacctgagtctgttccgtaagcgcatgacccgatgtaacgctgggcgagctgaggtcgaaagttgtgtttattgacatggttccggaatcgtgtgtaggggccgcggaggtcctgcttggccaggattgctgccagctgaatttctctgcactgccgctggtggggctgctgtttggatgggtggattggctgtagatgatgttaatgatgttgctccctgtggtggtgggcgattccgggatcctagaggcagatcctggcgctggggcgctggcaaccacagtcgatcgccgctgaagaacaaacggtaggtaattcgtgttgaggctgtttcactaaccctagggacaagctaatgagggacctgtaagaggagtacagtgaatcctttatattcatgctgagtttgaaatacttaaactaagaatgcgatcgacgaaaagaaaaaggctttagcagagggttcgtctagtaacacctttaccttcagggattcaacatgtactagatattaactgatccgccaactgtcgacataaactagtcaaagtggacaaatggagttcccaaatgagctagctatcaaaaaaggggaaacagacactaaaaggctgccaagtctatccagatatatacttcccacatcgcctatctcacgctgatagtaaacaattgttattgtcattttgcatgtttatgacaaatgcagttggcgcttgcgtcagcagctggtgcaaaacatttgcggcatttccgtcgccagaaagggattgaattggattgaggactgtgattctgattgtatcgaattggatgggttggtatggtgtggcatggtatgggattggattcttagtcactggcccacatgcagatgtaggcgccatcgtcgccttgttgttgctgccactttcggcttcaaacgaaattccccgccatgttacgcagcgacacggcgatacgagtgaaaattgttcgcgattgcatttagcgcgaaattaaatcaaaacaagtcgacggcggcgactgttcatgaacttatgtatatgcatatataatacatacatatacatatgtacacatacaggggactcgcaggcggcactcgcactcgtactcgcactcacactggcacaactgcaaaagcaaaagcatattcatttacaatttgcgaaaatgtcaacgacggatggccgccggctgtacaaatgtcgctatctatctaaaactgtaaacaaatgtacataaaataaaaatcgacaaaatacacacacaggcataagcggacaggcgctcgcacaccgaggcagtcacacagacagggctgcattgcaaagtgcgagtgaggccagactgtgggtgcgagggggagggagacagacagtacgcgtgtctgccacaaaggtgtatgagtgtgagtgtatgtgtgagtgtctggccgtgtgcgtgtgattgtctggccgtgtgggtgtgagtggctgagtgagtgaaccaccgagtgtgcgagtgtgtgtgggcagcggcgacctagcagcgcaacatgtcaaatcacttcgtggaaatggaaattgtggaaatgctggtgaaaaatacaagaacccacctagttttgtaaaaaaaaaaacccgacttttgctttccctactgcactgcggtttgttttcctactcgttttggtattttcctttagatggtgacggcagcgacaacgtcacaggccttcttattattgtgcgtgtgttgttgttgctgcttgctattgttgttgttgctgctgctgctgtagttgttgttgtgttaaggtgccagacaccagaggacggaacgaaacacacacaatctcgcactcgcgcactggaagtcgatttccgccacccgggcgtttccacttggtgttttcttgccttccaaagcaacgttgcatcaattgcaaatgcttaaaaacgtagttttcataaacagaagcacgcacacaggcaaagtaaattttccaagtaccgtttagtttttacgcttcactttttttcgataactggctcgataactgattcgatccgcgttgccacctgttttagcgatagttaggcgactgttacggtggaaagatgccagagagagacattatttaagagctgtacaacgcgcaaatatcccttaaatttaaattaaatgttttagaaggcaatagttctgttttctgactgtctaggccgactctttaactagaattcacttcaaatttgaatgtatgaactgcagattaataataatgctgtattgttattaaattcatttttaaaaactttattttatatgctatgtatacaaaactatttcttatatcgacaaattgttataacttttcaaagcataattgatcaaaaatttggaagccctatcaattttatatatggttcctgtccgcactaagtagatactctgataagtatgaccatgtgtaagtagctagaaaaagtcagttctcttttccagtttcccagatcaaatttgatattcacctctttgggcactcttgctcagatttgtttatgcagaacgcgaagtctcctttgaatccgaaaaaaaaacaaaaaacgagtagcgaataaagtgccccattggcacaaaacgaggtaaataacttgcaacccaatcggaagggagaacatagcatgccactttcaaataaacaaataacgactccagcgcgactgtgtgtgcgtgagtccctcccaatgtttgtgtgtgttatcaaaaaaggcgtagaaaagtgcaaaaacaaaggtgttattgactctcaactttctttttctgcctatcgtgtgtatcactgtgggctgtggccgaataagagcgttcgccgaatatgagcaattggaaaagcatgagcataagtaatgaggcagaatcggttgcattcaattagttggagaaatgaaaaatatgaagagatggtgtagagagaagggaagagtgcagtctcgagcaatcaataccaacgcagccacgagcccccctttctttgt

SEQ ID NO: 25901 - DNA, 2375 bp, DROSOPHILA
aaaaaaagtgaagcgtaaaaactaaacggtacttggaaaatttactttgcctgtgtgcgtgcttctgtttatgaaaactacgtttttaagcatttgcaattgatgcaacgttgctttggaaggcaagaaaacaccaagtggaaacgcccgggtggcggaaatcgacttccagtgcgcgagtgcgagattgtgtgtgtttcgttccgtcctctggtgtctggcaccttaacacaacaacaactacagcagcagcagcaacaacaacaatagcaagcagcaacaacaacacacgcacaataataagaaggcctgtgacgttgtcgctgccgtcaccatctaaaggaaaataccaaaacgagtccctcattagcttgtccctagggttagtgaaacagcctcaacacgaattacctaccgtttgttcttcagcggcgatcgactgtggttgccagcgccccagcgccaggatctgcctctaggatcccggaatcgcccaccaccacagggagcaacatcattaacatcatctacagccaatccacccatccaaacagcagccccaccagcggcagtgcagagaaattcagctggcagcaatcctggccaagcaggacctccgcggcccctacacacgattccggaaccatgtcaataaacacaactttcgacctcagctcgcccagcgttacatcgggtcatgcgcttacggaacagactcaggtcgtaaaggaggggtggctgatgaagaggggcgagcacataaagaactggcgccagcgctacttcgtgctccactccgatggaagactgatgggttaccgcagcaagccggcagatagtgccagcacgccatcggacttcctgctcaacaactttacggtgcgcggctgccagatcatgaccgtcgatcggcccaagccattcaccttcatcatccgcggcctgcaatggaccacggtaatcgaaaggacatttgccgtcgaatcagaattagagcgccagcagtggacggaggccattcgcaacgtatccagccggctcatagatgtgggtgaggtggctatgacgccatctgaacagacagacatgacagacgtggacatggccaccattgccgaggacgagctttccgagcagttctccgtacagggaacgacttgtaatagcagcggcgttaagaaagtgactttggagaattttgagttcctcaaggtgctcggcaagggcacctttggtaaggttattttgtgtcgcgagaaggctaccgccaagctgtacgcgatcaaaattcttaaaaaggaagttattatccaaaaggacgaggtggcccataccctgaccgagagtcgtgtgctcaagtccacaaatcatccgttcctcatttcactcaaatattcgtttcaaaccaacgaccgcctgtgttttgtgatgcagtacgtgaacggtggcgagctcttttggcatttaagccacgaacgcatatttactgaggatcgaacacgtttctatggggcagagatcatttctgctctgggctatctgcattcacagggcataatttatcgcgacttaaagctggaaaatcttttgctggacaaagatggtcacataaaggtcgcagacttcggtctgtgcaaggaggacatcacctacggccgcacaacgaaaaccttctgcggtacaccggaatacctagctccggaagtattagatgacaatgattatggccaagcggtggactggtggggcactggcgtggtcatgtacgagatgatctgtggtcgtcttccgttttacaatcgtgatcatgatgtgctctttacattgattttggtggaggaggtaaaattcccgcgtaatatcacagatgaggcgaaaaatctgttagcaggccttctagctaaggatcccaaaaagcgtttgggaggtggaaaggatgatgtcaaggagatacaagcacatccattctttgcgagtattaactggacagatctagtgttgaaaaaaataccgccgcctttcaagcctcaggtgacatccgatacggatacaaggtacttcgacaaggagtttacgggagagagtgtggagttgacgccgccggatcccactggcccgttgggctccatagccgaagagccgcttttcccgcagttcagctaccaaggagacatggcctccacgttgggcacctcgtcgcacattagtacttccacaagtctcgcatcgatgcaatagaacaagtttacaaacttttaccagcacacatcatgttctgcttcatcacctattactatactatacctataacacatagaaatgggcaaaagaaaacaacagcaagaatatattaaatattaattataccatgataa

SEQ ID NO: 25902 - protein, 530 aa, DROSOPHILA
MSINTTFDLSSPSVTSGHALTEQTQVVKEGWLMKRGEHIKNWRQRYFVLHSDGRLMGYRSKPADSASTPSDFLLNNFTVRGCQIMTVDRPKPFTFIIRGLQWTTVIERTFAVESELERQQWTEAIRNVSSRLIDVGEVAMTPSEQTDMTDVDMATIAEDELSEQFSVQGTTCNSSGVKKVTLENFEFLKVLGKGTFGKVILCREKATAKLYAIKILKKEVIIQKDEVAHTLTESRVLKSTNHPFLISLKYSFQTNDRLCFVMQYVNGGELFWHLSHERIFTEDRTRFYGAEIISALGYLHSQGIIYRDLKLENLLLDKDGHIKVADFGLCKEDITYGRTTKTFCGTPEYLAPEVLDDNDYGQAVDWWGTGVVMYEMICGRLPFYNRDHDVLFTLILVEEVKFPRNITDEAKNLLAGLLAKDPKKRLGGGKDDVKEIQAHPFFASINWTDLVLKKIPPPFKPQVTSDTDTRYFDKEFTGESVELTPPDPTGPLGSIAEEPLFPQFSYQGDMASTLGTSSHISTSTSLASMQ

SEQ ID NO: 25903 - DNA, 4226 bp, DROSOPHILA
catatgtacagcataagcggttttgacattggtgtgcgtaaaactcggctttgcttttcctttggaatttcttgttttcctaatcaccacttacgtttcattttcgaacacgggttttattcaccattcctacaatttattttcacattgaatggactttaacaattagacaaaacagaaatattttcgcagatttccagcgaagccgattttacaaaaaaaaaatatcgtttatcgattgcatgtggacgttagaggtggactagccactatcgccagtatcgatgtgtgctcgaaaaaatactaaaacaccaaaaatttataacttaaatggaaaaaaaatgttctctaataaccatttgttaattttaggcttagtatgcttttgcttgaataccaattaataatcggctctttatagcattaaaatactaaaacaccaaaaatttataacttaaatggaaaaaaatgttctctaataaccatttgttaattttaggcttagtatgcttttgcttgaataccaattaataatcggctctttatagcattaatattaattaaagttgccagaattctattacttgtttttaggtaaataatttaagaagtaaaactaattatgtgtcattaaacattctaaatacaaggttaaagtccagcagacattccattcaggttttacccttacgctttcctattttcagcctaaaaaacgttttagatcgaccttaagtcggcttatcaccagctgccagataaaataatacgttatacaattaagtcgctacttctgattttacttctttagttcttgccggcctcttagtcagacaaaactttctatttctgacgcttcacagttttggatatggactctaacggcttacattaaggcgatggactcttgtcttatctccaattaaaaaccagataacgggatggatatataaagcgccctataccgcgcaatttccatttaattagttctcttcttggtattcttatagtttttaggttgttcaatttaagttcgtagtttaaggatacacacaataaatgtcgtaagttcctaatggtatgaattaaaaaagctgtaaataattattaagtttactgcgagaggatgaacatatagagtgcatattcctttgacttaattcttttgccaaaacaaatcttattattcaaaggtatctatgatatatatatggaatgggcctttcgatcgcagcacccgatgaaaggggagcccggaagctgtcacagttcacttaaacatgttttatggggaactattcgacgcctttggtgacctattagtcgggtacgatggcaagtgtccccccgaaataaatcgcacttaccaacttaagtatcctatatttggaaacactaatgcataccgtcaatccgtaatcttattctaggtgctgcaagaagtacgccgtctgctggattatcctggtggtgaccgcattgggtgtgaccttgggtctggtttttggactccggagcaaagcggaggaaccccgtcgcattggcgccgtggcatcgaatggcgtgggatgtgcggaggtgggaggctccattctggatatcggaggatctgctgcagatgcggctatagccaccatgttgtgcgaaggagtgatgctgccccacagcttgggcgtgggcggtgggtttgttgctaccatttattccagagaaacagaatttagtgaggttctaattgcccgagaaaccgctccagctgcggccactcaggacatgttcgtcaaaacagaaatcaccggcgcattatcctgtgccgttcccgccgaaatttatggctactccgagttgcacgataagtatggccgcctgccctggaaaacgcttttccagcccacaattgatctctgccgccgtggcatcctggtctccaggtatctctccggagtccttcaacgcgaagaagagcgtatcagaaacgaaccctccatggccgagatctttattaatccgaaaacggatgaggtctataagcagggcgaggtcatgtaccgtcacactttggccgaaactctggaaatcatagctgatgagggcgccaaagctatttatggagggggcagggtaggcagaaaactggtggaggatatccaggcaatgggcggcattgttaccgaagaggatctgcaaagttacaagtgagtatggagtgaataacttaattagctgatattgaatatcaattcgaatattggtcaacttaattgatatatgactttgtagtgttcgatgggaaatgccgctccactcccactttagtggtggctacaaattaatcacctcgacactgcccacgagtggggccgtgttaacctttatgctgaatgtaatggaaccgctatatacgagcaatacggacaagtactggcagcggttaattgagacttttaagcacgcatacgggcatcgtaccaatttgggcgacatccactatgaaccagatgtgcaggagatgtacgaaaaccttatcgatccggcctttgccgcagagatccgaaaacttattttagacgacaggaccttcgaggacatgtcgtactacggagccaattttgctaatgaggaggatcatggtacagcacacatatccgttttggcgccaaatggtgatgccatttcagtgaccagtacaataaacagccatttgggagccaaagtgagatcccggcaaacaggctttatcctcaacgacgaaatggacgactttagtacgcccggaaaaataaatgcctatggcatacccgccagtcccgcaaactttatcaaaccaggaaaacggccgatgtcctcaacttgtcccagcatcgttttagacacccatgggaatgttaaattgattgtgggtggtgccggtgggtcaaaaatcaccacctctgttgcccagactattctaaggtattttgtactccacgaacctattgagaaggcggtgaattcaggacgtttgcatcaccaactggcgccaatgcacattgacatggaaccaaatgttcctaggcatactgtcgcctatttaagtgctattggacacgacatcagatttctggaagatgataaggcatattcagcacagacggccattggaatcttgggcactgaaccacaccccgtctgcgatcggagaagagtgggtagcgcggtggtagtcgaaccagatagagtagaatagatcgaagggatgttaatttcatcttaagctttaggaaagcccgttagaatatttttgtggtgttcatctgaattaaataaatttcaggaaagatcttttcaagatgctttcttttataatacataataataatgataattcgttgaaaagtatgtaacacgcacaaggaagcgtttccgattatataaagtatatatatttttgatcaggattattagccgagtcggccatgttcttgtccctatgaacgtctcgatctcaggaaccagtaacgggtacagacggacagatatggctacattaaaaacaccatggtaataaaaccactttaaattgaattaattacatttggtaagtcactgttacatacttttcaacgaataacgagtaacgagtataaaaaggtttggttttcaaggcctctacgtaaaatcagtttcataagtaaaacattaatttggttctatatggtttgagtctccgaaacaatcgaaacatggttcaagtccgcgcaatacttaaattttttttcaacactcggaaacaattccttctggcctgttagacacttttcaacaaatctagtaaacccttttactctacgagtaacgggtatataagatagtaaagcttatatggtcacagcaaggaatgatggtaactaaattgccagcattgggatccatccacccgtaaagcgttcacatttgacatgcacccttgatttttaagtttaagtagtaaaccaaatttaacagattttaattgacattaaatatgaaatattcctatgaagcaccgaagcctagatttggaattcaaaaaattcaaagtattaaaataatagtgggcgcgacaattttgagcgccttgtggacgttgggaattgggtggcaatgaaaagacatagataaaaaacagagaagtttgttgaaaatcagtacgattgaaattaaacttgataattaataaataacaacatatttcatagaaaaagtat

SEQ ID NO: 25904 - DNA, 1775 bp, DROSOPHILA
attcttatagtttttaggttgttcaatttaagttcgtagtttaaggatacacacaataaatgtcgtgctgcaagaagtacgccgtctgctggattatcctggtggtgaccgcattgggtgtgaccttgggtctggtttttggactccggagcaaagcggaggaaccccgtcgcattggcgccgtggcatcgaatggcgtgggatgtgcggaggtgggaggctccattctggatatcggaggatctgctgcagatgcggctatagccaccatgttgtgcgaaggagtgatgctgccccacagcttgggcgtgggcggtgggtttgttgctaccatttattccagagaaacagaatttagtgaggttctaattgcccgagaaaccgctccagctgcggccactcaggacatgttcgtcaaaacagaaatcaccggcgcattatcctgtgccgttcccgccgaaatttatggctactccgagttgcacgataagtatggccgcctgccctggaaaacgcttttccagcccacaattgatctctgccgccgtggcatcctggtctccaggtatctctccggagtccttcaacgcgaagaagagcgtatcagaaacgaaccctccatggccgagatctttattaatccgaaaacggatgaggtctataagcagggcgaggtcatgtaccgtcacactttggccgaaactctggaaatcatagctgatgagggcgccaaagctatttatggagggggcagggtaggcagaaaactggtggaggatatccaggcaatgggcggcattgttaccgaagaggatctgcaaagttacaatgttcgatgggaaatgccgctccactcccactttagtggtggctacaaattaatcacctcgacactgcccacgagtggggccgtgttaacctttatgctgaatgtaatggaaccgctatatacgagcaatacggacaagtactggcagcggttaattgagacttttaagcacgcatacgggcatcgtaccaatttgggcgacatccactatgaaccagatgtgcaggagatgtacgaaaaccttatcgatccggcctttgccgcagagatccgaaaacttattttagacgacaggaccttcgaggacatgtcgtactacggagccaattttgctaatgaggaggatcatggtacagcacacatatccgttttggcgccaaatggtgatgccatttcagtgaccagtacaataaacagccatttgggagccaaagtgagatcccggcaaacaggctttatcctcaacgacgaaatggacgactttagtacgcccggaaaaataaatgcctatggcatacccgccagtcccgcaaactttatcaaaccaggaaaacggccgatgtcctcaacttgtcccagcatcgttttagacacccatgggaatgttaaattgattgtgggtggtgccggtgggtcaaaaatcaccacctctgttgcccagactattctaaggtattttgtactccacgaacctattgagaaggcggtgaattcaggacgtttgcatcaccaactggcgccaatgcacattgacatggaaccaaatgttcctaggcatactgtcgcctatttaagtgctattggacacgacatcagatttctggaagatgataaggcatattcagcacagacggccattggaatcttgggcactgaaccacaccccgtctgcgatcggagaagagtgggtagcgcggtggtagtcgaaccagatagagtagaatag

SEQ ID NO: 25905 - protein, 571 aa, DROSOPHILA
MSCCKKYAVCWIILVVTALGVTLGLVFGLRSKAEEPRRIGAVASNGVGCAEVGGSILDIGGSAADAAIATMLCEGVMLPHSLGVGGGFVATIYSRETEFSEVLIARETAPAAATQDMFVKTEITGALSCAVPAEIYGYSELHDKYGRLPWKTLFQPTIDLCRRGILVSRYLSGVLQREEERIRNEPSMAEIFINPKTDEVYKQGEVMYRHTLAETLEIIADEGAKAIYGGGRVGRKLVEDIQAMGGIVTEEDLQSYNVRWEMPLHSHFSGGYKLITSTLPTSGAVLTFMLNVMEPLYTSNTDKYWQRLIETFKHAYGHRTNLGDIHYEPDVQEMYENLIDPAFAAEIRKLILDDRTFEDMSYYGANFANEEDHGTAHISVLAPNGDAISVTSTINSHLGAKVRSRQTGFILNDEMDDFSTPGKINAYGIPASPANFIKPGKRPMSSTCPSIVLDTHGNVKLIVGGAGGSKITTSVAQTILRYFVLHEPIEKAVNSGRLHHQLAPMHIDMEPNVPRHTVAYLSAIGHDIRFLEDDKAYSAQTAIGILGTEPHPVCDRRRVGSAVVVEPDRVE

SEQ ID NO: 25906 - DNA, 3515 bp, DROSOPHILA
cactcttcgcagggatagaaaaggatccgcttgtttccagctcaatccagtggatctaacgttttgttgtaatgtttcgggcacagccagcagtacaaacatcacgttcgttgtggagaccaaagttgctactaacaccacagtattaattccgtaacgatccattatgagattacccattgctggggcgatcaccaagctggcagcaaaggtggccgatacaagttcataggatctagagcgctcttcctttgtggtaacatccgccacataggcgaaagccactgagaagctaacacccaatactccactgatcgaacttatcacaaagaaccaccagttatccatggtcatcatggggatcggtaaggaagtgaagatcactgttataaggagcagcactttccgcccatatatatccgataaagctccgatcaggggcgacgacagaaacgagagtattcccttgactcccatgaccaatccgttcattaggaacgtgtggtctgggaaggtctcctttagagtggctatcatgggcattgttagcaggccccatgcgaagtattccagaaaaacaactactagtatgtgcccaacacttggctttccaattcccgaagtagaggccaacgatacgagtaactttttcagaccgaacttggacatatgtatataatgggagttcaacatggagaatactaaactttcgagtttggaaattcaactgaactgaaataacaatttgtatggtctttcagcgtagctaataccttttggtgattagttagttaggtgagtccgaaaatggtataagaacttgaagttttctacacgtttaaacagtcgatatttgtcgcaaatccaaaagtttcgagttgaagacttttaattaagttaaaaattatttaaattacagatacgtaagtctacattctttaaatccaaaccaaagtagcagtcattaatatctacttataaatatccttatttttcgcctttaaggaatgttttcgttggcgactctagtttcttcatttccaagagtatccttcttaatgaaactgctcaagacgatggccacaaaaacactgatggcacttatgacgaagggcattgaaattggagaattgaccttaagatcagtctccgaatcatcctgaaaaatgaagaagagtaatccgaaaaaggcaggtcccacaccctcgctcaagcactcaattccagagataatgcccaggacagcaccccgattatcgggactggcgtagatggaagccaccgcattattggcagcgggtataattgttgccagtgcggccaagatactgcttaaccagtacatccaatgatgggttccaaagccgaagaaaagcatttgcaagaacaatagtaaaagtcccagacggatcgaccacttggcccctactatattcataatataaccgagtagtatattggatgtgatcgccagcacagatagtaatcccaacatcatggacacctcctcgtactcaaatcccatattagttttgagataaacgggcgcagtagaatccactcctgcaaagggccaaatcgagaggaatgttatgaggtatatcacgagcaggttcttatccttacgacttttacgcagcacttcccaaagatcggaagagtttagggatccattatcaattttctccttttcagttaaatcattctgaaggttttcctctttgctgaactgttggtccagctctttatttgtgactatattctgtgaggtgggtttgttcacttcaacattcacctttccttctccatttaagttctctttcttttcctttgggcttatgtcatccactttcgtgtcctccaccttgttatcattattttcattcaaaataacctttttctccttcaaaactaaactctctggcaccgcaaatatgataaacaagatattgatcatcccagtgatggtggctatcagaataactgatgcggacccgtacgatttcatcaagtaattccccaacgatggagaaaaggctattcctgccccaaaactggccgccacaaagccatatccttttgaacgattctcgacagtagttgtgtctgccacataggctaatgaagaggagtaagtgctgccacagatggagctcacagtgagaatggcgaaaaaccaccaactcttcaacatcatgaatggaattggagcgtaggtggttgccactgccagtagcatcactactttccggccatgaaaatcggaaatggcacccatcacgggcgtggtcacaaatcccaggattcctctaactccataaaccagtccatcgacgagaaggacgcgattcccaaacgatcccgacaatttttcgatgaagggaacggtgagaagaccccaggagaagtagtgcataaacgtaacgatcaccgcgtgccaaacacttgcttttccgattccagaacgattaaccaatactttcaccaggggtctaagaaacttcaactgcgccattttttagtgttctgtccgcgaactggccaacgccagaatagcctgacaactccagtttaaatccaatttatacgcctcagttttatagaaaatatagttatggctgcactggaaaaaacatgatactcgaactatactacactattttgtcgtttaaaaaatatatcgtttcttaagatgttttattgagtttatttgaaagagaggtacacatatttcgaatatattaatattcatatattattatcattctctcttgatactggcaattaaaagaaaaggttcccgtttacaactagcgtataaactattatttgaaaccaacaagtagtgccatatacatatattcacagtttttcacgaatataaaatcaaacattccgaactttttaaaagtaaaccataaacaattatttaacacagtttcgtgccttaaaatatgattcgagaattgccatatgactttgaataaatatgaatttatatgaatataaaatgaattttctgaaatatctgcagcttcattaatttatatgagaatattgttggtacaaaaaatataacaacacaaagggaaactctatcagataccctttaagcagatggtgggagtcacatagaatattgcaagtaaaccagtataattaaaaacgacaacgaaagggatttcaacagtgcaagcgcgacagtttggacggttttcggattgggcttggcccaaatgagtttggcagctagagtcaagttgtccgactatcagataccctttactcagctagagtaagtgcgtttgacaaatttcaaaaaaaaaaaaaagcgtttgcgtgatattttttggcgatttctggtagcaagattgggtgtaacaatcttgcgatgcgtctacctctttaaaataaccatgcctaatagtaacattctagtttttataggtgccgagaacccagtgttcatacggacagaccgacggacatggccagattgactcggctagtgatcc

SEQ ID NO: 25907 - DNA, 1515 bp, DROSOPHILA
atggcgcagttgaagtttcttagacccctggtgaaagtattggttaatcgttctggaatcggaaaagcaagtgtttggcacgcggtgatcgttacgtttatgcactacttctcctggggtcttctcaccgttcccttcatcgaaaaattgtcgggatcgtttgggaatcgcgtccttctcgtcgatggactggtttatggagttagaggaatcctgggatttgtgaccacgcccgtgatgggtgccatttccgattttcatggccggaaagtagtgatgctactggcagtggcaaccacctacgctccaattccattcatgatgttgaagagttggtggtttttcgccattctcactgtgagctccatctgtggcagcacttactcctcttcattagcctatgtggcagacacaactactgtcgagaatcgttcaaaaggatatggctttgtggcggccagttttggggcaggaatagccttttctccatcgttggggaattacttgatgaaatcgtacgggtccgcatcagttattctgatagccaccatcactgggatgatcaatatcttgtttatcatatttgcggtgccagagagtttagttttgaaggagaaaaaggttattttgaatgaaaataatgataacaaggtggaggacacgaaagtggatgacataagcccaaaggaaaagaaagagaacttaaatggagaaggaaaggtgaatgttgaagtgaacaaacccacctcacagaatatagtcacaaataaagagctggaccaacagttcagcaaagaggaaaaccttcagaatgatttaactgaaaaggagaaaattgataatggatccctaaactcttccgatctttgggaagtgctgcgtaaaagtcgtaaggataagaacctgctcgtgatatacctcataacattcctctcgatttggccctttgcaggagtggattctactgcgcccgtttatctcaaaactaatatgggatttgagtacgaggaggtgtccatgatgttgggattactatctgtgctggcgatcacatccaatatactactcggttatattatgaatatagtaggggccaagtggtcgatccgtctgggacttttactattgttcttgcaaatgcttttcttcggctttggaacccatcattggatgtactggttaagcagtatcttggccgcactggcaacaattatacccgctgccaataatgcggtggcttccatctacgccagtcccgataatcggggtgctgtcctgggcattatctctggaattgagtgcttgagcgagggtgtgggacctgcctttttcggattactcttcttcatttttcaggatgattcggagactgatcttaaggtcaattctccaatttcaatgcccttcgtcataagtgccatcagtgtttttgtggccatcgtcttgagcagtttcattaagaaggatactcttggaaatgaagaaactagagtcgccaacgaaaacattccttaa

SEQ ID NO: 25908 - protein, 504 aa, DROSOPHILA
MAQLKFLRPLVKVLVNRSGIGKASVWHAVIVTFMHYFSWGLLTVPFIEKLSGSFGNRVLLVDGLVYGVRGILGFVTTPVMGAISDFHGRKVVMLLAVATTYAPIPFMMLKSWWFFAILTVSSICGSTYSSSLAYVADTTTVENRSKGYGFVAASFGAGIAFSPSLGNYLMKSYGSASVILIATITGMINILFIIFAVPESLVLKEKKVILNENNDNKVEDTKVDDISPKEKKENLNGEGKVNVEVNKPTSQNIVTNKELDQQFSKEENLQNDLTEKEKIDNGSLNSSDLWEVLRKSRKDKNLLVIYLITFLSIWPFAGVDSTAPVYLKTNMGFEYEEVSMMLGLLSVLAITSNILLGYIMNIVGAKWSIRLGLLLLFLQMLFFGFGTHHWMYWLSSILAALATIIPAANNAVASIYASPDNRGAVLGIISGIECLSEGVGPAFFGLLFFIFQDDSETDLKVNSPISMPFVISAISVFVAIVLSSFIKKDTLGNEETRVANENIP

SEQ ID NO: 25909 - DNA, 3188 bp, DROSOPHILA
gctctggaaattggaaaagtcagatagcggatacatcggtgaacagagtcgtcggcaagttgggacagctgagacagattccatcaccgcatagagtggcccacgcaccagccaccggagcagcagtagcagtagcagcatcagtgtcagtcatagtcctttggcgagctccggcatacgtggacgcggcaacactcgacggcatactgggtaactgcatcgacatcgactcggtggccgtggtgcagcacaagctggtgcaccgaattgtgtgagtagtaggagtgtccaatgggtcggttcggctggtccaacgccttctgtgcatattccataatgaataaataagtgagtgcaattaagtgttggccacagcacagcgattaccatttccagataggagggtgcctcagggaacgggtctcgaatcgggaattccctgtatgaattaatcataatttattaaaattatctccgctgttttgttacaaaaatattagggagcattatatacatatatttatcagcacaagcttacattttacattttacacttacctttttatatatttatttatttagaagcgatgaattttacacttacctaagcattttacatttgttaacaaaatcgttgcatacatttaggctgatcgtttagtgacacaaccttcaacagcgatatttaaatatttattatttgaagactgttgtaatctttttaattccattaagaacacattttccaattgtactaccatgctatcattttattcggtttacctttaaatttacttaataataaaactacagtacttaatagccttgctgccaactttttgcaagttctcaaaagaccacgccaagaacaattggcattaattaactataaatatatagtcgaataaaatcgatgcattgattatttgccgctgaccgccaagaggcaacttttttgggcctgcgtgtggccggtaacctggcattccagttccggccaatgtccgacacgaagcgtattgtaactgaattcgtgtattgcctactcctcagaggtggcaagatgtcgccgcccgtgctgtactacctgccgcccagtccgccctgccgcagcattctgctgctggccaagatgctggacatcgacttcgagctgaagatcgtcaacattttggagggggagcagctgaaaccggactttgtggccatgaatccgcagcactgtgtgccgactatgaacgacgagggtctggttttgtgggaaaggtgggtgtttgttcggttaaactattatacatttgagctagaaacttatattcttaccctattgcagtcgtgccatactctcctatctggtggctgcctacggcaagagtgaccaactgtatcccacggacataagggtgagggctttggtggaccaacgcctccagttcgatttgggcaccctatacatgcgactcacggactactatgtaagtggtttattttttgtatttagaatatctgtagttcaattacgaaatgtataaattgtgggtgcctcttttttttagcttgaagcagacctgcccatatgtaaatagcacgaccatgtgatctgcaaatatactatctttaatagctcgttaaaaaagatacacaagcgcaaacataacgctgaaattgagcaaaccgagacaaatagagaacttagtgttagctttaaaaactataaagtagctcatattcaaggctaagttcgaaagagttagtcaaagtgtagatacttttatgaatacttaagtaaaagctcacctatattgggtttattacaggattacgtttcttttttttatttataataattgtcaatactttacagttccccacaatgtttattggtgcgcccctggacgaaggaaagcgtgccaaattggcggaggctgtgggctggctaaacacaatcttggagggcagacagttttccgccgccgatcacttcaccatcgcggatctcacgcttttggtgaccgtttcccagctggaggccttcgaatttgaacttcgaccctataaacatatccgccaatggctcgatcgctgcaaggatcacatggcaccgtttgactacgaggaactcaatgccaacaaggccaatatgttggccgatatgttcaaggccaagatgaatcaatcggcgggctaacagttctttaaattagtgttacagtagcgaaaaaatatttaatatttaatatcagttgtgtaagtgttgtattaaataaataaattgttctgaaaacaaggttgtatgttctatatagataaattccttattttattacctaacttagtagaagacttactgcatatcctttcagatctatttttcctaaaatcagttaaaatcagtcccctccagttagatgcacaaagttaataggtatcccttagcccggcctctacgagatatcaaatgtaattttcgtgtggattggcagttaacttaattgagtttcagtctccgaagtgtgacaatctagatgaattgactggttcaaagggggccaaaatgagctgctaactggtggccatagacggacggacgttcacaaaaagatgacatgacacacattttaaaaataccgccacccaaaaaggacgctgctccgaatgtcctcaggcaaatggacgatattaacgtgtgtttggcactttgtttggccaaaaggacggaggaaaaaacgaggtggcagcaaactagcggatgctgatggccgcatcggcacctgtaaaaccccaactgaaatttaatggcacgccaacacaaaaaggcagagaagctcggttttatgcgaggagcgggctatttttataccagacatgggacatcggcagcgctcagctagacgacaggataatggaatccagcttcacagtctcacattggccgctgacaatgccggccgcatccttggctctgggattaaccgtggtcctgctggccaccggaaatggacaatcgcagcaggcagtgaccaacagcaagcagtcgcatttctggctaggtgggttaaaatcaatcactttggagttcaagaagttgcttgatttatattttatgctactagtcttgagtggattaataagagacttttgttaccatccctccgcagattgctcctgccttcacttgtccgagcgga

SEQ ID NO: 25910 - DNA, 732 bp, DROSOPHILA
atgtccgacacgaagcgtattgtaactgaattcgtgtattgcctactcctcagaggtggcaagatgtcgccgcccgtgctgtactacctgccgcccagtccgccctgccgcagcattctgctgctggccaagatgctggacatcgacttcgagctgaagatcgtcaacattttggagggggagcagctgaaaccggactttgtggccatgaatccgcagcactgtgtgccgactatgaacgacgagggtctggttttgtgggaaagtcgtgccatactctcctatctggtggctgcctacggcaagagtgaccaactgtatcccacggacataagggtgagggctttggtggaccaacgcctccagttcgatttgggcaccctatacatgcgactcacggactactatttccccacaatgtttattggtgcgcccctggacgaaggaaagcgtgccaaattggcggaggctgtgggctggctaaacacaatcttggagggcagacagttttccgccgccgatcacttcaccatcgcggatctcacgcttttggtgaccgtttcccagctggaggccttcgaatttgaacttcgaccctataaacatatccgccaatggctcgatcgctgcaaggatcacatggcaccgtttgactacgaggaactcaatgccaacaaggccaatatgttggccgatatgttcaaggccaagatgaatcaatcggcgggctaa

SEQ ID NO: 25911 - protein, 243 aa, DROSOPHILA
MSDTKRIVTEFVYCLLLRGGKMSPPVLYYLPPSPPCRSILLLAKMLDIDFELKIVNILEGEQLKPDFVAMNPQHCVPTMNDEGLVLWESRAILSYLVAAYGKSDQLYPTDIRVRALVDQRLQFDLGTLYMRLTDYYFPTMFIGAPLDEGKRAKLAEAVGWLNTILEGRQFSAADHFTIADLTLLVTVSQLEAFEFELRPYKHIRQWLDRCKDHMAPFDYEELNANKANMLADMFKAKMNQSAG

SEQ ID NO: 25912 - DNA, 2610 bp, DROSOPHILA
catgacttttggagagctttccaaaatgctccaagtaatatatcgtccgttaatgcaccgaccgaagaaaataagttggtaggggaaaacatgtatcctttaacatcgtccgaaagtcagcaattagccatagtgaagtaattatttccaaaagcctaagagatattaggtcgcacttcatttattaaacattgcatcgaagtcaaaaatgcaaatcccgttaaacagaggttctatccagtcagtcacatccatcgtatgctgcggttagatgttatagagccttgtgtaagtctatggagtcttccaatgcgtctggtcgccaaatgcacgaaggcttatcgagcctaccaagaaggatatccaagctcgattcttagctctgaagcttttagagaggagctaaatgcacaacttatgaataccgaagataaatttgccgacattaaaattattgaaagtaataataatattcagattaaataatcaaacaacagcaacttgtgtgaaattcagtttggttttattttatctcttttcttgtgcatgcaccgtcgtctacaagcaactgactcgatctcagaattgcaaggagaccgaacaaaaacagaaaaagagacagcgattccttccagtgaaatagtcccgtcaacatttgtatatgtattggtcatattattttctctaacagatcaatgaggctttcgcttatgtccatatatggtcatgttcatgtattcgtatacaagcacacacatagggacatttgcagcacacctgcagcgttttgggaaaatacaattttatgatgcagcatttactgcaaaagtttaggaaacccagtaaaacctaatcagatcattaaaaaattagtaatgattttaatacaaaatcaacaaaatagcttcaatacttcaaagtaaagtatataatacattttgatttatataggaacttcatgttcggatttcattatccagtaattaaatttttttttttattcaattagacctgattgttgtctcagaagcagtaatctggccgatggcaatggtttcgtccttatatccgccagttgcatatctgtgggactatacctaatacaaattagtttttttttttcaatttcctctctagtaaaatggtatataatatccatatgctttgttcgcttgtggtaagttggattattggccaggctaatacaaccttggttatcttctaaaatgtctattggtttatttaactcaatccttattccgtttattaatgatttaagcactttcaaacagtgccgtatattctgcttctgttgatgaagctgcaactgacttctgttttgttgtactccaacatattaaacaggattcaaatattttaaaaataaagccatttgtactttctttgaccggcccaatgataatctacatatcatttagattcatttctgacaaaagtcaagttcaaatcaatagtacccttcaggtatctcaaaactctcttaaggttttgccatagttctttaccattactattggtgtatcgactcaatatatatatggatgccctcaaatctgaccgagtacataacataacatacatcaaacacccgatcaagctccgaaatggtacgttgcattttccctctgtttgcaatgctgcatagccaagtttatttggcagaggcgtacttactggcttacaatcctccatattaaattttattaaaacgctttgaatataagctgattgacttttttttaccattgcttttatttattgaatctttttgaataagaactaacaatttaactaacaagttaaaaaaaaactgaactattacaaattttgttctaaacagttgtttttttccaactgttctgaaataaaacgtccctaaaaatttcttcgctgggttggtaggtcctttcgtcggagatgggaacgacttctgagctgagttagattcctcgacaggtggttgggtgtgaggaaagcttgctatttccataagttctaaaattgcattgatgactgttataatatttaagtctctttggatgttttcgttccgaacgtaccacggtgccccagttctcagaacctttgattgtgctcgttgtatgatgtcaatattgctgttgctggcgttgccccatagctgtgcgctaaggtccggatgggtttcaatacagaagtatagagtaataccttgtggtccaggctgaggggagaaccagcgttgatgaggcagtgtaagtagttggctttgagtttaagatgggtgtttttagcttcaataagcctgcgccatgtgagtcttctgtcaaggtgtactcctaggtacgttaccttatacagccgctagtgtgaggtgagtgttgccccccagctgaatatttatagatgtggcctgaagatgaatttcaaattctttgtaaaagtggtgcttcatacggttcctagttggaatgccggctccaccgtgtgctctaccatcggcgagatttgtaccatagaagtggtagttgttgaagtggttgaaaattgtatttgcttgtaagatgagtttccgaaagaagcattacgtcgatatgcttcagtgtgtgt

SEQ ID NO: 25913 - DNA, 800 bp, DROSOPHILA
ttcttattcaaaaagattcaataaataaaagcaatggtaaaaaaaagtcaatcagcttatattcaaagcgttttaataaaatttaatatggaggattgtaagccagtaagtacgcctctgccaaataaacttggctatgcagcattgcaaacagagggaaaatgcaacgtaccatttcggagcttgatcgggtgtttgatgtatgttatgttatgtactcggtcagatttgagggcatccatatatatattgagtcgatacaccaatagtaatggtaaagaactatggcaaaaccttaagagagttttgagatacctgaagggtactattgatttgaacttgacttttgtcagaaatgaatctaaatgatatgtagattatcattgggccggtcaaagaaagtacaaatggctttatttttaaaatatttgaatcctgtttaatatgttggagtacaacaaaacagaagtcagttgcagcttcatcaacagaagcagaatatacggcactgtttgaaagtgcttaaatcattaataaacggaataaggattgagttaaataaaccaatagacattttagaagataaccaaggttgtattagcctggccaataatccaacttaccacaagcgaacaaagcatatggatattatataccattttactagagaggaaattgaaaaaaaaaaactaatttgtattaggtatagtcccacagatatgcaactggcggatataaggacgaaaccattgccatcggccagattactgcttctgagacaacaatcaggtctaattgaa

SEQ ID NO: 25914 - protein, 111 aa, DROSOPHILA
MVKKSQSAYIQSVLIKFNMEDCKPVSTPLPNKLGYAALQTEGKCNVPFRSLIGCLMYVMLCTRSDLRASIYILSRYTNSNGKELWQNLKRVLRYLKGTIDLNLTFVRNESK

SEQ ID NO: 25915 - DNA, 3622 bp, DROSOPHILA
gccatgactgcggccatgacagcgataatgtattcgggagtgggaaggggaggcatccacatccacatgggttaggaggaggtaggtcctggcgaagttgtagggttgccaggactcggtcacatcccacttccaccatccgactacccacgctcgccgttctccggccttctcgctatttgagtttgggtcctggttcactttgtgggtattaagttcgttttaaggctaaagacaaacgactccatctctttcgacatgcctttctccgtctcttttacttaagccccggttgcactttttgcgctcctgccaaatgaaaactgtcctggcgaaggtgagtcaaagtctttaaagttgcacaaaggggattatgactgtgcccacataattagtcagctgccagtctttcgttactactcaaagtttttaaaacttgtattgtaaaataaagtcaagtaaacttgaaattagaaaaactacttccatcattttatatataataaacaccttttaggtctgccaagaccaacacaaaatccacgcatttcacttctcaatgcttaaggaggggaaaaatgtcagtcgtcattttttatgacgcacttagttaaacgatatggacaatagcaaagcaccgggcaggggtaaccagtccatggaaagtggtcttcaggggcaacccccaaggcatttgatgcagtggccaagttgacagcccttccttatccgccaaccgttgagggaatttgttttcgtcccggatgctagttttttatccagctgatgggccaagcgggagacttttgttttatcgatggcaatacatctcagccatcaatatgattaacccacacggaatgtgccgaagtgccgaaaatcaaattaaattggcctgatgtaagtgttagtgacagattcggacactcgcttgatttatgcatagcaaatcgatagtttgtgtttgtcctctgagaaaagggatcagtgtcggctatgtgcagacggtaaaaacataatttatattcacatctccatgatatttactataaatggggagtacaaaaatgccttaacaagtagatgctggctgtcacttcttattcgctcgctgttcatacttttcctcaatgaacttgaacacggaatcgatggccgagtaagaggtccattcgtgcttagtgtggccagcggaaatcctccggatgctgctctttgactgtgaaacgggtgtgtctaagggtgtgttgctggcaacccaatcgcaggccacatcgcacaggtactccttgttcttcgcttggggacttcccatggcggcatcagtgaaggcaatggcaaaaacggattctttaaagaaatccggaaaccgctccacctaataaagagaagattaaaatatgatgttgaaatatatttggaattttatacccaccaaatcaagagtaagactgccaccataactgtgggccacaatggccacactctcgggtttcgcgggcaatacaatattcttccacacatatttaacgtgctctacggacgtattgacgcccttgatgggattctccttaccattgtagaatcgtgtgcaatcgttggcattggtgatgaggagatcgtatcccagtttttgggcctgtcgcacataaggcagctgggtaccgtggtccaaggaattgttaataattaaactataacaaaattaaatatgtaagtatttgtatttgtatgttaatatcatttgtattggtattcaggtatttttatcatttctattatttggtttaaatagtgaacatacacaccttctggcccactgtccggctttaacgtatccactgccatggatgaggactagcaactttttggactgcgacagctttgccggttgcgagaatacaaacgaagaccgctctggaggctggtcaaaagggatgtaggtgcgactaagaccgtttttctccagcaaagcgtagacaatttctgggatttgctatgggcgataaaggatacagtatttgtataagcttattcctacccacgtgggcatatgtaataatatttgtggaaaggaattgtgtggtctagtttctcttgaagaggattcgtcctaggtgtggattccttgacatcaaggaaacctaatagattatagttttcggcagaagatattcatgtgcaatgtgggttgaatgcggtacatacgttggctagcttctggtagtgcttctcgttttcggcggcgtcgtcgctgacgttgtaggaaaagagttccttgccaggctccccagtggcgggatcgactttgcgcagcactccttctgcaggaggcaaacgggaagatcatattgtcaagtagcgactttgtgcaacattctacttacctccatcgaatgcatatccaaagtttttcagctggatgagagcctcctcgcaattgctagccggcggcggtgagtgcgacattcgaaaacttctgaggggtcgaaatatttgaataagcctagaccacattacaatcggtcgcgtggcttccacacggttcggcacttacgtagtaatagagcgattggaaaaagcttttatttatatagaattgttgttcgagtttttgttttgatttttcatatgaacgccgaactagggatggaataagcgcgccacctactggccgcaagctcacatcgtctaagcgataggtatcgatagcgaggtcagagcaccaattcacaccaaaacgcatcactgccaaaaaaaatccccataatattcgttataaattaaattttattaaataacattttttaatataatattgatcctttcctgatgattaatcattgtcttttaattgtaaccctagatagaaaagatcatacatatttctgtaaaacctgctataacccatctttccatacagtgcgattaatttgtaagacttttaatctcgcagccatagagtccatggattcctgaatccagctggagtatgcgttgatgcgagtgaaggcatagggttttaatggggtgcaggcttttcgaccgtaggaaagtaatccgtacagcttctcttttgccacattcatcaagggagctccagaatctccctgaaatgtaaaattaaaataactcttatttaactgatataaaaattattttatagcattggtgtttgttcctggtaagaaattataggacttctataaataatatcctaaatacctcttaaaaattgctacgtattgcaaaccaaggaatttgactggaatatgttttctagtttcaaattttataatgattaaatatttgaaatgtacctatatgtagtttgtttaatttaattggaaaacatattctttgttgaaaaaattttaattgattttcgattatgaatttctggcgtatttctgatccacttacgtcgcagggacctcgcggtcctttcaaatgcatcgcacagatgtcaagcggtttgaggaaaacgaagcgatggctttgctggcactcatcgttctccatggtcaagaagggcatctcctggagttttcttatcttgccgacgccaacccgaccccagccaaccagcgaggcctgggtgccactatccctttgaggcttt

SEQ ID NO: 25916 - DNA, 1176 bp, DROSOPHILA
caaaacaaaaactcgaacaacaattctatataaataaaagctttttccaatcgctctattactacgtaagtgccgaaccgtgtggaagccacgcgaccgattgtaatgtggtctaggcttattcaaatatttcgacccctcagaagttttcgaatgtcgcactcaccgccgccggctagcaattgcgaggaggctctcatccagctgaaaaactttggatatgcattcgatggagaaggagtgctgcgcaaagtcgatcccgccactggggagcctggcaaggaactcttttcctacaacgtcagcgacgacgccgccgaaaacgagaagcactaccagaagctagccaaccaaatcccagaaattgtctacgctttgctggagaaaaacggtcttagtcgcacctacatcccttttgaccagcctccagagcggtcttcgtttgtattctcgcaaccggcaaagctgtcgcagtccaaaaagttgctagtcctcatccatggcagtggatacgttaaagccggacagtgggccagaagtttaattattaacaattccttggaccacggtacccagctgccttatgtgcgacaggcccaaaaactgggatacgatctcctcatcaccaatgccaacgattgcacacgattctacaatggtaaggagaatcccatcaagggcgtcaatacgtccgtagagcacgttaaatatgtgtggaagaatattgtattgcccgcgaaacccgagagtgtggccattgtggcccacagttatggtggcagtcttactcttgatttggtggagcggtttccggatttctttaaagaatccgtttttgccattgccttcactgatgccgccatgggaagtccccaagcgaagaacaaggagtacctgtgcgatgtggcctgcgattgggttgccagcaacacacccttagacacacccgtttcacagtcaaagagcagcatccggaggatttccgctggccacactaagcacgaatggacctcttactcggccatcgattccgtgttcaagttcattgaggaaaagtatgaacagcgagcgaataagaagtgacagccagcatctacttgttaaggcatttttgtactccccatttatagtaaatatcatggagatgtgaatataaattatgtttttaccgtctgc

SEQ ID NO: 25917 - protein, 309 aa, DROSOPHILA
MSHSPPPASNCEEALIQLKNFGYAFDGEGVLRKVDPATGEPGKELFSYNVSDDAAENEKHYQKLANQIPEIVYALLEKNGLSRTYIPFDQPPERSSFVFSQPAKLSQSKKLLVLIHGSGYVKAGQWARSLIINNSLDHGTQLPYVRQAQKLGYDLLITNANDCTRFYNGKENPIKGVNTSVEHVKYVWKNIVLPAKPESVAIVAHSYGGSLTLDLVERFPDFFKESVFAIAFTDAAMGSPQAKNKEYLCDVACDWVASNTPLDTPVSQSKSSIRRISAGHTKHEWTSYSAIDSVFKFIEEKYEQRANKK

SEQ ID NO: 25918 - DNA, 2927 bp, DROSOPHILA
tagattttatgcgcgacaaaaacgaagtgcaaacatttttatgttcccgccgtttctatgctgcaattggtataccaatttgacggggcgccgactttgactttaactttaacttcggtctgggctccactgcgtctgtgtaattaggttcaaataatgtggagctcagcctcttcgcgccacactagtcagcaagatattgtagttcgcacagccctcatggaaggatgatcctgcagaggacccaagtttgccagcagagtgcccgtctcctagctcgtttcacgctctcaatttactggatcaaagctcgccacgctcggcgagcctaacatggaaaatctggccccaaattaactcccatatggtagacggctagcaacgggtcaaatgctcagaagactaaacctaaacaccaaaactccaaccacctacctatccatctcaacgcatctcattcggagggaatctgagtctcgctgggcaccgcgctcagcatataaattcatttagatcaatcaattcaatttgtttgtcaataagccctaaatgagtatttcatttaaacaaattaaaattcgacccgttcggaatgccagaggctgctcagactcatcccgcagcaattaaaattgacgcgacacactcgattccctgatttcttaaacgagcgcaatggaaacacatataaatacggctggactttggctcagacccagacccagacccacatccagacccagaccctgggacccagaaccgtcgcctgagttccagagaccaagaccaagaccaagaccaagagaccaacggccagccagcccatcgttgttgactcttcattgtcaattaaaatcaaataaatttatttgcttcttgacattcgcctggccacagtgagcaccactttcgattcgccgcttttgtttggcatacaagtgcattgagctgattgctctgaccttcttcggaggctgctgggtatacccaaaatcacggatcacttggctttgccctggttggccaccgactccattgccttcttcaccgtctccggatcgccgaggaacttcaacgtggccaaaggcttgaggctctcgtctagttcgtagacgaaaggaatgccagtgggcaggttgaggctcataatgtccttgtcagagatgcattccaagtgcttgaccacgccccgcaggctgttgccgtgggcggcgatcaggacacgcattccatccttgatctggggcactatgacctcgttccagtagggcaaggtgcgctcgatggtgagcttgagggactcggatttggggaactcctccggcttcagttggtccttgtagcgcggatcctcaacaatgcaggcgtagtactcgtgatccttctccattggcggcggtggggtgtcaaagctgcggcgccagatcttaaccttctcctcgccgaacttcttggcggtctcggccttattcagtcccgtcagtccgccgtagtggcgctcgttgaggcgccacgtggtgcacaccggaatcttcttgtgctcgctggactttagggcggccctgagtgtctcctgggctctggtcagcaccgaggtgtgggccacatcgaactcaattttggcatctttgagcgctttgccagcggcacaggcctcctgctgccccttctccgatagcttggcatcgaaccatccgcagaataggttcttctgattccattcggactctccatgacgaaccatcacaatcctgtacttgcccttcttctcggcctgctttccgccggatgatgacttcgagaacgggcagcgggcttcgatgttcgccacgcgacacagcaattggccacaccacgaattcctggccagagccaacattttgggacactttgaatttggaaagtgtttgcagtctatatcgtgttcatttcgaatggattttctattaaaagtgccgggttgaacctatgacagtaagaaaagttcgttgaaataaggttactttgaggtttttatttcatgcattctaacagtatggaaatattctttaatgattatattctacgtttcactgctagtaatggttgctcagccagcttcatagtggtattgtctataaacctaaggtccttgtacaaaaaggtggtactcagcatataatttcgtaatattttagctagagctagctttgcagatatcagcgagagtttccaacctaagtacataatatattataatagtgtaaaggaattataagaaagttacccacctaagcatgttttcttccccttcgaaaaaggtaaataggaataaggtggccttgctcgcttattttcaggcagaaagttatcgggattaaatgcattagcctgtggtccccagatatccttattacgatgagtgtgaaaaatgtctatcattaaggttacgccttctggaatataaaatccgtttgatagttgaatagaatgggaagtttgccttatcagtaatggaacggccggtattaaacgcatagtctcatgcaaaactcgatccagcttcactaatttctccagatccgcatgactggcttcgaattctcctcctgaaggaaacacctctgctagctcctcaaatacattatcctggtatttaggaaacattgccatcaggataagcacattgttgactgttatagataaagtatcggatgcggcaaatatgatattagaaaattcccccattacgtcgtcataagaaagttctccgattctcacaagattgagaatgcggtcaattagtgccggttctgagctattatctgtgctactcagctttttgtctattatctgaaaatatgcatatgtttagaaggaaatctctgacttctgagttataagtacgtctttgatgaatgcatttgactgcgttgcggcctctagtc

SEQ ID NO: 25919 - DNA, 864 bp, DROSOPHILA
gaacacgatatagactgcaaacactttccaaattcaaagtgtcccaaaatgttggctctggccaggaattcgtggtgtggccaattgctgtgtcgcgtggcgaacatcgaagcccgctgcccgttctcgaagtcatcatccgaatggaatcagaagaacctattctgcggatggttcgatgccaagctatcggagaaggggcagcaggaggcctgtgccgctggcaaagcgctcaaagatgccaaaattgagttcgatgtggcccacacctcggtgctgaccagagcccaggagacactcagggccgccctaaagtccagcgagcacaagaagattccggtgtgcaccacgtggcgcctcaacgagcgccactacggcggactgacgggactgaataaggccgagaccgccaagaagttcggcgaggagaaggttaagatctggcgccgcagctttgacaccccaccgccgccaatggagaaggatcacgagtactacgcctgcattgttgaggatccgcgctacaaggaccaactgaagccggaggagttccccaaatccgagtccctcaagctcaccatcgagcgcaccttgccctactggaacgaggtcatagtgccccagatcaaggatggaatgcgtgtcctgatcgccgcccacggcaacagcctgcggggcgtggtcaagcacttggaatgcatctctgacaaggacattatgagcctcaacctgcccactggcattcctttcgtctacgaactagacgagagcctcaagcctttggccacgttgaagttcctcggcgatccggagacggtgaagaaggcaatggagtcggtggccaaccagggcaaagccaagtga

SEQ ID NO: 25920 - protein, 271 aa, DROSOPHILA
MLALARNSWCGQLLCRVANIEARCPFSKSSSEWNQKNLFCGWFDAKLSEKGQQEACAAGKALKDAKIEFDVAHTSVLTRAQETLRAALKSSEHKKIPVCTTWRLNERHYGGLTGLNKAETAKKFGEEKVKIWRRSFDTPPPPMEKDHEYYACIVEDPRYKDQLKPEEFPKSESLKLTIERTLPYWNEVIVPQIKDGMRVLIAAHGNSLRGVVKHLECISDKDIMSLNLPTGIPFVYELDESLKPLATLKFLGDPETVKKAMESVANQGKAK

SEQ ID NO: 25921 - DNA, 5487 bp, DROSOPHILA
ccaaaacttcttctggatgttctctaatcgaaatactcatggctggccctacttggcagcccaaactgtttcacactttgctacagttttgaaccttccctgttgctttatttggtgacatctgcatgatgtgccgatgtgtaccggtcaaggaaccggaaagctacttacaatgcaatttgtggcgtgacacacaccagactaaagtatttaagcttgataccgtcacctacagaacaaagccagcttgatttctatctgacagagccatgcagcagatgacgaaaaaacgtagtttctaattgccgctaaaattcttctacgagtcttttatggcgatgacctcatcacaagaggtaactcaaccgaagaagtcttgtagatcatgctacagaccatagtattactggctctactaatgcgggaagtcctgcagcttggcttattttcatgccatgtttattgctgatcagattctgctgtggtgatgttctggattcgagatgagtcttcacgctttcaaacttttatttctaatcggatctctttattcaaggaactgtcaaatgccatagaatggcattatgttcctacagcctgcaatgcagaggacatactttccaaaggggcacttcctagtatgctgatcgagtcaagtctttggtctcatggtcctgactaacttcaagaagataaatcacactgactagaatcttgtctcactccaaaggttcgccctgagctaaggaagaaggccctcatcactctctagacccctgccgacatcgacatcccaaccacttgtaaatttgtcaactcctggcaaaaattgaagcatgtttttgaatagatcttcaaatttcgttatcgtatcaggcacaccggtctggctgttaatcatctttccgtaggcctgaaacttatcattcgctccattcagatggcacaccttaccaaggactataatgccctgctcaacactcgacaagtaaaatcatcgagctcaaatgcatccctcgcatccatcattaacaactctggacttatgagagttggtggcagactaaagcactcatcgttggactatgacgatcagcatccgctattattgccacgtcagcacccaatcacttgtgccattatattcgactatcatcgtcgcaatctgctttctggacctcgcttccattccactgcagttctttgcggtcgcaagacaactgcaagtgcagtcagcaaatggatcatatgttttcgagctaagccacacaaagctcgtcacattatgggtgatcttcctgaaaaccgcgtaacagctttatcgctcttatacattgctccgtgcagcaatagattctgcattcccctttatgctatgttcctttctctcgatagagagcgagcagagctgttttaatctttattctgtaaaacttgtaagttcttaacttagtaagttcagttaccagttaagtgttgatcccaccagtattgccgtgatacagtttaactcttaatcggttcggtacgggcactgccgccgttcgttataccctacagccctgtgtggcgaaatatactgaaatattaattataacattaactctgccgtgtttataaattgccacatcattttcaaagtcaatgcagatcgcaaccttagaaaaggaactaaccaaggcgagggaaaatgaaaggcaaggcgaggccgaaaggaatcccgttggaatcgggtcacgcggtaccggtgtgagcggagcggcgaatgcaacgttcaatttgaaacgctgtcagcagtaagcgtaacggtgacgcagacatttagtgaattaattaaatcctaccttaatagaggagctgatggcaagctacctataagcagaaggatggatttggcaaggcatgcggctacgatacaatcatatccgacagtggtgcatcttagtgaatgtttacacgagctaaaccagaagcattggaaccggaggaccatatgcaaatcaatccactggtttcgagatcctgtcttctagctaaacgactaaacgagtcagcgataccagactgggcagctatggaaagacgaccaggtgagactgccagacagctacaacatggcactcaagacactcgtcatcattgaaagaaaagtaaagcacgatgtggatttcgtacgagcttatagcggaaatatggatgattacatcaagaaagggtacgcacgaagactagagccgcatgaagtcatccgcaccagcagtggcaaggtatggtacctgccaccttttggagttgagaattcaaacaaaccaaggaaaaattatactagttttcgacgcccggggtaaggtgaataacttgtcgcttaactcagcactatgtaaggcccctagcgctacaagcccctaacagcagtgctcttccacttccgggacggatcaattagagtgtgcgcagacatcaaggagtattgagtattgatgcaaccagaggatttatatatatacgagatgcaggtgatgtcattcggagtgaagcggacaatgtgaagaccgtaaacgtctcacagtacagcagtgcggtcctggcgataaacgagtaccactgcgtcgacgactacgtgcacagtgtcatgagcaagaatgaagctgtcgcaatttcctcaagggttagagaaatacatgcgcatgccgggtttgatttgtgccggttttcctttagttcggcaaacgtggtcaaggctttgaatccacaaaaatacaacacatcagttaagttatccgaatctaaggaaaaaatgctgggtatgtattggcagccagctacagatgacttcaagttcagtgtcaagttccattgagtgcccagaagcgtgatgaatggagaacgcgaccctaccatgagggagttcctaagcctcgtcatacccacgtttgacccgattggatttttgagcagttacatggtgactgccaaactgtaaatgcgagaaattaggcgaagaggagtcaattgggacaatccgctcccaggcgagttggacacagtctttgagagctggcgacaagagatgagatgagtataaagacgtatgttcaaaaaccaaatgtgctcccatgaggacgatgtcaatccctcgactggaactacaggcagctgtactaagtacgagactgatggacactgtcaaacaggagcacgacttggagatcagcaggtcacactctggactgactttaagaccgtgctgctttggattagcagcacccaccggaggtataagcaattcgttgggaaccgagtggcagaaatcatacaaatgcttcccaatggacgtggctaccgtttgccgaaaacgtggtagacgaggccaccaggccgcgttgatttcagtcaaggttcacggtggttaagcgcaccgcgacggatgtgctccacaggccgctgagaaagaagagatcaaatgtgagtttgcattggtcatagcgaatgagtcgttcgtttctttgcagagattttagagtttcaaccgactggtaaggacgacagcaagggccctacggtttcttcgacggagtcgcaagctatgcagcgaaccctatggtggcccaattatactgtcgcacaagaacgcactggcggagataatcgttcatcaccatgagagaatgagccaccaaaacttttgggccacaatcggcgagatccgtcgcaagtactggataacaaccataaggagactgctacagagactaaatttaacgttgcgcagggcgcgactaacgcagcctgagatgggcccctgctagaggatcgacttgaggcaaaggaatggccgtttaagtatactggcctggattatttcggatcattgcatgtgacaattggacgacgtacagagaagagatgggtggtgtaattcacatgcctaacaaccagagcaaaacatttggagattgcccattatttgtcaacagattcatgcatcatcgctatgaggaatattatgtgccttcgtgaaccggtggacacaataagaagcgacaatggttagaacttcgtcggaacagacagagaagcaaagagattcagcgaagtacttgacccagatccagggcgagctgtcatcgaaaaaaatagagtgcatactgtctgtaaaaactgtccagcaaacccagctgagggtggagcgattggtccagtgtgtaaagaaggtgttagcccacacaatgaaagagctcgcgcacaaggagcacgtgctggagaacggaccaggggccccaatgacacctaacaatctcctgaaaggtgtatccgatataccaagtcttacaaggggcgacggaccggcttccagggcatgtgccacaagaaagcaatgggagaagtggtatcagcgtatcgacccaatgtgtcgcggagttctagtatacatctgcgatccagccataccacgcagggactgggaaagaggcatcgtcgattaagtgttcagcgatgaagatggtgcaccaagacgagcggcggtgaggactagcgatacccccaagttaatactgcgtcccgcttcgaagttagctgttctagatgtggtgaatgcttcttcttcatgcacctctatcgatattgatgataatttggatcgagtcataaagaagtcagagttaatatttattgtatttattttaatgtatgtcgggtctggttttaccttaaagaaacattaaacttgactggcaaagtgagttcgactagcactatccaaaagagaggaagagaatattgcggtacgcaaaataagaacatttaaacgattgtaaaatgatttacttatagaataaaacctaactcaaatgctaacagaccttgcggcctgagttttgttaaaggcattacatgaatacctgcagaggctcttcaatactgattataatttatttttctatttatataaaacagatttaactaattaagatattatcattttcgttttattcctaagcgtataaaccgacaaatggccaaaaaactgaagacattagcagcagagcgttcattagacatggtggaacttaaatcaagacaatgtattataaatagttttgctggaaaaattagtgaaatcggagagctgtcaattctttcagatgggaaaaacgaaataaaatctgcaattttagacgttaaaaatgaaatatcaaagtcaaacatgtcattggtaccacaagagtatatggaatgtggattgttttcagatgccgatacaaaaacatcaacgatgtgtgcgaagttaacggatattttaaattccgaagtgtttaaggacctgtgaaatgttttcattatatatttgtgagatatttattaaataaaataagttattattaattgctgactaaaacattttaaaatacaataattatatattgaattatttatttattaattattcaaggataaaatgttgtggtaaacggtatttgaaga

SEQ ID NO: 25922 - DNA, 1497 bp, DROSOPHILA
catgtttttgaatagatcttcaaatttcgttatcgtatcaggcacaccggtctggctgttaatcatctttccgtaggcctgaaacttatcattcgctccattcagatggcacaccttaccaaggactataatgccctgctcaacactcgacaagtaaaatcatcgagctcaaatgcatccctcgcatccatcattaacaactctggacttatgagagttggtggcagactaaagcactcatcgttggactatgacgatcagcatccgctattattgccacgtcagcacccaatcacttgtgccattatattcgactatcatcgtcgcaatctgctttctggacctcgcttccattccactgcagttctttgcggtcgcaagacaactgcaagtgcagtcagcaaatggatcatatgttttcgagctaagccacacaaagctcgtcacattatggacagctacaacatggcactcaagacactcgtcatcattgaaagaaaagtaaagcacgatgtggatttcgtacgagcttatagcggaaatatggatgattacatcaagaaagggtacgcacgaagactagagccgcatgaagtcatccgcaccagcagtggcaagagtgtgcgcagacatcaaggagtattgagtattgatgcaaccagaggatttatatatatacgagatgcaggtgatgtcattcggagtgaagcggacaatgtgaagaccgtaaacgtctcacagtacagcagtgcggtcctggcgataaacgagtaccactgcgtcgacgactacgtgcacagtgtcatgagcaagaatgaagctgtcgcaatttcctcaagggcagctgtactaagtacgagactgatggacactgtcaaacaggagcacgacttggagatcagcaggtcacactctggactgactttaagaccgtgctgctttggattagcagcacccaccggagagattttagagtttcaaccgactggtaaggacgacagcaagggccctacggtttcttcgacggagtcgcaagctatgcagcgaaccctatggtggcccaattatactgtcgcacaagaacgcactggcggagataatccgaagtacttgacccagatccagggcgagctgtcatcgaaaaaaatagagtgcatactgtctgtaaaaactgtccagcaaacccagctgagggtggagcgattggtccagtgtgtaaagaaggtgttagcccacacaatgaaagagctcgcgcacaaggagcacgtgctggagaacggaccaggggccccaatgacacctaacaatctcctgaaaggtgtatccgatataccaagtcttacaaggggcgacggaccggcttccagggcatgtgccacaagaaagcaatgggagaagtggtatcagcgtatcgacccaatgtgtcgcggagttctagtatacatctgcgatccagccataccacgcagggactgggaaagaggcatcgtcgattaa

SEQ ID NO: 25923 - protein, 463 aa, DROSOPHILA
MAHLTKDYNALLNTRQVKSSSSNASLASIINNSGLMRVGGRLKHSSLDYDDQHPLLLPRQHPITCAIIFDYHRRNLLSGPRFHSTAVLCGRKTTASAVSKWIICFRAKPHKARHIMDSYNMALKTLVIIERKVKHDVDFVRAYSGNMDDYIKKGYARRLEPHEVIRTSSGKSVRRHQGVLSIDATRGFIYIRDAGDVIRSEADNVKTVNVSQYSSAVLAINEYHCVDDYVHSVMSKNEAVAISSRAAVLSTRLMDTVKQEHDLEISRSHSGLTLRPCCFGLAAPTGEILEFQPTGKDDSKGPTVSSTESQAMQRTLWWPNYTVAQERTGGDNPKYLTQIQGELSSKKIECILSVKTVQQTQLRVERLVQCVKKVLAHTMKELAHKEHVLENGPGAPMTPNNLLKGVSDIPSLTRGDGPASRACATRKQWEKWYQRIDPMCRGVLVYICDPAIPRRDWERGIVD

SEQ ID NO: 25924 - DNA, 5249 bp, DROSOPHILA
aataggaaagttttactcataggttctctatactctttacacaggttactcattaaagctaagcattaaatgtttgccaaatcggaggcgccgcctacttcttcctggtggtggtgggtccgcccatgcgctccagctcgtccttcaggtcgagcagctccttgtcgggcacgtagcgccgctcctcgcagtcgtcggtgtactcctgcacctgcaagctcacaccctcgggcagcgccgcctgggccaggcgcaagaactgcggatagactggcgcatccacattgttcagctgcaggttgcgctcgtaggtggtcagcttgtactccgattcgatgaccgtggagttgggccgcagtcgctgcaccgtggtcttttgcggagggagggcgtagcagtcggagacgtccaagtccaggtactcggccaatccgtgcagaaacctctggtagctctccagctgcgggtagtcgtagcccttgatctgcacattcaggctctcgtactgcgggaatttcggcttgagggactgcaaacggagaacaatggttactgaccaccaaaataattgctcatctagtctgatctgattgaaatctgtctacaagattatgctactatgctcaaagcaagtaatatttaaaaaggggttaagatccttccttctcagttgaggacccacctccaggtaatccggttcgtaaacacttccactggtgctcctcacggctgttgtggttgctttgggcacctgcagcgccagccgcacacttggcagtatctagcacagtgggaaaatgaaattgtaatagataatttaatagatattttcagctatttaccctgcgtagcattttgctgtttttaattctccaattcaggttatatcaccagctgatggcgtgcagccacactgttgccggctccatggtcacactggctcaagcgtcagataggctcggcaagtgttatcgaagaacgataggcccgataagttcggacgagtagaagaggaaataatatttgtatttacttaagcccattgtacgcacacacaactcgaaatgcagggatcggccacgctgttggtggttgcgttggccttgctacttggcccggcgagcacggccgggaaatcggatccgggcatggtggacgtgctggtgaccacggtaaatatgtgcaccaccaccacagccccaaacaaataggggaattagaattaatccttttccggctacgtaacaactggtttgtcctcttctctcccacacaggacttgcccagcatccgggagcagcgtccgctgctggccaacacaaaaatctacgcgcagagtaagtacaggcggcggaaaacgcgtgacgaatgcctccgacttacccctttcttccacacctgtttcaatggttccagttaagggctgcacttccaatgtggaatcgaacctgaccattacgttccggctgacggagcacccctgcatctttgatgaccgcacggtgagtacaacgtttccatatggctcagtgaccatttaatcccatcaatcttgtatccccaaacagctgcaggccatcgcccagaatgctaccctgcagaagaacgccaccatcaataacgtcatcaccgagatcaccaggacatatccctgcaacggactcatcgtcctggcgataaacaaggacaaggtggtcgaaggatcagcgatcccaacaccggagccaaagcatccaatgctggagcacaagcacccactttcggtaaatgcgacatatatcaacgataagtagaagcacagcaattaccacgggccagcaaagcattttcggctttttccttatcagcttatcgtttctctttaaacagggtattccctagataggtggggcatactgtttatagagccagcttgaaacatttacaggcatttgtgccattttattgaatggaatggtctactcggtatcaggttttcttatatatgtataatgaagcaggaacactgagataacgcagtaattgaaccacttccgtttccttatagcccacaacgaacccaattgcgagcgtcaaggaggatggcatttacgaaatcgaagttaacatcgcggcgggcccatccgcgcagttcagtgccgtggtgcacatagagttcctgggcccacacggcttcatctcggccatagattggccattcctgccggtaggggtcgagtgtgtttctaaatgactttgtttatacataatcatgtatatgtttattttcccacagttctatctgatcatgtgcattgtttacgtgatatttggaattatttggctgtttgtttctttcgcgcaatggcgggatcttttgagaattcaattctggatcggtggcgtcatactgctgggaatgctagagaaggccttcttctacgccgaataccaaacgctgacgaacaagggtgttgcagttcagcacgccgaactggtggccgagtttgtgtcctgtgcgaagcgcacgctggccaggatgctggtcatcatcatgagtctcggctttggcattgtcaagtgagtgagcgcttttgattagaaacagaagggccattaaactgccgcctgcagctgtttatagttatagttatagcttactctaaagcagttgctgctattgaccgaaccacttaagcgttaatttactcaatctattccagaccccgtttgggacccatgctgcatcgcgtggtgggcgtgggaaccctctactttgtgctggcctgcgtggagagctacttgcgtatcaccaatgtgaagaccgatcgcagcgagctgctggtggcgagcattccactggcggtgctggacacaggaatatgctggtggatattcacctcgctcgtgcagacaactcgcactctccgactgaggaggtgactaatgccaatgatgaaatctcaacacatgcgctaacaatgtgtaccttttccaggaatatggtcaagctctcactgtacaggcacttcaccaacacgctgatcttcgctgttatcgcttccgtcatattcatgctgtttgctttgcgtttgcgtagggtcgagaattgcacgcctgtaagttgttgattagcatgaatggagctgcgaacaggggtttgctgatttcgtgttttttttttagggctggcgcgacatttgggtggatactggcttttggcacattttgttttcggttctgctgctggtgattatgattctatggcgaccgacgaataacaaccagcgctatgccttcactccgctgctggataacccggaagacgaagacgatgagggtaagttagaacccgaacttctgctgcaaacaaggactaattgactccttaacttttggcagacgaggaggatcagttcgtcgcggatgcctacggcgtgaaaatgcgcggccagaatggaacgccgaaaacgtcgacgacttcacgaaatgccacgaccaccgaggaagacgacctgcgctgggtggaggagaacataccgtcttcgatggcggactcggcgttgcccatcctggactccgatgaggaaatcatcaacaccaagttcgaggtgtcgaaaatgcaataagctgtgactttcgctggaccgaagagactttttacgcatatttttgcacattttcacgcaaccgtgtctcccgccagcagctatgtattttttagttctatccgccattgaggaggaaaaccccttattgctgcgctgcgctgacactgatcttccaatttcgagaaccgtctgtccggccacgccttctgagcccgtgtaaaataatgtatgtaatcgtagttccttctacgcgcacgtcctccccccctctaaataaacctaacttattcataatacctagcctaagttgtagatacctatgcgacgatccgagaacttaatttaaaaacttcgacttgaattcttgtgctgctgcccctaactacactcgcaaaggtgtatgagtgagctgttggtggtcgcctcattgtatgtatatagctggtaacacaagacgaaacgatctatataaatctacgagtatattctgtaataactatgataaaacgcgactatgcaaagattaaaagtaattgtctaagtaagcacacaatcgtttgcgtcacacacctcaaggtatttaattacatatttttaatcaaacggtctccgattttcataaataaatgcaaacgtatcttaaaggtagccatgaaccaaactcgccatgtttttctttagtccttatctaactagcttatgatatgatatgtcgtgactaaaagtagaatatggtatacatcgatggagtgatgtgtagtagtttattttatatatcttatcttttgcgataatatgatgttttcccccaatgaaaccacttctagttgtaattcaatatttattagtttctttgtataaaatttctcttgccttccaaatttcagttaaaaaatattaagtaaagaagaaaggtaatgtgcatttcctcagataatacaatcacaaagcgatttcagttaatattttgcttcgagcgccttactgttagattacacacaaacacaaagttacaattaataaacacaatatttattcgcggaaggattaagaacgaaacgcaagtgcctcgacttcggtgcaaatatgcattattacaaataagatacaaatacttatggatactgtcttgagggcggcgaagttggcattttcggctgaactctggatgaagcgcgactccaaacggcaacaatgtgggaggacagttgaaacgggcgggcaaaatttacattaatgtgcttctcgtggtgtaacaattttctcatgtaacaaatttactgcctagaaatgcgtatttaatattttttagtcagctctttagtccagtccaagcggagtcctccacggagctgctcaacacaattgggcgagtaacagcgaattgggtgggtgcagccgaaatattatgaaaattatttatatttatgacaatatttagtggtgacaacagtgccttgcaattcgaatattgctgcgctcttcttgggagcagccagcttgtgggacgcccctggactggattggtttatgtggaaattcagccttcagccgctcagtactcagttcgattcgggcttgacattgcgtcgcaggattgccgctgcgaggtcctgcttcatggccgcctgctggcgctgatcggccagtgattgtgtg

SEQ ID NO: 25925 - DNA, 2298 bp, DROSOPHILA
acgagtagaagaggaaataatatttgtatttacttaagcccattgtacgcacacacaactcgaaatgcagggatcggccacgctgttggtggttgcgttggccttgctacttggcccggcgagcacggccgggaaatcggatccgggcatggtggacgtgctggtgaccacggacttgcccagcatccgggagcagcgtccgctgctggccaacacaaaaatctacgcgcagattaagggctgcacttccaatgtggaatcgaacctgaccattacgttccggctgacggagcacccctgcatctttgatgaccgcacgctgcaggccatcgcccagaatgctaccctgcagaagaacgccaccatcaataacgtcatcaccgagatcaccaggacatatccctgcaacggactcatcgtcctggcgataaacaaggacaaggtggtcgaaggatcagcgatcccaacaccggagccaaagcatccaatgctggagcacaagcacccactttcgcccacaacgaacccaattgcgagcgtcaaggaggatggcatttacgaaatcgaagttaacatcgcggcgggcccatccgcgcagttcagtgccgtggtgcacatagagttcctgggcccacacggcttcatctcggccatagattggccattcctgccgttctatctgatcatgtgcattgtttacgtgatatttggaattatttggctgtttgtttctttcgcgcaatggcgggatcttttgagaattcaattctggatcggtggcgtcatactgctgggaatgctagagaaggccttcttctacgccgaataccaaacgctgacgaacaagggtgttgcagttcagcacgccgaactggtggccgagtttgtgtcctgtgcgaagcgcacgctggccaggatgctggtcatcatcatgagtctcggctttggcattgtcaaaccccgtttgggacccatgctgcatcgcgtggtgggcgtgggaaccctctactttgtgctggcctgcgtggagagctacttgcgtatcaccaatgtgaagaccgatcgcagcgagctgctggtggcgagcattccactggcggtgctggacacaggaatatgctggtggatattcacctcgctcgtgcagacaactcgcactctccgactgaggaggaatatggtcaagctctcactgtacaggcacttcaccaacacgctgatcttcgctgttatcgcttccgtcatattcatgctgtttgctttgcgtttgcgtaggggctggcgcgacatttgggtggatactggcttttggcacattttgttttcggttctgctgctggtgattatgattctatggcgaccgacgaataacaaccagcgctatgccttcactccgctgctggataacccggaagacgaagacgatgaggacgaggaggatcagttcgtcgcggatgcctacggcgtgaaaatgcgcggccagaatggaacgccgaaaacgtcgacgacttcacgaaatgccacgaccaccgaggaagacgacctgcgctgggtggaggagaacataccgtcttcgatggcggactcggcgttgcccatcctggactccgatgaggaaatcatcaacaccaagttcgaggtgtcgaaaatgcaataagctgtgactttcgctggaccgaagagactttttacgcatatttttgcacattttcacgcaaccgtgtctcccgccagcagctatgtattttttagttctatccgccattgaggaggaaaaccccttattgctgcgctgcgctgacactgatcttccaatttcgagaaccgtctgtccggccacgccttctgagcccgtgtaaaataatgtatgtaatcgtagttccttctacgcgcacgtcctccccccctctaaataaacctaacttattcataatacctagcctaagttgtagatacctatgcgacgatccgagaacttaatttaaaaacttcgacttgaattcttgtgctgctgcccctaactacactcgcaaaggtgtatgagtgagctgttggtggtcgcctcattgtatgtatatagctggtaacacaagacgaaacgatctatataaatctacgagtatattctgtaataactatgataaaacgcgactatgcaaagattaaaagtaattgtctaagtaagcacacaatcgtttgcgtcacacacctcaaggtatttaattacatatttttaatcaaacggtctccgattttcataaataaatgcaaacgtatcttaaaggtagccatgaacca

SEQ ID NO: 25926 - protein, 530 aa, DROSOPHILA
MQGSATLLVVALALLLGPASTAGKSDPGMVDVLVTTDLPSIREQRPLLANTKIYAQIKGCTSNVESNLTITFRLTEHPCIFDDRTLQAIAQNATLQKNATINNVITEITRTYPCNGLIVLAINKDKVVEGSAIPTPEPKHPMLEHKHPLSPTTNPIASVKEDGIYEIEVNIAAGPSAQFSAVVHIEFLGPHGFISAIDWPFLPFYLIMCIVYVIFGIIWLFVSFAQWRDLLRIQFWIGGVILLGMLEKAFFYAEYQTLTNKGVAVQHAELVAEFVSCAKRTLARMLVIIMSLGFGIVKPRLGPMLHRVVGVGTLYFVLACVESYLRITNVKTDRSELLVASIPLAVLDTGICWWIFTSLVQTTRTLRLRRNMVKLSLYRHFTNTLIFAVIASVIFMLFALRLRRGWRDIWVDTGFWHILFSVLLLVIMILWRPTNNNQRYAFTPLLDNPEDEDDEDEEDQFVADAYGVKMRGQNGTPKTSTTSRNATTTEEDDLRWVEENIPSSMADSALPILDSDEEIINTKFEVSKMQ

SEQ ID NO: 25927 - DNA, 2815 bp, DROSOPHILA
ctcaattacctgacacgcttcgtctgccttagtttgggtttgacacaaacgtacaaaatttttattcctccatttaaaaaattttttgaactatgattttaaatttcattttttgctttaccagtttctaatgaaatggcaaaataaatcgtcacctaaaaatttaataaatagtttaatatattaaagcttaacaaagaaacaaatatttttaaatttctacagctctctccccctagatgagtatcgggtatctgatactccaaaaattctactctggtttcgtgtttttatataatattattctaaattcttactaaatagtgtcactgcaggtgcacaaattgtattggattgggcactgggccataatgattatgcttacatatgtaattattaatacggctattttaatcacttaaaaagaataattttaaattttgtaaaaaaaaattttgtatgtgtttttgactttgatcaaagagtcaaagagagtgttttcgtgctgtagcgaaattgaagcgaaagtgttttctgtagcattcttaaaggtctacctgtgggtggttaatctgcagtttagttgtgccatataaatagctgaaggttagggaaaaaagtttcgttatatatgcgtttaggtgttttattctatatctatatatttactctcctaaaacagaagagggattttccgttagctaatccattagtcaattttaaaaattggttacggaaaagcgattttttaacagacctatttccttttaattacatatcttaaatcttaaaactatgtcaaaacttgttgagctagcttactaatggcgatataaataatctatatcatatattagaattaaatctctcaactgttgtctgtgcgaatagtctataatgaaacatttaggtctgttggaatatggtataattaaaattgtcaaattattgcacattgatattaatcaaaaattgtatgtcctcaaataaacgataacagttttattctgcaaagtttgcactgtaacaaaccaattgtatccaccaatggcctacaatcatgatggtatgccagaccagcaatttctttgggatgtttttcaaaggtaacagtcacagaataaatacttctaactagcgataaagcgacttttttttagagtggataaagataggagtggtcatatatccgcagatgagctacaagtggccctttcgaatggtacctggtctgcatttaatccggagactatccgtttgatgattggaatgtttgatcgtgaaaataaagggactgtgtcctttaaagattttggagcgttgtggaagtatgtgacggattggcaaaattgttttcgatcctttgatcgtgacaattctggaaatattgacaaaactgagctgaaaacagcactgacatcatttggttatcgtttatctgaccacctaatcgacgtcttactacgaaaatttgaccgctttgggcgtggtacaattcttttcgatgattttattcaatgttgtattgtgctgtatgtaagtatgactgttattgcaatatatgagtacaaggtagctgttggctctagagattttcgctgtctggcttatgaaaaaatttttgagatagctttgaagccagcacgaaaaaattgtatggcgtttcgggttttttctaatgtctttgcaaacaaacgctcaccacttataaatatgtcagaacgctatagtcgagttctttactaccagttactcaggtagtgggagtgcacgggaggtatgctaatcatcagatacccattacttcgattgggggtgtgcaagttggagaagttggagatattatagcaatgcttttcccattgttatgctcgctaaggatgtgtaaagtttagctgagagtgcttatgtctatatttcctattattgattatattcatatataagttgttgtcgtttcccgttgttggcgcatttccctctatgccatcctttttataccttttactcgtaaacgggtagtatacccgttcgttcgttgagaagtatgtagtggaagcggtttcgaccctataaagtgtgtatatccctgatcagaaacactagtataaacgttgtgaactagtgattctagcaatcccacaaagcggctaaagcgtccacaactttacttatttctatcaatatctaaatacacatcttttaagctatgataggcaaggtaatttaccatagcattctaatttgttatacccgttactcgtagagtaactagtgattctagcaatgcttacgcagggcatattttctttagaacgttttaatcccacaaatcaaaaggttatactagattaaaagtctgtaacaggcaaaaataagcatatattcttgatcaggatcaacagccgagtgtaaatctatatgtcagaatctattaaagctagaaggttgagattaagcatacagattctagagacatagacgcagcttctcccacgcccactttaacgccctaaagtcgtcgaaccggtcacgcccacactttggaacaattcttaaattttttctcattttaatccccaatatctatcgatatcccagaagaataaaaaaatttcgcattcgcattcacactagctgagtaacgggtatctaatagtcagggaacttgtttatagcactctctcttttttttcagttgtttttccaattttatcgatatggcgaaaacattttgcccacgcccactctggacaccacccaaatctatctcggccagaccttagaacattaaaattatttttcccctcaattt

SEQ ID NO: 25928 - DNA, 761 bp, DROSOPHILA
ttttattctgcaaagtttgcactgtaacaaaccaattgtatccaccaatggcctacaatcatgatggtatgccagaccagcaatttctttgggatgtttttcaaagagtggataaagataggagtggtcatatatccgcagatgagctacaagtggccctttcgaatggtacctggtctgcatttaatccggagactatccgtttgatgattggaatgtttgatcgtgaaaataaagggactgtgtcctttaaagattttggagcgttgtggaagtatgtgacggattggcaaaattgttttcgatcctttgatcgtgacaattctggaaatattgacaaaactgagctgaaaacagcactgacatcatttggttatcgtttatctgaccacctaatcgacgtcttactacgaaaatttgaccgctttgggcgtggtacaattcttttcgatgattttattcaatgttgtattgtgctgtatgtaagtatgactgttattgcaatatatgagtacaaggtagctgttggctctagagattttcgctgtctggcttatgaaaaaatttttgagatagctttgaagccagcacgaaaaaattgtatggcgtttcgggttttttctaatgtctttgcaaacaaacgctcaccacttataaatatgtcagaacgctatagtcgagttctttactaccagttactcaggtagtgggagtgcacgggaggtatgctaatcatcagatacccattacttcgattgggg

SEQ ID NO: 25929 - protein, 219 aa, DROSOPHILA
MAYNHDGMPDQQFLWDVFQRVDKDRSGHISADELQVALSNGTWSAFNPETIRLMIGMFDRENKGTVSFKDFGALWKYVTDWQNCFRSFDRDNSGNIDKTELKTALTSFGYRLSDHLIDVLLRKFDRFGRGTILFDDFIQCCIVLYVSMTVIAIYEYKVAVGSRDFRCLAYEKIFEIALKPARKNCMAFRVFSNVFANKRSPLINMSERYSRVLYYQLLR

SEQ ID NO: 25930 - DNA, 2877 bp, DROSOPHILA
cgaagcactggatgcagattagcaccacgaatccgaagttcagggcgctctggaagtccgagttggtgaacacggagttctccacactgcccatgcatccgaggaacatcagcatagcggtggctatcatctcggcaagaactgttgtgatgctgtccagctggcggcgctgcagcagccagcagttggattggctgcgaaatagagaggagtattccattttagtattcttgtgggtttcattgtgtttaaatttttttgagtcactcttcgaggatattttagattttgattttaagacttggaacttggtggatcaccttgcggttgtagccatgatttacgtgcgtcgcgacgagcgattgactttaacggagacgtggtccgacgtggactgcactccagaccaagtactcaatggtgcgaatcgcatactctatcgccggctcttaatcgccggcaatctcgtctaatcgccttaggtgggttatcagccagcgtttctatatactcatatctacccaactattgccaaacattcgcgttggtgtgctccattcactcgagtgcgtatgtccactttatgacgttttaaggcaattcaaaatgtgacaaggcactaagttagtgtcccactagaaagggggctataagccatctaatcaatatgatttaagccgcctgttgtaatggttgaaacgcagaacatttcattcgctatcaagctgagcaattctaaaaggggctacttatcaatggccattgataatgattttcaaagacctatggacctattgatatatatgacaaactcgacaaactttccagcgaatacgagcccccaaaaaaatggccaatatcgccgctcatcccaattgtatgctatggaaataatacaaggtggtgcttaattacttaatcgacctaaatattttgtggctctattattacaacatattcgtatatatatatagtttattcgataagattcaattcacacctattgcactataacctctccgatcattcgtatcttggcatcggaagtcctcagatcgatctcctcgtcgcccttaaaggccatgcgatagatcagcgaggtcacagctcctgccaccaaaggacccacccagtagatccagtggtgtgcccaggagtcgttccaaacagctggacccagtgatctggtcggattcatgctggctcccgtgaagagaccctaaaagcaacagacttcccattaagtaacacttcgcaactttgaaacgcaccgaaataccaaccgctgtgaggatcagacaggagacggtgagaccgaatctcacgggcaccgaatcctgcagcttggcgttccgtggatcccacaccgaacaggccaccatgaccaggcagcaggtaatgaggaactcgatgaagaccccctgaagtacgctgattccgggggccagaattgtcacacaaacacccgacgggttgtccacacccttgatggagttcccaggcagaacagccaccaggagaccatagcctatcagggctccggcagcctgggccacaaagtaagcaatggcccggatccaaccgattgcgccgtagagccaggcagccagggtgatggccggatttaagtgggcaccggaaacggagccgaagcactggatggcgatgagaatggccaggccgaaggtgaggccactgcgaaagtgcgaattctggaacagcggcgtttccacacagcccatgcaggctatgaaaacgaagacggcagtcgccgccagttcaccgaagaagcaggctatcgcactcctttggtgtccttccaggcgccacctggcgttcggattggactcctgcgatttttgcttctgttgcgacatgctgacggaactctactgccgcaattttgggcggctgcccaagtgacccaacgtgccagcaaaatttacggcaatcaatcaaaatccattataaaaccttaatgctaattatcgagcgcagatttgggagcagctcccgcccacccattcaggatggatcaatccatcaaggcgattttcggggggctttgctcagccgtaattatcggcctgataagcgccactgccatttcgcccgatttgtgctcaatcttatctcattaagatctttatcgaacggcgaacggggtcgccgagacctggccaatactcgtacttcttgtgtgccagccagtgtctgaatcgctacaacaaggccaataaacctggcctatggtgttcgaaagctactcgaaggaatcaccccgtgatttccagaaattccagaagagtgatgcaaatccagcattagcatatcacccatagcacatagtcccctttaaaccacatagaaccacatatatcatttgtgcttcgtatacggactatagacccgaatggagtacgtaacgtacaataactgcatattgttggtatattttggctttatttggctgatacgcgcgtctcattcgcagcctgctgataacgttttttagccaccatttgattggtcgatttggaggtactaagatattcgaatatcttatgaacagattttccaaagaccgcttaagctgatgggcttttttcactttcgattcctggaaaaagcttattggtatttttaagcccggaagttacttagagctaatcaaagcaaatacctcgttattgaagaatgaaaagcttttagataatatggactcaacatgttttaagatggcccagaagagcagaacttcaggtatcaaataactaccaatatcttgtgtagaatttcttaaaaccataaaaataatttacttgttttgttttggttttagattaaaaatctcgatgttctttatttctgaaggca

SEQ ID NO: 25931 - DNA, 825 bp, DROSOPHILA
atgtcgcaacagaagcaaaaatcgcaggagtccaatccgaacgccaggtggcgcctggaaggacaccaaaggagtgcgatagcctgcttcttcggtgaactggcggcgactgccgtcttcgttttcatagcctgcatgggctgtgtggaaacgccgctgttccagaattcgcactttcgcagtggcctcaccttcggcctggccattctcatcgccatccagtgcttcggctccgtttccggtgcccacttaaatccggccatcaccctggctgcctggctctacggcgcaatcggttggatccgggccattgcttactttgtggcccaggctgccggagccctgataggctatggtctcctggtggctgttctgcctgggaactccatcaagggtgtggacaacccgtcgggtgtttgtgtgacaattctggcccccggaatcagcgtacttcagggggtcttcatcgagttcctcattacctgctgcctggtcatggtggcctgttcggtgtgggatccacggaacgccaagctgcaggattcggtgcccgtgagattcggtctcaccgtctcctgtctgatcctcacagcggttggtatttcgggtctcttcacgggagccagcatgaatccgaccagatcactgggtccagctgtttggaacgactcctgggcacaccactggatctactgggtgggtcctttggtggcaggagctgtgacctcgctgatctatcgcatggcctttaagggcgacgaggagatcgatctgaggacttccgatgccaagatacgaatgatcggagaggttatagtgcaatag

SEQ ID NO: 25932 - protein, 274 aa, DROSOPHILA
MSQQKQKSQESNPNARWRLEGHQRSAIACFFGELAATAVFVFIACMGCVETPLFQNSHFRSGLTFGLAILIAIQCFGSVSGAHLNPAITLAAWLYGAIGWIRAIAYFVAQAAGALIGYGLLVAVLPGNSIKGVDNPSGVCVTILAPGISVLQGVFIEFLITCCLVMVACSVWDPRNAKLQDSVPVRFGLTVSCLILTAVGISGLFTGASMNPTRSLGPAVWNDSWAHHWIYWVGPLVAGAVTSLIYRMAFKGDEEIDLRTSDAKIRMIGEVIVQ

SEQ ID NO: 25933 - DNA, 5079 bp, DROSOPHILA
ccttagtttaaatagaagcttttcattacatgtctcattcttgggttacgaaaccgttaaagtctggtatttttgacaataactttgcaaatatgatggcttaacagtggtatttttgtttcagaagcatatgtataagtaacaatctttaattaactttgttccaaaccttgaaagaagatattcctatcgtgttattatattgagcacttttgggagataaacgcggttattcgtacatatgcatgaaagcatttaaactgggttgtcagccagcataacggtgtccatgatttgtctttctggcggatggttagctcttattgcgaggtatccaacaactctagaaaaggttttcttaaaaaaaaaaatgaaataaaataaagatgttttatttacatatttataagtttattgcttaataacagtagcaataactgtatcctgatcagtaaatgattggtttgcttaactacaaggattggtaacacggatttaaatattgcatattgcgtttttaacgaaattacctggttttttaattaattaacctattatcccttgaaaagtgcaaatgtttaataacaactcaaaatacactataccttttaactaatatggttataatatgttaccagttactcgtagagtaactgctataacaaatcagtaataatagatttgttattctgttttaaacacacattttattatttacagcctcctacaaaacgtagctcgaattcctgagtttgaacaactgtggcgggatattcttttcaatcctaaaatgttgcatcaaacttttaacggaatttggcaactactgcatatacggacaagtcgaaggtttctgcaatgccgtctgctgcctgagatggaacgaaaaataagcttcttagcatcttctgttaagtttggaaatcagaagagataccaagattggtttcaggacaaatactttgctacacctgagtctcatagcttgcgatctgatctaattcgatttatcataaatgtcatccatcccacaaacgatatgttgtgctctgatattataccgcgatgggcaatcataggttggctcatctcgtcctgcaccaatccaatcgcttctgctaatgcaaagttgtcattgttttatgattggttattttttgatcctgccaaggataatataatgaatatagagcctggaattttagttatgtaccactctataagaaatcatccatttgttagtagcacgctgttggatttcttatgccgtattacaaaaaactttttcgtaaaacatgaagataaaattcgcattggtgtttataattcattgaaattaattcttgaaaagcaggtaatacaatgtcaattaaatcaggttttaaattaacaaaaaaaaatatctttataacaggtgataccaaatctgcaaccactttttgagtcacccaaacttgacagagaactgcgtaatttaataagggacaattttagagagtttttatcaccgccggctaatcacggacagctactgttcacttccctgcatccagttcagggtcatattttaaaaaaagagagcgatcaaagaattttacattgtggttggtatttctctttcatatttttaatctcgaaaaataatgtgaataaatctttattgacagaaaacatggaccttcatgaaactgggctcataaatattagtgggacaatcgatgaagacaaaaagatcttactcgtgccaacggatcaagaaattgaaagtgtttttagcgacgaaactgctgaaaatttaagaagagttcacaacattgaggacaatacggatgacgacgatgacctaccattatcagaggtttttagtcttcaaatttcatttataaaaccaattatttaataggatatactagattagttaaaaacgggcccactctaacgcccacaaactgcataaaacagcacttttgcatttagaaaaattgaaatattcctaatcgggatcaggaaatgtttccaaatgttgccacgtccaaaaatgcaattttttttggtttcttgatttttttcattttattttcttttttcccaatatttactaatataaaaaaaaacctacttgactatagtattttctattcaatttattacaggtaagacttaaagaaaagccaaaggtagaactagcagaagcaatagccgaatcttttgatgcatttgttacgaagcgtaactcatacacttgggaggcgtttttgaaagatttccggccattaccagcgtctgcgtttgaagagtttcagctgaactatgtgatatcaaatactgttttaattttacgggagactttgcctcaacaaaatatattttccgagagcaaaaccgaagaaaaacatttggcaaaaagtataagttatcctttgtacggtttgtttcgatttttatatgaaaacgacgaaaaaagcaaaaaaccatttcaaaccttgctgtcagaaatctgtgaaggaatacctgaaattggctatttgcttctgtactttatgaaaatttattgtaagcttcaaacgcgcaaaaactcccaacaatcatatcagtttaaaacaactatttatcgacaaatttgcgatgcggcagatgagaaaatcggcaattgtctgttacgggatcttgatctgctagaaaaggaaaacacaaatatttttttatggctcctgcctgatatatatagagagtttaagtcaatagcaacaaataacactgatcttttgcgaataacactgcgttgcatagatgcaaaaaatgtgcgtgacatattatactcaatcgcacaaggaaaacttacaatatttaaacaagatggtctcattgattgcataaggcaaagtctcgagtttgagacatacgaacagttttgcctttggcaaattgttcaagctcacgatgtacccttaaggtgtatacaggtatggtacataaatattgattacggctctcgactatttcactgtttcattttttaggacatattgccagaactggaagccggaagtcatcccgaagctttaagccattttctgttattgcttaaaaatgaagaacccacaaatgaaattattcgattaatgcttagcagagaatcgaagtcgaaaggtgatccattcgtaacctcagccttaaggtaaataatagcagcactatacgcacactgtataattgtattagagtattttgacaaaaaaatattaaaacaacatttaaatacatcaaggaaagcaaaattttaacaaaaaaaaactaatcaaatttaataatccaacagattctggtgtcaacgctatgaagaaaaactgtctgaaatcattgcttccctgcttacatcaaaataccccagttcatctcccaacaaaagaaaacgaccccccaaggggatttctgtctcgactagcactccttctgctgatcaagtacgttccgcaatattaatttatgcacataataaacatattttaaacaggtattaaatcatctggagcattatagaagaagttgcagacatggcactggaactggcctttacgttcatgatatgatgcagagagcacttcaatcggcttactctcacagtaatgatagtactaaggtacgtgtaaaacaattagtttattttgacttgataatttttaatcattttgtccgcagaaacaattttgtgatttgttcgccctggcagcggaagaagataccacagttggccgacgtgggggaagcggacgtggacgtaaacaaccagggagtaagaaagatgtcaataatcatgggacaagtaaaaaaaatcccgagatggttaaaacaatatattcctccgatgacaattctagcgaggttggttgttaacatctctcaacgcgtactaattaataatatcttatatattttaggaggattggtcaaaatctaaaatattgcaaacggctaagagaaggaaaaaagctaacaatgattctgactgacaatgggaatgtcattccctaattagttacttctctgataaagaattaaaagcggatttcgagatttctcaataaaaattatgaattgaaataactaaaattaaataatttggtgcacgttaatactaagacgtaattcttttttggtattttacaaaccaaattaattttattttacaattaggtccgtgctttgtgtctcggggcattttcggtcttatgaaaaagcggtgtacgaaaattttttttctttccatttgtgtcctactttgattgacgacttggtaacataaaagctttctatactaattttttgttttaactttactttattggatcttctcagaaattatgtactgttttcaacagtcgtttgaactgtattcttgaagaatggacctaataatcagcgttgagtcggaaggtcgttgcggcgaagacaggatcgcaagatggttaggatgtaaagtttatttgctcatgtaattttgtttttgttgagttatttcctctctgacagatatgattttaaggtctctttggatattttcgtttcggatataccatggtggagtgattgttctcagtaacttggactgagcccttcgcatgatatcaatgttgctactactggcacttccacataattggtagccgtatgtccaaattgtttttaatacggaattgtaagaccctgtggtcaagacagagggatgaccgtgagttgataagccaatggagactattagccttaagcttcagatgtgatcgaagggcagtcttgctggttgagtgtgaatgttacttgcttacatttttgttcgtttattttgattcgtcaatcagatagccacttctccacagccaataagtgacgagagagttgagttgttgcttgtagaggacatttggatcgacttaaaatcgctgtgtcgtcggcaaatgtagaagtcgttaacagtctgcttgtgggtatatctgatgtataaaagacgtatagcgtaggtccaagtactccagtgtttatagcgtggtcattggacatatcagagttacatctcacagcaaa

SEQ ID NO: 25934 - DNA, 2413 bp, DROSOPHILA
cctcctacaaaacgtagctcgaattcctgagtttgaacaactgtggcgggatattcttttcaatcctaaaatgttgcatcaaacttttaacggaatttggcaactactgcatatacggacaagtcgaaggtttctgcaatgccgtctgctgcctgagatggaacgaaaaataagcttcttagcatcttctgttaagtttggaaatcagaagagataccaagattggtttcaggacaaatactttgctacacctgagtctcatagcttgcgatctgatctaattcgatttatcataaatgtcatccatcccacaaacgatatgttgtgctctgatattataccgcgatgggcaatcataggttggctcatctcgtcctgcaccaatccaatcgcttctgctaatgcaaagttgtcattgttttatgattggttattttttgatcctgccaaggataatataatgaatatagagcctggaattttagttatgtaccactctataagaaatcatccatttgttagtagcacgctgttggatttcttatgccgtattacaaaaaactttttcgtaaaacatgaagataaaattcgcattggtgtttataattcattgaaattaattcttgaaaagcaggtgataccaaatctgcaaccactttttgagtcacccaaacttgacagagaactgcgtaatttaataagggacaattttagagagtttttatcaccgccggctaatcacggacagctactgttcacttccctgcatccagttcagggtcatattttaaaaaaagagagcgatcaaagaattttacattgtgaaaacatggaccttcatgaaactgggctcataaatattaaaaagccaaaggtagaactagcagaagcaatagccgaatcttttgatgcatttgttacgaagcgtaactcatacacttgggaggcgtttttgaaagatttccggccattaccagcgtctgcgtttgaagagtttcagctgaactatgtgatatcaaatactgttttaattttacgggagactttgcctcaacaaaatatattttccgagagcaaaaccgaagaaaaacatttggcaaaaagtataagttatcctttgtacggtttgtttcgatttttatatgaaaacgacgaaaaaagcaaaaaaccatttcaaaccttgctgtcagaaatctgtgaaggaatacctgaaattggctatttgcttctgtactttatgaaaatttattgtaagcttcaaacgcgcaaaaactcccaacaatcatatcagtttaaaacaactatttatcgacaaatttgcgatgcggcagatgagaaaatcggcaattgtctgttacgggatcttgatctgctagaaaaggaaaacacaaatatttttttatggctcctgcctgatatatatagagagtttaagtcaatagcaacaaataacactgatcttttgcgaataacactgcgttgcatagatgcaaaaaatgtgcgtgacatattatactcaatcgcacaaggaaaacttacaatatttaaacaagatggtctcattgattgcataaggcaaagtctcgagtttgagacatacgaacagttttgcctttggcaaattgttcaagctcacgatgtacccttaaggtgtatacaggacatattgccagaactggaagccggaagtcatcccgaagctttaagccattttctgttattgcttaaaaatgaagaacccacaaatgaaattattcgattaatgcttagcagagaatcgaagtcgaaaggtgatccattcgtaacctcagccttaagattctggtgtcaacgctatgaagaaaaactgtctgaaatcattgcttccctgcttacatcaaaataccccagttcatctcccaacaaaagaaaacgaccccccaaggggatttctgtctcgactagcactccttctgctgatcaagtattaaatcatctggagcattatagaagaagttgcagacatggcactggaactggcctttacgttcatgatatgatgcagagagcacttcaatcggcttactctcacagtaatgatagtactaagaaacaattttgtgatttgttcgccctggcagcggaagaagataccacagttggccgacgtgggggaagcggacgtggacgtaaacaaccagggagtaagaaagatgtcaataatcatgggacaagtaaaaaaaatcccgagatggttaaaacaatatattcctccgatgacaattctagcgaggaggattggtcaaaatctaaaatattgcaaacggctaagagaaggaaaaaagctaacaatgattctgactgacaatgggaatgtcattccctaattagttacttctctgataaagaattaaaagcggatttcgagatttct

SEQ ID NO: 25935 - protein, 757 aa, DROSOPHILA
MLHQTFNGIWQLLHIRTSRRFLQCRLLPEMERKISFLASSVKFGNQKRYQDWFQDKYFATPESHSLRSDLIRFIINVIHPTNDMLCSDIIPRWAIIGWLISSCTNPIASANAKLSLFYDWLFFDPAKDNIMNIEPGILVMYHSIRNHPFVSSTLLDFLCRITKNFFVKHEDKIRIGVYNSLKLILEKQVIPNLQPLFESPKLDRELRNLIRDNFREFLSPPANHGQLLFTSLHPVQGHILKKESDQRILHCENMDLHETGLINIKKPKVELAEAIAESFDAFVTKRNSYTWEAFLKDFRPLPASAFEEFQLNYVISNTVLILRETLPQQNIFSESKTEEKHLAKSISYPLYGLFRFLYENDEKSKKPFQTLLSEICEGIPEIGYLLLYFMKIYCKLQTRKNSQQSYQFKTTIYRQICDAADEKIGNCLLRDLDLLEKENTNIFLWLLPDIYREFKSIATNNTDLLRITLRCIDAKNVRDILYSIAQGKLTIFKQDGLIDCIRQSLEFETYEQFCLWQIVQAHDVPLRCIQDILPELEAGSHPEALSHFLLLLKNEEPTNEIIRLMLSRESKSKGDPFVTSALRFWCQRYEEKLSEIIASLLTSKYPSSSPNKRKRPPKGISVSTSTPSADQVLNHLEHYRRSCRHGTGTGLYVHDMMQRALQSAYSHSNDSTKKQFCDLFALAAEEDTTVGRRGGSGRGRKQPGSKKDVNNHGTSKKNPEMVKTIYSSDDNSSEEDWSKSKILQTAKRRKKANNDSD

SEQ ID NO: 25936 - DNA, 9080 bp, DROSOPHILA
cgttcggattggactcctgcgatttttgcttctgttgcgacatgctgacggaactctactgccgcaattttgggcggctgcccaagtgacccaacgtgccagcaaaatttacggcaatcaatcaaaatccattataaaaccttaatgctaattatcgagcgcagatttgggagcagctcccgcccacccattcaggatggatcaatccatcaaggcgattttcggggggctttgctcagccgtaattatcggcctgataagcgccactgccatttcgcccgatttgtgctcaatcttatctcattaagatctttatcgaacggcgaacggggtcgccgagacctggccaatactcgtacttcttgtgtgccagccagtgtctgaatcgctacaacaaggccaataaacctggcctatggtgttcgaaagctactcgaaggaatcaccccgtgatttccagaaattccagaagagtgatgcaaatccagcattagcatatcacccatagcacatagtcccctttaaaccacatagaaccacatatatcatttgtgcttcgtatacggactatagacccgaatggagtacgtaacgtacaataactgcatattgttggtatattttggctttatttggctgatacgcgcgtctcattcgcagcctgctgataacgttttttagccaccatttgattggtcgatttggaggtactaagatattcgaatatcttatgaacagattttccaaagaccgcttaagctgatgggcttttttcactttcgattcctggaaaaagcttattggtatttttaagcccggaagttacttagagctaatcaaagcaaatacctcgttattgaagaatgaaaagcttttagataatatggactcaacatgttttaagatggcccagaagagcagaacttcaggtatcaaataactaccaatatcttgtgtagaatttcttaaaaccataaaaataatttacttgttttgttttggttttagattaaaaatctcgatgttctttatttctgaaggcaattagtgttttcaccaagacgtttatcgtttcaagggcttatgtaagtgtgtgcacttggttcgccttttgaaacgttcgagccactttgtgaagacactgctaacattagcgtacaacgaatgcattattttaaaattcggcatcttagatattaactaaattagttagggcttttcctacagcaatgtctttggccttacgacagctggacgtcctccagttgccgcagcttctcattggaggtgatctccgcctcaaccacctcgcggcggaagacgaccttgtaggcgtaggcggtgatggcggaggagctcagcggggccagccagtagatccagttgctctcgaagtgcttgttccacagggcgggggcgaacgacctggccgggttcatgctgccgccggtgaagggaccctaaaaccaatggtagggaacgaggttaataatccgtttcgaggcaggtaaggattagccaactgttcgctttaacttacggcagcgcaggcgagacaggcgatggccaggccaaatcgaatgcccacggagtcatggaacttggagttgcgcggatcccacactccgcagcagacgatgaccaggatggaggtgattacgaactcgatgccgagggcctggcccgtggttacgctggtgtggggcaaggtcacgcagagcccagcgcccaccgtaagtgtgggcgagggaagcaggaccatgagcaggccgtagccgatgaaggcgcccagcatctgggcggcgaagtaggcaaatgccatgcgcagggtgaccatctcgtagatgtaggcggccacggtcacggcgggattcagatgggcaccggagacgcagccaaagcactggatggcgatgaggacggcgaagccgaagttcagcacaatctgcagatggttgttgggaaagaggtccgtcttcacgcaacccatgcagcccaggaagaccaggatgccggtgccgatgagctcgccgaggaaggcggagattttgtccagcgtcgatcccttcattttgaagaccttacagcaactgaaatggtcagagaagcgcttgaataatgccacactaaaaagcgagctaccctctctgtcgcacgccatcgtccatctctttctcgactctaagtagacctgcttaggaacttcatcaatcatatcctatctaagaccatcctatcgtttcgcaaagccctcctcgatttgcacctaatccccgcgacacacttctacaatctcaactattgtgcaactttgtagttagtttgtcaagcttctagacctttgcaactgctgttctccttcggctgcctggacgatttcctgctggttttccaccccttgcggatccatcccctgctgctcgaggttcattgacttggcatcgattttccaaacacccttttttggaagcacaacttatgctgctgatccgacaaacgatgcctgctgcgggaatgccatcgatggctggactgacatgaagtagccgtgtactaaatatagtagacttgtgattgccgttcggctgtcaattgggtttatagataaatggccgaaaaaatgcgaatcaaatcacgacatggccataaaacaataaccaatctttttcaaccttatcgcctgagcgccactcgagtcaattggagttcactacgttgcgaattaatccgtttattgtgattggtaaatccctctttctggtagccagaactcttgttttttgttttttgaatttctttggtttcgagtgccagataattaccgaatctcgtggctcattttgacacttgtccaattctttgagatcgcactatataatcaatcttttccgtagctggtgaaaattcacaaagcggcagcgcgactgtcaatgtcaatctgaggcggtggagtagccataggcaaatatttatatctgtgtctatataatattgcgtaaatcaaaagcccatttttagcccctgtgagagagcagcaacacacacagatacacacacacacatatgaaggggaccgaccacaagcacacacacacacacacacacacaaaggcgtggaaattagcgaatcctactggtgagcataaaaaagtcaagtgtccagaatttatgagcatcttaaacgctcattcgctgctctcgttcgcttttgcgattatctctggagcgatgctccttctcgctcccactcttcctttaccagtcacctggcttaaatcattataaaatggtagaaacaatacggatgatattccatggaaacaaggttagatattaacacttggtgtgcaactgacatactggttttgctctatcgaattcattcgacttattcacagcattttatgagaattataatattaaaggtggtccttacatttgttttttaagtaaattatcattttcatttaacttgtttcttactatttgtttgccatgagaaaggcaaatctgctaagcaatgattgctagaattagtagtaaccatagttcctaaaatacgacattttcattgcgtgtcattcaaacttagcactaaactgtaattgatagcgaaaatccccataattattttcagtgtagttggtcggtgggcggtgggcataacactgttatgctgtgcaagtgcgtgacgcgctcgcaattgaagcaggcggcatattgcgtattgataacagcagagtggcacactatcaattaccaccgtcgcttcgattcctatcaattgcaattgctgcaattgaggatgcgttgcgtgaatcgggctaccacgcaatgtggcaaacaaatcacggcaaatctcggcacgcctgtcgatcaaattgcacgcaatttgcgtagttatgtgtctcaataacaattggatcgtcaataaataataacaatttaaagcaaatattttcaaaagccctgctgttgcacacacacccagtacacacagtggctcaggtgatcagaacttttgaccctcactgaccacgcctaatgttttccattgctttctcgccataacacacattggcattgccacagaaaacggtggagaaaatagcactgctggttcatttgcgttttggcccttggccaacggcaaatgtttgtgtttggccaactcattgacagttggttggtcaaaagagagcgacacgttttggcaagagacaaagagattaaaggcaaagcagtaaacacgcgatggatcgaaagtttaaaaataaatcaaacacaccatccgatcggcagcacaataataataataataatttaattaccacctgcacctttatcatattttccatgcccagaaggatcacgtatcatccatgggatcgctgcatgggccacgattttcaatggcccgagggcctaattgacaacaaaccccgtttgggatgatggatcttaattattatgatccattctcagcgtttgtctaagtgatgggacgtgactgggcgtttctacgttcatattttggggagtgctaatcgctgatgttaacggaagtggggactgttaattaacagagcggtgcgataagaacgggcgactcctcggagcttctcaaaagctcagctgctaggatgcgcaactttaacgaagcttcgatcgttagctttcggcgagcttttcgatgagcttccttatcacgcggcattattattagctaattatgactaagttggtaatagagtgataagccttcggccagaagctcgtcgtaaaaaacttgttagcctgaagaacagctaatcaatccgtgccgataagcctcacccgctgtttgctgatagctgtggctgtagctgcttaagaagtgatttttgctagtggccctaaaatgttggccataaaccatacgccgcaaccactgtcactcgcactgataaccgatatcgagctgagtgagtggtgatggtgtattgggattggcggtgtctggcggcgcaatatcacaggcttaatttggccataattgggccaactcaaatcggatttactcgtcagacttttgacatcgccccgcatttacggctcttccaaagtgcgatagtgatcggttgccgacttattgatgtgcaacaacaacaacgtatacccctttatggcattccaattgccagctggatcgtaattgaagctcattatggtgccacaggcggaagccttagtgcccattgaccaagatccatggcagcctcttcctagccccaaggttctgcttcttatctgtgcggcttatcagggcaatggaaactgctgacgttttgggttgcgcaacaggttgttggcatcgccacctcgcagtgctgcccccttttatttacggctgtaaatacggggggcaattaagacgtggtcaacaatacggcaagatccacgcacacggctcgaaaatgtcaggtgctctagcagccgagaaggtctctgatttcgtggctaaaactgtggggcttcgtcttatcagctggccacgaggttgggccactcgaaaggcgattgctcagactatgatttgtgaaaggcattgtaatgactagacagacaatttgctaattactggcaaataactcttatttctgttgctctgatagcactcggcagtgacctaggctacgaattccttttgctcttccacgaaggctggtcagcagttaatttatggttcgatgtggcctctaatcgtgatattttttatttttgctggcaatacgtatgtatatgcagtccatttgataatggcgataaggatggagtgactctggaatttggctgaagctcatgcattatgcaacggccccgtcctaaagtcttgaattggaactacactctgctcaatggcggctgggacaccgccgttgataacctgctaaccccacggcagagcaccttatcaagtggcaaagcaaccaagttaatcgcagttccgagtggctgcggtttgtcaagcacaaatacaatggtggcgtgggattgaatgacatcaaccaactgtgaagaatcaccgggttttggccaagtcaggcacaattaccatacaggaactgccataacagacacttgaactggcccaatttgagtcgggccaactgttccgtgtccgaccggtttctcaatcatatgatgtgactttacaactgggccaaatctcgatcgattcgtttaatagagccaacaatctggatctggcgatggtgcacgcgattcgcaactcgattgatttatcaaatttgattagcacaaactcgtgagttcccccctccaaaagatcttaatcgaaggcatgtgccaacttatataaaatcgagacttcgtttagttagtcactaattacttgaacagtttggtcattattaaactcatcgtactaatgagatcatctgttttattaaacattgtttaaaaggagcaattgaaatcgcttttcaaagtctgacctctaatgtcaaaacttaagtaaaataatctgtaaataaacaagaatttgtatttctctttttaccccttttatgagatatttctgctaacaactttatcagacgctgcgaccttcaaggcagccgaaaaaaaatgttcatattgtttggtttcatttttcgtttttttttttggtgggagtgtgagttcaagttctcgaattgcgcagataaaacttcgattccaagctagccaaaccaatgccgcgattctatgtagaagataaactgaaatatttacaagtggtcacataagacattgctacttatggtatcataaaatgatcaatttggcgcaggcactatgcaaaatcgcctgatccaaggccaaaaattccgtttcttacttatcagggcgcttttcattttatagaaccgagaaccgagaatcgtgtgaccccgccaatcgagttgctatacttatttttcaatgataattttgataagaccgccacaccagccgtcgtctaattagtatacaaaaacaacaatggtcggggcaaacatatatgaatgtatatacacatatataggtacatacatatatttgtgtagctaaaagctaaagtagaacaagcggaccgaactaatgtatgcgcacacagagtggaaatgttttccaaaaagccaaaacgtccaaaaagcatggcacagttctttaaaaataaacattctccgttagagtcggttttcagcacaaggcaagtgttaaatgaatgtcacacgaagaagtcctcccactttcattcgtagaatgatggtcatatctgtatctattgcagttgaacttctaattactcgctctgatagttgcgcaatcgtgggatcactgacaattaccttcgcccctgcaagcttgcccatcatcaggtgcaaatgctaaataatgcacataattaccagttaataatgcggcagtcggtaaacaacaatattaataaacgtataaatgtgcaggcaatgtgcccgcccgcctgggtgttttcgattgttcttcgcttgtttgatcactattcaagtattcaagtatccaactattcaactattcaaagcagccagtggcggcgctgtgggagtgggaactctactttttatggctagacgataggcgataaggcagaaatggaaagctgaatgctgaaagccaagataaccgagacatagtcaaatatttgaataaaattaacatttatcggccattatacgcgtgccaaagcagaattcgcactcgaaaacacgcactccactccactcactcattcactctcctcaagatatggaaatattccaccaactttctgtttcactgtgttatttttttcccttttttttcatttacccaggaagcagatcacgatactcaaaagtgcatgcgcgccaattcgaaaacgcgttttgcgaaccacttgtgctgccagtcaacgcactgcaggcctttttatatcgaagccacctctctgcccacctgagtcttgatgaaatttagcgacagctttgctaattaattaacgcacactcaagcagaccacggagagccaaactaacctgcgttccgatcgatcgtttgtttgctattgagtgtggaaaaggcctccagctaaatacgcgcgatcgactgcgagtgggctgcgcagtcggcgtcgcagctggacaccatggcgtatgattgctctagctatatgctgctgctgctttccagcacaagcaagcagtgcgaagcttgctgaaaaacgccaactgccagctgctcagtcgacgctgcgttcttacgccggtgatgtgagcttttgatagcgttatcaagcaactaagttcactttgatatgcgctttatttcaagcagcgcaaacagctcgcagccggcaagcagtgtaaagcagtggacagtggagtttgggaacgggtttttgttgatatcaataaaaaacacgctcatcatgattcaccgagttctttcaataacgccaacgaaatatttgatatttcacaagattagaggctgaatctatcaatttaaactttgattatctcattaaatccatgacaggtgcatcacttctaaaacaactttgctatttacattagttaaacaaataaagtctaatataaaacccatacttacggacacaatagtcacgcagtcccgagtaaacaattaaaaacccaaagttcccatatttggacacatggaagtcatgcaaactgtgcaattataagttcgaataaatatgacagtcatacctgtttgcctaatatttccgccaattatcagaacacctcagatgctgaggttggtagtgaaacctaaaaaaaaaaaacacttcaattggtctcaagtggcgctccccaactgataaaacaaatcaaaactgataggaagagcaagagatagaccaaattaaataattaaaagcgtgctataaaataaatcaacagatgacaaaatccgtggcaagcgagtgattgtcaattgaaaaacatccataaaatttaagtggcgcgccctttttgataagagcgtatcaagagggaagcggggattaa

SEQ ID NO: 25937 - DNA, 1089 bp, DROSOPHILA
ttagtttggctctccgtggtctgcttgagtgtgcgttaattaattagcaaagctgtcgctaaatttcatcaagactcagttgctgtaaggtcttcaaaatgaagggatcgacgctggacaaaatctccgccttcctcggcgagctcatcggcaccggcatcctggtcttcctgggctgcatgggttgcgtgaagacggacctctttcccaacaaccatctgcagattgtgctgaacttcggcttcgccgtcctcatcgccatccagtgctttggctgcgtctccggtgcccatctgaatcccgccgtgaccgtggccgcctacatctacgagatggtcaccctgcgcatggcatttgcctacttcgccgcccagatgctgggcgccttcatcggctacggcctgctcatggtcctgcttccctcgcccacacttacggtgggcgctgggctctgcgtgaccttgccccacaccagcgtaaccacgggccaggccctcggcatcgagttcgtaatcacctccatcctggtcatcgtctgctgcggagtgtgggatccgcgcaactccaagttccatgactccgtgggcattcgatttggcctggccatcgcctgtctcgcctgcgctgccggtcccttcaccggcggcagcatgaacccggccaggtcgttcgcccccgccctgtggaacaagcacttcgagagcaactggatctactggctggccccgctgagctcctccgccatcaccgcctacgcctacaaggtcgtcttccgccgcgaggtggttgaggcggagatcacctccaatgagaagctgcggcaactggaggacgtccagctgtcgtaaggccaaagacattgctgtaggaaaagccctaactaatttagttaatatctaagatgccgaattttaaaataatgcattcgttgtacgctaatgttagcagtgtcttcacaaagtggctcgaacgtttcaaaaggcgaaccaagtgcacacacttacataagcccttgaaacgataaacgtcttggtgaaaacactaattgccttcagaaataaagaacatcgagatttttaatctaaaacc

SEQ ID NO: 25938 - protein, 249 aa, DROSOPHILA
MKGSTLDKISAFLGELIGTGILVFLGCMGCVKTDLFPNNHLQIVLNFGFAVLIAIQCFGCVSGAHLNPAVTVAAYIYEMVTLRMAFAYFAAQMLGAFIGYGLLMVLLPSPTLTVGAGLCVTLPHTSVTTGQALGIEFVITSILVIVCCGVWDPRNSKFHDSVGIRFGLAIACLACAAGPFTGGSMNPARSFAPALWNKHFESNWIYWLAPLSSSAITAYAYKVVFRREVVEAEITSNEKLRQLEDVQLS

SEQ ID NO: 25939 - DNA, 3308 bp, DROSOPHILA
tggtggccaggtgatgcttagtgagatttctataatagaatattgttaaatactctatcgtatagcgttcactatggcctgacggtgatggtggtgatgcacgtgtttggcttcgtatccggagcccattcgaatccatgcatctcgatctcatgctacttgatgggctacatcgccctggaagtgatgatgatgtacgtggtgtgtcagatggccggtgctttccttggttacttcctgctaatgcaactgctgcccaaggagctggtggacaaaagcaagccaggcatttgcctggtacaaccgatggacactctgtccacataccaggtcgtcatcatcgagtgcctgctgaccgcggtcctcgtgctcggatggtgctccttgtgggacgtgcgaaacggaaggttcctcgactcggtcgccattcgcatgggtctcctcgtgatcgcttgcagtttcgcaggggtgagttgaaaggctttggattttgtatctatagatactatagctatatatgcatttattgcagattcaactaactggagccagtatgaaccccgccaagacattggtgcctgccatattctacggcagtccgaattcggttctaatgcagctgactggccagatcctggccgccatcatggtgcccttcgtgtggaatcatgcgtatacgccaccttataagcccttggaaattccagtgtgcaactgagctgtgacaataaacataagctcgacgtttttggctaccgtgtggcttatttgatcaagtgtatgagcaattaaatattaacgataagcagttcgccgtggcgtaaaaataatctggcttagataagcatagcatttacattagattaaatatatagtcgtcaggcgttggaaattatttaagctatttatttgcacgcttcgcaacttaaaactatccgctctctccgctctcacgaacacgaacttaaacgataacttgtcctatgtgtagtaaatccatttaggcgagctccgcctccgaggtcctcttggttgacatcgtcgtctcgtccacctccgattcctccagctcccgccggaaggcgtgcttgtagatcaccgaggtgatcagggcagccgccatgggacccacccagtagatccagtggtcatcccagaatccgttccaaatggccggagcaaaggatcggactggattcatactagccccagtcagttgtccctgttgggggatttacaattgtttattaagaacatttttttgatacctattgattgcatttcatgggatggctaaaatgtctatattaaaagtgtatatatgccatttaaagaaaggttatcatcgataccgagaaagtcaagtgcatttgcctgataaattgaaaacagatagtgaatggaattttagcatagcggatcgtcaatttgatatttcttaagagcagacagtcttatctgtatcggtattacttggacaaacagacattaaggtggattacaaaataagatatatctaatactgtatctgaattattccgaacaataatcaacttaccgctgtgagcgacaggcatgcgatggccagaccaaatcgcactggcagcgagtcctgcttggtggcattgcggggatcccagacgccgcagcacacggagatgaggacgcaggtgatcaggaactccacggccagtccctgccatggggtcaaggtgctgttgagcgaggtgaggcagacgccattggggttctcagcgctgtagatggcgctctccgggagcaccgccttcagcaggccgtagccaatgaaggcgcccaccatctgggccacaaaataggccaaagccatcggcagggagatcatgttgtagacgtaggtggccagggtgacggcgggattcaggtgggcgccacacacgcaaccgaagcactggatgcagattagcaccacgaatccgaagttcagggcgctctggaagtccgagttggtgaacacggagttctccacactgcccatgcatccgaggaacatcagcatagcggtggctatcatctcggcaagaactgttgtgatgctgtccagctggcggcgctgcagcagccagcagttggattggctgcgaaatagagaggagtattccattttagtattcttgtgggtttcattgtgtttaaatttttttgagtcactcttcgaggatattttagattttgattttaagacttggaacttggtggatcaccttgcggttgtagccatgatttacgtgcgtcgcgacgagcgattgactttaacggagacgtggtccgacgtggactgcactccagaccaagtactcaatggtgcgaatcgcatactctatcgccggctcttaatcgccggcaatctcgtctaatcgccttaggtgggttatcagccagcgtttctatatactcatatctacccaactattgccaaacattcgcgttggtgtgctccattcactcgagtgcgtatgtccactttatgacgttttaaggcaattcaaaatgtgacaaggcactaagttagtgtcccactagaaagggggctataagccatctaatcaatatgatttaagccgcctgttgtaatggttgaaacgcagaacatttcattcgctatcaagctgagcaattctaaaaggggctacttatcaatggccattgataatgattttcaaagacctatggacctattgatatatatgacaaactcgacaaactttccagcgaatacgagcccccaaaaaaatggccaatatcgccgctcatcccaattgtatgctatggaaataatacaaggtggtgcttaattacttaatcgacctaaatattttgtggctctattattacaacatattcgtatatatatatagtttattcgataagattcaattcacacctattgcactataacctctccgatcattcgtatcttggcatcggaagtcctcagatcgatctcctcgtcgcccttaaaggccatgcgatagatcagcgaggtcacagctcctgccaccaaaggacccacccagtagatccagtggtgtgcccaggagtcgttccaaacagctggacccagtgatctggtcggattcatgctggctcccgtgaagagaccctaaaagcaacagacttcccattaagtaacacttcgcaactttgaaacgcaccgaaataccaaccgctgtgaggatcagacaggagacggtgagaccgaatctcacgggcaccgaatcctgcagcttggcgttccgtggatcccacaccgaacaggccaccatgac

SEQ ID NO: 25940 - DNA, 846 bp, DROSOPHILA
gaccacgtctccgttaaagtcaatcgctcgtcgcgacgcacgtaaatcatggctacaaccgcaagccaatccaactgctggctgctgcagcgccgccagctggacagcatcacaacagttcttgccgagatgatagccaccgctatgctgatgttcctcggatgcatgggcagtgtggagaactccgtgttcaccaactcggacttccagagcgccctgaacttcggattcgtggtgctaatctgcatccagtgcttcggttgcgtgtgtggcgcccacctgaatcccgccgtcaccctggccacctacgtctacaacatgatctccctgccgatggctttggcctattttgtggcccagatggtgggcgccttcattggctacggcctgctgaaggcggtgctcccggagagcgccatctacagcgctgagaaccccaatggcgtctgcctcacctcgctcaacagcaccttgaccccatggcagggactggccgtggagttcctgatcacctgcgtcctcatctccgtgtgctgcggcgtctgggatccccgcaatgccaccaagcaggactcgctgccagtgcgatttggtctggccatcgcatgcctgtcgctcacagcgggacaactgactggggctagtatgaatccagtccgatcctttgctccggccatttggaacggattctgggatgaccactggatctactgggtgggtcccatggcggctgccctgatcacctcggtgatctacaagcacgccttccggcgggagctggaggaatcggaggtggacgagacgacgatgtcaaccaagaggacctcggaggcggagctcgcctaa

SEQ ID NO: 25941 - protein, 238 aa, DROSOPHILA
MIATAMLMFLGCMGSVENSVFTNSDFQSALNFGFVVLICIQCFGCVCGAHLNPAVTLATYVYNMISLPMALAYFVAQMVGAFIGYGLLKAVLPESAIYSAENPNGVCLTSLNSTLTPWQGLAVEFLITCVLISVCCGVWDPRNATKQDSLPVRFGLAIACLSLTAGQLTGASMNPVRSFAPAIWNGFWDDHWIYWVGPMAAALITSVIYKHAFRRELEESEVDETTMSTKRTSEAELA

SEQ ID NO: 25942 - DNA, 3069 bp, DROSOPHILA
catggctatatatacatgaccgatgagaatgcttagttactcgggcggatagagctatattccaaccatgaagcaccggcaatcttcacaacatcaacaacatttccttaagttattcaccgttttcgttgggagtgcaaacatgtgattgaaacaaaaactacactatccatacatagacatacctacaaataatttaacaaccattcacacctaatttctggccttcaaagtttcccaacaaaaaaaaaaagaaaaaaacagtccaatgtaaatagtttgagctatgcagatgtatgtagtttttgtttttctatataattttggcccttgcggcaaccataattgttaaagcttataacgagtgcagatgcaacatgaataagggcagacaagagtccatatagtcgtaagataaccataatattatatatatgtttacatatatgtacaacacgaaagctaaccaagcaaaccacattacataacgtaaagggcaatatgcaagccaaactcagtttaaatctatgtttaaaggaggaagcgggagaacccagatccatatatcatgtgctagaatttctccgtagttttaatgcctattttcttatttaacaatctaatattcccctattattatattataaacataccatacaatattgatggctgcactacacaaacatgtttacaatgtgctatgttcatagtttttagttaggtcttttctaaaacaactttaaagatgtatttaattttatgacaagaaatttatattttaaagaaactttttaagtttttctacaagcaaagcccacaaaactttcgaaaaaatctatatatgtatatggtatacaaaagagagaaacacataaaagagtgtataaaatgaaaaagaaacaaaataccgatttgaactaataaaaagtactaaggaaaatcgtagaaatatgcctgtttttaaattataaacaattaaaaaggaagagaaaagtgcattccaaaatgttctttattttgagataggcttgtgtgaaaatgtaaaaaatattcaacgtttaatttagacatggtgcacgcggccgatgttgaaaggaggaccttggttattccgttgatagttccgatgactatccacacagccagccttccaccgcccactgtatggagagctgaagtgtggcgaggcagtcggagaatagcccggcatggttgaaacctcttgccttgggcatttccagggtgcaaacgtagaaggcggagcacagcttcccaaactcacagccgtgccgccggaatttcgcgtgctattggacgatctgtcttgcctttccttttgcttcggcttcggaggaatcttctccagctgagcagcaggggagttgctgcaacagcaaccgcacggactgcagcagtaattgcagcaattacgacagccattgcagcaattcgcgcagtagtagtaacagccggtgcagggattatagtaccaggaccaaggacattggttcgagcagggcatgcagcaggtatttactggagctggagcatgattgcagggtactggtggaggattcgagggtgctggtggaggattcgagggtgctggtggaggatcttcgttttccctgcgaaacgcattaattactccttgatggaagtggacagaagtgggtactcactcaggcaaattggcagagcagccgcaggtgcgcatttcttttgtcggaggcgttggacatggtttcttgcagttacacgggcagtgggcatcctcgtcttctggtgtttcctgtggtgatgctacggtaccttctatttcgttgctgctgtgctcgctcatcttgttcttgacttttgagccattcgatttcttattcttcttggcagacggtttcgcttgctttttgctcttgtccttgtccttcggcatcaggaggtgacaccacttctgcaggtcacacggaggacaggactcggtgaggctgcaatggatacggaagacattacttcgtgttcgattaaagatgtgtgccgaatggtggattgagtaagcctaattcgagagctgtaatagctcacgaactctgacattaaactcaccggctgagaagctcaaggcaattcttttcctgcgtcttcttttttccagagttcacattttcttccggtggacaatcagattcttcggaaacgtaatgaggatagtattgattgttgggatcgaaccgagtgcagcagcatttagtggatttctccttcgatggtttaaagcttgatggaactttattcgaatttttatcctttttgggtcctgccttcgataagtttggtgcacttgctgcttgcgttctattcacgtcatgtcctggctgagcataaaaaggattatggtcttggacaaatgtggcattaagtggagcgcattcattgtacggataatactgattggatggatcaatgcccatgcccaccctctgctggtcataaagtacgggttgtcgattggtaggtgctcctacagatttattacgatttcttgaatcgtacgatctgttgttatcacgagaacgcacttcaccagcggatgccattgacttgggcgcggacctatgatctacatttctatctccaccactattagaatgataattggttgtggctctactggcttgtggttttccggaacgaccttccctcgactcatttcggtgactgagcgacttggacctctgagcacctggactagcatgaacattttcaggaaaattattattggcataagctctgcctgatcgatctcccctagatgggcttcgttgatttggagatttagatctgttgttaccatgaggcagttgcccctttgatgactccaattggggaactggccttgaatgtgtggcttgactctgctggttatagacttcagatctgttagcaccaacatgaacttgattcgttgattggggaacagtatagctataattctgattgttgggctcacagttcattggttgattatttcggccataagctggtgcacttcctcctgaggtaggagtgact

SEQ ID NO: 25943 - DNA, 1015 bp, DROSOPHILA
gctctcgaattaggcttactcaatccaccattcggcacacatctttaatcgaacacgaagtaatgtcttccgtatccattgcagcctcaccgagtcctgtcctccgtgtgacctgcagaagtggtgtcacctcctgatgccgaaggacaaggacaagagcaaaaagcaagcgaaaccgtctgccaagaagaataagaaatcgaatggctcaaaagtcaagaacaagatgagcgagcacagcagcaacgaaatagaaggtaccgtagcatcaccacaggaaacaccagaagacgaggatgcccactgcccgtgtaactgcaagaaaccatgtccaacgcctccgacaaaagaaatgcgcacctgcggctgctctgccaatttgcctgaggaaaacgaagatcctccaccagcaccctcgaatcctccaccagcaccctcgaatcctccaccagtaccctgcaatcatgctccagctccagtaaatacctgctgcatgccctgctcgaaccaatgtccttggtcctggtactataatccctgcaccggctgttactactactgcgcgaattgctgcaatggctgtcgtaattgctgcaattactgctgcagtccgtgcggttgctgttgcagcaactcccctgctgctcagctggagaagattcctccgaagccgaagcaaaaggaaaggcaagacagatcgtccaatagcacgcgaaattccggcggcacggctgtgagtttgggaagctgtgctccgccttctacgtttgcaccctggaaatgcccaaggcaagaggtttcaaccatgccgggctattctccgactgcctcgccacacttcagctctccatacagtgggcggtggaaggctggctgtgtggatagtcatcggaactatcaacggaataaccaaggtcctcctttcaacatcggccgcgtgcaccatgtctaaattaaacgttgaatattttttacattttcacacaagcctatctcaaaataaagaacattttgg

SEQ ID NO: 25944 - protein, 271 aa, DROSOPHILA
MPKDKDKSKKQAKPSAKKNKKSNGSKVKNKMSEHSSNEIEGTVASPQETPEDEDAHCPCNCKKPCPTPPTKEMRTCGCSANLPEENEDPPPAPSNPPPAPSNPPPVPCNHAPAPVNTCCMPCSNQCPWSWYYNPCTGCYYYCANCCNGCRNCCNYCCSPCGCCCSNSPAAQLEKIPPKPKQKERQDRSSNSTRNSGGTAVSLGSCAPPSTFAPWKCPRQEVSTMPGYSPTASPHFSSPYSGRWKAGCVDSHRNYQRNNQGPPFNIGRVHHV

SEQ ID NO: 25945 - DNA, 6248 bp, DROSOPHILA
tgcctagtggattaaattgaacaaattagtctggttttgtaccgcaagtaaaaggtgtataactcaaactataactgtttagcaagatgcttaaaatagttgatgttataaaccttaaaccgcagtttgtactcacagatgagcagcgtgttgatggcctcctgggagatctgcacctgattggtctggctctcggcaggcggctccacgctgactccgcttgtgctggtctcggagctcaggattccggctttgaccagctccgtgctgttgtccattttgccccgattgcgattggctaaatgcgaacaatgggaggtgagcaacagacacgttagcaagatgatctacgagtcatgggaaatagctcaccacttctgggcggtgcgggtgtggcggtcactggctttgcagtgctggtgatgctggcgacgatgggcggatttgtaatccccttgagcggcggctccgtgggatagatgagactgccgttgaagggggtgcccagtacgaattcgtagcagctgatgtcgtagttgaggaagctaatcgtgtcgatggaggtcagcaggctgcacagctcctcgatgttctgttgttccagttccggcagcttcagtttaattatttttgttagcggcgagaaagctttcgtattgatttgctgtcggaatggaaaagcgtgagcgggacaactatatagacaactgcgcgatggcaaacacagctgttttggcttcagttgcgccaactatcgatagagcgataacttgtgctatcgcacttttggctcgccattcttacctgtttaaaatcgttcttgttcaagcgcaacacctccaggccactcatgttctggaacgtctgttccggcagttccgtccagctgcagttgacgcagctgaactccaccaagtcgggctggttcaagaaggatccgtccaggcgctgggttatggtgttgttgctcaaatcgagtagcgttagttccttggccgccgcaaaggtgtcgggatcgattttggttagacggttgttggccagccgcaggcgcttcaaacgctccgatccctgaaagacctacaatagataataagcacattagttacaatttatctaattagtagaattagctgggcacttacatccttgtctatgctgctgatcagattgtgattcaaattgatttccaccgccctggacagattggcaaaatcctccggcctcagttcggcaatcacattatggctcagatcgatgatggccgccgttttgggcatgtccaggggtacatgggtcaaatgggcattggcacactgaacgaacttgaagtcctccaggcagaggcagttgcgcgggcaactgggctccaggacatggttgctgcgtcgtggtatatctgcaaaacgatattcattagccttttcagttcggaatatatagatttatgttatgctcactaaatattggtcgaaatgtggtggtggtcgatgtggaggatgattgtggcatcagtctattttctgctgtctccggcgattcctcgcccgtcgctgtttcactgtagtcatcatcgccgtaattaaagtcctcgaggggatttgcctcctcactgcccgctggagcggcatttgtgtggctgatgctgtaagagtaatcattaaattattttccggtctcgactgaataaaccaacaatataccaatttggttttttccacgacttataaacgaattcacattgcttatgaagaaaaacgcagggcaattatatgtcaaacgaatgcgcatttctgatagagcaattactgtacgaattcgttaagtggttttaccaaatacccaaaattgtcaatatttggctttagattgtcggtgggttctaagcggtacgtgcttacatcactcacgtcttgaaggcgaacacacctagctaatttgtcctgaaaacgctcttgacccatatcgttatgaccacgccatagccacacagaaacattcgttttccccactatcattatacggctattgtttatgtttgctccgcgaaagaacatgaatgaatacactcacatgtgcgaacaagcctacatacaaagtatttctcgctacagtcgtggtcacagcaatagcccttaaatgaattaaaagtattcaatgatacaaggcttcttaatgcaattcattagattatgcatatattgtaaaatatattttgcctttcgttttttaagaataaagtaaaatcaaatagatatactttcaagctaaagaaaataaagaaagcacacatttcttttattgtaactcaagcacttttattgtctgtaaagttgtttatttgtttctgttaactgaccttacattttcgaaacgtactgtagctactcagtaaaaagcacagatgaaaccagtttacttcatggcaaaagagacaactcgaccggttttagtttacgatttcgtttactctcacttttttcagatttattttatttttttgctgtcatttgtgacccctcttcatttttttttttgtctgattctaaatcgttcgttatccgtgcattcggcgacttcagttctagtgggttgtatttacttttagaaaaaaaggtgtaaattggctagtagagtagttcaagtgagtcttttgactgccatgtagagttctcttcaattgcgtgacttttgagtgaagtttcaatgaatgctgctgaggagccttgtcaatccttaaaagtgccaaaatgaacagaatgaacgactttatagagtcgagtacttgaaccgcaagtgctgatatgtagctattaattggtatatagtcctaccggataataaagatatatttatcgaacgttacgaattgccttcaagcttcagctgctcgccgaagttaatgggtattacgaaagatctctaaactgttactaagcatgacgacctagtcgacgtaattcccttgactacttgaatgaagtgactaaaattggaagcgtcgcacttaaaagcactctactttgacatttgatttcgagtggctgaaaaggtttaaaaaggcccaaaaatcaatagagaaatgggcttatgtgcactgggaaaattatactagtactaacatgcaaagaacgattaaagaattttatcttaggttttaaaactcagaagtatttaaaaagattttttttagggcaagaatatagaatatttatacataatcgataatgtctaaacctcgtttcagttgtaaattaaaagaaaaatctgaaaatcgagacagttataaatttctatgtcatttgcaatattgcttgagatattggttgagaaattcaaaacgctgagcaaacaatttgataagcaataacggtataaattatcggacaaccggggaattgttattatttttatcagaaccagattatgcgatatgattaagtagagtgtaaattcgtgcaccttatatatatattaaaggcggcaattaagagcggttgccgtggactatcaataaaatgttgctgttttttttttataaccccatgcgtgagtattccatttggcattgatatctcagttgtgggcgggtcaaagtcccgttaccctggttcacctgtcgttatttcgtttttagtgaattaatcactgcgaatgttgctaaacggaaactttgccccgtgtcttccctgtttttcgtttttaggaaagggtctactgatttctataaataaatggattacttattttccagccccataagaataacaaatgtgatttctccacatatcgagatctgtaaatatttattacaacttgatttttacctcacgcttagcaaaaatatcagcagtaatccaaacttgtagtacacgtgcattattatgaattatttgtttactgatatttgtttagctttgttttcactgcgtcttcaaggcgtcgtgttgtttgtatttgtgtttatctcagggttttcatagcattttcgtcgtttttgccaaacttgatgtgaaaattttcaagctgaaaatagattttattaggtgttaggggcctatttttgcaccgctattctcgtttcactttgcacttttaatattcatctgttttgctttgaaattacagcttcaaagttgattaatgtccatttacatttgccggcttacttttggcaaaagtaaaataattatttttcactccgctcgcacaaacttttccactcgctgccgattctcgaatgagcaaaaattcgccaacaattcccattccgttcgactgactgaacaggtgtgtgtgtgagagcttcgaagagcggcaaatattatctctttttctttactctcactctctcttccaaactctctcatgttaagtttaatgtttagccgtggttatcttatcagtttttaatatttaattgctttgtctcataccctcgcgatttctgcttagcttttaaccaacttctgacttactaatcgattattatcaatagtaacaattatggaattcatgttttcaatgaaaacagaaagagcaaactcacactttaagcaccgtaaataaaggctaatcggtttgggtaatcctatcttaattaataagcattacatcacattagaaattaaaatttcaattgccatattttcaacataataacttaagcagcagatttggaagtacaaagaaatctttaggacggcttgtaatattaataaaattaattacacacttgtctgattagaattaacgccgatcgtaatgaactttgctttggacttgacttataagtcggtcggcccgccttttgatatgaaaaaagggaagctttcacagtttatttacataatttgctggaaaaatgtgaaacacttggctggctgaatcatagcgattaaattggacgtgatttgagtgaaaagtttgtttgaatatttgtttcaccgagtgctaagttaaactcttgttttaatcccgtttctaggtctttgtgttgtgattgcgatgaacaatgtatagcagcagcgttctttttatcgcctagaatatgttgacctttagtccactgcgcttacttcgaatgacacgcgtcgtcgtttttctcgataatatatgtactaaattgggtattacactagagagttttctcatcgaattctactgaatggaggagtatcgcgtttaaattatacttaatgatttgctaacttggctttttgttgtcgcgcgataacgtgcgactcatgccaccgtcgatttgagaatgagctgcgaacggaaccgcagaagttgcgagcttaaaaattgagtaagttgaaatagagcggctgaagagagtcttctcttagctttcgaatcgctctcttcacacttgattcttcaaaataatatttaaaaaagaaagaaaaaacagagaagcccattaattacgcaagtgcatttttcaataaatcgctgactcatgggcacttgttgccgggaaatggcattgcatataatttagaaattgttaaaaagccccagaggaagaaaaaccctcttcgttgcgagtattccaccatttccttcaaacttttacttttatgtttatgtttatgtactttacatgtcaatgactttttgtttaatgttcttcgctcttcgcttctcttcggcgattttagcgatttcacaaaaagcgagtgcagtgaaatcttttgtcatttcaaattggctgtttaattgcctaatgttgctttgtttgctcattaaactgtaagtggtccatatattttctcatgaaaaacaaaaaatccataaaagcggataaaaatgttcgccgcgcacattacttttgttggtttttggtggttgtgttcgtgtggaattctatagtcatgtcttcgattggcggcctcaaggtcaaaaatcgcaaatccttttaggcaacttgctcaggccaaaaatataacggcattttggagagacaggggttcgttctcttcatttacattttagcgagggctgcttacaaagttctcccatatcgggatattctattttcattttcaagtttttcaaaaacttcttcatgataactgatattcctttttgctgttttcgaatgcttagaggtttatattttatttgaacattttgttgccttttgtttagcattcactatcatatactttatcaatggcttattattataatattatattatattatatattaaaagagaaaattattaattattctcaaat

SEQ ID NO: 25946 - DNA, 888 bp, DROSOPHILA
atgagtcgcacgttatcgcgcgacaacaaaaagccaagttagcaaatcattaagtataatttaaacgcgatactcctccattcagtagaattcgatgagaaaactctctagtgtaatacccaatttagtacatatattatcgagaaaaacgacgacgcgtgtcattcgaacttgaaaattttcacatcaagtttggcaaaaacgacgaaaatgctatgaaaaccctgagataaacacaaatacaaacaacacgacgccttgaagacgcagtgaaaacaaagctaaacaaatatcagtaaacaaataattcataataatgcacgtgtactacaagtttggattactgctgatatttttgctaagcgtgagcatcagccacacaaatgccgctccagcgggcagtgaggaggcaaatcccctcgaggactttaattacggcgatgatgactacagtgaaacagcgacgggcgaggaatcgccggagacagcagaaaatagactgatgccacaatcatcctccacatcgaccaccaccacatttcgaccaatatttaatataccacgacgcagcaaccatgtcctggagcccagttgcccgcgcaactgcctctgcctggaggacttcaagttcgttcagtgtgccaatgcccatttgacccatgtacccctggacatgcccaaaacggcggccatcatcgatctgagccataatgtgattgccgaactgaggccggaggattttgccaatctgtccagggcggtggaaatcaatttgaatcacaatctgatcagcagcatagacaaggatgtctttcagggatcggagcgtttgaagcgcctgcggctggccaacaaccgtctaaccaaaatcgatcccgacacctttgc

SEQ ID NO: 25947 - protein, 190 aa, DROSOPHILA
MHVYYKFGLLLIFLLSVSISHTNAAPAGSEEANPLEDFNYGDDDYSETATGEESPETAENRLMPQSSSTSTTTTFRPIFNIPRRSNHVLEPSCPRNCLCLEDFKFVQCANAHLTHVPLDMPKTAAIIDLSHNVIAELRPEDFANLSRAVEINLNHNLISSIDKDVFQGSERLKRLRLANNRLTKIDPDTF

SEQ ID NO: 25948 - DNA, 5595 bp, DROSOPHILA
tgcctagtggattaaattgaacaaattagtctggttttgtaccgcaagtaaaaggtgtataactcaaactataactgtttagcaagatgcttaaaatagttgatgttataaaccttaaaccgcagtttgtactcacagatgagcagcgtgttgatggcctcctgggagatctgcacctgattggtctggctctcggcaggcggctccacgctgactccgcttgtgctggtctcggagctcaggattccggctttgaccagctccgtgctgttgtccattttgccccgattgcgattggctaaatgcgaacaatgggaggtgagcaacagacacgttagcaagatgatctacgagtcatgggaaatagctcaccacttctgggcggtgcgggtgtggcggtcactggctttgcagtgctggtgatgctggcgacgatgggcggatttgtaatccccttgagcggcggctccgtgggatagatgagactgccgttgaagggggtgcccagtacgaattcgtagcagctgatgtcgtagttgaggaagctaatcgtgtcgatggaggtcagcaggctgcacagctcctcgatgttctgttgttccagttccggcagcttcagtttaattatttttgttagcggcgagaaagctttcgtattgatttgctgtcggaatggaaaagcgtgagcgggacaactatatagacaactgcgcgatggcaaacacagctgttttggcttcagttgcgccaactatcgatagagcgataacttgtgctatcgcacttttggctcgccattcttacctgtttaaaatcgttcttgttcaagcgcaacacctccaggccactcatgttctggaacgtctgttccggcagttccgtccagctgcagttgacgcagctgaactccaccaagtcgggctggttcaagaaggatccgtccaggcgctgggttatggtgttgttgctcaaatcgagtagcgttagttccttggccgccgcaaaggtgtcgggatcgattttggttagacggttgttggccagccgcaggcgcttcaaacgctccgatccctgaaagacctacaatagataataagcacattagttacaatttatctaattagtagaattagctgggcacttacatccttgtctatgctgctgatcagattgtgattcaaattgatttccaccgccctggacagattggcaaaatcctccggcctcagttcggcaatcacattatggctcagatcgatgatggccgccgttttgggcatgtccaggggtacatgggtcaaatgggcattggcacactgaacgaacttgaagtcctccaggcagaggcagttgcgcgggcaactgggctccaggacatggttgctgcgtcgtggtatatctgcaaaacgatattcattagccttttcagttcggaatatatagatttatgttatgctcactaaatattggtcgaaatgtggtggtggtcgatgtggaggatgattgtggcatcagtctattttctgctgtctccggcgattcctcgcccgtcgctgtttcactgtagtcatcatcgccgtaattaaagtcctcgaggggatttgcctcctcactgcccgctggagcggcatttgtgtggctgatgctgtaagagtaatcattaaattattttccggtctcgactgaataaaccaacaatataccaatttggttttttccacgacttataaacgaattcacattgcttatgaagaaaaacgcagggcaattatatgtcaaacgaatgcgcatttctgatagagcaattactgtacgaattcgttaagtggttttaccaaatacccaaaattgtcaatatttggctttagattgtcggtgggttctaagcggtacgtgcttacatcactcacgtcttgaaggcgaacacacctagctaatttgtcctgaaaacgctcttgacccatatcgttatgaccacgccatagccacacagaaacattcgttttccccactatcattatacggctattgtttatgtttgctccgcgaaagaacatgaatgaatacactcacatgtgcgaacaagcctacatacaaagtatttctcgctacagtcgtggtcacagcaatagcccttaaatgaattaaaagtattcaatgatacaaggcttcttaatgcaattcattagattatgcatatattgtaaaatatattttgcctttcgttttttaagaataaagtaaaatcaaatagatatactttcaagctaaagaaaataaagaaagcacacatttcttttattgtaactcaagcacttttattgtctgtaaagttgtttatttgtttctgttaactgaccttacattttcgaaacgtactgtagctactcagtaaaaagcacagatgaaaccagtttacttcatggcaaaagagacaactcgaccggttttagtttacgatttcgtttactctcacttttttcagatttattttatttttttgctgtcatttgtgacccctcttcatttttttttttgtctgattctaaatcgttcgttatccgtgcattcggcgacttcagttctagtgggttgtatttacttttagaaaaaaaggtgtaaattggctagtagagtagttcaagtgagtcttttgactgccatgtagagttctcttcaattgcgtgacttttgagtgaagtttcaatgaatgctgctgaggagccttgtcaatccttaaaagtgccaaaatgaacagaatgaacgactttatagagtcgagtacttgaaccgcaagtgctgatatgtagctattaattggtatatagtcctaccggataataaagatatatttatcgaacgttacgaattgccttcaagcttcagctgctcgccgaagttaatgggtattacgaaagatctctaaactgttactaagcatgacgacctagtcgacgtaattcccttgactacttgaatgaagtgactaaaattggaagcgtcgcacttaaaagcactctactttgacatttgatttcgagtggctgaaaaggtttaaaaaggcccaaaaatcaatagagaaatgggcttatgtgcactgggaaaattatactagtactaacatgcaaagaacgattaaagaattttatcttaggttttaaaactcagaagtatttaaaaagattttttttagggcaagaatatagaatatttatacataatcgataatgtctaaacctcgtttcagttgtaaattaaaagaaaaatctgaaaatcgagacagttataaatttctatgtcatttgcaatattgcttgagatattggttgagaaattcaaaacgctgagcaaacaatttgataagcaataacggtataaattatcggacaaccggggaattgttattatttttatcagaaccagattatgcgatatgattaagtagagtgtaaattcgtgcaccttatatatatattaaaggcggcaattaagagcggttgccgtggactatcaataaaatgttgctgttttttttttataaccccatgcgtgagtattccatttggcattgatatctcagttgtgggcgggtcaaagtcccgttaccctggttcacctgtcgttatttcgtttttagtgaattaatcactgcgaatgttgctaaacggaaactttgccccgtgtcttccctgtttttcgtttttaggaaagggtctactgatttctataaataaatggattacttattttccagccccataagaataacaaatgtgatttctccacatatcgagatctgtaaatatttattacaacttgatttttacctcacgcttagcaaaaatatcagcagtaatccaaacttgtagtacacgtgcattattatgaattatttgtttactgatatttgtttagctttgttttcactgcgtcttcaaggcgtcgtgttgtttgtatttgtgtttatctcagggttttcatagcattttcgtcgtttttgccaaacttgatgtgaaaattttcaagctgaaaatagattttattaggtgttaggggcctatttttgcaccgctattctcgtttcactttgcacttttaatattcatctgttttgctttgaaattacagcttcaaagttgattaatgtccatttacatttgccggcttacttttggcaaaagtaaaataattatttttcactccgctcgcacaaacttttccactcgctgccgattctcgaatgagcaaaaattcgccaacaattcccattccgttcgactgactgaacaggtgtgtgtgtgagagcttcgaagagcggcaaatattatctctttttctttactctcactctctcttccaaactctctcatgttaagtttaatgtttagccgtggttatcttatcagtttttaatatttaattgctttgtctcataccctcgcgatttctgcttagcttttaaccaacttctgacttactaatcgattattatcaatagtaacaattatggaattcatgttttcaatgaaaacagaaagagcaaactcacactttaagcaccgtaaataaaggctaatcggtttgggtaatcctatcttaattaataagcattacatcacattagaaattaaaatttcaattgccatattttcaacataataacttaagcagcagatttggaagtacaaagaaatctttaggacggcttgtaatattaataaaattaattacacacttgtctgattagaattaacgccgatcgtaatgaactttgctttggacttgacttataagtcggtcggcccgccttttgatatgaaaaaagggaagctttcacagtttatttacataatttgctggaaaaatgtgaaacacttggctggctgaatcatagcgattaaattggacgtgatttgagtgaaaagtttgtttgaatatttgtttcaccgagtgctaagttaaactcttgttttaatcccgtttctaggtctttgtgttgtgattgcgatgaacaatgtatagcagcagcgttctttttatcgcctagaatatgttgacctttagtccactgcgcttacttcgaatgacacgcgtcgtcgtttttctcgataatatatgtactaaattgggtattacactagagagttttctcatcgaattctactgaatggaggagtatcgcgtttaaattatacttaatgatttgctaacttggctttttgttgtcgcgcgataacgtgcgactcatgccaccgtcgatttgagaatgagctgcgaacggaaccgcagaagttgcgagcttaaaaattgagtaagttgaaatagagcggctgaagagagtcttctcttagctttcgaatcgctctcttcacacttgattcttcaaaataatatttaaaaaagaaagaaaaaacagagaagcccattaattacgcaagtgcatttttcaataaatcgctgactcatgggcacttgttgccgggaaatggcattgcatataatttagaaattgttaaaaagccccagaggaagaaaaaccctcttcgttgcgagtattccaccatttccttcaaacttttacttttatgtttatgt

SEQ ID NO: 25949 - DNA, 1287 bp, DROSOPHILA
ataggattacccaaaccgattagcctttatttacggtgcttaaagtgtgagtttgctctttctgttttcattgaaaacatgaattccataattgttactattgataataatcgattagtaagtcagaagttggttaaaagctaagcagaaatcgcgagggtatgagacaaagcaattaaatattaaaaactgataagataaccacggctaaacattaaacttaacatgagagagtttggaagagagagtgagagtaaagaaaaagagataatatttgccgctcttcgaagctctcacacacacacctgttcagtcagtcgaacggaatgggaattgttggcgaatttttgctcattcgagaatcggcagcgagtggaaaagtttgtgcgagcggagtgaaaaataattattttacttttgccaaaagtaagccggcaaatgtaaatggacattaatcaactttgaagctgtaatttcaaagcaaaacagatgaatattaaaagtgcaaagtgaaacgagaatagcggtgcaaaaataggcccctaacacctaataaaatctattttcagcttgaaaattttcacatcaagtttggcaaaaacgacgaaaatgctatgaaaaccctgagataaacacaaatacaaacaacacgacgccttgaagacgcagtgaaaacaaagctaaacaaatatcagtaaacaaataattcataataatgcacgtgtactacaagtttggattactgctgatatttttgctaagcgtgagcatcagccacacaaatgccgctccagcgggcagtgaggaggcaaatcccctcgaggactttaattacggcgatgatgactacagtgaaacagcgacgggcgaggaatcgccggagacagcagaaaatagactgatgccacaatcatcctccacatcgaccaccaccacatttcgaccaatatttaatataccacgacgcagcaaccatgtcctggagcccagttgcccgcgcaactgcctctgcctggaggacttcaagttcgttcagtgtgccaatgcccatttgacccatgtacccctggacatgcccaaaacggcggccatcatcgatctgagccataatgtgattgccgaactgaggccggaggattttgccaatctgtccagggcggtggaaatcaatttgaatcacaatctgatcagcagcatagacaaggatgtctttcagggatcggagcgtttgaagcgcctgcggctggccaacaaccgtctaaccaaaatcgatcccgacacctttgc

SEQ ID NO: 25950 - protein, 190 aa, DROSOPHILA; identical to SEQ ID NO: 25947

SEQ ID NO: 25951 - DNA, 1828 bp, DROSOPHILA
ataatcatataccgatctttcacaccttatttttgatttaaataaaactcatcgtcatttttcgaagaatctactccgtctcgcttgacggataacacaactcatcgtcacacattgatagataatttacaccccattgaaacagagctgtcgggatattctccacattctcgttatccaactcattataatttctataatatatatatatgtttatcaaaaatatttcaaatttggtcttacatagtggaaccaacccaaggtctccaatctgtttaccaatcaacatattcaacggccaattccgtacaagttgggctttgccagtacgccctgtcacgattctacgagtagcaacaaattttaagggtgctcatatcgcattccacttgcccatctgcacgaaaaaaattagtgacatacaaagctctgaaaactggcaggtaagaacaagtccaggtcaacgatgatgcgatttggtacagcaaataagaatgcggaagatttcatggcatttagctttaggtaagagctggaaacgtgttctacctcgtctttggacttttcgcagttaatgcgttttgaccaatctttccccaaaatctcagtcaaagttattgacaatttctattatctggtgttctaacaattcgttatattgttatttttttatttgatgccaaatttggaggcataattaagaggcacctcagctgtgccattatcttccttaccctaagctttcctctctcgcgagctctttctcttttaccctcgcaccttattcttcttttatatttttatattaatgatgatacatgcactcataaaagtgtacaaactccacaataaatgtttaaaaaaacgatataagagcagggccaatggcctagaaacaacttaatttttaaataatgaggtcattaatgaaataaaaataataataaaatcaaaaaataaaatttttcttcttaatacttaaaaatgtttcaaataaattatggattgtcaaaatttaacagccatcttaaatgaaataaaagaaaaatttgataagtcatataaatgtttgtctcagaatagaacaatccaaaaacaaactgctaataagcatataatcattctggtagaatcatttaatcaggctagatcccgtatacatgacccaagagggaaactggacaaaaaccagtagacaacagtatccaaatttttgattagattaagataagataatctaataaatatcaaagaaaggttcgatctaaacataccaacaattcttaattccgctttgactcttagtgaagaagaaacagaatcactcaatgatcctgactctgaactagaaatcaaagaagaacacttgaacgatctaacaataccagtaatgttgcaattgccagaagattcagggaatagagaagatcaggaaataaaattaagcaaaatgacagacaattcatcctccaatagggcctaaataagggcagtgtcgagcgcagtaccggagtttgatggacaaaagatccatcttcagaggtttattatggcctcaaataaaatagttgaccttgcaaaaggaccatttcaggacattgcagtccaagttataaaatcaaaattgattggcactactctgaacctggtacttaccgaatctacaattgaagcaataattaataaactgcaaacttcaattgttggggagacattccaaaacatcaatgcaaaattatccactgtacaacaaaaaggcaaaacagctacacagttcacaacccgaagttgataacttacgtaagctcttagaagcctcgtatatcga

SEQ ID NO: 25952 - DNA, 595 bp, DROSOPHILA
atggattgtcaaaatttaacagccatcttaaatgaaataaaagaaaaatttgataagtcatataaatgtttgtctcagaatagaacaatccaaaaacaaactgctaataagcatataatcattctggtagaatcatttaatcaggctagatcccataatctaataaatatcaaagaaaggttcgatctaaacataccaacaattcttaattccgctttgactcttagtgaagaagaaacagaatcactcaatgatcctgactctgaactagaaatcaaagaagaacacttgaacgatctaacaataccaaggtttattatggcctcaaataaaatagttgaccttgcaaaaggaccatttcaggacattgcagtccaagttataaaatcaaaattgattggcactactctgaacctggtacttaccgaatctacaattgaagcaataattaataaactgcaaacttcaattgttggggagacattccaaaacatcaatgcaaaattatccactgtacaacaaaaaggcaaaacagctacacagttcacaacccgaagttgataacttacgtaagctcttagaagcctcgtatatc

SEQ ID NO: 25953 - protein, 186 aa, DROSOPHILA
MDCQNLTAILNEIKEKFDKSYKCLSQNRTIQKQTANKHIIILVESFNQARSHNLINIKERFDLNIPTILNSALTLSEEETESLNDPDSELEIKEEHLNDLTIPRFIMASNKIVDLAKGPFQDIAVQVIKSKLIGTTLNLVLTESTIEAIINKLQTSIVGETFQNINAKLSTVQQKGKTATQFTTRS

SEQ ID NO: 25954 - DNA, 4383 bp, DROSOPHILA
aaaaatccaaactggtaattgctatttagcaagaagctaaattatgaattattttcctttttttgtttggctccaacaaagcgatacagttatgtacagtacgtttttgcaaagaaaaactttatttatagttatatttaaagttccttatcatagggtttttcaatttttaaagttgttcatctcctcacaattgtttacttaataaatttaaaaggtacaattaaagaagaatattattcaattaataaattgaagtctcggtttatcaaagctttttgactgataaaataatcattttagctgcaattaaattagacacatatatgtatatctagtgtcttatcaaagcgtacttattatttatgcaaatattattagctttataactttcccatgcttattaatttataaattaaatgaagtgtaaagttggttactatagagctaatgtatttacgtagctgtaacttttagtcaagctctactgtagtcttgctggttgctactgctgctgctgcctgttgctgccccttttgtttagcgctcttcttgtggcatttctcgtcttcgtgctgacacgaatcatcaacaagcggagccaagcggccaaccaatccacatctaccaatttctaagccgagatcgagtcagttggcatttggctgtagacgagcgtggatggagcaggcccagaatcgaaagcgaaaacgaaactgaaatcgaaacagaaacagaagaaccaccacaaaccagctgcgatcgcatggggagaggaatttatgtggaacgcggcgggccaagaactgaaagctcagcaaagaacgatcgaagtggctgaaagcagggccaagaaaaatgtgctcgctgctgaccgtggaaacgtgatatgtgcttaggattgggccaagacaatatgagcctcctgcgccagcagctgccacgttcaaaatagaaagttgctgccaaagatgaaagagagcgccgctattgccacagaatgagcgaatcggaaccgaatagcctggagttcattgaagacccctatctgccaagcattgatgatctcaccagcacaccgtcactggatctggaaaccaatgatgccgtcttggactggtatggcgatgggcaggaggagagcgaggctgagctatatttgcgtaatctgacgctagaccagatattctacgatgtggattcggactacaccaacagcctggaattgcaggcagtggaggcggacttcattgccgccaagttggccaatcaagcgccatcgtcttcgatggccaaacgcttccgcttgaagttctttgccaagcgaaccatgcgcgacgttaaggtcacgttcatagacttctccaaaccgtatctggccaaaatatcaaacagtgataactacaagagattcctcaacattgggcatagaagtagaggtaccaaattcggtcagtggggaggggggttggtgggcttaggtcgggtctttgttctgtggcattcgcttttccactttcaaccatgactaaccagactaacttctctgtttctttctcctttgcctgcctttcgcctcgtcagtttgtgagtattaacaaaaacccagatctaaccaattaaccaactcatgtctttgcaaattgtacatactcgtatatacaactaaattcggtgtattcagcctatgacaaagtctttgaggaagttgctttcaaaggaggtacttaaacactacccgccgacaacattgaaattaagctacagtccccacacagcaccccaagttttaatgttcccttggattggcatatatttaatggctttttatttcatgttcagataatacagccaacctgtcggagccagcatctccagctaattctgtggcatccgcagaaattgccgccgagttcgctgcgctttccgtcgaggagaaggagcagcgtcgggctgagtggagtcaggtaaggaagttttcagttttacgatcataatttgattactcagctcgaacgctaacttctacttcaatttccaggagctcgcccgcgttgaggaagagatcaatacgctgcgaactgtcctagcctccaagacgcgccatgcctccgatctcaagcgcaagctgggcatcaccgtctggaaggaggtgacggacgacgtgaaccagggccttaagaacctcaaggagagcactgtgtaagtctatgaaccgttcgcagttctgctgggcaattaacccgactagacagttttaatttctaaccatgctttttgtttcaaactcctgttgaaacgctataacgtgtatttatttagttaccaatcggtggagcagagcgtgggcacgtttactaaaacggtgtacgaggcaccactgtaagtaattgggttcaggctgatttttaattgggtacttttggagttaccggactaacgccgtgtttcacgccacttcctttaacacaataaccaactctcgcctgtttgtaactaaagcgcacctatgtttgcccactttgtgtatggaggaaaactatcgagatgagtaactaatgttggatttatttgtactctcccctagataccaacgcactgagtcggtgctaaagtccacgggcgagaagaccgcctcggtgtttggcagcatcaccagtggcatttcgtcgaaactgtcgcaaatgaaaaactccgaatcgatgcgttctatcgaggcttcggtgggctctgcctacgagaacgttaaagtaagctatgaacacaacaattttatgtgccaatctcatgcggtaactactattttattatatatctgtctttacacatctctcatactgttgcgattctgttttggttcccgtctaactaactagccactaactaaccaactaactaacactaaccacacatctttcacacttgctcacccactataaacgcactctgaattgggatacttcggttgatttgcttgcttacacaacgaactactccttgcgcaaatgctactgcacctctactacaatctgttcggttttctgttctattgtagaccaaggtgacatcccgctcgggttcggtgtccagtttcccagatgccctggacgagaataacacatcctcgggtctgaattcacccacagactcactcccgaaatagatttcggggcaactgcaaggccaagcgcgtcgataatgtggagcaacctatactacatacaaacagacccacgcacccactctattaacttatttaactaaagcgaattgtcgtgtctgcgcactaacaacaggatcagaattaatttaaccagaaatcatatgtacacctgtgtcgatacggtttatataatacttaatataactaaaatctgcgcgtcaaaaatttgccaatgggagcacatattatatgcatctatttgtatttgccttggagacaccatcaaattgcatgacttgtttaaatttaaagccacggaggatcgaagatccaagggcttgctgcattcgtttatataactatcaatctaagtgtacgtttaaagactaaaccacattggatggtccacccgatgtcattcccaaatgtttctaatacttagtaaaaacattagaaaatcatgcattgcggttaaagtgaatatacatttgttttacgcttttatttcttctctaggcgttgagttccgtggttagatggcgttccctaatccgttgaaaagccaattccaaatttatttagtactaaatatttgtgttacgatcagagcttgcgtgcaaataacgaaaatccattggtaaacttaagtggatgtagtccgtactgctgaagattgagaaagagacgaaatcgcacccaatttgttgctaatgctgatcaaatttgctatatgtgtatgaaatctttgaataaatgcaaaaatttttgccccataaaaatagcgatgtctttttgataaatgatgtttgggagtatatgtgtgattaccttttcaaacttaaactacagctaatgaattaaaaaaagttaatttccaatttcatctgtcagctttaaatatcccgccaaaaattataataaagttgacaactctgatttaacccagggatcaacgtaaaacagctgtttgctttgacgaggtggcaacgccatagagggttcttgcatacttctcaattttttcttcaggccacaagaaaatctttagatatgaggaattttaaatgaaaacagcgagcaaacagaacgcatcgtgatgccggaaacctaatcaaccactccgaagtaaagtgcaattaaattacatagttttatacaactgaaagcggctggccagccgcataaagtattcgcctacaccagcattgttctaaatgcta

SEQ ID NO: 25955 - DNA, 1288 bp, DROSOPHILA
atgagcgaatcggaaccgaatagcctggagttcattgaagacccctatctgccaagcattgatgatctcaccagcacaccgtcactggatctggaaaccaatgatgccgtcttggactggtatggcgatgggcaggaggagagcgaggctgagctatatttgcgtaatctgacgctagaccagatattctacgatgtggattcggactacaccaacagcctggaattgcaggcagtggaggcggacttcattgccgccaagttggccaatcaagcgccatcgtcttcgatggccaaacgcttccgcttgaagttctttgccaagcgaaccatgcgcgacgttaaggtcacgttcatagacttctccaaaccgtatctggccaaaatatcaaacagtgataactacaagagattcctcaacattgggcatagaagtagaggtaccaaattcgataatacagccaacctgtcggagccagcatctccagctaattctgtggcatccgcagaaattgccgccgagttcgctgcgctttccgtcgaggagaaggagcagcgtcgggctgagtggagtcaggagctcgcccgcgttgaggaagagatcaatacgctgcgaactgtcctagcctccaagacgcgccatgcctccgatctcaagcgcaagctgggcatcaccgtctggaaggaggtgacggacgacgtgaaccagggccttaagaacctcaaggagagcactgtttaccaatcggtggagcagagcgtgggcacgtttactaaaacggtgtacgaggcaccactataccaacgcactgagtcggtgctaaagtccacgggcgagaagaccgcctcggtgtttggcagcatcaccagtggcatttcgtcgaaactgtcgcaaatgaaaaactccgaatcgatgcgttctatcgaggcttcggtgggctctgcctacgagaacgttaaaaccaaggtgacatcccgctcgggttcggtgtccagtttcccagatgccctggacgagaataacacatcctcgggtctgaattcacccacagactcactcccgaaatagatttcggggcaactgcaaggccaagcgcgtcgataatgtggagcaacctatactacatacaaacagacccacgcacccactctattaacttatttaactaaagcgaattgtcgtgtctgcgcactaacaacaggatcagaattaatttaaccagaaatcatatgtacacctgtgtcgatacggtttatataatacttaatataactaaaatctgcgcgtc

SEQ ID NO: 25956 - protein, 355 aa, DROSOPHILA
MSESEPNSLEFIEDPYLPSIDDLTSTPSLDLETNDAVLDWYGDGQEESEAELYLRNLTLDQIFYDVDSDYTNSLELQAVEADFIAAKLANQAPSSSMAKRFRLKFFAKRTMRDVKVTFIDFSKPYLAKISNSDNYKRFLNIGHRSRGTKFDNTANLSEPASPANSVASAEIAAEFAALSVEEKEQRRAEWSQELARVEEEINTLRTVLASKTRHASDLKRKLGITVWKEVTDDVNQGLKNLKESTVYQSVEQSVGTFTKTVYEAPLYQRTESVLKSTGEKTASVFGSITSGISSKLSQMKNSESMRSIEASVGSAYENVKTKVTSRSGSVSSFPDALDENNTSSGLNSPTDSLPK

SEQ ID NO: 25957 - DNA, 5072 bp, DROSOPHILA
gtcgattgtcgtctacaggagcacacacacactcgcgcagcgtcttttcgccgtatgtgtgatggccggggagatgcgatgcctttggcccgaaacaatcgctatcttaacaccctgctcgcgcgtttatcactctaatgcgttctgtcgtcgttgcgaacagctttaatggcagttttctggctatttttcagcactttactatcgcaaaataaaaaattatattcgtgaaaacggtctgcgccagtgatggcagcagcggcccaaaacacgagtaatcggaccagcgcaggactatcggcaaatgttatcggcgagcatctggcagcgctgcgcacagggtgttaactgtcttttttaattcaaatgcgaccgttacattttaaatcttttcaaacttaaaacgaattttaaaatgatctgtttagattggtttctatttttactataaaagagctacattttctagatcatttaaggcacatgtcggtatgtgcgtagccatagcaattacattctatttatagtttcattattatatttccatccttttgaacaattttatattccatccctttggaattaaacgactgcagtcacatttcgaaacgaatgtttttatttagcattttcgaatgccgtaattaggggttctaataaatacacactacaaacgcacagaggcatttaatcaattttgtttaaatttagacttaacattaggattcgattatttttcgagcaaaatttcaattcaattttataaagctgagtgggatttaaaggagaatgagagatggggggaaaacattaaataacattgcaaaattgatttcgctacaaaaaataattccttttaattaagccagccagccagccagccagttcagcccagctcggcttggctccgatctgctccgacccaaaactcgctcagttcttttggttgctgttggtgttcctggtggttaccgccttcgccttccttcgtttcctccttctacggtatcatgttcggctcctgggcggcgcccgtcgagtacttgggcttgcacacgcatccgctctccaccagcacgtaatcctggccagtcagcgtcaccgggccgagcggaatgaccaggaacaggtagggcacataggtttgcgtacactcgccgcggaccacatcgcactcagaggatctgaaattgaccatagtagtgagctttaaaaagaagaactagtggagattgtggagtaatgtaagttaagggtaaatttcttatttgaattcaatttgtttggtataccaataagatttatattaatcgggtgccaaaatattactcactcgcacacttcgaagaccacctgctgcaggagatcggggaacttctggacgatggtcaccggctggccggaggtgaggctcactccgtacatgggcgccgtggtattgtagcgcgtcttgcagaggcgcgccggcgtctcgctcttgcactgctgcgccggcgtggcgttcttcagcgaacgacctgttgagttgcgatgcgatgagattgattaatcaatcaagtagtcagtcaatcaatccatcaatcaatcaatcaatcaggcggtggttcgatcgattggtttggtcaatcaggtggcggtgaccgacttaccatagcgactgcttccgacggcctcgttgttcacctcgtcgtaggccctcagcagagcactggtggttatggctgggtccagtgtgctgggcaatttgctctggcggccacgtcgcgagtttccgttccagttggagaatgtgcgcgccacggccgcgctgcagagatcccaattggatggtcacaggggcgttagaaaagaaagttactaccatgccagatgactgactcacctcggatatggcgcattattgggacccaggcagtccagcgagtccgtcagcgcatcgcccgataggtacttcaggccacgcccaccgctgcagcggctggggggcgcatcatcgctgctgtaacttggccacaatgccgcgtttgcgcaggtgagtgcgatgctgaggacgcagagagccgttaggtgctgcaacagatacgaagcggtacggatatgggttatgaaacgggccaaaacagattattcacacggtcaatttgtggctctcttgagcagtaagtgcatcctagactttagagtatctagtatctagatagtaacgaaacgtaccaaaaatttaaaatagtctgcgaaaacaaaactataataaaacaaaatgagaaatgttcttttgtagatccctagcaataacaaagtttttaaacatttaagaagacttctccttcttcgttcagaggacttttcttgaagtactgatacaataatatcagcgactttagatatgttgcatttatggtatttgataacgggtaatccgcggaaggagggaagtgctgtctcatgctggaaatacaactagtcttactgaactgaagttccgtaagagttgtaacgtgttttatggcctgtcgttgaaccgacgaccctgaccatggcccagctatatatgtttgcttgtatataacatacatatgtatgtagttgtctagcactatttggcttttggctggggactctacggaattctgggaaaggctttaaaagtacgccactgcagacgatggcgattacgcgttacaagggctatccattttggttttgatggagggaggtgtatggacgatgaaaagtttctattttcacatgcttgacccgcttagccccgaaatccataaacaaattaattaagctcataaataagcatcttgcggggggggggggcacggcgcacgtgaaagtaaaaacagagacgaaaacccacatccatcgagttggaatgtttgtattaagacatacggacatacggacacttttcagtggcacggcatgcaaagctgacttctaatatggtctgaactttttattgcctcttctcgcggtttttatccaaccgctctcgcatgtattttctttcactttctccgtgcagatttggctgctgatcaagtgcccgattcgtgccgaaaaacccgtttcgattgaattaaaattgcagcacaaaatttgccatttcttctgcttttttctgttaatttttttgcaattttttgcatttgactttctgttgagaaaatcgctgcacgtatgtatgtatgtaaggtatgcatgtatgtatgtacgataatcgttgcttttctttgagcctttgtgcgactgtcaatggcggaataccgcaaatatttcttaattgatataaatattttctttctgctattattgttttgttcggttcgcacatttggtaggtttgctagccaactttcttttcagttagacatttgacaaaaaaaaaaatactaatgaaaaacgagggggccataatggtcattgcgtgtgcgctgcgccgctgggaaaataaaaacgaaagcgaaattctattatttaattcttttcccattcactacacgaatttaatgggtctctgaatgagcggaaaagggggcctatacacgtgcagaccagccaggtcttcaggttcgatggtgcaactatggccacaagcacttccactctcaccgcgccttctgtcgaattcttctggggggctcattaaacgcgcttttcccgacattgtcatttcgttgctcggactttccgtttttatgactcttcagcaatttcgtttaataaatgctcgctgtcccctcttaattcgacattaaagcactggggagccggagaagccattgccatttgaacctgtcactagacgcatttctacctggtaattgccatcttgattgggccctcgtcggctcctaatgaggtctgtggagtgttcattgtagtgattgtggcatgactgtaccgaatgcaaataatttcgaatataattgggctttggaaatcggaaaatcacgcattaatcaaaaacccattgacgatccgttgacaatttcggtttgccttgtcattaggcttacataacaaaaacaacaataacaacaccgtgcactacaatgattttctatgctctgctttgtatttgcccgcgaggaaaagagaaaagagacgagacaagcaaggcttgaaagaacttagagatgacagcgtgataaataacaccacataccacgaaataaggtatgtaaattgaatttaattactcaggcaactaggagcaatattccaaaatcacaataatcatcaaaattaaaataattaaacaaatttgtcaatattattttctactctttaaatattgttgagacagaattcagtgtttaattattattaagtattcatatataaccaacttttataatccattcctgcaatttaagatagtttagatactgagatattgataaagtattgcgatatatctttgtagatttatagacggttctctgtaaacgcaaatttacatcgtgacacgagatcagcaagatttagccccttctctataaagaaccgatggcaaagagacacaacaacaacagcaacaaacggcaaaaagagacaaagcgacgggcaaaactgtcaagagcagcggctccgttcgtggatcaggtgccgttataacgaggttaacgacccacatcgccatctccctctcatgccatctctctatctctttctctgtctcactcgcttggcataaacaaacattggcgtttaataacaaatgaaattaaattctaacagctcagctgcacgggtgaaaattggttttgggaaagcatggctatgtcgacagattattgacagccaacaaatagccggcggtgactgcgactttggctgttactgtgactttgactgtgacttagatagctggcgttgcacgcgatgttgttactggttgaaaccaggaacaggtttattgataagcgtagcccatagccccgggcattcccctccttggagttccacattctcaatggatgtcagtgataatgcattgtgattgaaacgaattgaaagagagaattgtggcttggccgttggctttgacttcgcttgac

SEQ ID NO: 25958 - DNA, 938 bp, DROSOPHILA
aaaatcattgtagtgcacggtgttgttattgttgtttttgttatgtaagcctaatgacaaggcaaaccgaaattgtcaacggatcgtcaatgggtttttgattaatgcgtgattttccgatttccaaagcccaattatattcgaaattatttgcattcggtacagtcatgccacaatcactacaatgaacactccacagacctcattaggagccgacgagggcccaatcaagatggcaattaccagcatcgcactcacctgcgcaaacgcggcattgtggccaagttacagcagcgatgatgcgccccccagccgctgcagcggtgggcgtggcctgaagtacctatcgggcgatgcgctgacggactcgctggactgcctgggtcccaataatgcgccatatccgagcgcggccgtggcgcgcacattctccaactggaacggaaactcgcgacgtggccgccagagcaaattgcccagcacactggacccagccataaccaccagtgctctgctgagggcctacgacgaggtgaacaacgaggccgtcggaagcagtcgctatggtaagtcgttcgctgaagaacgccacgccggcgcagcagtgcaagagcgagacgccggcgcgcctctgcaagacgcgctacaataccacggcgcccatgtacggagtgagcctcacctccggccagccggtgaccatcgtccagaagttccccgatctcctgcagcaggtggtcttcgaagtgtgcgaatcctctgagtgcgatgtggtccgcggcgagtgtacgcaaacctatgtgccctacctgttcctggtcattccgctcggcccggtgacgctgactggccaggattacgtgctggtggagagcggatgcgtgtgcaagcccaagtactcgacgggcgccgcccaggagccgaacatgataccgtag

SEQ ID NO: 25959 - protein, 176 aa, DROSOPHILA
MAITSIALTCANAALWPSYSSDDAPPSRCSGGRGLKYLSGDALTDSLDCLGPNNAPYPSAAVARTFSNWNGNSRRGRQSKLPSTLDPAITTSALLRAYDEVNNEAVGSSRYGKSFAEERHAGAAVQERDAGAPLQDALQYHGAHVRSEPHLRPAGDHRPEVPRSPAAGGLRSVRIL

SEQ ID NO: 25960 - DNA, 4124 bp, DROSOPHILA
gctgtgagttcaaagcaggggtcttgctaaataggccgacatttaataccactcgcgagcaaacagacaaatccctacaaatgattcacatgcattgttgttcttgttgttcttgctgctgctgttgttgttgttgtcgccaacttatcaacatatgatgttcgcccgtgtgcgtatgtgtcggtgtgcatcggtgtgtgcagcgcatcgttgtatgggtggccagcattttcgtgttttcttcttcgcatatgatttgcttttgggggcgggggctctgctagggcttccgcccagcggcggaatgcgccaccgggatggtcgggtacttacttcgaagcgagttctgatccggggacgcacaatgttcgcgcacaaagcctttcaccacacgaaatacaatgataattctctgcagcagaagcagcagcccactgagcagtgtgaccggagctttcgcagcggccgttctatcgatgctgggggcgggttatcgattatttgggcgccaactccagcccccacgcaccacagaggggttaaaactcaccccccccccccccgtaaaataaatgaattccttttttcaataatctattgccctttttttatgatatgaatgaaataagtgagatgaagacgtaaacaagaataacacaatcatcatcataaattgaaatttaagtcctcattaaaatctgcttttgaaatatttacttaacaaacgcaacttttgaattcgtgtcatagataaaactagtctttcaagctctgaaatgtcaattttgagggtagttttactttacgtccagttctaaggcattgtgaattgattttaaagttcctataaagtcacgtttgaatagctttaagtcacgtcacacatgtcccatgtttttttttttacacatttcaaagcaaacatctgattctttaaactcttggccaacaaatagatcaaccacttccattgcaaaagaaaacacatgtgttacgttctcggcttgtaattccgtagctaaacgtacagagtgttatgctaaaaggtaaaagtccttaaactcctgcgccttagtgggtcttggcggccagacgcttgtcgcgctcctccgcaatgctcagcttgacacccttgcccttaggcagggagatgtagggcttgttgcccttgccaatgatgaacacgttggtcaaacgggtggcgaacacatgaccttgcgagtccttaatgtgcacaatgtcgaaggaaccgggatgacgctcacggttgacaacggtgccgacacgtcccaaattcctgcctccggtgatcatgcagaggttgcctgtggagacggagaaatataccagttagttggaatcatacgacttggttaataatattgggcgactgtcattgcacgtaaaagttactgaagcgactttggaatgccgcatcagagaccgtcgtgacaaaaattgcttttggcttattgtttttgaaccacgcaactttcgaggagcgttttgtggtcttcgaaccagccaatgaacacgatgatctacgatagcggatgcttaccagaatcgaacttaatgtagtcggtgatcttgccagaggcaatgtccacctgcacggaatcgttggcgtggatcaggggatccgggtagcggatggtgcgaccgtcgtgtgtaaccaggaaaggaactcccttggctcccagctgggtcttcttgaccttgcacaacttgtactgcaaaagaagcaaagaaaatgtgggttaattttaagacgttttatttctacacaattgcactaccactttcatttaattgcattgtaattgcacgtaaaagttactcagacgactgtggaatgccgaatcagagaccgtcgtatcaaaaattgctttgggcttcgatttgaaccaatagacacatggcaacaagcggaaatcggtcttcgacgtagcccacagaattacaatataatgctttatactccttggtttcttttgtaattgcacgtaaaagttactgaatcaactgggatttgtcgaatcagagaccgtcgtatcaaaaattgctttgggcttcgttttgaaccaatcggcgcactattctacacgcaaaacggtcttcgacaaagccctttcgatatttaagttaattactttcggtaattagcataaagattgattttgtattccaaaataggtgaactatttatgttttaaagatgaagttagatgaatctaattcaagtgctcttgcatgaaaagaattcctagttgaggatgaaacctcagttaataattttagattttaactccatggttggaaagcgggaacctctggaagcacagactagataactcaccttggcctcctcggcggagatgcggtggatgacgaagcgtcccttcacgtcgtagaccagacggaagaactcaccggtcttctcgagggtgatgacatctaaaaaacgggcaatggagcccattagtatggagcacatttgaagcacactcttgccgagcacacaactcacccatgtagccagcgggataggtggggtcggtgcggacctttccatcgaccttaaccaggcgctgcatgacgatcttggtgacctcggcgccattgagggcgtacttcaagcggtttctcaagaagatcagcaggggcagcgactcacggagcttgtgtggaccggtcgagggacgcggggcgaagacgcctcccagcttgtccaacatccatgccttgggggcggctaaacgcttcaaatgcttcttggggccacgagcctgcaaagtgtaagtgggttttagccgttagtcaggtattccaaaggcaaagacaaacaatcgtgaccatatctccaccaccaacagatactcaccatgtttgattcactatattgaacgggcgatcactgcaaatagaacaatcaaacgttagttttgtgccagcattcgctcgccactgccagtgccgcatccgtggccagcaaatccccaatgccgggccttccattgacaaaacttagcacgtggctagctgcaaaaaatacacataccgtccgtcgggcaatacaacaggaaaaggaaaaggcagatttgcgggcggtgtggccagcgggcagttggcgtcgaataactaaatactggattgcggttaccgcgcagggttacttttgcgaggatgccttattatcgggggtattcctcagcccctgtatcaattagcttttgtcagctgtgacgcgatttaatgcttaaatgagaatataaataaagtatattgttataaaccgatgattgctctaatagagagaatcggctacccttaaatatacaatattttactttcatatgaatttatatacacgcaattaggtcttatcactgttatatagtcatgtcaaataaagtcaaatgtaaagttatttttacacagaagtctctcaaatatagggttagtaattaaaactggtctgctaaaagaacacttgaacgccagtgtgtatataacaagctgctcgtttattttcaaaggtgggactacacaatagaccataatatagttttggaaccatgaacgtttggtttcccttggattgtctcaatcgatttcgagttatgcagcatttgaattaatcgttccgaatcaaatataattatattttgcaaaatttttttaacaataagtattaaccttattagtaataacaaagttatatttaatacattatggacaaccctcattaaaatagcacatttaattacgtcgaaaaaaaatacccttactaaagtctaaacattggatacatcctgaaagaaataccataattgccagggctgcattgtgcgcaattaatcgtatttgaaaaagacacaagcaatcgaaatttaaacgaaacatcagttgggggtttggtaattttacatttgtttattttctcatttagttaatgcccttcaaacgcacaatttgctctttaggcattattaattacattctgtaaaacctacttataaattaaactgcggcaacaatacaatttgccaatcggatttacgcgcttgtttatgtttgcttgttttatgttttaaatgtgattttgttatgcttgtatacgg

SEQ ID NO: 25961 - DNA, 950 bp, DROSOPHILA
cccgctggccacaccgcccgcaaatctgccttttccttttcctgttgtattgcccgacggacgtgatcgcccgttcaatatagtgaatcaaacatggctcgtggccccaagaagcatttgaagcgtttagccgcccccaaggcatggatgttggacaagctgggaggcgtcttcgccccgcgtccctcgaccggtccacacaagctccgtgagtcgctgcccctgctgatcttcttgagaaaccgcttgaagtacgccctcaatggcgccgaggtcaccaagatcgtcatgcagcgcctggttaaggtcgatggaaaggtccgcaccgaccccacctatcccgctggctacatggatgtcatcaccctcgagaagaccggtgagttcttccgtctggtctacgacgtgaagggacgcttcgtcatccaccgcatctccgccgaggaggccaagtacaagttgtgcaaggtcaagaagacccagctgggagccaagggagttcctttcctggttacacacgacggtcgcaccatccgctacccggatcccctgatccacgccaacgattccgtgcaggtggacattgcctctggcaagatcaccgactacattaagttcgattctggcaacctctgcatgatcaccggaggcaggaatttgggacgtgtcggcaccgttgtcaaccgtgagcgtcatcccggttccttcgacattgtgcacattaaggactcgcaaggtcatgtgttcgccacccgtttgaccaacgtgttcatcattggcaagggcaacaagccctacatctccctgcctaagggcaagggtgtcaagctgagcattgcggaggagcgcgacaagcgtctggccgccaagacccactaaggcgcaggagtttaaggacttttaccttttagcataacactctgtacgtttagctacggaattacaagccg

SEQ ID NO: 25962 - protein, 261 aa, DROSOPHILA; identical to SEQ ID NO: 23601

SEQ ID NO: 25963 - DNA, 2288 bp, DROSOPHILA
tctactatcaagggttaccacctctaaaatggagacattctaatcaggatcatcgtggtagtcgatccatctgagcacgttgtatcatcgcattgctcgattgctatattttaataatatagtggcataaaaagtagattaaaacttgtttgattttagctcttgcttaggttaagatatccaagtgcgagtttaatgtcctagtgtgttccacatttgcattgtcttcatttgtttctgcggtgatgaggacagcactgttgtcgtcatagtctccttgttgggccattgtccggactccaatccccggactcctatctccggactcctatctccggactcctgactcattgttggccctttgtttttgcgcctcgcgtgtctaataaaagcgcatcacaatgtgggtcattgtacgacgacacaggccagtcggcatcacatgactttgcatttgtcagcagcatgcaactgctgcaacatcaacacataaagcgctgctaattgcaaacgttcacatgccgcacaatcggcaagggccatgcggagaaaatatttattttccgatttttttaatttaaatacacgaaaaacagcatgagaaagttattttttgtaattgtaacgatttgctattttgttattcattaagcaagtacgcatatcggtaaatttttttcagtgtcttcactctttgttccgcataagtctgcaactgctgcaaaaggagtaaaggggggaaaatctatggaaagtgtgacaggcatagtaaatcgatatggactcctaaataattcattcctggattaattatgattgcctctaaagtcttcctgcttcatcaattcacttaacgcaagtaaacgacacatacttttgagcagaattggacatttgaaattgtcccccaaaaataggcaataagaagatgttgcacatattatctacatgtatctacatctgagcaatgtaaaatgtaagacaaaacgttagggattttaagacattttggtgggtgggtttattttatattaagctcaaatattcatatcttaacatcttccaccccaggcgggccccaaattaagacggcaccacttatcacctacgaaagaaatggttacgctggttaaatggttaaatgtcggaactggagaggaaacaacttacgaggattggggcttggaattggaaactttgtaggcttcctattccacggccattcccaggcctggaccaagccgagtacgcaaacgagaaccaagaatagagctagagttttcatttttacaccgacattcaagctaatcggctttttataggtctgaacactaaataaaatatgcgtagcttcttaataggattacgaatgacacggttaaggtttttcacacttttaaattatccaacatctaagtcaaagtgatcctttgacatttagaggacatatttacttaaattctattgctataaaacaacagatagtattttaaataaatatttcattatttgctcattaaataatccccatacgcactacttacattttattgtaatacatattatctattccacgtgaagcatattgcattttcaagttagaatagcgtgaccactatttgctcaactagagtaatacatatattaaaatacgtttttagtatgcgaattttcggccttatttgaccttgacatccgcgtattcgcgtgtgtgtgtggcaaatataagctatgtgactaagggacttttatgtttcgatagccgcgttgtctaaaaagttgcaccagcaactgcggaatagaattagatttacccgagactaggagacccagaatatcgccattcggtgaccacaatatgtcttctttggccaggaaccgacattaacatgctgtggtaatcaccacgcttcgggccatggggtttatggttgcaattcgatggtccggtaaccgcagatgtaagagtgaaaggccggccaagaacttgcagctggtttttgcactgctctggtctttgaattgctaacctgattcaatgagcctgaaaatccatcacttcctctgcttgccaacttatcttagcagaatgtgggcctttccttttgccacttttttggccaccaccgaaaggcaaaaactcgattgagcagcagccaaccttattcctgtatggcaatactttctaaaggcttagccattggccgcaattgttttattacaaattggaaaaatgtctcaaaagcgcctagagaataatcgcgttgcatacatggggaatctataaa

SEQ ID NO: 25964 - DNA, 223 bp, DROSOPHILA
aaaatgaaaactctagctctattcttggttctcgtttgcgtactcggcttggtccaggcctgggaatggccgtggaataggaagcctacaaagtttccaattccaagccccaatcctcgtgataagtggtgccgtcttaatttggggcccgcctggggtggaagatgttaagatatgaatatttgagcttaatataaaataaacccacccaccaaaatgtctt

SEQ ID NO: 25965 - protein, 55 aa, DROSOPHILA
MKTLALFLVLVCVLGLVQAWEWPWNRKPTKFPIPSPNPRDKWCRLNLGPAWGGRC

SEQ ID NO: 25966 - DNA, 2173 bp, DROSOPHILA
gtgatatggagtccgctaaacgttccactcgagtataaattacagccgtcttccgcttcaaaaatgccgccctgtttgcatcagcgttaccagaattttcagaaggcattggcaacaggaacaataacaaaacagcaggaacagcgactctaaattcggtgcaagcgggaagatgagcgcaaagaagaattagcggcaacttccgttatttggctaaaaaaaaaactattgtacaacgcactatgcatcaacagccatacaattaaagttaaagctttaaacagcactatatgatttgctatatatacaatacatacactgcgcgtcatcagattagctcaccctgcacggctccgtttcttcttatttctagtattttgccattgcacgaaaattcgagaatgttgttgttttttgttaagttatattctctctctctttgagaataaaaaaagtggtcacgtgaacactctatacagttttgattaccttccataatttaaaaggtacgcactcagagacaacagcgaattaattaattatttttaaacagctttgcaagatttgcattatttattgtttatgcagaactcacgtcggggtcaccaagtgttgagctaataggctttctttaagctatttttgtgcaatgaaaaggcacggtctataagagtttattggtttcagataaagagattctgcatcaaggcgcacgtgcataggtaacaaaagcgaatgatattgagcgataatgagttgcagagcgaacaacagaacgctaagccaaatgtgtaggtctgagagtacaagagagaaagagagagagagagagaacgcgaagagggagatcttagatgctcacgcacctgatctgcatagataacgatgatattgctgcacagctgaggtgcagtaaaatttatccgtgccctcacagtcactttaaaatttacaagctttacaaacgtttaatatcgccgaccttcttgtataaatttatctaattatgttttgagtccctatatgcaataaatataaatgtaaaatatacaaacttattgcacggaagaacacaaatgccgcaacatttttccattccacttaaatttttttctgcttctctcatgtctgcattaatttgatccattccttcttcaatacgatccagttgttctaaaaaaaaaaaatatatatatagaattattatataaaaagattacgaaatatgcaacattattactatcgttttttgctgctcaaacagctgacttattttttagcaaaaccaataaacgtgaaaaaatgtcttttgtatttccaattacttgttttgaatccaggagaaagcagaattttgctgctagcaatcaacagtaaacagctatttaagctgttttcctgacaacagattggccacctttttaaccgttttaatacctatgctcgcaattaatttttcatattattaattaattaataattttaacaaaaaaagatttttttaagacaacaatacccgttttacaaatcgcaaaaattttacgagcattgattttgcgattttaaaatcgcaatcgtacaccgtttaagaattcgattcgaaacatgcccgactgagtcaatgatgtttaagatgtttcagccgattgggaaacatttcccattccaaaaatacctcaagaaattaaatcatttttaggcttatgcagatattaccgcaagttcattctatattttgcaaaaatagcaaaacctctcaccctattaacttgcgtcaaataaggagaaaaatttaaatatatattatataataattctatatataaattatattacactttaatttaaaaatagaattttattttgatgtgaatttattcaactccaaattgtgactgaacagaaaagattttagaatacctttgctagctgtgggttttaggcgctgacgcggcagagctctgcagatctggcttgaactgattatgatctgcagtgtcagcgatttgtcatcaagggccaaaagtgcgcacgcaaaacacacagcggacgatgttggtggcatttgcgacgtcttgagcggatgtttagattattgaactaaacaatgtattacattgttgcagttttttaggttggattgcttggataggttgcattcttgttatatatt

SEQ ID NO: 25967 - DNA, 173 bp, DROSOPHILA
aacaactggatcgtattgaagaaggaatggatcaaattaatgcagacatgagagaagcagaaaaaaatttaagtggaatggaaaaatgttgcggcatttgtgttcttccgtgcaataagtttgtatattttacatttatatttattgcatatagggactcaaaacataattag

SEQ ID NO: 25968 - protein, 48 aa, DROSOPHILA
MDQINADMREAEKNLSGMEKCCGICVLPCNKFVYFTFIFIAYRDSKHN

SEQ ID NO: 25969 - DNA, 12509 bp, DROSOPHILA
tatttttgtaaagtgagatgtaaatatatttttgccgagttacaatgttatttatttcttcaattgcaatcataaataaaaccgcagaaattggcgaaccttgcggaattacattgtgtaaaatgtttgaattcgatgtgacattgtttattcgaaccctggtagttccgccgtccagggcggccatgctgcaccccgggctataagacggatgcaaagtacagtacgctgtcatcaagtctgatcaccgcttccgaaataaagccttctgcccagctctcttaaacaatattaagcttagctttaattagttgacagccttacaaagaatctaaacgaattccaaaaatcttaaacacaggtggcgagcacgcaaaacggaataaatatttatttatttatttctctatgtaagctaatggccatgatattaagattaagatataaaaatattttttgaatcttacctagctttagtgtattggatcaacctaatatcgaaataaaacagaatgcgaattaaaccaatcaatgctactgtatccatagcaaaagttaaaaatgtttttttttttttaattttcatcccatacaggtcatcctataagggaacgtgccctctccaaaagtcacttcattaaaataaagttttaattttaaagaaatattctacaaccaatttttttattaatgttattgtaactgatttgttttgttcccaattaaagaataatattttcttctcattttctttttatcttatatgctttaaaatttaaaattaaattataaattacattcctggtaaacccgatataataatttgtttttaataattctttacactaaagagctggacctgttgcttataatattgtcaaattggttcacatatggaaccaatttcaccgaaaaactgatctgtgggaacatggtataacaaagttgacacgaatgtttatgttttatatacaggcaaaaattattatcaccgctgttgtttgctccatatataattacaattatattcctaaagaaacgtaaatgtaatggctgagagtgtcataacctaataacgatcacgttcagtgtcttattggtgtgaactttattccggaatttgtgttgcgtttaagtctgatgccatgtagaaataatggttatggctttcagatggcaacatcgccttttaatctaatatgaggcctacaattagaatatgcagaattcaaaaagtgtttgtttataaattaaagcgaaagcaagacgatgagcatctgctgttagtgtggggagtgtttgacgtattggtgttcgtgtgtgtatatagaaagtgcgagcatcaggcgttggcttgccagcgatgtctggcattacattgaccaaattaactcaagaacgaatttccattccaaacaacaatgtcatcacgaacggcgtcgaaaacaacatagatagtgacacgcttagtggtactctgactcatcttatggaagagcatcgcacgcgggtgggagcggtaactggaccagaagcagcgaccacgtctacagacggcctaatatcgaatggagcagagcgactgcgacttcagggcagtcggcttcagacctcgcgctttgcttgctttcgatgttgcggaaatattatcacatatctagtaaggctgcgtagtacccctgaggaactggagcagcgctacaagtccaaagagattgataagttcctggaaaaagaaaaacacacctttcgacgtcaggtaaggtgatttagggatatcgatttctaacccttgctgttggttattttatttaaatgttaacaacgaagtaaaggagatattcgacaaattaaagtctatgtacaatggcggaaaaattataatgtgtttaaaatgtaatttctgtacaatgttataagcatatatttaatttaaaaagttacgtttttttgctaacaattctagaattatacgtatgtgttcttaattaacaggactaggcaagtcggtcgagtagtatatatgtacatacatacatacatacatacaacaagcgctatatatttgtaaccgaaaaatataaaaacaagagaaatcctatagttgtgagctccgcaagtataagatacacgctacttaggtaatggaagacttcctacttcttgaggcccgtcccgtctcgagcacgaaacctagtcccaaaaaaagcccggggccctgcccaagctaaacacgaacaaattaaaaaataaaaacaatgcaattttttttaatttaaagtatgtcggttttcttatatttatatttcttatattttgtaaacaaagttgattgcaaaaaacttaatatttagtacagttttggtgttttaaacataatttatgacaagtttttatttaaaaatatttttttttttaaattagaacattttaaacgtgtacatcgctcatttaatacaattccagaggtagaaaataatcttttgctattcgctgagcttgccggaatggcaattcaataacttgagttcactacatttccaaaattctaacacattttggtctgaagtagctgcacagccatttaaatatttttctatttcaatatcataagaatttagttgtaactaagtttttttgaaaaatttttaatcctgaaattctgcaaacagtcctaacccctttttatctgggcttgcagttcttaatcctataaaactcctcatcactttgcatttctgaaagcattgctttgacagttacaattacattctccttaacttttggcgataagcaacacatttccttaacgggagaatttaagaagagtccaacataatgtgccgtttatggtgcacatcttttatgtaaagaatttaacgtattatttttcagctgaattatggtttcagaatcgagcatttcactggcgcacatctttaatactttctccgatcacaaacaaaatagatttatcgatattagaatccaaactgtattcttccataatttccttaacgttattgaggatgttctcgcctgttagattgtgacaaacaagtttaactttcggttctgcctgcgggcttttttcttagggcacgaaagacgaatttgaggcccgaacccaatttttttggcaaaggcccgcgggccttgaaataaagcccggcccgcgctgcatcatcatttaaaaaacattataatggtccacattacaaaatttttgccaggcacagtctatcaaatacttttgcaaaacggacttaattgttataggcattttttaaaataaatctccattcaagaacaacattttgttttttataagcatgcagagtttttttcaatgacttgttcaagggtaatagtttcttgttcacagaaagggtaaggagtttactttgggtgagtcagggaatgtttttaaatgtcttgtttttgaaaaaacaattgaagatatttcatggaatttcttcaccggccccaaccaggtctaattttctactttgacgtgttagtcgatttttctcggaaacgaacaaggttttagaccgataattcggttatgagcataacacaaacttttgcacatatattttgttaatccattcataaaacaaattaacaatataaatcttgctccatctcttatatttcgtgcaatggaaagaagaggtttggacaagaggctagtttgattagaaacggtcggacaagcatgaatatttcgattcgcttgttcatattgatgaataatatacatatgtacactgcgcctcaccaggttagcgcaccttgagtaaaaatctttgatgtgagacatttagaaaactgcttaagcgaaagtttttgaaattttttcccttaaaagttgtaaaatttcataaatgaaaagtttatatgggatgcagtttgttgtttatagatttttgttgaaataaaaaagaaaaacaaaaacaccagaaaaaaaacatcaggatagcgcccctatgacaatttaggtttttttttattaatttcgaaaaaagttagatgattatcacttaaatgtttaaaatctaatatttttaaagaaaactaataattagttgcttctcctttgttttcaaggacttcacacattcgtctgggaagtgaatcatatattttttctaggtaatccaaagtaatcgtagaccaaccgaacttttttccggtgatcgatttctcttgagtgacatattgcttaccaccctcgtataccttcccagccaaccatccccacacgttttctattgtattaaggtcctgggagtatagtggccattccataacttttacattatcgcttcgaatccatgtttttaccgaacgtgtggacattgtcgtgctgaaaatgccattctagatttccaaaaacgttcttaaagtagggaaatgcagtttttaatacacacttataatctttcgtgtttatttttggtgttaaaaacttccaatcacaggggacataataggatactgcgccccataccatgacaccttcaacccgactgtgaataagatccaaaatgtgctcctctttacgcaaatcatgatagtaatgacaattgccgtctggttcctccaaattaaatttcatctcgtccgaaaattcgacataatgccactccttagaccaggtcatgtgagctcgagcaaaactcaggcgtgcttttttcgcaacttattaagagttgttttttttttttgcagtttttcgtgttttaaatgataagctttcttaatcaccctttgaattaacgatttcaactgcttttcaccacttttttttcgaattttggcggaggactcgtgggaattgcaatgtattcgacatggacatgcgatctgccgcgttaaagacaaggttattgccgcttttatagttctttccataagtttgctcgtttttaataaaattgtctacagttttgagatgtctgtcggttttttctgcaattttatgaaaaggcagcccgcattcaaagaaagctatgatttcgaatttttcctgcaaggataacagcgtccctcttcttattttttcgctaaattagagcaaatttttcaacttaacagcatacaacattgtctctttgttgacctacctttcaaattatggaagttattcaaaagtaaaacaaagcagaattagaaagataacggttcttctcaggacctcttttttatactcaaagagagagggagtatcagtaaacaaaaaacaataacattgatatattttcgtgcaatggctaaatacagaacataaaaagaaacggagccatgcaggggcgctaatctgatgacgcgcagtgtatatactttatatcaaataattatggtagaaaatgtaacctgcgtttaaacaaatcaaaaaaccctctccaatgatataagaagtatgtattaatcgctttgtttaaatctagccaaaacctacagcttgcctaaacagaagctggcttcggaaaaatcaaatttgtgaaattttaatgctgaaatcgtttgcccaccaattttttttgcccacgtccagttttcgaatttgaaatttcgataaggtttaaaaatgttcgaaaatcaaaaagttgactttttcacaatcacaataacatcgtttgcccaccatttagaattttgaaaaaagctgtactttagaaaatacatataaaggcaatatcggtatactcagagaatacgtttgccaaactcataaattaaatatcagcattaaaaaacgtttgccaaaccataaaaaaaatgtaggcgatcatctgcaagacaatatatgcataactgtattgtgaataattaataataataacaacataaaaatataataattaaatacaaagatggaaatatgtacctatgtatggaaatatgcttctatacctttcgtcgtttgcttttctgcttactcttactttcgcagagtacgaaaatgtacatacatacaaaatgggcactttagttccagcagcaactcactcaaaggatacttttccatatacacctgtgttcaatgaaatagcagcgcaagagaaactaataaatacacaggtattttcccatgtccttttccggaatcgactttttattccacttatttttgtaaaatggaatgtgtagatagaaaaaaaaagaaaatcccgtttgtttttcatgttttacttattttctttacattcttgagcaaaatttacaactttgttcattattggaatagcagtttcagtttttgacctacgtaaagtcaagaatttaagcatatattctaaacagagattttggttacgttaatttgaatatttaaaagggcaataaattaaagaaaatatataaaaacaattctattttagtgtgtagaggacagcactgctcccaagagaatagaattttaattagtaagctaagaaaggaagggaaacataaataaattcgaaaaatctttgattccaattccattaaatatgaattgaagcccgaaccgtggttccatatgtacaaccacagatatagaggatcgacgcattgttacttacagcaaagtcaatccttttgcatcctctagggacgtaaagactgagctgaactgggaaatcagagatggtataatttggagacgactactaaatcaaaatttaagtgcgaggagtccacgaatggcgcccctacatagcccaaggcatatttaggcacggttaaacttctctaaaacctacctaaactggccagtcaaactggactgatgagtcaaaaatagtgctatttggtggaactggtttaccatagtatgtccgacgacctccactcacggagtaccacccaaaacacccactcaagactttcaatcatggtggacgtaaaatcctggtatgggtttgttttctttttacaatgttatgagtccaaaacatttgatttatggtattatagaccaaaacgcatatgtaaatatatttagtgatgtcctactgtcatatactgaattcaatatttccttaaaatggacattccaactggataacgatccgaaacacgtaaacagatcggtttacccaaaataaaatgtaggcaaaaattacccccaaacgttgccaggacctggtggactccatgccgcgtaggtgtaaggctgtgctggcaaacaaagacattagaccctaattcacacattaaaaaggaaaactaagttagttctaaataatgttgaattttattagtattttttcatagcactgctatttcagtgaacatttcttcctattatgttgttttaatctatatattcgaaactatttaagaaataagactgaaacatttgttgaattgtttaaaattaaataactaataatattaatattaattatattatattagctttatattgttttgattttgttccatatatttgttcgatgtgtttgcctaaatatgtattgtatatgtcgcgcagcgagtttcgaacgcatcgaaggtctacacacaattaatttgtgtcactcacttcttctccgtgctacccttcgaaccacactcggcgacagcgaccacacgctgccgccgcgctgtaacgggagatgccaaagctacaaaaatacagccgaccaatagcaaatatcaatgatttccccgaactgatggaattattattcttgtgaaatattctagcacatccaccagcttacaaaattatgcaccgacatatattaaaacaaagtttcgggcgtggacgttttgggcagtattagggagttagaatgggcgtggcaaaagttttggcaaattgatagaaatttacaagactaaaaagtagcaacacatttttcaaatgtgtaggcgtgccagttttgtgggctttagagtgggcggggcaacaaacttgtgctgcgtctgtctctggaatctgcaataaaatcttaattttctaccttttatagttcctgagatatcgaccttaatacgaacagacggacatggctcagatcgactcggctattgatcctgatcaagaatatatataaagtataaagtatacggtcgcaattacttccttctgccttctgaatttagtatacccatttactcttgtgaactggacgtgtgaaaaaactaattggtgggcaaaaatgcacaaacgattccagctttaaaatttcaaaaattcgatttttccgaacccagttttttgagctaataccaaagacattagaataacaagatctttttcatttaaagctccgtaaagcaaaaagtatttattttaacagaatagcgtttaggctgacagcagtctgcgaagcgataatatttgggagagaaggagcgataaaccactgcatacatttttaagtgcactcgctcgaaagatgtcagagcgagagcgaagcgagttgcgagctcaagccataaagcgagagagcagtttgcaacctgctttatcgcttcaactcgctcagagcgtacgactgttttgttgtattctgtgctttaattgccgtttatttttaaaacacgtttttttgttttgttttgttccatttagtgcttgttgttaattatgttattaattataatataatatatatataatagtagttatataatagtagttatattgtagtagttatattatataataattataattaaacatgttattattaatttttggcaaggcagtatagggtctttaacaaaatttggacaattcttcgtcaaacgacttataattttattgaaaatatgattaaaagtcgaaatagacaccccctaatagttaaagaaactttctgtaaatataagtcattatataaagtattaaatttgcctttttcatttctattgaagggaggtggaagccagttttttttaacagatagctaatagttgcgcttgatgcaaaaaatcctcgtccgaatccaccacgatcacattaataactaaaggatagctcgcttctcgcaaagctctcactctgccatcttctagctttgcccaaagcttctcggttcgccgtcagccttaagatatgtagggattattttaagcgcatttgaatgttaccaacttcacctttattaactttggaccttggaatattatgtgaaagtgcagttttgtgtttgccctatactctagaaaagttttaaacaagcggtaagacaaaaatttcatttttagagtgcaggctttgcccgtatttaaatatttttatttaatttacattttaagagtaaagaaaagaagaaaagaaaatcacaagtctttggcgtcaggggttcacaagtaatatgcgtaggaagttaagctatttgtagctgtttattcgatatacgcttacctaatgctgtctgttttatgtacaaaagggatttcaagacacaaaaataacattttggcactggtaaaggtattatttttagaaatttaaattattccatgttataaagccaaaatgttttgaacaattatgttacttaaaaaaatacttgaaccaatgaaattattcaggtgtggaacaatattcaccaatcgtcaagaataatcttatcagggtactctaaacaagtatatatttttttgatatttacatatacctgctcgaatcaagatcacaggcccatcctggccatgtcccctcgtatgagctccgagatctcatgaagcttacatagattaggcatgaagatcccaaaggcagagacgtagcgccagtttaattgctgacttcggcacgcccacatttatttttctccccaatttctatatatatgccagaaaaattgtttaacgtctgatagttggtgaacttgacagcgttctatcgggaagctataccttatgcaacacaaacttgatatactgacatggcgaaattcggttctaggttaaactgctgcttttaggtgctggggaatctggaaaatcaacttttcttaaacaaatgcgaatcattcatggagttaactttgattatgaactgttgctggaataccaaagtgtcatataccaaaacgttataataggtacgtatatatatttataccgaagaggctctgtcttagaaaactaacctttaaggtatgcaagtcttgttggacgctcgcgaaaaattaaacattgcgtggggaagtgacggcagagaacaggatgcttatgatgccaaattaatggaatgtaattcactagacgtacccaagtttatggagtatgcaccaccaataagtcgactgtggcaagatcgtggcattagaagagcttttgaaagaagacgtgaatttcaaattgtaagcttactggcagcacaattacataatatactttaaaaattatgtttttagagcgattctgtaagctatttcctagacgagattcaacggctagctacacctgattatgtgccaacgcacaaggacatattacattgccggaaggcaactaagggtgtttatgagttttgtgtgaaagttcaggtgtgtgaattaaataaaaatataatattacctctaaagtctcggttattttcagaacattccatttgtgttcgttgatgttggtggacagcgaactcaacgtcaaaaatggactagatgttttgatagctccgtaacatccattatatttctcgtatctagttcggagttcgatcaagttcttgcggaagacaggtaaattattatcaattaacgattattaattaaaaattatcgttacagaaaaaccaatcgtctcgaagagtcaaagaatatatttgatacaattgtcaacaacgcgacatttaaaggaatatcaattattttatttctgaacaaaacagacttgcttgaacaaaaagtttgcaatcctgagactgacattcgctggtactatccgcacttcaacggaaatccacactcagttttagatgttcagaacttcatactacaaatgtttatgagcgttcgtcgcagtagtagcataagtaggatctaccatcattttaccacagccatagatacgcgtaatattaatgttgtctttaattctgttaaggacacaatactgcagcgtaaccttaatgctcttatgcttcagtagtaaccaccattcttataaacaaaaatgaagagtaagaacttgcagttattttaaacgacccatgaacagaattttacaatcgtgagactgacccttgctgaagctatttgcaattcaaagggaaatgcacatggttttcaatgccttagacacgtgaagttaagctacagtgaaatccttcggtaactatgataaataactatatataatgataaaaaccgagactacagcattttaatatgcatatagacttatttaaacccatcggcaaacttagttatcgtggtatttgtgatataataatattaataacaactttttaacatatgcattttatatggtagcatatgttgatttatattaatattatcgatatattaaaacggatgttgtcaatatcaaaaatattgttttatatgtattttgcgtgcatcttcgttttgaaaagccattaaccaatttatgtgagattttaaaagcagctgaaatatttttaaatggtcgttaaaagtaacagatgttttatatggtagcatctgttgatttctttgaaaatgaatgaaatattgaagcggatgttacaatatactacacaaaattgatcgttaagtatatcgtaggcgttttcgttttaagaagctaatcaccgctgtgcgtcaaatttaaaaagcagcagacacttttttacgtgggtgataaaagttatatcgacttctaatggaatgatgtgactgtataccacactttaaaacggatttaaaataaattaaaaaattatatggaaatttaatatatacacctctatccatctatatctgatgcaatgtggaagtaataataggaattggtagtcgtattcatattactttatgttttaaatatcatgtgcaacacagaaaatacacggaatttatacctactaagaatgaacaagatttttaaactgctcaataaaataagtctacagaataaatgaaatttaaacgttaaattttaatctaactaggtgtagagttgaacattttagtctcaatttgttgtgttgttatcatgttaattcgtattcaaaacaatatatttttgtattgctttatttgtaaatggttcttactaacatttaattaaattgttgcattgcatagaaatgttaaaactaaaatgttagtatagtatagtataaagagttttcttattttcaaatctaattctacctgttactcgtagggtaaaagggtaaacaagattcgtttaagtatgtaacagaaggcagtatatatattatacattatacaaataagacagaatgttatagtcgagttccccaaatatcagatacctgttactcagctaatgtgaatgcgaacgcgaattttcatcattttattgggatatcgaaagat

SEQ ID NO: 25970 - DNA, 2003 bp, DROSOPHILA
tttgctccatatataattacaattatattcctaaagaaacgtaaatgtaatggctgagagtgtcataacctaataacgatcacgttcagtgtcttattggtgtgaactttattccggaatttgtgttgcgtttaagtctgatgccatgtagaaataatggttatggctttcagatggcaacatcgccttttaatctaatatgaggcctacaattagaatatgcagaattcaaaaagtgtttgtttataaattaaagcgaaagcaagacgatgagcatctgctgttagtgtggggagtgtttgacgtattggtgttcgtgtgtgtatatagaaagtgcgagcatcaggcgttggcttgccagcgatgtctggcattacattgaccaaattaactcaagaacgaatttccattccaaacaacaatgtcatcacgaacggcgtcgaaaacaacatagatagtgacacgcttagtggtactctgactcatcttatggaagagcatcgcacgcgggtgggagcggtaactggaccagaagcagcgaccacgtctacagacggcctaatatcgaatggagcagagcgactgcgacttcagggcagtcggcttcagacctcgcgctttgcttgctttcgatgttgcggaaatattatcacatatctagtaaggctgcgtagtacccctgaggaactggagcagcgctacaagtccaaagagattgataagttcctggaaaaagaaaaacacacctttcgacgtcaggtaagggttaaactgctgcttttaggtgctggggaatctggaaaatcaacttttcttaaacaaatgcgaatcattcatggagttaactttgattatgaactgttgctggaataccaaagtgtcatataccaaaacgttataataggtatgcaagtcttgttggacgctcgcgaaaaattaaacattgcgtggggaagtgacggcagagaacaggatgcttatgatgccaaattaatggaatgtaattcactagacgtacccaagtttatggagtatgcaccaccaataagtcgactgtggcaagatcgtggcattagaagagcttttgaaagaagacgtgaatttcaaattagcgattctgtaagctatttcctagacgagattcaacggctagctacacctgattatgtgccaacgcacaaggacatattacattgccggaaggcaactaagggtgtttatgagttttgtgtgaaagttcagaaaaaccaatcgtctcgaagagtcaaagaatatatttgatacaattgtcaacaacgcgacatttaaaggaatatcaattattttatttctgaacaaaacagacttgcttgaacaaaaagtttgcaatcctgagactgacattcgctggtactatccgcacttcaacggaaatccacactcagttttagatgttcagaacttcatactacaaatgtttatgagcgttcgtcgcagtagtagcataagtaggatctaccatcattttaccacagccatagatacgcgtaatattaatgttgtctttaattctgttaaggacacaatactgcagcgtaaccttaatgctcttatgcttcagtagtaaccaccattcttataaacaaaaatgaagagtaagaacttgcagttattttaaacgacccatgaacagaattttacaatcgtgagactgacccttgctgaagctatttgcaattcaaagggaaatgcacatggttttcaatgccttagacacgtgaagttaagctacagtgaaatccttcggtaactatgataaataactatatataatgataaaaaccgagactacagcattttaatatgcatatagacttatttaaacccatcggcaaacttagttatcgtggtatttgtgatataataatattaataacaactttttaacatatgcattttatatggtagcatatgttgatttatattaatattatcgatatattaaaacggatgttgtcaatatc

SEQ ID NO: 25971 - protein, 305 aa, DROSOPHILA
MSGITLTKLTQERISIPNNNVITNGVENNIDSDTLSGTLTHLMEEHRTRVGAVTGPEAATTSTDGLISNGAERLRLQGSRLQTSRFACFRCCGNIITYLVRLRSTPEELEQRYKSKEIDKFLEKEKHTFRRQVRVKLLLLGAGESGKSTFLKQMRIIHGVNFDYELLLEYQSVIYQNVIIGMQVLLDAREKLNIAWGSDGREQDAYDAKLMECNSLDVPKFMEYAPPISRLWQDRGIRRAFERRREFQISDSVSYFLDEIQRLATPDYVPTHKDILHCRKATKGVYEFCVKVQKNQSSRRVKEYI

SEQ ID NO: 25972 - DNA, 7966 bp, DROSOPHILA
tgccgcccggccagcgccccacatccgagctgcgcaccatcacagccacagccatgcccacatgcatctgcatcccggcatggagcagcacctgggccccagtcttcagcagcaacagcagccgccaccgccgccccagcagcctccacatcgcgacctccacgcacggtaagccatctatgtcgttgacgctatcaggaataacaattaaaccagataatgcttcatccttcagtcaaataagagtagtatcagtttattaaattgtgataccttttggagttcggttccaatttagcagttctaactatgtttggagttaaacaagatggtacgccttgttggttcagtttgttttcggaaatggttatcatccccttcattcaatcgaaactccatgtaaacaagaaggggtaacatgggttaaataggttttccaagtctagaagaattcccatctatctatgtacaggaaggaacttttagataggtgtgttattaatatgggataacatcttatagagtttcctaatctagatcgagatctcagtataaattgtttaggcaataatgtaccactagccactggttggatctcatggactcagtgtgaatctcaggtgaggaaaatgtatctccctggcttggttggatcctagagagattccacatcgactcgaaacgccagcttgtctgagctttatgcgttgcggcaattatgttaattcctgtcactgacaattggtgtgagactcatcatcccattttctcaactcataaattataatttcagtggctctttgttctttcgcgctcagcatgacttccgctcgatgataacgggtttgccctgccgactgcgctgcaattatccttgacgttcgcgagtatccttcggctcggcctccagtagttcaggctcctcgtattgtctacgatcatatgtttcgccaaactctctgcaaactgctcatccagttccgcattcagttgcgttttgcctgccggtcggatcgggtcgcacatgaatttattaccgacgttcgctgattctaacgtacatttgcgtacgatcttttaacgatcatgatagactttcatcagtgccaagtgagaggtgaaatatgcaagaagattaaagttatagaaactgaagcgggatctaataagttcgcaagacaataaattaaagaactcgtaaagataagagatgagattttgcaaatgaaatcaaatcctcttaaccatataacttgcaagtgaaaggtacgaaaggaataaacttcagatattactacagatttgtattagcctgaaatatggattatcacattgctcagacttgttttcaaaaaagagtgtccataaacattaagagcattcaattaattacctttcccttacgcaggacatttttatcgcatatcaactgatcctaatcacaaattgcccatatcaatgttaatttgaaggcttgtttccgtactgatttagcgattataaattgccaaaaatatttccttgtcttgtgaaatgtacgaggctgtaggtaaaggtcgctagagtgctctcctaccctcgatcattgggaaaggaaaggtagggagcggttgcaggagcagggtgtcgcagtaggtgcgtctcaattgaaactgacagttggcgaaaaatgacacgatgcgtaagagaatgcggcttttgtgctttgttaggattttgtccattgttcggcgtggtcgctgttgtctgctattccgcaggaacaacaacatacggcagagggttggggggggccacgaagcttctaggacctctctcgttggtgtttttgtttttcccgtgcgccagtcgatgtacacttttgtctcgatggcctctataatcctcttggtgtgcattgtttgctgatataaccgcagaagccagcgcatccgccccaggagctcttacttgtggccatcgattaaccaatttgcttgctctatcctccgttttgcagtctgaatcatcaccatctccacgctcagcagcagcagcagcaacagacgtcgtcgaaccaagccggcgccgtcgctgcggctggggctgcctatcaccacggcaacatcaacagcaacagcggcagcaacatctccagcaacagcaaccagatgcagaagatccgccaacagcaccagcacttgagtagcagcaacggccttcttggcaatcaacctcctggtccgccgccacaggccttcaatccattggcgggcaatccggcagctctcgcctacaatcagcttcctccgcatccgccgcaccacatggccgcccatctgggcagctatgccgctccaccgcctcactattacatgagccaggcgaagcccgcgaaatataatcactatggcagcaatgcaaacagcaacagcggcagcaacaacagcaacagcaactatgcccccaaggccatactgcagaatacgtataggaatcagaaggtggtggttccaccagtggtgcaggaagtaacccccgtgccggaaccgccagtgaccaccaataatgccaccaccaacagcaccagcaacagcacagtcatagctagcgagcctgtaacccaagaggatacttctcagaagccggagactagacaggagccagcttcagcggacgatcatgtcagcacggggaatatcgatgctacgggagcactgtccaacgaggacacgagcagttcaggacgcgggggcaaggacaagaccccaatgtgcctggtcaatgagttggccaggtacaacaagatcacgcatcaatatcggttgactgaagaacgaggacctgcccactgcaagaccttcacggtgacactgatgctgggcgatgaggagtactcggcggacggtttcaagattaagaaagcgcaacatttggcggctagtaaggctatcgaggaaaccatgtacaagcatccgccgccgaagattcgccgcagcgaagaaggcggtcccatgcgcacacacattacgccgacggtggaattgaatgccctggccatgaagttgggacagcgtaccttctacctgctggatcccactcagattcctcccacggattccatagtgccgccggagtttgccggcggtcatttactaactgcgccaggaccagggatgccgcaaccacctccaccacctgcttacgctctccgccagcggcttggcaatggattcgtgcccattccatcgcagccgatgcatccgcatttctttcatggaccaggtcagcgaccgtttcctccgaagtttccatcacgctttgcgctgccaccgcctctcggagctcatgtacatcatggaccgaatggcccatttccatccgtgcctacgccacccagcaaaatcaccctgtttgtgggcaagcagaagtttgtgggcatcggacgcacactgcagcaagcgaaacatgacgctgcggcgagagcgctgcaggttctcaagacacaggccatatctgcctctgaggaggctctcgaggattcgatggatgagggtgacaagaagtcgcccatctcgcaggttcacgagatcggaattaagcgcaacatgaccgttcattttaaggtgttgcgcgaggaggggccggcgcacatgaagaactttataacagcctgcattgtgggatctattgtcaccgaaggagaaggaaatggcaaaaaagtgtccaagaagcgtgccgcggaaaagatgctcgtcgagttgcaaaagctgccgccccttacgcccaccaagcaaacgccattgaagcggattaaggttaagacacccggcaaaagtggggcagctgcccgagaaggttcggttgtgtcgggcactgatggtcctacgcaaacgggcaagccggagagacgtaaacgcctcaatccgccgaaggacaagctgatagacatggacgatgcggataatcccattacaaagctaattcaactgcagcagacgcgtaaggaaaaggaacccattttcgagctgatagccaaaaacggcaatgaaaccgctcgacgacgggaattcgttatggaggtctccgccagcgggagcacagcccgtggaacaggcaacagcaagaagttggcaaagcgaaatgctgcacagggtaaattaaatataattcatacaaaactaagaaagctttaacaaacttaattgcttattgcagctctgtttgaactgctggaagctgttcaagtcacaccaaccaacgaaacacagtcatcggaggaatgcagcacttcggcaacaatgtccgccgttacagcgcccgcagtggaggcaactgcggaaggcaaagtgcccatggtagcaacgccagtgggtcccatgccaggcattttaatactgcgccagaacaagaaacgtgagtgagacccacattaaattcaaaatagcatatttatccagtacgtttctatcattatagcagcaaagaagagggatcaaattgtaattgtcaagtctaacgtggaatccaaagaggaggaggccaataaggaggtggcagttgcagctgaggagaatagcaacaacagtgcaaactctggcgacagcagcaacagcagcagcggcgattcgcaagccacagaggcggctagtgagagtgcactgaatacctcaaccggcagcaatacgagtggtgtgagtagcaacagcagcaatgttggagccaacacggatggtaacaaccatgccgagagtaaaaacaacacggagagtagcagcaacagtacgagtaacacacaaagcgctggtgtgcacatgaaggagcagctcttgtaccttagtaaactgctggactttgaggtaagcttaccaacggaacagtcaaccccaactagaaactaaccaatttcctcaattcaggtcaacttctcggactatccgaaaggcaatcataacgagttcctgaccatcgtgacattgtccacacatccgccgcagatctgccatggcgttggcaagagctccgaggagtcgcagaatgatgctgcaagcaatgccttgaaaatcctcagcaagctggggctcaacaatgccatgaaataagcataaagcgctgaaaatttcacaaaacccttattaactgcaatttttgttgttgcacataagcatgataagagcaaagcaaagaaaaaacaattgaaatacccgtccacaaagcaaaccttaaacaaaatccaaaaaccaagctgtgtgcaaattcaaaaaaaaaaaagaagaaaaatgagaaatgtaagagaagcaatgcaagaaacagttttgaaatagcaaattattagttaatacctatttatttatttatgtgtgcacgttgtgcaaactggtgttattattttatttatttgttgagaattgaataacgaatcgaactgatagtaaccgaaactgaacagaggcgaacacttaaccagaaccgcaacgttgttaatccaaatcgagaatcgaacaataactagacttaatgaaaacccaacaaaatcatgaatgaacagatgcatatatacatatgtgcagtacctaaacttaagattaaagctcattaaccacttgaattgaattgatgaacaaaggactattgatacctcttagctgcatgcggcaatcgctttcaaaaataaatacaaaatttctgagcacctcggtgcaggacaaaattgaaggatatccgcatttgcgaataaaccaggcaggctgtcaatggagaaactggacaaatttttgatttatttttcaaagcacgacaaccatgaaccgtttgtggtcatatgcttgatgaaactcgtcgaataatgaatctattatacgtatactatatttaagtgttaagcataagcatcggcgaatgtcggaaagccgtataccgtaccccatgaccggtcgatttgccaaaactttcagcaaatatttgcaatgttttgctggattttggttgattgataggaagtggaagaaagggcgttcacgtcgaacatacaacataaaatacaatttacataatcgttataattatatttatgaatgtttaataagccatttttgtaaatgttcagcttttggcgagtgtacaagctaaaagctgaacatccttatgaataatgaatcgtgttgtttaatctgtcatggtttgtccccacatgtcttgctcgtttttgaatccgacctatttattagttatgttatcgccgtaaccccattactcccccctccccccctccccaatacacacacattgcacacaccaactgaaatttcgagaacaatagttttaattacttttatcccgaacagcaccagttgattaagcgttaagttgcgttatgtaaaatgtattttgtctaagccatcacgttggccacaatgtgcatgattgcttcgcgatttgcgatcctaacctaagcttaagccccagcgaactgtaaccgttgaaatgaagtcaatcccagtattaaatgtatagatagggggcagttgtgcgtaactcccattaaattactagactcacagatatatatcgtgcacattgtttgcgccacacaaattgttcattttgttagaagattttgcagacccagcggatacgatacgatacgatcataatcgtagtcaataaattttcatgtgcgagtgtagcggtgtctgctttgcaaaatcttcacaaaattgattgaaattattaatcttaatgtgagatgtattcgcaggtagcaacaatgcgtgaagatctgttcattaacaccaaataaaggcatacgagtcaagatgagagaacacatttattagtcttaagcctacgcccacacacattcactaagttttgtctatctgtaatgtgacacataatcgtgttatgtcattaaaactgaagaaatccccgccccaaataaaaatatgtaaaatgtaattatacgaataaaaagtgaaataaagttggaagtgagtgtttttgattgatttgggaaacttattcttacaccgaaaatgcatatgaaatgagttagccccgtaaatcgacaagatatcgccattaaaaactatgatttattccggccataaattaatttatagtcccgcctttcctgccctgccctacgttgaaaatatttgtgacaggtggtgtataatatgtaatactgtccgaaaaccccgatgcgttacataaaatatcataaaaattagggaaaattatattttttttaaattcaccatcaaaatgcaaaagggtgagaggcggccataaacttataaatacataaacgtttgttaatttgccgaaaaaaacaaaaaaaccctttcgcaatacgaattcacaaactgtaaacggcttaaatgcccgaatcagattatgatgtgccgacagctcgggctgactaatcgatgacaaatgtttatgcaaaatggcccattcatttcttcagaagatttttgagagttttcgagactattatattatagaaatatgcaggatcgcatcgtttgcaaacttttagatgtatcttttgaacttaaactatgtagatacatttattatggttctgcatatctttttttcaccttggtatagttgataaatcataaaacagtgcaatcctatgaagctcgatctggtaaagtgagctgggatgtgggatatgctatggtgcagctcctccactttctccgctggcatttggctagtttttgtggcaatcgtgcgattaaaacaaaaagaaaactacaaaaaaaaaataaacttgtggccggcaaatgcataataaatacataaaatgaaattaatgccttgcttgcacatcagccagctttccggcaaaatcaaagcgattccgcgcccgccactctgcccctccatttgcatatgcatttctctgggggctctgggtctctgggtctgtggcatcccctggaactgggagccaccatatcatatcaaatgt

SEQ ID NO: 25973 - DNA, 4898 bp, DROSOPHILA
cctgccggtcggatcgggtcgcacatgaatttattaccgacgttcgctgattctaacgtacatttgcgtacgatcttttaacgatcatgatagactttcatcagtgccaagtgagagtctgaatcatcaccatctccacgctcagcagcagcagcagcaacagacgtcgtcgaaccaagccggcgccgtcgctgcggctggggctgcctatcaccacggcaacatcaacagcaacagcggcagcaacatctccagcaacagcaaccagatgcagaagatccgccaacagcaccagcacttgagtagcagcaacggccttcttggcaatcaacctcctggtccgccgccacaggccttcaatccattggcgggcaatccggcagctctcgcctacaatcagcttcctccgcatccgccgcaccacatggccgcccatctgggcagctatgccgctccaccgcctcactattacatgagccaggcgaagcccgcgaaatataatcactatggcagcaatgcaaacagcaacagcggcagcaacaacagcaacagcaactatgcccccaaggccatactgcagaatacgtataggaatcagaaggtggtggttccaccagtggtgcaggaagtaacccccgtgccggaaccgccagtgaccaccaataatgccaccaccaacagcaccagcaacagcacagtcatagctagcgagcctgtaacccaagaggatacttctcagaagccggagactagacaggagccagcttcagcggacgatcatgtcagcacggggaatatcgatgctacgggagcactgtccaacgaggacacgagcagttcaggacgcgggggcaaggacaagaccccaatgtgcctggtcaatgagttggccaggtacaacaagatcacgcatcaatatcggttgactgaagaacgaggacctgcccactgcaagaccttcacggtgacactgatgctgggcgatgaggagtactcggcggacggtttcaagattaagaaagcgcaacatttggcggctagtaaggctatcgaggaaaccatgtacaagcatccgccgccgaagattcgccgcagcgaagaaggcggtcccatgcgcacacacattacgccgacggtggaattgaatgccctggccatgaagttgggacagcgtaccttctacctgctggatcccactcagattcctcccacggattccatagtgccgccggagtttgccggcggtcatttactaactgcgccaggaccagggatgccgcaaccacctccaccacctgcttacgctctccgccagcggcttggcaatggattcgtgcccattccatcgcagccgatgcatccgcatttctttcatggaccaggtcagcgaccgtttcctccgaagtttccatcacgctttgcgctgccaccgcctctcggagctcatgtacatcatggaccgaatggcccatttccatccgtgcctacgccacccagcaaaatcaccctgtttgtgggcaagcagaagtttgtgggcatcggacgcacactgcagcaagcgaaacatgacgctgcggcgagagcgctgcaggttctcaagacacaggccatatctgcctctgaggaggctctcgaggattcgatggatgagggtgacaagaagtcgcccatctcgcaggttcacgagatcggaattaagcgcaacatgaccgttcattttaaggtgttgcgcgaggaggggccggcgcacatgaagaactttataacagcctgcattgtgggatctattgtcaccgaaggagaaggaaatggcaaaaaagtgtccaagaagcgtgccgcggaaaagatgctcgtcgagttgcaaaagctgccgccccttacgcccaccaagcaaacgccattgaagcggattaaggttaagacacccggcaaaagtggggcagctgcccgagaaggttcggttgtgtcgggcactgatggtcctacgcaaacgggcaagccggagagacgtaaacgcctcaatccgccgaaggacaagctgatagacatggacgatgcggataatcccattacaaagctaattcaactgcagcagacgcgtaaggaaaaggaacccattttcgagctgatagccaaaaacggcaatgaaaccgctcgacgacgggaattcgttatggaggtctccgccagcgggagcacagcccgtggaacaggcaacagcaagaagttggcaaagcgaaatgctgcacaggctctgtttgaactgctggaagctgttcaagtcacaccaaccaacgaaacacagtcatcggaggaatgcagcacttcggcaacaatgtccgccgttacagcgcccgcagtggaggcaactgcggaaggcaaagtgcccatggtagcaacgccagtgggtcccatgccaggcattttaatactgcgccagaacaagaaaccagcaaagaagagggatcaaattgtaattgtcaagtctaacgtggaatccaaagaggaggaggccaataaggaggtggcagttgcagctgaggagaatagcaacaacagtgcaaactctggcgacagcagcaacagcagcagcggcgattcgcaagccacagaggcggctagtgagagtgcactgaatacctcaaccggcagcaatacgagtggtgtgagtagcaacagcagcaatgttggagccaacacggatggtaacaaccatgccgagagtaaaaacaacacggagagtagcagcaacagtacgagtaacacacaaagcgctggtgtgcacatgaaggagcagctcttgtaccttagtaaactgctggactttgaggtcaacttctcggactatccgaaaggcaatcataacgagttcctgaccatcgtgacattgtccacacatccgccgcagatctgccatggcgttggcaagagctccgaggagtcgcagaatgatgctgcaagcaatgccttgaaaatcctcagcaagctggggctcaacaatgccatgaaataagcataaagcgctgaaaatttcacaaaacccttattaactgcaatttttgttgttgcacataagcatgataagagcaaagcaaagaaaaaacaattgaaatacccgtccacaaagcaaaccttaaacaaaatccaaaaaccaagctgtgtgcaaattcaaaaaaaaaaaagaagaaaaatgagaaatgtaagagaagcaatgcaagaaacagttttgaaatagcaaattattagttaatacctatttatttatttatgtgtgcacgttgtgcaaactggtgttattattttatttatttgttgagaattgaataacgaatcgaactgatagtaaccgaaactgaacagaggcgaacacttaaccagaaccgcaacgttgttaatccaaatcgagaatcgaacaataactagacttaatgaaaacccaacaaaatcatgaatgaacagatgcatatatacatatgtgcagtacctaaacttaagattaaagctcattaaccacttgaattgaattgatgaacaaaggactattgatacctcttagctgcatgcggcaatcgctttcaaaaataaatacaaaatttctgagcacctcggtgcaggacaaaattgaaggatatccgcatttgcgaataaaccaggcaggctgtcaatggagaaactggacaaatttttgatttatttttcaaagcacgacaaccatgaaccgtttgtggtcatatgcttgatgaaactcgtcgaataatgaatctattatacgtatactatatttaagtgttaagcataagcatcggcgaatgtcggaaagccgtataccgtaccccatgaccggtcgatttgccaaaactttcagcaaatatttgcaatgttttgctggattttggttgattgataggaagtggaagaaagggcgttcacgtcgaacatacaacataaaatacaatttacataatcgttataattatatttatgaatgtttaataagccatttttgtaaatgttcagcttttggcgagtgtacaagctaaaagctgaacatccttatgaataatgaatcgtgttgtttaatctgtcatggtttgtccccacatgtcttgctcgtttttgaatccgacctatttattagttatgttatcgccgtaaccccattactcccccctccccccctccccaatacacacacattgcacacaccaactgaaatttcgagaacaatagttttaattacttttatcccgaacagcaccagttgattaagcgttaagttgcgttatgtaaaatgtattttgtctaagccatcacgttggccacaatgtgcatgattgcttcgcgatttgcgatcctaacctaagcttaagccccagcgaactgtaaccgttgaaatgaagtcaatcccagtattaaatgtatagatagggggcagttgtgcgtaactcccattaaattactagactcacagatatatatcgtgcacattgtttgcgccacacaaattgttcattttgttagaagattttgcagacccagcggatacgatacgatacgatcataatcgtagtcaataaattttcatgtgcgagtgtagcggtgtctgctttgcaaaatcttcacaaaattgattgaaattattaatcttaatgtgagatgtattcgcaggtagcaacaatgcgtgaagatctgttcattaacaccaaataaaggcatacgagtcaagatgagagaacacatttattagtcttaagcctacgcccacacacattcactaagttttgtctatctgtaatgtgacacataatcgtgttatgtcattaaaactgaagaaatccccgccccaaataaaaatatgtaaaatgtaattatacgaataaaaagtgaaataaagttgg

SEQ ID NO: 25974 - protein, 914 aa, DROSOPHILA
MQKIRQQHQHLSSSNGLLGNQPPGPPPQAFNPLAGNPAALAYNQLPPHPPHHMAAHLGSYAAPPPHYYMSQAKPAKYNHYGSNANSNSGSNNSNSNYAPKAILQNTYRNQKVVVPPVVQEVTPVPEPPVTTNNATTNSTSNSTVIASEPVTQEDTSQKPETRQEPASADDHVSTGNIDATGALSNEDTSSSGRGGKDKTPMCLVNELARYNKITHQYRLTEERGPAHCKTFTVTLMLGDEEYSADGFKIKKAQHLAASKAIEETMYKHPPPKIRRSEEGGPMRTHITPTVELNALAMKLGQRTFYLLDPTQIPPTDSIVPPEFAGGHLLTAPGPGMPQPPPPPAYALRQRLGNGFVPIPSQPMHPHFFHGPGQRPFPPKFPSRFALPPPLGAHVHHGPNGPFPSVPTPPSKITLFVGKQKFVGIGRTLQQAKHDAAARALQVLKTQAISASEEALEDSMDEGDKKSPISQVHEIGIKRNMTVHFKVLREEGPAHMKNFITACIVGSIVTEGEGNGKKVSKKRAAEKMLVELQKLPPLTPTKQTPLKRIKVKTPGKSGAAAREGSVVSGTDGPTQTGKPERRKRLNPPKDKLIDMDDADNPITKLIQLQQTRKEKEPIFELIAKNGNETARRREFVMEVSASGSTARGTGNSKKLAKRNAAQALFELLEAVQVTPTNETQSSEECSTSATMSAVTAPAVEATAEGKVPMVATPVGPMPGILILRQNKKPAKKRDQIVIVKSNVESKEEEANKEVAVAAEENSNNSANSGDSSNSSSGDSQATEAASESALNTSTGSNTSGVSSNSSNVGANTDGNNHAESKNNTESSSNSTSNTQSAGVHMKEQLLYLSKLLDFEVNFSDYPKGNHNEFLTIVTLSTHPPQICHGVGKSSEESQNDAASNALKILSKLGLNNAMK

SEQ ID NO: 25975 - DNA, 12551 bp, DROSOPHILA
ccgtcaccagtgcaccacaatggcaaacacaggcgatgccacgaatgggtgattttgaagtcataggtgcttgtggcttaaattagaaatggtaaaggaaatacaaaaagttaatatgtagttcaaatagaatgtatgataatcatgttaaaccctaaatgaaactccatttaaatcattatcattcattgtgccttaagtatattattaagcccagatattgtccgtgaataaattaaataatatgggcattttggccaacaattaaacgaggaaataaacttagccaaaacggaacttccgaactggtcgccaaccacagtgaatcacttacctctcaagagcctctcgccattctagccaagtcgagtcgagtcaagaactcgtggccaccgagaggggactgtcgtcttggccatgttgcaattaactagccaactaagcagcaattggccacaattattattattatttcttgtacgagtagtatgcttatgctacgatggccgattgttgtgcccgccgcattttggtaattgttttagccatgttttgccatttatgtatgggccagaccaagtcccaatatgtgactggaaccgagtcgcctaagttttatttttattacactgtgactacacaaatttgtgaactaacttgatgaattgaatatctcttggtcttggagttttaagggcagcttaaaataaaagcaattatttaagattgtgaatcatatatttgaaatatttttctttttctagtaatatttgttcagtgcacttttttctaatatttctttggcgctgtggctatttctcagttctatcggctaccgtgcgtggagtctccccagattggtttctcgcccgatcccctgacccccggattggccagatgaccttaattcgcggtgcccaccgctcgttttttatgcggctccgccaatttgctgcacattattcacatttggatttgcacccagtcagagacgaagatttgtggcttttggctacagggaaagctttattactgctaagcataacttatgactaaggatatacatacagatggtttttggtggatggacaccggtcgctcttctttcttaaacgtgtaaatagatttatgtgtgtatatttgcactatttgaaccaggaactgcccatttacatgtatgtgtgtgtatgtggtaggtaggtataccgaatacgattggaaactaaggttaacttaagagtatctagtgggctagcataggcaaacagtctgcagagcctcacattcattaaccaaataatgcacttttcttcactttctgcttggactttttttgtttatccgcgtaatttacgttatgcgtagctaattaatcaggtatacttttgcatttagaggtcataaaatgtacaatccttgtgccgggtgatattaaacgttacttgatttgattgattaaggtacaattctttccagctgggtgggcctcactcaaaactcggatatcggatcggatcggttaggatcgattggaattggatcctcagtgatagtggggcacccggatctcggttcgctcaagtcgatcgtcctcatcgctcacatacattctggtcaggtccgaggccaaagagacattgtcgctgctgcaatgatcatgagccaaaagacgaaacatgagcacacacacaaaaaaaaaggccaagaacaatttggtggccaaaaaagagccattgaaatcgcgcatacgaactggaaaacgtttgccagccgcaaatggctgaaattgaataattgcttgccataaatttatgtgagacactgttcagcaatgcccggcattctccagcttttcccctccttggtcgacatattgacagaatgacgggctgccatttgcgcaatctgtctaattgtcaattagccaggtcgaaatcttggctggggattgactagagcctcgcctccatcggtttcgattttcttttttatctttcgttgaaagccaatatatatctgagttaactcaatggtaaaggggtttgggtcacaaaataaacgaatgaaatggtttggatagtgccacatttcaccatccttaatatataacaattatgtatcttaaaatatgcttctaagctgtgtgccaaccgactggccgagatatgccgaacaattaattaggtttataataagtatttggtaaaggggagatctggaatacatatttctaagtatgtacgtaagaggggaactatctattcaagaaatctgttcaaacaatattttcaaattatcacaaaaagcattgaaaatattttagaaaaaggccatgtgaggcgactgagaaaatattgcatggaagaaatctgtcaaactgagaggtgacatgtttaaaataacgttataaaaatattttttttttaaacaaataaatgtaacctatgtgcgactcgttaaataggcatccattgagctgggacaccaggctcaatcgcactcactttaattccttctccttttcgtacacagatgccaccatggcactgtactcctggtccaagttgttggcccgcgagaagtgcgatccgtttacctccagccgctcgaacgaggacttcatggaggcgtccacatccatttccagcccggaggtgttacctcctccgcctgccgcgccggtgctcatcagagccaccatggacagggaggagacggtgcccccgcaaccagaactgctgctgttctcgttgtggcttcccatgaaggtgtttagcatgttcaggctcaaagtggttgtgggattaaccgtgctcatggaggtgctcgccgcctgcgaagtggctgcactgatggacttgccaaatccctcatcgtccacggttgtcgacgaggagccaatgctgtaaaagaagatggaatcaaacaatgagtttagtaaaatgaattgctggactgtgaggcatagtaagattatattgtagaatattatcatcaagctattaattaaatgtatcaacatttcaatctcccaagatgtaccctttcattacctatacctttcctttcatataaactttacagatcgctgctcaattaaccctttgctaccagagcccatatattctcacactttatggttgtagaagcagtttctgaataaaatgactcagcagactccacgactgcagtagttcttttttccgcaacttgtttatttaataattaaaatgatttatgggcctgattgatgtggtggcagacccagtccaccggagagcaataggtgtccatgtttcggctgcatgttgcacttattgctctgcagcagcaacaaagtgcattggcaataataatgcaaaatgttaacaaaatgtagaagcaagaaggaaaaaaaaaattataagccaggccaacccaacatgaattcggagcccaagaaggtcgccaattgaagctgggaaatccaatggaaaaatcgtatatatatatatatggttagtagtcttctgccccatgttgctgctgttcacttggtgttgctgcagttcctgacagattgcggagtggaaaacacagcccacgggccacttgaaaggtgcaactcaagctgcaactcgagctgttgacttgggcttcctagtgggctggccaatgcctgtacgacttcgaagtcagcaaataacggcaaaaaatgagaaaaatgtcaaattcaattttcgccaggcgtcagagtaaattactttggaaaattgccttttgtcaacgcccacgcctcgagggcaactagaaaaaaatacaataaaagcggccagagtgataatttgcttaagcttttacgcagttatgcaattacttaaagtatctgaaagatactttaccgcttctgctggcatgtggaacagttgtaaaacctatttcatccttaatgatctaagtctgcaactgagtcagcaacttagctagctttttgtatattttgttatagtatcgagactggaaaaagaacttgtttggtcgcactatggcactcacgcactgccttttcagctcgaggatgccccagggggccaaagatcgcgtaacatttgacttttactttccacgcaaaaagcaaataaaataaaaaaaaaataaaaaatagtaacatactgcaaagacaaaactcgtttgacaaaggcagaggaaccaccgcaccgtttgtgcagcaaaccataaataaaatatcagcaaggtataaataaaaatatcacatgccttcgaagagcaaaacgcagatagcggacaaaaaatatgcaaatttcagtccaaaaactggttcagtgtactggaagttctcatggggtcgacgacagtttcttctaaggatgcacagcagttgtcggatgtttgtaagacctggctaaatgtcaagatctctcgatgtgattaatggcggtctccatagccaagctcggatttctaattacccagaacaatgggcaattattcaggcggtttattaaagttaattcggtgtaaacgctttgatttcgccctataagcctaatgaattgattgactgcaaccagctgccgcgattatctggtttatgtatgtgacagaggcacaaactcaatttatgcagccagggtgcgagtgtagccactgtcctccactctacgtgtatctatcagatacaactgccccgacattcataggctctgtctcagctgcgcgtgctaatcgcgatgacttcatttcgtgttgctcttgatgttgctgcggctgctgctcattttgctgctgggtttttgctgctgctgggttcgctgacagaggtcaggcccatgtatctcacagataccattgattgccggatagctgtgtgttcgcttgtggcgaaggtgtaaatgattcttaagaaaaaacttaggtgagggtgtgttgaaagtttgggtatcactgggggaagcttgaaaaacaaacatcttaaaattcaaatactatgtttataatgttcttacttgttttgcctaaattcacattcaatttaagtcttgcttaacacaaacaacttgggttttccaaaagcgaataaatcattgagcttatggagttatgtaaatttcagatttcagaaatttgatatttaacaaaataaatgttttgatatcatcatagcaagtaaaacagcggcacactcattaattcaatattatgcctgtttaattagaactcgaagtatctaattgccagatatcaatcaagcaaactcgtttaaacgcccaaattaaacgcagccccaccctttgcggtggcattctcaagcgtgttccacggcagacccaatatactttgcgttatcctgtaatcggccagcccgcctatttatcgcgaatctaagagtttcggtgtaacaacaaaatgccatacaaaaagtcataaacccaaattcaaaacgctgttcaacatgagcagcagccgtcgcaatcggaatcgcaaaatcgaaggagcagctagctccgccagcgggtgagctgcatctgatcgtgtggggtcttgagacgtagacggagtcggagatggagtcggactcggagtcggtccaaaactacgagtaatacggacacacatggccaaagcggatgggaaacacactctaaatgcatctagatagatagtcgagcggtggtccagtgtgcactgggaaaaacaagggtactagttcatgaaaaattgctgtagctacaatattccaattatctatatcttgccttctactccttgactaacttagttaaggtaaccaaaagaattctaaaaatgatgcccaatgatagaactatcttcttttttactgctagcttctagacaccttgataaatgatcttaaaatgctgattttaattacttttccaaacccataactttcaagatacataataaaacgccagtgcagtcagttctaagtggaaggcagggagactggccagacagacacaatggccaaaacggagctgacatttagtgcgcaactggcgacaacgactgtcaacacaggaaagtaaatgcaccgggggccgcaaagttcataaatcgcggaccagagctcgaagttggctgatttcagttggcagagagagcgcaacgtcgtgttaacaatatgttcgctgcttggagagccttaacggctgccgtgtgccataaatctgaagattttcggcattgtcttcgctcagattgggctaggtcgcaccacttggctctgcatatggatatggatatgcatgtggatgtggatggggatgtggtggatgtggatgtggatgtggatatggatgcatgtggataaagtgcacttaccaatcgctgggatcaccagacggacctgtgcgatgattgcatttgctgcgcatgaccaactgcagccagttgggcactggaggcgtgggatctggtgtgtatctgtgggatagcgataatataaggcgaaattagcaattggaaggtcaggagagaggacagtccttcttgtattccgatagatgctcacctgatgatcgagttgcagtgcttcgtcttgggaaccgcgaaaatctcgctgggcgatggcgtggatgccatggcgtgtgccttctccacggccgcatccacctcgggtataagggccagctcctcggtatcgccgagatccacgtccaggctgcttaccgagctgagcgagttgcggggtccggtgtggtggtaacgcgacggactcgacgccgtcgcatcctccagttcactggcgtcgaacttgaggttgactataagagcccagaaggaggagaaggagagaggcacacagcatatcgagatacaccgacggacacacaatgagaatgggaatggatggaagcacggatttggattcggtttcgggcgagattcccatgatcaaaatttcacacagagagagagcaaaaattgttgataacggtatatacatcacctttgtggaatgacaaatgggttgtttttttctgtggttgactttaactcacgtttgtccagcggtcccagctttttggcgagtccgtacattgtctccggtgtccagtagtccggaattctggcgaagatcgagcccgcgtccgccggcagctgaatgcccagcttgtggagcaggagaacaaaaggctggtacagcatcgtagtggattgctcgttgttccactgcaccaccggaatggacttctgcttgcagatgcagtggtaggccaccggctccatgatgtgatcgccttccggaaccttgagaccactccgcagggtcagtttaacgaagcagcactcaatgaggatcctttgcagccataacaaatgctgcgccttgttttccttaatgatcaggtccagcaggatctagaaaaatgtaaaatgcattcttatttaatctaatgccagtaatatccagcaaacccacctgaacatcatctgagggtttgccgtaggcgcactccttaatctcaattccagactctgttgttgcggaagtgggagttgtcagcaaagttctctgatactccgcatcctcgaacttcatcaggtcatcgtattccaacagggtgataatgtccttgaagaattaggcaaattattaataaaatcgactttgagagttcttcattaaagcctcacttgttgcaaaagttgttggataatagaaatcctggttttcagcttgttgccgttgttgctgaagagcttaactatctttcccacaatatcgttgttcttcttgctctgcacataataccaataaagtgtgtccatttcctcctgcgaccaagagctaaagaatatagttataggttaataacatataccaaaggtctaattcaagtgaacctaatatagttgtgattagtaagcaaattcttagggaaagtcatgttaggaagccttgtaaatcaactaaagaatcccataaatacttggatccctacaaacgattgaattttaaaaatctcttgtagctcatccacagatgaagttttgtttaggacgactaaatatgtctaaaagaaaacgctagacaccttgttcttatggtccacaaatgttaaaaatgttatgtttattgcttatgttagttgtatcttagatcaaagattatattgcttatacccttattaaatatattgcttcaaggaaatcttctgaaatccttaccaaacggtatgctcctggttgtgttccttggtcatttccgtcaaggaagttgtaggaatggtgagtggcgacttcggaggagtattcatgaacttgtgaatcacatactcgataagatcagaccagtcctgtgaaaataaattgtttaatgaatgcaaatgactcaatctaataaaatctaataaacttacatcgcacagttcatagtccgcttcccaaattcttgaataggttttcaaaataattggttgaaatagaaccccaatctggcccagatcgccaccgatgtgatgcatcatggtgaagatgcagtcattgacaaactctccgttgttgttgaagtcctccaacagaatgccatagtagtgcatcacctccagcgtggcaaacctgtaatattaatgcattaataatctataatataatataataccatataaccctactgtgttatgtgctccgacaggcgaatggtttgacatccaccaagtttggccgaactgtccagaatgagtaggaggatgtgattggtaaccaccagatcctgaagatactgcttggaatgaatgctgggattgaaacgcctcagcagaagcacaaaaaggcacctcagatcggacatttcgctaatctgcagctgaagctgcctcaaatgggctttgtcgtcctcgttcagatgagtcactttgttgtacgtatcaatggcctggaggaactcccggatggccgtcaccaccaagtgcattcgccttagatagggcttcaggtcactgccctcctgtcgggcattcagttccagttgctcacatagggacacaccctcataggtcaagtagctcaaaacatcgtaggtgagaatagtgtcgatgtgctccatatccagctccagttgggcggcaaacttcaggaagtaggtgaccagccagaagaagtgcgatgtgtcaatgggcaccttctggaggaaagtcagagaagttctctttagtttttatgataatatataatattataattaaaataataatagcaagatgtgaggtatttcaaaagataatgaacctaatctactttaagcctgttaagttttaagcctccgaaaaacatatgaaaagcgatgagcgcatcataaatgacaaaaattcaccttgttctgtctcaattagttagttagtgtgtgtaaatttgtttttaagaaaatcgaaattatagtcctcataataatttctatatcaatatcgacataccgcattggaaagcagttgcatgtgcagttcctccaccagatagctgtaacccttgaggaggaaatccacggtgaattccttcagcagattggagatgtcatcatcggtgggggtgtgctgtaccagacccttcatgttgatgctgtgaatttaatattattgttaaatggttacaaaagtttttttttctgatttctaatcaatttgctgtggattttcctgaaacttacaggctgcttttgctgcgcttgaccagttttttgcgtctaagctcctttttgtccattggcgacataatcgtccgtggtttattccgtggcttcgtgttacacggaggcttctggtgctgcggcttgccctgcggcccatcatcgtcgttgctggaggtggaaatggattcctgattttccacctgggtgccataaccgcaatccgatagctccgactgcgaggaggggcattcccgcttctgtgggcaacacttgcccttggtcagctggagctggccggcatgtggggacttttggcccaatttgaccgcagatacgtgggacgcgtaggacgattcgttgaacttctgcatttgagcgtgtgccgaggtggaggctctgactggcagaggaggtggtggcttgaatggctcattgcccaggcagccttgtggcgcactggacgttgggttggtagtgttgttgaccttgtcagctggttgttgtgttaagtttaggggctccgaggctgggcccaattgtaggtactcttcctcctccacttcgtcctggaagagtacgatattttgttatatatttcaatggcactggtcatagaaactcacctcatcttcatcctcctcgccatgctcgttcagttgcctgtgtctctggtcctcgtaatctccatcgtccatggactcgccggcgggctgcgattgctccggcgatccaggctgctcgctgtcgttccccgtcatatcgctggcctcttcggagccatcgggcttatccgctggcactctggccatggcgttctgatactcctgacccttgcggctcacctcctgcaaagtggccgctgttccttcccgcatgccaccgcccatgccacggccattgctgccattgtccgaggaatcagaggtaggatcagaggtcagcatggggctggaatcgccactgccctgtttggggggcgaggtattactctcattatcctcagagctctccgacagagaggcttcgaaccagaggctaagtagtttttgcagagtgctcacatgctgatccttgtagatcaaagcaatcagttgcaccatggtcactccccagaaggctctctgcggacaggtcatcagatacaggagtaacttgtcgatgctctggatgaagagattccacaagatcgtgttctgcatggagatgccatgcggcatcgactgcatcatgggcatcacgcaatgggcatgcgtctctggaatgtgcaggatatttctcagcagcagcagacagttgttgatttgatcgcatttgtgcggcgacagcttagggtccgactccagtatgtgtttcatgtactccaccacgctcttggtgctcctggcctcggtaaatgcttccttgctggtgtacagcagcttgttcagctcgaagatggtgtggcgacccacatccgtgcggtacatcacgtccacggagaagaggcactccaccggcaccgtcagattgacgagtatccggatgaccgactccaggaccgcatcatccttggcattctccagcagcggtatcaggtctgacctcacattctggccaaatccaatggcccgtcgaaaggtgcgcagtgtttggtcctcataggtgagcttgtagttgatctcctccagaatggctggggattgaaaataagttaaatacctaattaatgtagtagtcctatattgattactcacccaatgcattcgggttgaccacataggtatcgccctccaagcaacccaaggaggagaacgcgctgtacaactgcggagttgctagtaaccagtccataaccgatttcactttatcaaagttctgattattccagatgtgattgtggagctgcctaactctgctcattgtcgactgcgaacattgaggtacttcttagccatttgcgcggtatctgtaactataagtaaacaaaaatgtatatttaattgttattaaaacttaaatattcttaacgtggtaccagaggtgaatttaaataatattacacatttaaactgagatgtgaaatggtgaaaaatttatggcatttttgtaagctgtaacagtcaccttaaaatatgttaaggtcactaacccatcgtcttccagggcattacgcaaccacaaatgattcccataaatatttgcactcgcaaacaaaatcgccacccatgtgaccatcaagggcgcagtccatgcaatgtgctgcaattgcagccgctcggggatgaaacccgaatcaactcccattccacatcacctcacacacgtgtccgcacagcacgtctcccatttaccacccgttgcgagtcgaatcaaggaaactgcctaccagacgagccccgaaagttcccagaagccacacttgccagtccggaaagtgaaaaagtgggctggattggcaaacaccaccaccccccccccccacacaggggggagcccaaccttcagccatcacgtaacgaggcaaatcctcaacaggcgactgcggcacccggtggccgcatgtgactcacttgcagacatccgggctgattgtgtaaacaacacagttggaggacaaagccactgggttcgcaaacggactacggactacgggactccggaggaacaaagcctgcagtcggaaaagccgaccacccgtagcgatatttataggacatgaatcgggatgcaggatttggcatttgtgcggcttccagcctgctgactttgaatgtttcgtgctatatttggccattaaagcgaatgcagtttagttgcattggttttcgttgccctcttttgggcgaacacgttaaatggcacgctaaatggccaagagcggaaaataaacagcgcaaacagttgagaaaattttaaaatt

SEQ ID NO: 25976 - DNA, 4809 bp, DROSOPHILA
atgagcagagttaggcagctccacaatcacatctggaataatcagaactttgataaagtgaaatcggttatggactggttactagcaactccgcagttgtacagcgcgttctcctccttgggttgcttggagggcgatacctatgtggtcaacccgaatgcattggccattctggaggagatcaactacaagctcacctatgaggaccaaacactgcgcacctttcgacgggccattggatttggccagaatgtgaggtcagacctgataccgctgctggagaatgccaaggatgatgcggtcctggagtcggtcatccggatactcgtcaatctgacggtgccggtggagtgcctcttctccgtggacgtgatgtaccgcacggatgtgggtcgccacaccatcttcgagctgaacaagctgctgtacaccagcaaggaagcatttaccgaggccaggagcaccaagagcgtggtggagtacatgaaacacatactggagtcggaccctaagctgtcgccgcacaaatgcgatcaaatcaacaactgtctgctgctgctgagaaatatcctgcacattccagagacgcatgcccattgcgtgatgcccatgatgcagtcgatgccgcatggcatctccatgcagaacacgatcttgtggaatctcttcatccagagcatcgacaagttactcctgtatctgatgacctgtccgcagagagccttctggggagtgaccatggtgcaactgattgctttgatctacaaggatcagcatgtgagcactctgcaaaaactacttagcctctggttcgaagcctctctgtcggagagctctgaggataatgagagtaatacctcgccccccaaacagggcagtggcgattccagccccatgctgacctctgatcctacctctgattcctcggacaatggcagcaatggccgtggcatgggcggtggcatgcgggaaggaacagcggccactttgcaggaggtgagccgcaagggtcaggagtatcagaacgccatggccagagtgccagcggataagcccgatggctccgaagaggccagcgatatgacggggaacgacagcgagcagcctggatcgccggagcaatcgcagcccgccggcgagtccatggacgatggagattacgaggaccagagacacaggcaactgaacgagcatggcgaggaggatgaagatgaggacgaagtggaggaggaagagtacctacaattgggcccagcctcggagcccctaaacttaacacaacaaccagctgacaaggtcaacaacactaccaacccaacgtccagtgcgccacaaggctgcctgggcaatgagccattcaagccaccacctcctctgccagtcagagcctccacctcggcacacgctcaaatgcagaagttcaacgaatcgtcctacgcgtcccacgtatctgcggtcaaattgggccaaaagtccccacatgccggccagctccagctgaccaagggcaagtgttgcccacagaagcgggaatgcccctcctcgcagtcggagctatcggattgcggttatggcacccaggtggaaaatcaggaatccatttccacctccagcaacgacgatgatgggccgcagggcaagccgcagcaccagaagcctccgtgtaacacgaagccacggaataaaccacggacgattatgtcgccaatggacaaaaaggagcttagacgcaaaaaactggtcaagcgcagcaaaagcagcctcatcaacatgaagggtctggtacagcacacccccaccgatgatgacatctccaatctgctgaaggaattcaccgtggatttcctcctcaagggttacagctatctggtggaggaactgcacatgcaactgctttccaatgcgaaggtgcccattgacacatcgcacttcttctggctggtcacctacttcctgaagtttgccgcccaactggagctggatatggagcacatcgacactattctcacctacgatgttttgagctacttgacctatgagggtgtgtccctatgtgagcaactggaactgaatgcccgacaggagggcagtgacctgaagccctatctaaggcgaatgcacttggtggtgacggccatccgggagttcctccaggccattgatacgtacaacaaagtgactcatctgaacgaggacgacaaagcccatttgaggcagcttcagctgcagattagcgaaatgtccgatctgaggtgcctttttgtgcttctgctgaggcgtttcaatcccagcattcattccaagcagtatcttcaggatctggtggttaccaatcacatcctcctactcattctggacagttcggccaaacttggtggatgtcaaaccattcgcctgtcggagcacataacacagtttgccacgctggaggtgatgcactactatggcattctgttggaggacttcaacaacaacggagagtttgtcaatgactgcatcttcaccatgatgcatcacatcggtggcgatctgggccagattggggttctatttcaaccaattattttgaaaacctattcaagaatttgggaagcggactatgaactgtgcgatgactggtctgatcttatcgagtatgtgattcacaagttcatgaatactcctccgaagtcgccactcaccattcctacaacttccttgacggaaatgaccaaggaacacaaccaggagcataccgtttgctcttggtcgcaggaggaaatggacacactttattggtattatgtgcagagcaagaagaacaacgatattgtgggaaagatagttaagctcttcagcaacaacggcaacaagctgaaaaccaggatttctattatccaacaacttttgcaacaagacattatcaccctgttggaatacgatgacctgatgaagttcgaggatgcggagtatcagagaactttgctgacaactcccacttccgcaacaacagagtctggaattgagattaaggagtgcgcctacggcaaaccctcagatgatgttcagatcctgctggacctgatcattaaggaaaacaaggcgcagcatttgttatggctgcaaaggatcctcattgagtgctgcttcgttaaactgaccctgcggagtggtctcaaggttccggaaggcgatcacatcatggagccggtggcctaccactgcatctgcaagcagaagtccattccggtggtgcagtggaacaacgagcaatccactacgatgctgtaccagccttttgttctcctgctccacaagctgggcattcagctgccggcggacgcgggctcgatcttcgccagaattccggactactggacaccggagacaatgtacggactcgccaaaaagctgggaccgctggacaaactcaacctcaagttcgacgccagtgaactggaggatgcgacggcgtcgagtccgtcgcgttaccaccacaccggaccccgcaactcgctcagctcggtaagcagcctggacgtggatctcggcgataccgaggagctggcccttatacccgaggtggatgcggccgtggagaaggcacacgccatggcatccacgccatcgcccagcgagattttcgcggttcccaagacgaagcactgcaactcgatcatcagatacacaccagatcccacgcctccagtgcccaactggctgcagttggtcatgcgcagcaaatgcaatcatcgcacaggtccgtctggtgatcccagcgattgcattggctcctcgtcgacaaccgtggacgatgagggatttggcaagtccatcagtgcagccacttcgcaggcggcgagcacctccatgagcacggttaatcccacaaccactttgagcctgaacatgctaaacaccttcatgggaagccacaacgagaacagcagcagttctggttgcgggggcaccgtctcctccctgtccatggtggctctgatgagcaccggcgcggcaggcggaggaggtaacacctccgggctggaaatggatgtggacgcctccatgaagtcctcgttcgagcggctggaggtaaacggatcgcacttctcgcgggccaacaacttggaccaggagtacagtgccatggtggcatctgtgtacgaaaaggagaaggaattaaacagcgacaatgtctctttggcctcggacctgaccagaatgtatgtgagcgatgaggacgatcgacttgagcgaaccgagatccgggtgccccactatcactgaggatccaattccaatcgatcctaaccgatccgatccgatatccgagttttgagtgaggcccacccagctggaaagaattgtaccttaatcaatcaaatcaagtaacgtttaatatcacccggcacaaggattgtacattttatgacctctaaatgcaaaagtatacctgattaattagctacgcataacgtaaattacgcggataaacaaaaaaagtccaagcagaaagtgaagaaaagtgcattatttggttaatgaatgtgaggctctgcagactgtttgcctatgctagcccactagatactcttaagttaaccttagtttccaatcgtattcggtatacctacctaccacatacacacacatacatgtaaatgggcagttcctggttcaaatagtgcaaatatacacacataaatctatttacacgtttaagaaagaagagcgaccggtgtccatccaccaaaaaccatctgtatgtatatccttagtcataagttatgcttagcagtaataaagctttccctgtagccaaaagccaca

SEQ ID NO: 25977 - protein, 1398 aa, DROSOPHILA
MDWLLATPQLYSAFSSLGCLEGDTYVVNPNALAILEEINYKLTYEDQTLRTFRRAIGFGQNVRSDLIPLLENAKDDAVLESVIRILVNLTVPVECLFSVDVMYRTDVGRHTIFELNKLLYTSKEAFTEARSTKSVVEYMKHILESDPKLSPHKCDQINNCLLLLRNILHIPETHAHCVMPMMQSMPHGISMQNTILWNLFIQSIDKLLLYLMTCPQRAFWGVTMVQLIALIYKDQHVSTLQKLLSLWFEASLSESSEDNESNTSPPKQGSGDSSPMLTSDPTSDSSDNGSNGRGMGGGMREGTAATLQEVSRKGQEYQNAMARVPADKPDGSEEASDMTGNDSEQPGSPEQSQPAGESMDDGDYEDQRHRQLNEHGEEDEDEDEVEEEEYLQLGPASEPLNLTQQPADKVNNTTNPTSSAPQGCLGNEPFKPPPPLPVRASTSAHAQMQKFNESSYASHVSAVKLGQKSPHAGQLQLTKGKCCPQKRECPSSQSELSDCGYGTQVENQESISTSSNDDDGPQGKPQHQKPPCNTKPRNKPRTIMSPMDKKELRRKKLVKRSKSSLINMKGLVQHTPTDDDISNLLKEFTVDFLLKGYSYLVEELHMQLLSNAKVPIDTSHFFWLVTYFLKFAAQLELDMEHIDTILTYDVLSYLTYEGVSLCEQLELNARQEGSDLKPYLRRMHLVVTAIREFLQAIDTYNKVTHLNEDDKAHLRQLQLQISEMSDLRCLFVLLLRRFNPSIHSKQYLQDLVVTNHILLLILDSSAKLGGCQTIRLSEHITQFATLEVMHYYGILLEDFNNNGEFVNDCIFTMMHHIGGDLGQIGVLFQPIILKTYSRIWEADYELCDDWSDLIEYVIHKFMNTPPKSPLTIPTTSLTEMTKEHNQEHTVCSWSQEEMDTLYWYYVQSKKNNDIVGKIVKLFSNNGNKLKTRISIIQQLLQQDIITLLEYDDLMKFEDAEYQRTLLTTPTSATTESGIEIKECAYGKPSDDVQILLDLIIKENKAQHLLWLQRILIECCFVKLTLRSGLKVPEGDHIMEPVAYHCICKQKSIPVVQWNNEQSTTMLYQPFVLLLHKLGIQLPADAGSIFARIPDYWTPETMYGLAKKLGPLDKLNLKFDASELEDATASSPSRYHHTGPRNSLSSVSSLDVDLGDTEELALIPEVDAAVEKAHAMASTPSPSEIFAVPKTKHCNSIIRYTPDPTPPVPNWLQLVMRSKCNHRTGPSGDPSDCIGSSSTTVDDEGFGKSISAATSQAASTSMSTVNPTTTLSLNMLNTFMGSHNENSSSSGCGGTVSSLSMVALMSTGAAGGGGNTSGLEMDVDASMKSSFERLEVNGSHFSRANNLDQEYSAMVASVYEKEKELNSDNVSLASDLTRMYVSDEDDRLERTEIRVPHYH

SEQ ID NO: 25978 - DNA, 7447 bp, DROSOPHILA
atctcatctcatatgaaagcaatatcatatatgtatgttaatattaaatagatattaaacataaaaatccatcccacccacattccgctgaaaaatgaaaacactcgcttttgccgaagtggaattttattgtaattaaatttgttgggtgtacaaaggtatgttttaaggactttctctctgcatttattacaatttcttcaaatggttttaattgctgggcttttgcttcgaagacgggcaatcaagtttcaagaatcctattttctttaatcatacaaattatgttttatttcgctttaatatataaggatacatatatatatctgctatatatagaagtgtgttgacttgcgtatatttcgtgaaaagtaaaagttttcttcttcgcaatttcccttgaactaacattccaattcgggttttggttatgttttttttttctgttttactctcattattttgtttgtttgttttttttaaataattttgcattttctgcatacatgtggttttgtgttttgcaattttttcaatgatttttccttgggtttttatttgtttttagttttcgatttgtttaataaaaaaatatgtatttcactgcccagagcgaaagccatttcttacttccgcttgcgttaatatatcattttatgtatgtatggtgtaaaaacatcatttactggtaaaactctcgatatcctttgtaacagaaatcggaacgcaaatgaaatcgaggcgacttaccagctccttctcattaaatacatatatgttcttgcaaatgtttataaatgtatgcatgtttttccttctctcggataatagtgtaatcataaaaatcctgtctgcttttttgttgtttattaatatgcttcataagttgtttacgctttagcgcttttcatgtgtttcttgtatttctcatatatgttgtggttgtttaatatgtgtgttgctgtgtgtgtgtttttgtgtttatatatattattttttttttgctgtttttacataggttttgccatttttttgtagttttttcgatttatgttttgttttcatttgtcaacatattttttcagctgttggtattctgtattttctctcttttttcaaagtagcaaaaacttgactctcatattcttgcggttttctttttctttctttctttctattcttctgttctctgcacagtttgctttccattttttcgtttttattttaactcttttgcaatttttttgttttttctttgcttttttaaaagtgtatggttgtcgcgtttctttttctaaacaaagctttcttaaagtttgaatttgagaaaaaagaattgaaaaaaattacatatcgctttcgtgtttgttgttgtttgaaagtgtggatggaaaaagtgtacgaaaaactcaatatgtatgtaacactagaaacttctttaaaatttttaaaacacaatttcaatacttgcaagaagcggtttacatgtatgctttgctttaatctgtttattttgcaatggttttttggtgttttcattatacgcatacaaaataatatcgatccagttaaagcaataacgaaatttttttcatttcacatttttccgtttttttttttaattaacatgtttatgtaaaaaaaaagaatttataagtggactgcagaatttgattgcgtgactttcttcttttgcttcgtgtacttgcgtaaatgcgttcgaaattaaatgattgaaattgcttttgttgatgtttctgggattagaaaagaaaaagccgtagatttttcgctttgtttttctgtgttaattgtgtgtccttggcaatcctcccctgcgcaaagcatcagtgaatgcgaatttttgttgttcatgtattgaaagattagtggaaaactgcaaggacaaaagagaggcgagtttagacagcttgaacttttcggaaaatttgtagactacttactttttgggtgtaaagtgttcttgtaaaatgttcatacgcttgagctgttcgagcttagttggcgggctcggtgacgcggtgcacctgaagcacggccacagcctcctccaccttggccttaagggcctcctgatcctcgatcatgtgcaagagctcagagttttcgatctccaacaacatgccggtgatcttaccagccaaattggcgtgcatatgctcaatcatcggatacagacgctcgcccaggatctgtttctgctcctgcggcttggcgttggccagcaacgaggcaatgagcttctcagaatctgcaagaaaaatagcaatggtgccattagtgacaaattgtgcatattttcagtcgacctaaaacttactctttccttgcaattgctgtggaattggctgggtctgatgcaactgtggcactggaggattgcgcatgtttgaggtgtacttatagttggaagtacgctgctgggcaccgccagcgatttgggctccggggatctgcatgttgggtgctgcagtttgctggccagtaatagcgcgtgctccagtgttgcgcatgttgttagccgcagcagcggcggcatgtgtgccctgcacctgaggctgtgccccgcgagcgccagcagcagccgaacggaactgagtgggcaccgcaccggctgtgccctggaagccaccagcagcggcagctccggcctggacaccctgtatggctgctgggggacgcacctggggcacccagcggggtgtgtttctcatctgagtggccacctgggaaccgaagaaacgctgatttgacggaagggtcggcacaaagaagccgctagccgcgttgggctggtagatctgtcccagctgctgcatacgcatgccggtcatgtgacgcatgtactgcgaggcgagatgagccttgcgctcctccttcctttgggccaaagcaacgtacaacggcttactgccgacgacgcgaccgttcagctcggtgacggcgcaggtagcctcgcttgcggcattgaagcacacgaagccgaatcccttggagcgaccctcctcatcggtcatgaccttggccgatgtgatgttgccgtatggagagaacgcgatgcgcagacgatcgtcatcgattgtgtcgtccaggttcttaacgtacaagttaacgccgaacacagactcgtgacgcttctgcttcagttcctcgaacttgcgcttcagctcctgctggcgttcggccttcttctgggcacgagccacgtacagggacttgccctctcccatgtccttgccattgagagcctgaacggccgcctcagcagcctctgttgtctcgaatgcaacgaatccgaagcccttgctcttgccatcctccttggacatgaccttgtagctggttatcttgccgtagggctcaaagaattccttcagtttttcatcgtcgaaatcctcagtgaagttcttcacatatacattggtgaagagcttagccttctcgcccagctccttctcgcgctccttgcgcgggatgaacttacccacgtagaccttcttgccgttgagcaacatgccattgactttgtcgatggacgtgtttgcggcctcctcggtctcgaagtggacgaatccatagccctttgagttgcccttttcatcggtggctaccttgcagcttaaaatgttgccgaaggcggagaaagtgtcgtagattgccttgttgtcgatggccctatctaagttcttgatgaacacgttgcccacacctgagcgacgaagagaaggatcacgctgagaccacataatgcgaatgggcttgttgcgaaccaggtcaaagttcatggtgtccaaagcacgctcagctgttgatgaaaatcgggaaaacatttggttactaccgacacgatttgggtatatcaagatcattataagttgaaggggcttaaataacaatgtgactcttcaacttctgcactggccatgagcaaaagcagcgcagtgcatggtaagtcaagtctgatcttttatctggcaactatgaatcttagtcgtgtcaaaaagggttgaatctgaccaaccaatgggtaggagttgctagatgtctaaatacaaggacaatcttatcagtctaatcatgtgatacattgagtgtttgttatgcagatggtatgcaaaacccatcagcatggtaagtcgcattgctttctctggcaactatgaatcttagtcgtgtcaaaatgggttaaatctgaccaaccaatgggtagaagttgctagaagcttagataagaaagggcataatccttcgagtctaatcatatgatgtattatttagtgtttgttatgcttctacttctgtggatggcatagatcagccatctacatggtaagttgcattgctttctctggcaacattgaatcttagtcgtgtcaaaaagagataaatctgaccaaccaatgggtaggagttgcgagatatgaatcgaaaaaagaaaaacatttagggtgttactagtctagaacgagatggtatcatttttgaaaggtctgtttttccaacctaaccttaacagctagagttcaagaaacttgctggaatgcgacagactttcacacgcagcgtaatcatcaccaaccgccagctttgtgccattgtgcgcttaattgaataaacaaatgtaagcgaacaacgggaatcgaagaagcaccaactatgcgcagtgaaagttttgttttcgttttttgtaaaaacaagattttgatggttaaaagagaggccgaaaagcagttcactgacatgtcaagaatttggaagtgttgatggatggaatgcggagagtatggaagatatgagaaagtgaaagcaaaacaaaagttggaggcagtacgaaaactaaagagcgaacgtgcggaaactcagttaatggaatataacctaaaatagatgaaggccaaaaagaaatggtccaaacaacaatgaacacatgtttttgcgcgtcggcgtgtgcgtgcgcgcaagtttgccgcttggaaacaacacacatcacacgaataaaacgagaagaacgggcaaggaaacaatgaaaccaccaatgggcggggctgcgataagcagtttgggcagtatggaaccatattattccatcataattgcaattttgtgcgaaattgagacggaaatttctaggcgaacagttgatgagtgccacgagccagctgtttagcccccatcatccccccgcacaaatcgtatacatccagaataactggaactgatataatcatgtgtgtgtgtgtacacactggcgggaattgagtgcgtgtgtgtgtgcgcgacgagattaacgtaagcagtgcactgtggaacaagttatgaaacacttggaagccgtttatctggtctcctatgaaagacatctttcaataaagtccagtttggacttgcgtttagccccactgtatgacatgcgctagtgtgcgtgcgtgtgtgagtaagcgagtgcaaaactgcacacgtgttttctttgtttcgcgcggaagggggctacttttgcgggcagtaagactaaaaaaattacactacttttgcggggattactcaccatcggctggctgctggaagttgacgtaggcatagcccaacgagcgacgggtaatcacatcgcggcagacacgaatggacagcactggaccagcagacgagaacttgtcaaaaagtcccgattcgttgacgtcctgtgggagatcaccgacgtatagagaagccatatttggtgatcaggtctacctgcaatttttaacaattaatttccacttttttgacactgaattttgggttttttcttaatctttacggaccggatggattcgaccaggcaggcggtgaaatagaaagaaaaaaagcggcgtggctttcggtcttctattcgtctctctgtctgtgtgtctgggtggcaacactggtacatgtgacagtcggtagacatggcaacgttggcatttgctttgttgttgctctttgctctccccttttatttctcttcgtgttggaaaatttccacacagacacaaagatagacacgcgtttgcctgatcgaattttggggaattctttgattttctcgaaaatatgcgacaactagttcctagaccactattttgcgggcaatctggcgtttatagacgccatctttgagcgaagaacgaccgcaaacaaagcaaatttcgatgggaaaggaaaatttccctattcgctttgtcgtgcgttgcgccctctcactctctacaccattgtaaccaatagctttacactgtacttacttctcaaacacgctcgattttttttgctactttttacaattttttttgttacgtttttgtgttttaatatttttttttattttttatatgttttttcttcacaaaaaatatgtgataagccgtgtgctgaaagcgaatccacgaccgctcacgtaaacggactctacacgactcatagagaggagattcgttagcgatgaccccacaaagtatcgattaaatcccactgcacaatgctgccacatagggttagagacaaataaatgtcactaaaaaatccgtgaggacaatttactaattacgaagcattattttgaatttcaaaaaagccagccatcacacataaaaaatttttatatttagctaattcccgaaacatgaaatacttgtgcattttcaggggttctttggtaactctgcttcatttatgttctgatattttcgccaatgtccttgaatactttgtctcataaaacacaatccaaaattaggaatgcagtttttttttcttttaaaaatgagcgtagacttttagaaaatgattttttggcactgcacagatattagcgtatgctccgaaaaccgaatcccatctttgtaattccccactgtgcgaacttacctaaatcagagaataaagcgatgaggctgcaagtcgacactccgagaagtgcttgagtacttcttttcgttctcgatggaaatcggcactacagagattgaagaattttttaagttttttttttgtgtttttgtttttacgaaatagaccacattcaaggatggctgaggataattttttttttctttttcccgttttgaacgtctggtgcatgtgccctatctggcgatcgagtacctaatgaagcggtgtgaggcgtcggtgcctgacaagcttcaaagcgaagtgtcactttgggcgcctactggcgtgtcctgagtaaaatcttaaaagatttgacatttcggaaacatttatttgggcattatatacttcattaaacatatttcgatctggtttggccaaacatttacttggcttgagaattagtttgctttcaactcaattttgatttttcgtagcatttaatagttaaacataaaacgtactggcttaattcattattgtgtagttttgcctagactatgggtgaaaattattg

SEQ ID NO: 25979 - DNA, 3038 bp, DROSOPHILA
agtccgtttacgtgagcggtcgtggattcgctttcagcacacggcttatcacatattttttgtgaagaaaaaacatataaaaaataaaaaaaaatattaaaacacaaaaacgtaacaaaaaaaattgtaaaaagtagcaaaaaaaatcgagcgtgtttgagaagtagacctgatcaccaaatatggcttctctatacgtcggtgatctcccacaggacgtcaacgaatcgggactttttgacaagttctcgtctgctggtccagtgctgtccattcgtgtctgccgcgatgtgattacccgtcgctcgttgggctatgcctacgtcaacttccagcagccagccgatgctgagcgtgctttggacaccatgaactttgacctggttcgcaacaagcccattcgcattatgtggtctcagcgtgatccttctcttcgtcgctcaggtgtgggcaacgtgttcatcaagaacttagatagggccatcgacaacaaggcaatctacgacactttctccgccttcggcaacattttaagctgcaaggtagccaccgatgaaaagggcaactcaaagggctatggattcgtccacttcgagaccgaggaggccgcaaacacgtccatcgacaaagtcaatggcatgttgctcaacggcaagaaggtctacgtgggtaagttcatcccgcgcaaggagcgcgagaaggagctgggcgagaaggctaagctcttcaccaatgtatatgtgaagaacttcactgaggatttcgacgatgaaaaactgaaggaattctttgagccctacggcaagataaccagctacaaggtcatgtccaaggaggatggcaagagcaagggcttcggattcgttgcattcgagacaacagaggctgctgaggcggccgttcaggctctcaatggcaaggacatgggagagggcaagtccctgtacgtggctcgtgcccagaagaaggccgaacgccagcaggagctgaagcgcaagttcgaggaactgaagcagaagcgtcacgagtctgtgttcggcgttaacttgtacgttaagaacctggacgacacaatcgatgacgatcgtctgcgcatcgcgttctctccatacggcaacatcacatcggccaaggtcatgaccgatgaggagggtcgctccaagggattcggcttcgtgtgcttcaatgccgcaagcgaggctacctgcgccgtcaccgagctgaacggtcgcgtcgtcggcagtaagccgttgtacgttgctttggcccaaaggaaggaggagcgcaaggctcatctcgcctcgcagtacatgcgtcacatgaccggcatgcgtatgcagcagctgggacagatctaccagcccaacgcggctagcggcttctttgtgccgacccttccgtcaaatcagcgtttcttcggttcccaggtggccactcagatgagaaacacaccccgctgggtgccccaggtgcgtcccccagcagccatacagggtgtccaggccggagctgccgctgctggtggcttccagggcacagccggtgcggtgcccactcagttccgttcggctgctgctggcgctcgcggggcacagcctcaggtgcagggcacacatgccgccgctgctgcggctaacaacatgcgcaacactggagcacgcgctattactggccagcaaactgcagcacccaacatgcagatccccggagcccaaatcgctggcggtgcccagcagcgtacttccaactataagtacacctcaaacatgcgcaatcctccagtgccacagttgcatcagacccagccaattccacagcaattgcaaggaaagaattctgagaagctcattgcctcgttgctggccaacgccaagccgcaggagcagaaacagatcctgggcgagcgtctgtatccgatgattgagcatatgcacgccaatttggctggtaagatcaccggcatgttgttggagatcgaaaactctgagctcttgcacatgatcgaggatcaggaggcccttaaggccaaggtggaggaggctgtggccgtgcttcaggtgcaccgcgtcaccgagcccgccaactaagctcgaacagctcaagcgtatgaacattttacaagaacactttacacccaaaaattttccactaatctttcaatacatgaacaacaaaaattcgcattcactgatgctttgcgcaggggaggattgccaaggacacacaattaacacagaaaaacaaagcgaaaaatctacggctttttcttttctaatcccagaaacatcaacaaaagcaatttcaatcatttaatttcgaacgcatttacgcaagtacacgaagcaaaagaagaaagtcacgcaatcaaattctgcagtccacttataaattctttttttttacataaacatgttaattaaaaaaaaaaacggaaaaatgtgaaatgaaaaaaatttcgttattgctttaactggatcgatattattttgtatgcgtataatgaaaacaccaaaaaaccattgcaaaataaacagattaaagcaaagcatacatgtaaaccgcttcttgcaagtattgaaattgtgttttaaaaattttaaagaagtttctagtgttacatacatattgagtttttcgtacactttttccatccacactttcaaacaacaacaaacacgaaagcgatatgtaatttttttcaattcttttttctcaaattcaaactttaagaaagctttgtttagaaaaagaaacgcgacaaccatacacttttaaaaaagcaaagaaaaaacaaaaaaattgcaaaagagttaaaataaaaacgaaaaaatggaaagcaaactgtgcagagaacagaagaatagaaagaaagaaagaaaaagaaaaccgcaagaatatgagagtcaagtttttgctactttgaaaaaagagagaaaatacagaataccaacagctgaaaaaatatgttgacaaatgaaaacaaaacataaatcgaaaaaactacaaaaaaatggcaaaacctatgtaaaaacagcaaa

SEQ ID NO: 25980 - protein, 634 aa, DROSOPHILA; identical to SEQ ID NO: 10608

SEQ ID NO: 25981 - DNA, 8132 bp, DROSOPHILA
atctcatctcatatgaaagcaatatcatatatgtatgttaatattaaatagatattaaacataaaaatccatcccacccacattccgctgaaaaatgaaaacactcgcttttgccgaagtggaattttattgtaattaaatttgttgggtgtacaaaggtatgttttaaggactttctctctgcatttattacaatttcttcaaatggttttaattgctgggcttttgcttcgaagacgggcaatcaagtttcaagaatcctattttctttaatcatacaaattatgttttatttcgctttaatatataaggatacatatatatatctgctatatatagaagtgtgttgacttgcgtatatttcgtgaaaagtaaaagttttcttcttcgcaatttcccttgaactaacattccaattcgggttttggttatgttttttttttctgttttactctcattattttgtttgtttgttttttttaaataattttgcattttctgcatacatgtggttttgtgttttgcaattttttcaatgatttttccttgggtttttatttgtttttagttttcgatttgtttaataaaaaaatatgtatttcactgcccagagcgaaagccatttcttacttccgcttgcgttaatatatcattttatgtatgtatggtgtaaaaacatcatttactggtaaaactctcgatatcctttgtaacagaaatcggaacgcaaatgaaatcgaggcgacttaccagctccttctcattaaatacatatatgttcttgcaaatgtttataaatgtatgcatgtttttccttctctcggataatagtgtaatcataaaaatcctgtctgcttttttgttgtttattaatatgcttcataagttgtttacgctttagcgcttttcatgtgtttcttgtatttctcatatatgttgtggttgtttaatatgtgtgttgctgtgtgtgtgtttttgtgtttatatatattattttttttttgctgtttttacataggttttgccatttttttgtagttttttcgatttatgttttgttttcatttgtcaacatattttttcagctgttggtattctgtattttctctcttttttcaaagtagcaaaaacttgactctcatattcttgcggttttctttttctttctttctttctattcttctgttctctgcacagtttgctttccattttttcgtttttattttaactcttttgcaatttttttgttttttctttgcttttttaaaagtgtatggttgtcgcgtttctttttctaaacaaagctttcttaaagtttgaatttgagaaaaaagaattgaaaaaaattacatatcgctttcgtgtttgttgttgtttgaaagtgtggatggaaaaagtgtacgaaaaactcaatatgtatgtaacactagaaacttctttaaaatttttaaaacacaatttcaatacttgcaagaagcggtttacatgtatgctttgctttaatctgtttattttgcaatggttttttggtgttttcattatacgcatacaaaataatatcgatccagttaaagcaataacgaaatttttttcatttcacatttttccgtttttttttttaattaacatgtttatgtaaaaaaaaagaatttataagtggactgcagaatttgattgcgtgactttcttcttttgcttcgtgtacttgcgtaaatgcgttcgaaattaaatgattgaaattgcttttgttgatgtttctgggattagaaaagaaaaagccgtagatttttcgctttgtttttctgtgttaattgtgtgtccttggcaatcctcccctgcgcaaagcatcagtgaatgcgaatttttgttgttcatgtattgaaagattagtggaaaactgcaaggacaaaagagaggcgagtttagacagcttgaacttttcggaaaatttgtagactacttactttttgggtgtaaagtgttcttgtaaaatgttcatacgcttgagctgttcgagcttagttggcgggctcggtgacgcggtgcacctgaagcacggccacagcctcctccaccttggccttaagggcctcctgatcctcgatcatgtgcaagagctcagagttttcgatctccaacaacatgccggtgatcttaccagccaaattggcgtgcatatgctcaatcatcggatacagacgctcgcccaggatctgtttctgctcctgcggcttggcgttggccagcaacgaggcaatgagcttctcagaatctgcaagaaaaatagcaatggtgccattagtgacaaattgtgcatattttcagtcgacctaaaacttactctttccttgcaattgctgtggaattggctgggtctgatgcaactgtggcactggaggattgcgcatgtttgaggtgtacttatagttggaagtacgctgctgggcaccgccagcgatttgggctccggggatctgcatgttgggtgctgcagtttgctggccagtaatagcgcgtgctccagtgttgcgcatgttgttagccgcagcagcggcggcatgtgtgccctgcacctgaggctgtgccccgcgagcgccagcagcagccgaacggaactgagtgggcaccgcaccggctgtgccctggaagccaccagcagcggcagctccggcctggacaccctgtatggctgctgggggacgcacctggggcacccagcggggtgtgtttctcatctgagtggccacctgggaaccgaagaaacgctgatttgacggaagggtcggcacaaagaagccgctagccgcgttgggctggtagatctgtcccagctgctgcatacgcatgccggtcatgtgacgcatgtactgcgaggcgagatgagccttgcgctcctccttcctttgggccaaagcaacgtacaacggcttactgccgacgacgcgaccgttcagctcggtgacggcgcaggtagcctcgcttgcggcattgaagcacacgaagccgaatcccttggagcgaccctcctcatcggtcatgaccttggccgatgtgatgttgccgtatggagagaacgcgatgcgcagacgatcgtcatcgattgtgtcgtccaggttcttaacgtacaagttaacgccgaacacagactcgtgacgcttctgcttcagttcctcgaacttgcgcttcagctcctgctggcgttcggccttcttctgggcacgagccacgtacagggacttgccctctcccatgtccttgccattgagagcctgaacggccgcctcagcagcctctgttgtctcgaatgcaacgaatccgaagcccttgctcttgccatcctccttggacatgaccttgtagctggttatcttgccgtagggctcaaagaattccttcagtttttcatcgtcgaaatcctcagtgaagttcttcacatatacattggtgaagagcttagccttctcgcccagctccttctcgcgctccttgcgcgggatgaacttacccacgtagaccttcttgccgttgagcaacatgccattgactttgtcgatggacgtgtttgcggcctcctcggtctcgaagtggacgaatccatagccctttgagttgcccttttcatcggtggctaccttgcagcttaaaatgttgccgaaggcggagaaagtgtcgtagattgccttgttgtcgatggccctatctaagttcttgatgaacacgttgcccacacctgagcgacgaagagaaggatcacgctgagaccacataatgcgaatgggcttgttgcgaaccaggtcaaagttcatggtgtccaaagcacgctcagctgttgatgaaaatcgggaaaacatttggttactaccgacacgatttgggtatatcaagatcattataagttgaaggggcttaaataacaatgtgactcttcaacttctgcactggccatgagcaaaagcagcgcagtgcatggtaagtcaagtctgatcttttatctggcaactatgaatcttagtcgtgtcaaaaagggttgaatctgaccaaccaatgggtaggagttgctagatgtctaaatacaaggacaatcttatcagtctaatcatgtgatacattgagtgtttgttatgcagatggtatgcaaaacccatcagcatggtaagtcgcattgctttctctggcaactatgaatcttagtcgtgtcaaaatgggttaaatctgaccaaccaatgggtagaagttgctagaagcttagataagaaagggcataatccttcgagtctaatcatatgatgtattatttagtgtttgttatgcttctacttctgtggatggcatagatcagccatctacatggtaagttgcattgctttctctggcaacattgaatcttagtcgtgtcaaaaagagataaatctgaccaaccaatgggtaggagttgcgagatatgaatcgaaaaaagaaaaacatttagggtgttactagtctagaacgagatggtatcatttttgaaaggtctgtttttccaacctaaccttaacagctagagttcaagaaacttgctggaatgcgacagactttcacacgcagcgtaatcatcaccaaccgccagctttgtgccattgtgcgcttaattgaataaacaaatgtaagcgaacaacgggaatcgaagaagcaccaactatgcgcagtgaaagttttgttttcgttttttgtaaaaacaagattttgatggttaaaagagaggccgaaaagcagttcactgacatgtcaagaatttggaagtgttgatggatggaatgcggagagtatggaagatatgagaaagtgaaagcaaaacaaaagttggaggcagtacgaaaactaaagagcgaacgtgcggaaactcagttaatggaatataacctaaaatagatgaaggccaaaaagaaatggtccaaacaacaatgaacacatgtttttgcgcgtcggcgtgtgcgtgcgcgcaagtttgccgcttggaaacaacacacatcacacgaataaaacgagaagaacgggcaaggaaacaatgaaaccaccaatgggcggggctgcgataagcagtttgggcagtatggaaccatattattccatcataattgcaattttgtgcgaaattgagacggaaatttctaggcgaacagttgatgagtgccacgagccagctgtttagcccccatcatccccccgcacaaatcgtatacatccagaataactggaactgatataatcatgtgtgtgtgtgtacacactggcgggaattgagtgcgtgtgtgtgtgcgcgacgagattaacgtaagcagtgcactgtggaacaagttatgaaacacttggaagccgtttatctggtctcctatgaaagacatctttcaataaagtccagtttggacttgcgtttagccccactgtatgacatgcgctagtgtgcgtgcgtgtgtgagtaagcgagtgcaaaactgcacacgtgttttctttgtttcgcgcggaagggggctacttttgcgggcagtaagactaaaaaaattacactacttttgcggggattactcaccatcggctggctgctggaagttgacgtaggcatagcccaacgagcgacgggtaatcacatcgcggcagacacgaatggacagcactggaccagcagacgagaacttgtcaaaaagtcccgattcgttgacgtcctgtgggagatcaccgacgtatagagaagccatatttggtgatcaggtctacctgcaatttttaacaattaatttccacttttttgacactgaattttgggttttttcttaatctttacggaccggatggattcgaccaggcaggcggtgaaatagaaagaaaaaaagcggcgtggctttcggtcttctattcgtctctctgtctgtgtgtctgggtggcaacactggtacatgtgacagtcggtagacatggcaacgttggcatttgctttgttgttgctctttgctctccccttttatttctcttcgtgttggaaaatttccacacagacacaaagatagacacgcgtttgcctgatcgaattttggggaattctttgattttctcgaaaatatgcgacaactagttcctagaccactattttgcgggcaatctggcgtttatagacgccatctttgagcgaagaacgaccgcaaacaaagcaaatttcgatgggaaaggaaaatttccctattcgctttgtcgtgcgttgcgccctctcactctctacaccattgtaaccaatagctttacactgtacttacttctcaaacacgctcgattttttttgctactttttacaattttttttgttacgtttttgtgttttaatatttttttttattttttatatgttttttcttcacaaaaaatatgtgataagccgtgtgctgaaagcgaatccacgaccgctcacgtaaacggactctacacgactcatagagaggagattcgttagcgatgaccccacaaagtatcgattaaatcccactgcacaatgctgccacatagggttagagacaaataaatgtcactaaaaaatccgtgaggacaatttactaattacgaagcattattttgaatttcaaaaaagccagccatcacacataaaaaatttttatatttagctaattcccgaaacatgaaatacttgtgcattttcaggggttctttggtaactctgcttcatttatgttctgatattttcgccaatgtccttgaatactttgtctcataaaacacaatccaaaattaggaatgcagtttttttttcttttaaaaatgagcgtagacttttagaaaatgattttttggcactgcacagatattagcgtatgctccgaaaaccgaatcccatctttgtaattccccactgtgcgaacttacctaaatcagagaataaagcgatgaggctgcaagtcgacactccgagaagtgcttgagtacttcttttcgttctcgatggaaatcggcactacagagattgaagaattttttaagttttttttttgtgtttttgtttttacgaaatagaccacattcaaggatggctgaggataattttttttttctttttcccgttttgaacgtctggtgcatgtgccctatctggcgatcgagtacctaatgaagcggtgtgaggcgtcggtgcctgacaagcttcaaagcgaagtgtcactttgggcgcctactggcgtgtcctgagtaaaatcttaaaagatttgacatttcggaaacatttatttgggcattatatacttcattaaacatatttcgatctggtttggccaaacatttacttggcttgagaattagtttgctttcaactcaattttgatttttcgtagcatttaatagttaaacataaaacgtactggcttaattcattattgtgtagttttgcctagactatgggtgaaaattattgaactagtcctacattttattaaatttgtgtgtatgtatgtatatcaattgttttttttttgtatgcatgacatgatttgtgagttttcccatttgaaggtatatttttcaaaaacatacatgggcgtggcgtatcgctaaagtacagtactgaacttaactgaattgttctcattatttaatacgttttcattcatcagcgaattttacataggcttccagattaatcttgtaatacttttaccaattttgtgaaaacttatttatgttctgctgcaacacttaactgccattgcacaattataacctgtattcagttgctttttgcttttttttcgttttttttttttacaatttaacattttatcgctttaatgctgaaccaatattttgaacaatctttttctattttggcagtgggttggtaataaacttttaaacattaacaaataaagaggcccgtagttggcagcgttcattaatacataataacgaaaagaaatgataatggaaatgaagaatataaaattcataatgagtcggtatgccaaagggttcaatttccaagcaatccaatcgccgttgtcgctgtatctccgccccactccaccaggtactggacctgtccatttcccatgcgccgcttggcccgaatggcaaagggctcaccagcatctatgcgattc

SEQ ID NO: 25982 - DNA, 3101 bp, DROSOPHILA
ccagatagggcacatgcaccagacgttcaaaacgggaaaaagaaaaaaaaaattatcctcagccatccttgaatgtggtctatttcgtaaaaacaaaaacacaaaaaaaaaacttaaaaaattcttcaatctctgtagtgccgatttccatcgagaacgaaaagaagtactcaagcacttctcggagtgtcgacttgcagcctcatcgctttattctctgatttaggtagacctgatcaccaaatatggcttctctatacgtcggtgatctcccacaggacgtcaacgaatcgggactttttgacaagttctcgtctgctggtccagtgctgtccattcgtgtctgccgcgatgtgattacccgtcgctcgttgggctatgcctacgtcaacttccagcagccagccgatgctgagcgtgctttggacaccatgaactttgacctggttcgcaacaagcccattcgcattatgtggtctcagcgtgatccttctcttcgtcgctcaggtgtgggcaacgtgttcatcaagaacttagatagggccatcgacaacaaggcaatctacgacactttctccgccttcggcaacattttaagctgcaaggtagccaccgatgaaaagggcaactcaaagggctatggattcgtccacttcgagaccgaggaggccgcaaacacgtccatcgacaaagtcaatggcatgttgctcaacggcaagaaggtctacgtgggtaagttcatcccgcgcaaggagcgcgagaaggagctgggcgagaaggctaagctcttcaccaatgtatatgtgaagaacttcactgaggatttcgacgatgaaaaactgaaggaattctttgagccctacggcaagataaccagctacaaggtcatgtccaaggaggatggcaagagcaagggcttcggattcgttgcattcgagacaacagaggctgctgaggcggccgttcaggctctcaatggcaaggacatgggagagggcaagtccctgtacgtggctcgtgcccagaagaaggccgaacgccagcaggagctgaagcgcaagttcgaggaactgaagcagaagcgtcacgagtctgtgttcggcgttaacttgtacgttaagaacctggacgacacaatcgatgacgatcgtctgcgcatcgcgttctctccatacggcaacatcacatcggccaaggtcatgaccgatgaggagggtcgctccaagggattcggcttcgtgtgcttcaatgccgcaagcgaggctacctgcgccgtcaccgagctgaacggtcgcgtcgtcggcagtaagccgttgtacgttgctttggcccaaaggaaggaggagcgcaaggctcatctcgcctcgcagtacatgcgtcacatgaccggcatgcgtatgcagcagctgggacagatctaccagcccaacgcggctagcggcttctttgtgccgacccttccgtcaaatcagcgtttcttcggttcccaggtggccactcagatgagaaacacaccccgctgggtgccccaggtgcgtcccccagcagccatacagggtgtccaggccggagctgccgctgctggtggcttccagggcacagccggtgcggtgcccactcagttccgttcggctgctgctggcgctcgcggggcacagcctcaggtgcagggcacacatgccgccgctgctgcggctaacaacatgcgcaacactggagcacgcgctattactggccagcaaactgcagcacccaacatgcagatccccggagcccaaatcgctggcggtgcccagcagcgtacttccaactataagtacacctcaaacatgcgcaatcctccagtgccacagttgcatcagacccagccaattccacagcaattgcaaggaaagaattctgagaagctcattgcctcgttgctggccaacgccaagccgcaggagcagaaacagatcctgggcgagcgtctgtatccgatgattgagcatatgcacgccaatttggctggtaagatcaccggcatgttgttggagatcgaaaactctgagctcttgcacatgatcgaggatcaggaggcccttaaggccaaggtggaggaggctgtggccgtgcttcaggtgcaccgcgtcaccgagcccgccaactaagctcgaacagctcaagcgtatgaacattttacaagaacactttacacccaaaaattttccactaatctttcaatacatgaacaacaaaaattcgcattcactgatgctttgcgcaggggaggattgccaaggacacacaattaacacagaaaaacaaagcgaaaaatctacggctttttcttttctaatcccagaaacatcaacaaaagcaatttcaatcatttaatttcgaacgcatttacgcaagtacacgaagcaaaagaagaaagtcacgcaatcaaattctgcagtccacttataaattctttttttttacataaacatgttaattaaaaaaaaaaacggaaaaatgtgaaatgaaaaaaatttcgttattgctttaactggatcgatattattttgtatgcgtataatgaaaacaccaaaaaaccattgcaaaataaacagattaaagcaaagcatacatgtaaaccgcttcttgcaagtattgaaattgtgttttaaaaattttaaagaagtttctagtgttacatacatattgagtttttcgtacactttttccatccacactttcaaacaacaacaaacacgaaagcgatatgtaatttttttcaattcttttttctcaaattcaaactttaagaaagctttgtttagaaaaagaaacgcgacaaccatacacttttaaaaaagcaaagaaaaaacaaaaaaattgcaaaagagttaaaataaaaacgaaaaaatggaaagcaaactgtgcagagaacagaagaatagaaagaaagaaagaaaaagaaaaccgcaagaatatgagagtcaagtttttgctactttgaaaaaagagagaaaatacagaataccaacagctgaaaaaatatgttgacaaatgaaaacaaaacataaatcgaaaaaactacaaaaaaatggcaaaacctatgtaaaaacagcaaa

SEQ ID NO: 25983 - protein, 634 aa, DROSOPHILA; identical to SEQ ID NO: 10608

SEQ ID NO: 25984 - DNA, 14278 bp, DROSOPHILA; identical to SEQ ID NO: 6373

SEQ ID NO: 25985 - DNA, 2325 bp, DROSOPHILA
ccgcgaacggtcgtgtgtgatctccgatctccgatccccgattttcggttcacgttctatacggtactcgattctcgcaggtatcgagctttgttcagttggggcaactccaaagtcgagacgtgtcgtcgggtgcgtgtgcgcgaatctgaacaaaaagcgaaaaaaaagtgccgatccgaaaaggcagcgttacgagttccaactctccaaccgtctagataagacgccaagagaggaagctagaaggatccactgccagcgtaccaaacacaaatcatccacacagccatggaacgcgtccacctgaccgcctggttggccctgttcctcattgtggttgccaacgccacgcccactcccgctcgcacgcccaccggctgcccggcggactgcacctgcagcttgtcccagcacacgcacaagccactgtaccacctcaaatgcaacagcacccgtggtctgaggctgaccgagaagaccttccagtcaacggtgccggtgcactccatcgatctgtcccacctgaacctcacccgcttgagccatttgctagacaagctgccggagctcacctccgctgatttgtcgcataaccagctgaaggatctgggtcacctgggcaagggcctcaagcgactgaacctcaagcataatcagctcacctcggacaagctgaggaaactgccgcagcatctgcaggtgctgaacctgcagcacaacaacatcacccacctgccgctggagctgacccacatgcaccagttgcaccagttggagctgagccacaacgccatcaactgctcctgccagactctggaggtgcgcaactggttggtggaacgaatcgtctacatggaacaccccgttgtctgctcctatcccctggagttcaggggtcgctcttggctgcaattgaagcaggatgagatctgcaagaaggagaagtaccaatggttcgataccgaggagaacgagctgatgatgggcgaccagccggctgcagtttctgcagaacgcgaggatgaggaggaactaggaaaagactttttgcccattgttggaaatcctgcagccactgctaagaaggttcgctcgcctcagatcccgctgccttctgaccaggtggagggatccggagatctcagcgaaaccaatatggagcttaaattgcccgaagagaccgttgcagagcctgaagctgcggaatctcagttggtggatgctgcggcctcccccagtgtcctcgaggagcacatcgtaaaggacgaggacgaagatgacgagggttctggcagcggcggtggtctgctcatcattcccgatccctctaaagttaagataacttccgaggacgacatagatagcgatggtaagccagaggagagcgatgttagacctcttgagaatccagagaattcggagaatccagacactgttttctccaataaaattggtatctacgaaggcgaccaggaggaaaagaagcccgtggaagaagataatatcgtgccggtggtgatgaccaatttggatactggtctggagtccgatgtggttactgatgggccactggacagcagcaaggagtccgaggacatcctgaccgccaagataggcaagccaaaggacgacagcagcgccatctactatctgctggccgtgattggactaattgtagtgggcctggtcctctttgtggccatcaagcgttgcaagtacgacagcaatgcggccgcccgagatgcagaggcccagcggcagacggagctcctggacatggacaagaagcagctgggcaagccgctgcacaagaatggccatggcaacggccaggagcactctccactgatcggagagaagaccaaattggacgaggcacagattgtcaagaagccctacgagaacggagaggccaaggacggggctggtcagcagcccctgctaaatggcaacggttcggccaatggaggtaccaaagaggcacccgaaaccggagagcctgccgcccatgaatactaccccatcacccctcgctaccccacaccgcaatcccccagggcatccaagtacgcacagcaacagcagctcgccgagcagaacaacaacgaaccagatggcgcctacctgccctcgtcgcccaagtccggaagatactcacccgtctattccccggagacgggtcgcgtcaagatcaagctgacggagaccccgaagcccaagacccccatgctggtgacgcgcagcaagtccaatgccggggacatcatcactacgcccgtcagacccatcgaacccacccaccaggtgatcaatggccactga

SEQ ID NO: 25986 - protein, 677 aa, DROSOPHILA; identical to SEQ ID NO: 6375

SEQ ID NO: 25987 - DNA, 3751 bp, DROSOPHILA
tcttccccaacgttaagcaagcctatagcaaggtataacacaagggacaaaatgaccgatattcctccaccacttcacaactaaattttgagatccttcatcatccatcgggcattcgaggagtcatcgtgagactttggtcaagaacgccggtgttccccgaggatgtgtacttggactcttcctgtataccatctgcacagcagatattccagtttcatcacactatacaggaatggcttgtgtcaccttcccgaaataacatattttttttgcagagtaaataattcttgaactatcaggtatccgtttttcagtacgatggaaaaaatttggcatatcgatttaaattggcactacatatatttaaaaaaaataatattaacatttctttaaatgagggcatggtagtcttaggccgtttaagggctatacagtaggggtagccaaaatgttttatcatatatatatatatagaaatttttaaaataaaatatttaaaaaaaattaaattaagaaatacctttgtgggctaagtcttgtgcgttttgttgtcgtacaaaaatatttatggcatgccgatagaaatttaaaatttaaacatattttaaaagtgtagacgagaaagttttaggcctaaaagtgggcttggtgggcttctaaacaaatcggcaaagcttttgcatcactaaaatttgaatatttaatagcaatattcaagctgttataatacccgagatcacagactttatacggacagccaaacctacagacaacccgacgtacaggcgaagatagccagatatagggtgttaaacccatacgtctaaatcaaatcttctatggaaaataatgtcataacacataccttcgctcgacgtacgttccatgttcgcagatatagtacttagtgcaatcccattcgtgcgccaaatagtttttgctgtggcatttgatggacaggacatttaaggatacattttgggtaggagaatcaagattaggtccagatggggcatttattgttggcctgaaaggcggtttgatgtttggctctggaaaatggtacggaattagtcttgttttactgaataatgctagacgtttcttactcattgtgcttttggggttttcaagtaagcacttcggttggggacccccgaaacctctgagtacacgattaatagctttaagcaagggatatgactcgcattcgcacacatttttgaagtcatccaagtctagagcccatatcatagctccaccaagacccatcgccttgatgtactcgcttttatgccgaatcatgggtacatcatcgaacgaaacccactgatccccatgatatgcgaagggtcctattcgacccttggtatcccttacaacgttccacctatgatgtcggattttcaagcatatttcatagtatgccaaaaatcctcgggctcttgtagcctctccagcttcaccgccaccatacgtgggagcatttagttggtgcttagtagtctcagccagagagaatgactggccgtacagaggtattcccattactaactttcgccggtcagctcccatcgagatccagtagttcatggaaaaattggcgttaaaatttgctgttccttctgggtggctgtacattggagctacatggccagtcttcttatcccactgaccgtggtagtcataggccatcacagatatccaagaaaagtaatgggatagctccgcaacttcgtatccagcatcgattaccttcttgttaggtgacacggcagctgacagaattaatcccctgggctggaaggcataaaaaagctcccgcaccaaagctgagaatccaatcttctcttctgccgtccctttcttgcaatccacctgccagcaaacggggtactcccaatccaggtccaagccgtcgaaattatattcctctataaaatccaagacattacggataaaccgagatcttgcctctggattccttacaagtcgggagtacttatcgccagcagaatcattccaaccgccaattgccacagttactttagcgcctttcttgcggtaggccacaatccgctcataaaacttgttgtctaagtccgcccaagagtcatgaggctgaatcgtaaggttgtcccgactcaacacggcaaagccataaattatgtgggtacacagatccgaatcaatatcttccggcaggaacttaccaccaccttgacggtaccacgcccagttggtaaagtagcaaatgattttaaattccgtggccatttcagtagcttctatgttttcctcctcaaggacgtgatttgggtctaaaataccttcatgttcttcaccttcattttcgcaggtctgcatcaccgcttcaatcggctgcacctcgggaccctccccattagactcatgtatctcttcttccatgcctgggtactctgtaggagtcgtttcgataggacctagacgaggtaaaagaatttagtgacactgataacctaattgtttacgatttaacataccaggtatttccattaaactaggtggatccttaagcacgttatggatttcagtgagcaaaggatgcacgccatttccacaccgatttttaaagtcatccagatcaagagcccaaaccattccaccgcccagtttcaatgacctcaccagtagtgattttttcctgaccatatcggggctatcgtaggacacccactgagttcccttgtaagcataaggtcccatgcgcccaaattcatcatgcactacctgccagccttggcgatttactcgttcacaaatctgatataaagcagtaatacgaattagttaaaacacaactaaaaaattcgcaccaaatatatacttaaatattcaaaggacaaagacaatacaaaaggtttttagtattctgcctataatcgaagcttgcatgagcaaaccgaagctattttatctatataaggcttaccaataaaaatttaaaataggttggagatatgaagatataaaaaatcaataaatattgccaagataaatagtaaaataataacaagaaaaccattttaacaattgtttccaactaaaggtttgcggcatgtgagcattagagtgggtgtttctgtgttttggcctactaatagaagacagcaaacgaaaacagatcataaaatataaaaatcaataaattttgcagaaaataggtactcttcccatctttcaccactagttccgagtagcggatcctactcaggatcccccaccgaaaaaattatcgcacaggtataagtaaagtccttagtgcaagtctgctcaggagagagaaagacattctccgagacacctaatccctagacctagagcctgatatcgcaaaggtatcgctttgtagaaaaaatctctttgaattatgatatgaaatatgataccctgagcgatgtcggaaattatgcaggaaaaatcactgaaatgattaatttccaattaaaaataccgtcttcatagacattttccaaggcataattctaacccaggggctctttgacaaacttgcagtcaagaagagagaaagtaagggctggggctaaaagaaacattcaaggactacatggttgatatgtaaaccctgataggacccctggcatacggaaaaaggaaacgctggaaatcattatagaggactgcacggtgctatcctaacgcgtggacaacctggaagcagtcagacgtgtttagccgaaacaaa

SEQ ID NO: 25988 - DNA, 1527 bp, DROSOPHILA
atgggaccttatgcttacaagggaactcagtgggtgtcctacgatagccccgatatggtcaggaaaaaatcactactggtgaggtcattgaaactgggcggtggaatggtttgggctcttgatctggatgactttaaaaatcggtgtggaaatggcgtgcatcctttgctcactgaaatccataacgtgcttaaggatccacctagtttaatggaaatacctggtcctatcgaaacgactcctacagagtacccaggcatggaagaagagatacatgagtctaatggggagggtcccgaggtgcagccgattgaagcggtgatgcagacctgcgaaaatgaaggtgaagaacatgaaggtattttagacccaaatcacgtccttgaggaggaaaacatagaagctactgaaatggccacggaatttaaaatcatttgctactttaccaactgggcgtggtaccgtcaaggtggtggtaagttcctgccggaagatattgattcggatctgtgtacccacataatttatggctttgccgtgttgagtcgggacaaccttacgattcagcctcatgactcttgggcggacttagacaacaagttttatgagcggattgtggcctaccgcaagaaaggcgctaaagtaactgtggcaattggcggttggaatgattctgctggcgataagtactcccgacttgtaaggaatccagaggcaagatctcggtttatccgtaatgtcttggattttatagaggaatataatttcgacggcttggacctggattgggagtaccccgtttgctggcaggtggattgcaagaaagggacggcagaagagaagattggattctcagctttggtgcgggagcttttttatgccttccagcccaggggattaattctgtcagctgccgtgtcacctaacaagaaggtaatcgatgctggatacgaagttgcggagctatcccattacttttcttggatatctgtgatggcctatgactaccacggtcagtgggataagaagactggccatgtagctccaatgtacagccacccagaaggaacagcaaattttaacgccaatttttccatgaactactggatctcgatgggagctgaccggcgaaagttagtaatgggaatacctctgtacggccagtcattctctctggctgagactactaagcaccaactaaatgctcccacgtatggtggcggtgaagctggagaggctacaagagcccgaggatttttggcatactatgaaatatgcttgaaaatccgacatcataggtggaacgttgtaagggataccaagggtcgaataggacccttcgcatatcatggggatcagtgggtttcgttcgatgatgtacccatgattcggcataaaagcgagtacatcaaggcgatgggtcttggtggagctatgatatgggctctagacttggatgacttcaaaaatgtagccaaacatcaaaccgcctttcaggccaacaataaatgccccatctggacctaa

SEQ ID NO: 25989 - protein, 508 aa, DROSOPHILA
MGPYAYKGTQWVSYDSPDMVRKKSLLVRSLKLGGGMVWALDLDDFKNRCGNGVHPLLTEIHNVLKDPPSLMEIPGPIETTPTEYPGMEEEIHESNGEGPEVQPIEAVMQTCENEGEEHEGILDPNHVLEEENIEATEMATEFKIICYFTNWAWYRQGGGKFLPEDIDSDLCTHIIYGFAVLSRDNLTIQPHDSWADLDNKFYERIVAYRKKGAKVTVAIGGWNDSAGDKYSRLVRNPEARSRFIRNVLDFIEEYNFDGLDLDWEYPVCWQVDCKKGTAEEKIGFSALVRELFYAFQPRGLILSAAVSPNKKVIDAGYEVAELSHYFSWISVMAYDYHGQWDKKTGHVAPMYSHPEGTANFNANFSMNYWISMGADRRKLVMGIPLYGQSFSLAETTKHQLNAPTYGGGEAGEATRARGFLAYYEICLKIRHHRWNVVRDTKGRIGPFAYHGDQWVSFDDVPMIRHKSEYIKAMGLGGAMIWALDLDDFKNVAKHQTAFQANNKCPIWT

SEQ ID NO: 25990 - DNA, 3185 bp, DROSOPHILA
aaaagtgaaatcaaccaagcgaattcattgttttcgcaaggcgaactttctgaggctaaatattttttaaaggtggctttaattggtcggatgcgcactcctgcaatataatgttgacatatatattttctataccgcaagcaaatcatttgttaactcttgtgttccgatgtactatccgtgaatctttaacaaacctccttggcttaataaagaaagaaagtaaatactttatacaaaatttaagaaataccggatctcagtctatccttcctaatatgtagtgctcagtgttaaaataacaatttaacccgttttttgttctaattcgcacaggatcggaaacagtttttttaatttcgttcacactaagtgcaaaataatttcgtacacttcctcgctactttttgaaaatactactgattgggcaatagctatatttcaaacgacgtattctaagttgcctcattccgaacagccaaactcttccgcggtattaaattcgaatctaatatgtaatcccactctaaccgaaagctgactgttttacgatcttcagcgtgttaagcccgtctatttgccaggtttcgacgaaaaccctggccttgtgctcaaatccttgggcaatccttgtataagcctctacttaaaatatttaccttatctctggaatatttacagttccccatgtatggaaggagctctttgtgattcctcttcacacaaagggtaacaaattgtatgcaagcaattacaaaggaatctctcaatttccggctttccctacgctttttgaaaattgtatcactcttcatttccagcacctttttaggtcatttatatcaccatgtcagcacggtcatattcactaatcttagtcttattcggtgtcccacaagggtacctgtgttcgttactctttaccttatttattattgacattcgcaaatgtggtttttctcacttagcaatttttaccacaccctagtcattttcgacctcagacccgagggccgtgcgcgaagaagtgaaataacggaataacgcgtcctacatataaagagacggcgcaagcataggggttaagggaatttgatggtccttaataaactaaaagcttattttgctagtccgtccgatagactttatcacattatcccagtctgacactttactgatcttaaagtaatctataataatctttttattattattcatatacataagggtgtttcgtaaatatttaattaagcaaaatcatttcatctattaaaacaatttcacaaattctttcatattggctgagtggttactggcaattttataaaattcaaagtgtttgagccttcgtaatctattcattaatctttgaaactatgtttgttaatatattgttccttataaacttttcttgttgaagaatgtttgaaatgtgggtgcttaaataaagaagtaaacaatgtggctccgcttactgtgaacttttaaattatattcaaagaaaagcaccgcaaagggattttagggctgaagctatttacgaatcacccctgtgtaatatgattttgggatatcagttgaataatataccttggtaaagccaatcaggaacaccattatatatatggttttcatgtccagaagaggttattcttatatcttcctccactaaaggcgattgtcgaataaaaatatcattttttactacaaatattattgcagtcgtattgccaagccaagatgcatactgaaggcgagttctttgtacctttaatgtgtcttttaattttactggcgtgtgatgatcattggttacatcataaattgtataaaatgcggtaaatgatttctgaaaattctacaaaaagagtttgtttattattaaagagtactgtttagaagaacacttactttttttacattatgcgtgaataaaacatattttagatcgctggagcacaaataccttcgaacatttagttggcgaagagtgtgattagttaccaatacttttactaagtttgtggtggtatccaagactgctagacttccatcatctgattgaaaaacatacttctgagttgttacccaagaagaaggtaaccttctaggtattaaatctccttgcaagtattcgtctaatatcattctgcgacccgaccaatacagaagttcgtcaacatatctatgaatgtaatgacagagtacataatttgtaaataatttcacaatttaaatttaaaaaattgttaagtatgttatgtgtaatagtgagtgtttataaaaacgtaagagaggtagatattcaagttatccaacccataaatatatcaatctgcttcagtagataaacaaatttcaaactcatctcaaactcaaatctcagcagcatttcccttactcttgtttttgtcgtcaaaacttaggctgtccttgtttttgtcgccaacacttaggctgcctttaccaaagacactagaatttatttagttattctagtgtctttgcctttaccctcgtttttgtcgctaaaacttaaccacccgataaagtaaacacaaccttcacttggagaccaagccaccttattcaccttattgcgcttcaatcaaactgcatccgtcagtaaatttcaatttcacaatgctgggaaataacttcagcataaagcttttatctaaacataactgaaagttcaaatcaaaagcttctggccgaggttgattggatcaggattaagaattagaagatcagtctgaattgaatctgaaacggggcgagatcgggaacagtttcaaacaaaagataagctagtgataaagtgtcttgtaaatattaaacaataaaaaataaaaaccattttttttaaataaataagtagtaacaattttaatttgcacacatagagtggtgcgactcgcttgttcagtcagacaaattgctacaaagaaaatacaattcggctataaccgattacggtccgaatcctaggcggaaacacctattaacatttctttatttctacgaaatcctattattaattacatatgtttaagtctattatccgcagcttcgggatcacctattatgttttgaaaatttcaggtggaaaaaattacccaaatatcagtacttaaaaagccaattaaattccgttaattgcagtcttatttattccctcaaca

SEQ ID NO: 25991 - DNA, 592 bp, DROSOPHILA
atatgttgacgaacttctgtattggtcgggtcgcagaatgatattagacgaatacttgcaaggagatttaatacctagaaggttaccttcttcttgggtaacaactcagaagtatgtttttcaatcagatgatggaagtctagcagtcttggataccaccacaaacttagtaaaagtattggtaactaatcacactcttcgccaactaaatgttcgaaggtatttgtgctccagcgatctaaaatatgttttattcacgcataatgtaaaaaaaaattttcagaaatcatttaccgcattttatacaatttatgatgtaaccaatgatcatcacacgccagtaaaattaaaagacacattaaaggtacaaagaactcgccttcagtatgcatcttggcttggcaatacgactgcaataatatttgtagtaaaaaatgatatttttattcgacaatcgcctttagtggaggaagatataagaataacctcttctggacatgaaaaccatatatataatggtgttcctgattggctttaccaaggacgcgttattccgttatttcacttcttcgcgcacggccctcgggtctga

SEQ ID NO: 25992 - protein, 184 aa, DROSOPHILA
MILDEYLQGDLIPRRLPSSWVTTQKYVFQSDDGSLAVLDTTTNLVKVLVTNHTLRQLNVRRYLCSSDLKYVLFTHNVKKNFQKSFTAFYTIYDVTNDHHTPVKLKDTLKVQRTRLQYASWLGNTTAIIFVVKNDIFIRQSPLVEEDIRITSSGHENHIYNGVPDWLYQGRVIPLFHFFAHGPRV

SEQ ID NO: 25993 - DNA, 3947 bp, DROSOPHILA
gaatgaaaggttcactccatagcgctacgtccccattgcgctccctcgatgtctggcacaaaaggttctgtgcggctgcacaatgcttgacgtttatctgtatgatgttaatttgacctagcatcattattagctccttttaaagcatgagctttgtaggtgggacatgcgaagccacctgtcgcatggttcttgtccacgtcgctgctgcagatcagggcggcgatgtgcagatctttgccttatgtccatgctcgccgcaccgtagacaacactccgatcgatcgactgacatgcagctggaagcccggtggccgtattccaggcacctgaagcatattgttggactatgcgacaccgtgacctacagttaccgaaccatgattataaccgtgatcgcgacgttcacacctagcgtcactgtcgctgactgcgttccatcccgcattttgcgccagccacgaaaatcctctggtttcatcagtatgccttgttattggaaggttttacttctgtgaacctcctcaatcactactctgtatgcgggaacgctggcagaggctttgccctctatctcgagcagtagttccccctgttgggtccttcctatcttttttgacctgtttgccaaagtcgcttagattgggaacggctttcagcgtacggagcatgtcggcgcacgaagcttcaccagtcttcttgaggatgacagcggcttcttgcgcaagcgcttcggcattactttaacccacccctccctcgtactcgcgtccctggcaatagtcgcgtagctgaccgctcctttaccttagaatgagccgttttggttggcttggttggcaactctgaatgtggcttcactgagtgcagccaactcagtgattacgcctttggttttcctggcgtggcgcaaagtctcaaatacggatactacaatatttattctggcacttatcatgtccagaatgccctgcaggccttcgttttggtatgccgacagattcctacaattttttcctctggcttgtcgttatggatactgccgaggccaagctagccacctccgcagcactgccattattgggtattgccgacgtcgtttgggggccgtttgctcccctctctcaaccgccggcgccccctgcaccgttatttccgcaaccctcgtcggacatctcgacatcatggagcttctcccgaaaaggtcgacgaagtggggggcactgccccccgttcgactatccattaaacagtagcggcaacaattattcccttgcggacgtggagcaccaagatttagatagggtaggctatggatttctcccaagctcgcctaatggaggttaatcatcctctactcggacaccagagcctctacttaggcaccaaagaggtgagaggatgactattggtctgtccacgaacttttccctttctaaaacggtccactccagaatttaaatataaatttatattaaaatgttccgctctttcgtggcagatattataaattcaaatttaaatttgaaatttgtggtctggcagcgctgttaatctggcaacgccactcaaactcgatcgcttcgacaagttggcagctgtcagctgttttcacggtcaactaaactaaatggcaactgcaattaaaatattcactgtatcgcgcgttttagcacgttatgatcacgtctgcagcaaatgtgcacagcctccgtgtgtttttgagcgattaccaattttatattatagctttgaagagcaattaagaaattaaaccgattaggtaattgttataaaaggattattcagtgagccaagcgctcttgtgtgtgtgatccgttagattcatgggtttatggtaacttatgtagttaccgctttatttaattactaagtacaatatcttgttgttttatgccgtaagcttgttgcgcgcggagctgaagtttcagtgtgtccagtctgacgatatcagaagatatcgtcctccaggaaaggtcttggcgttagtacctgttttcgccgtgatgccagaccgggcttcaggcgcccagacgggttcattgtatagtattttatttggtataataaataaaaataatgtaaggaatcaataagattcttcaggaccacgaaacggctgcactccttgatcgaataagccaaaaaattcaattacctataacggtaggctatatccaaatagtcttaggccaaatcagcttaaaattcaatttagtaaaatggtcatgtacggagcttaaggataatttattgacgacaaattaggcataatgaagatcattggaattgattcttatcacataataacgaaagcttctttacattaaattaaagtagcttccgtcattgataagagtctattttaaaactataaattaaatattcggaagtcgtagacgccattatcatcttcatccgatggtctttattagatagatacctactaaacagaggtacctttgcactaattggagaggttagaggtttaacaaaatcctacgagcttacgctgacaaccaggtacctgaacatcagatggctctctcacggtctaagcctttttccagaacgagagcactaacacgacgacgcaacaaggtcttatttatcctgtacatggaatatgttggtgttgctgttttttggtaatgcgctagaaaattaacagctcaatataaacaacaacatttccatgactctgatcttagacattcccgaagttgctctagttccgctttttggatcagggtccccagcttcccaactacctctgaattgcggtcccggcaggggaataaaatgctaatcaatttagcgattgcagcgcagctggagaaggataggtcatagattccataaattaatgattgataaattccagcagcttttacaaaatttgttccgttatctaaatcttctgagtgaagctaaaaatgcgtcgcttagttattttggcctgtgccttgcacacagtttcttctactcgtatgagcattcctacactagaatgccgttttattaatttgtaaatcggatcatttatcgcgtcatataatttttataaagacaggttcttctacagactgccgatgacaaagttcttttgggtaagctatccattccgacctatccaccaaagatcagaattagtcaactggttataaaccactcccatagatgtgtagtggcgactgaagcttttatgttagaataagaagaagaagctctgtgcgtctaattaagggtcatatcaataatgcagtattagtcattggaaatatacaagacgagatgtaaatctgttaaaaatcaaccctagttcgatatgtcgttaaattgcgagtctggtatgaactgcaatgcacgcatcttatacatacatatatgtctgagtgcgactcttcgcattccagaaattccttctgtgattgagcagatccatctgcatggtgcaccaccgtggatttaatctttgcagataatgcgcttgtaggcagtgcactcgcaatagcgttaagcaaagcatcagaaggcagtgcatcgcaatggctgtcgcagatatgcttcgctggcatcacgtggccgcagtttaaagaactgttcatacagcgattcgtaggaattgagacgtcggctgctattttgataaacgttttgaacggacgtccaacacttggagagagctttgcccagtatggaagtcgcattgtcaccttgttgctgtctaagtggaaggccaaggatttggaggagattgcggtttcggtagcgttggctcacatggcacaaatcgataataatttgttgcgttgggtgtttacgactaatgtggctacgcgcaatgagcttcagcaacaactgcaagcttacgccttcaagaaacgtaacaacgaagatgattctggcccagaaaaaagttaaga

SEQ ID NO: 25994 - DNA, 791 bp, DROSOPHILA
attcctacaattttttcctctggcttgtcgttatggatactgccgaggccaagctagccacctccgcagcactgccattattgggtattgccgacgtcgtttgggggccgtttgctcccctctctcaaccgccggcgccccctgcaccgttatttccgcaaccctcgtcggacatctcgacatcatggagcttctcccgaaaaggtcgacgaagtggggggcactgccccccgttcgactatccattaaacagtagcggcaacaattattcccttgcggacgtggagcaccaagatttagatagggatccatctgcatggtgcaccaccgtggatttaatctttgcagataatgcgcttgtaggcagtgcactcgcaatagcgttaagcaaagcatcagaaggcagtgcatcgcaatggctgtcgcagatatgcttcgctggcatcacgtggccgcagtttaaagaactgttcatacagcgattcgtaggaattgagacgtcggctgctattttgataaacgttttgaacggacgtccaacacttggagagagctttgcccagtatggaagtcgcattgtcaccttgttgctgtctaagtggaaggccaaggatttggaggagattgcggtttcggtagcgttggctcacatggcacaaatcgataataatttgttgcgttgggtgtttacgactaatgtggctacgcgcaatgagcttcagcaacaactgcaagcttacgccttcaagaaacgtaacaacgaagatgattctggcccagaaaaaagttaa

SEQ ID NO: 25995 - protein, 252 aa, DROSOPHILA
MDTAEAKLATSAALPLLGIADVVWGPFAPLSQPPAPPAPLFPQPSSDISTSWSFSRKGRRSGGHCPPFDYPLNSSGNNYSLADVEHQDLDRDPSAWCTTVDLIFADNALVGSALAIALSKASEGSASQWLSQICFAGITWPQFKELFIQRFVGIETSAAILINVLNGRPTLGESFAQYGSRIVTLLLSKWKAKDLEEIAVSVALAHMAQIDNNLLRWVFTTNVATRNELQQQLQAYAFKKRNNEDDSGPEKS

SEQ ID NO: 25996 - DNA, 4306 bp, DROSOPHILA
tcatacgttgttcccatttgtatacatattatatcattgtttggcctcgattgccgaagccgtgttgcgtccttttaaaatgttcttaggatacatacaaagtaaccacttagtcagtatttaaggcccgctccattcccgatccagggttcttttgtatatgtattattgatcgagatttataaccttttcgataataaactttgataattgtgcaaccgaaggataacacagttttatggtcaacaatatctacatttattttcgcattaattagtagcataaatagttatcatagttttttttttttttctataagagtttacgttcgtttaacaattcacctgcagcaaagccgtgagtggtgcactcggcgtgattggatggatgagttggcctgtggcaagcaagcgcgtctgctgtagatttgtatgagatcatacggcggcttgctgcccctgttgctgctcatcggtacaatttacgtataaaaactggactcaggttcaaaaatatcctcatggtgatcatctatcgcttaaacataatcagctcttttaagtgaagcaacccttgttgccaaatcgttttcgctctgttaacttccgaattctatgcaggcacattttctcaatattaattctcttactagcctataatctacgctgtgtggtgtgtgtgtgtgtgtgtgtgtgttatgatgtgtggggatgagtgggtgttgagtggttgacacgtgagatttgcatatgtttagatagtacggttgtgcttctacgaaatactagcaaagattcgtcgccagctcctcctattcacattcacattacacatcaaattcactttcacatttactttgaattcagtaaaatcaagtctgtcgctgtccgttgatgagtcgggatcggaactcttctctatcctccgcctgttgtcacttaaatttggttaatttgcgtagctgcttcgaaacggtcgccttgtagaggcgctgtgttcatcattccgacgtcgttgtggttgtctccgactgaacggcggactgtgtcgcctccgcggcggtggcttccgaagcagctgcgccctcgacggcagcagcatttggtggtgctggtagagggatgggttcctgcatctttgtagcatcctgtggctgtggagtcactggctccgcattttgtccggccgcttccgaggcagcaactgcacctgtgtcaaccgctggagctgttgcgctaggtgcaggtgctgctcctgatgccgctctggcattctcctcggccttggcctccagcacatttatcgaagcctgaatgcatctgcaaggaacaatcattgaattaattaaattcgataatgagctctggtgactctggtcacttacttgatagcctcctttcgggccagacgaatgctgtccttgccgtttgtgtcgatggtgtctagcttaagcaggttgcgggtcagcatctcgtccaggtaggcgtactccttctcctcgcgcgttcccttgaactgctccaccttgcccatgagctccagtacgtcgcgctgaatgtcctggattttgttaatagagttgagggtatgtggtgtctgtggcggcaatccagcggctccctcaactggcacctgctgctcaggttgcgcctgggtgtttagtggcgtcggtctgttgtgctgctgtggagcagcgtgtgcctgtggctgcgcctgcgcatatgcctgtgcctgagcttgggcctgagcactgggcggagcgttctggttcggtatctccttgtgggcattgatgatgggctcggagcgaccctcaacaaagatgggaatggtgcgcacataggtgccacccggggtctgtggagctggcggcggggtctgctgcttttgctggggatgcgtctgctggtgcggcgcatagtaggtcttgaactgctgaccctgaacgggcggacttgtctgggtgccaaacggttggctatgtactcccggttgctgatgctgttgctgctgctggtgatactgcagattctgctgctgctgctctggcggaggggcggagtgggatcgcagtccctgatcctgctcggcgacactcttcacgcccatgtcgacagtgtttcgcagtccgtgctggttcaagttagtcggcggggcacaatcaacctccgagcgaccggcaggatcctccgtctggatggcagcatcgcaaaggcgctttgaaggcgtctgcggcacctgctgctgggttggtccggcatagactggctgttgctggggcggcacaccgaactggaagtgcgtctggggttgctgttgggtgtactgcggctgtggctgcggctgttgctgctgtggaacttgtccgggtgcaggagcagctccggtaccacgtctgcctccgaaaccatctgggatatactggcggaactccgagggcagccgattaaagaagtcatcatcgtggtccatgtgagtgttggccccaccggccattcgacctcggcggcccatcgttgagaagcgggggaaaccaaagtctggatcgtcgaaataggatggaaagtcatcatcagcatggacttgaccactgggaccgtgcaaactgctccgcttacgtgagtcgccgaagccggcgaagggatcgtgcatcctgcccaggtgcgagcgcgggaacatgttgtccatgtccatgttcggttcgaatccaaaggtcggctgctatcaacagagagtaattataaataattaaattataatgaattcggaatgattctagctaagaagctctaatatgcaggtattcttttggtagcaaccacattctaatagttattacttttataatttaaatcatgtttattaagttgcaaatattggtttgaaagtaaaagtgcttttatccggttaaaaatcgtattttaaataaaataatcgctgtttcacatcaactatgtatttgttctgtgtagcaatagaggagtgcaaattgttcgactcggtgggcgaattgtttataaataacagggtgagtcagaaccatatagattgggtacgagtgtgggcaaacaagtgatgtcaattggcactgaatgaacagctgttggggagcggatggatctcgatgtcgatgtcgatgtcggaaccttaccttttgcctgctcaatttgttaactttatcaatgagctgtgctcactgctcgtcaattatttcgctacaagtgtatttacgagtatttagctatagcctgaatgtctttttagcttttgaatgcttttccgcttggtgacgtgatgcactgcgtccgattgtttacgtgcgaatgaggcgactcgtcggccgagaaggccttttaaagcgaatggcgcccactctcgaatccgctggctgattctggccacttctcgtagtttctgagacagtcgagtgttctcggttcggctcgacgaccgattttgagtctctcctaaaaggacgctctctctgctgttcaactcaattacccgaagtgacttgtggaagtacagtgaaataaaagattcggctttactgtatcacattttctgaattgaacggtagggacaagataagtgtgtttacttcaacaattagtattgttttacaatacccttcaattattaatgataatttactggctttcttacataagcgcacttgaagaaattgtcgtatatacgagtatgtatacaaatttgtatttttttaaggttttataaggctttttttaaatgggaaaccttttgtaaaacagatatatgtttaaaaacgcctttctgcggttacaagaagttcttaaacttctcgctatcatggcacctttatctgtttaaagtccaaagttcaccttagcacgtacccactgtacgttaagttggtgatgacgtttttatatagtcaacgtcaccaacgcattgccgaggcccccgcgttggccaagttgatgttgagcaaccaaaatccacccacgcttcccattagacaactggcatgcttccaccgatatgcgcacatatggagtgccattgtgtgtttactgtacggtgtgcccacctacagtggaagacacagacacgcacagcagactttgttaaagaatcaagagcgggccaatagtatagagcgttatttcgattcgaccaattctcagcgcccaaatagaaagaacgagagcattagcagcagagcaacgcgtcattagcttgtgtgttttcttctagaaattttcaaatattttctacgatttggtcgtgatagatttggattgctggccattagattaggccg

SEQ ID NO: 25997 - DNA, 1808 bp, DROSOPHILA
gacgcagtgcatcacgtcaccaagcggaaaagcattcaaaagctaaaaagacattcaggctatagctaaatactcgtaaatacacttgtagcgaaataattgacgagcagtgagcacagctcattgataaagttaacaaattgagcaggcaaaagccgacctttggattcgaaccgaacatggacatggacaacatgttcccgcgctcgcacctgggcaggatgcacgatcccttcgccggcttcggcgactcacgtaagcggagcagtttgcacggtcccagtggtcaagtccatgctgatgatgactttccatcctatttcgacgatccagactttggtttcccccgcttctcaacgatgggccgccgaggtcgaatggccggtggggccaacactcacatggaccacgatgatgacttctttaatcggctgccctcggagttccgccagtatatcccagatggtttcggaggcagacgtggtaccggagctgctcctgcacccggacaagttccacagcagcaacagccgcagccacagccgcagtacacccaacagcaaccccagacgcacttccagttcggtgtgccgccccagcaacagccagtctatgccggaccaacccagcagcaggtgccgcagacgccttcaaagcgcctttgcgatgctgccatccagacggaggatcctgccggtcgctcggaggttgattgtgccccgccgactaacttgaaccagcacggactgcgaaacactgtcgacatgggcgtgaagagtgtcgccgagcaggatcagggactgcgatcccactccgcccctccgccagagcagcagcagcagaatctgcagtatcaccagcagcagcaacagcatcagcaaccgggagtacatagccaaccgtttggcacccagacaagtccgcccgttcagggtcagcagttcaagacctactatgcgccgcaccagcagacgcatccccagcaaaagcagcagaccccgccgccagctccacagaccccgggtggcacctatgtgcgcaccattcccatctttgttgagggtcgctccgagcccatcatcaatgcccacaaggagataccgaaccagaacgctccgcccagtgctcaggcccaagctcaggcacaggcatatgcgcaggcgcagccacaggcacacgctgctccacagcagcacaacagaccgacgccactaaacacccaggcgcaacctgagcagcaggtgccagttgagggagccgctggattgccgccacagacaccacataccctcaactctattaacaaaatccaggacattcagcgcgacgtactggagctcatgggcaaggtggagcagttcaagggaacgcgcgaggagaaggagtacgcctacctggacgagatgctgacccgcaacctgcttaagctagacaccatcgacacaaacggcaaggacagcattcgtctggcccgaaaggaggctatcaaatgcattcaggcttcgataaatgtgctggaggccaaggccgaggagaatgccagagcggcatcaggagcagcacctgcacctagcgcaacagctccagcggttgacacaggtgcagttgctgcctcggaagcggccggacaaaatgcggagccagtgactccacagccacaggatgctacaaagatgcaggaacccatccctctaccagcaccaccaaatgctgctgccgtcgagggcgcagctgcttcggaagccaccgccgcggaggcgacacagtccgccgttcagtcggagacaaccacaacgacgtcggaatga

SEQ ID NO: 25998 - protein, 542 aa, DROSOPHILA
MDMDNMFPRSHLGRMHDPFAGFGDSRKRSSLHGPSGQVHADDDFPSYFDDPDFGFPRFSTMGRRGRMAGGANTHMDHDDDFFNRLPSEFRQYIPDGFGGRRGTGAAPAPGQVPQQQQPQPQPQYTQQQPQTHFQFGVPPQQQPVYAGPTQQQVPQTPSKRLCDAAIQTEDPAGRSEVDCAPPTNLNQHGLRNTVDMGVKSVAEQDQGLRSHSAPPPEQQQQNLQYHQQQQQHQQPGVHSQPFGTQTSPPVQGQQFKTYYAPHQQTHPQQKQQTPPPAPQTPGGTYVRTIPIFVEGRSEPIINAHKEIPNQNAPPSAQAQAQAQAYAQAQPQAHAAPQQHNRPTPLNTQAQPEQQVPVEGAAGLPPQTPHTLNSINKIQDIQRDVLELMGKVEQFKGTREEKEYAYLDEMLTRNLLKLDTIDTNGKDSIRLARKEAIKCIQASINVLEAKAEENARAASGAAPAPSATAPAVDTGAVAASEAAGQNAEPVTPQPQDATKMQEPIPLPAPPNAAAVEGAAASEATAAEATQSAVQSETTTTTSE

SEQ ID NO: 25999 - DNA, 4310 bp, DROSOPHILA
tcatacgttgttcccatttgtatacatattatatcattgtttggcctcgattgccgaagccgtgttgcgtccttttaaaatgttcttaggatacatacaaagtaaccacttagtcagtatttaaggcccgctccattcccgatccagggttcttttgtatatgtattattgatcgagatttataaccttttcgataataaactttgataattgtgcaaccgaaggataacacagttttatggtcaacaatatctacatttattttcgcattaattagtagcataaatagttatcatagttttttttttttttctataagagtttacgttcgtttaacaattcacctgcagcaaagccgtgagtggtgcactcggcgtgattggatggatgagttggcctgtggcaagcaagcgcgtctgctgtagatttgtatgagatcatacggcggcttgctgcccctgttgctgctcatcggtacaatttacgtataaaaactggactcaggttcaaaaatatcctcatggtgatcatctatcgcttaaacataatcagctcttttaagtgaagcaacccttgttgccaaatcgttttcgctctgttaacttccgaattctatgcaggcacattttctcaatattaattctcttactagcctataatctacgctgtgtggtgtgtgtgtgtgtgtgtgtgtgttatgatgtgtggggatgagtgggtgttgagtggttgacacgtgagatttgcatatgtttagatagtacggttgtgcttctacgaaatactagcaaagattcgtcgccagctcctcctattcacattcacattacacatcaaattcactttcacatttactttgaattcagtaaaatcaagtctgtcgctgtccgttgatgagtcgggatcggaactcttctctatcctccgcctgttgtcacttaaatttggttaatttgcgtagctgcttcgaaacggtcgccttgtagaggcgctgtgttcatcattccgacgtcgttgtggttgtctccgactgaacggcggactgtgtcgcctccgcggcggtggcttccgaagcagctgcgccctcgacggcagcagcatttggtggtgctggtagagggatgggttcctgcatctttgtagcatcctgtggctgtggagtcactggctccgcattttgtccggccgcttccgaggcagcaactgcacctgtgtcaaccgctggagctgttgcgctaggtgcaggtgctgctcctgatgccgctctggcattctcctcggccttggcctccagcacatttatcgaagcctgaatgcatctgcaaggaacaatcattgaattaattaaattcgataatgagctctggtgactctggtcacttacttgatagcctcctttcgggccagacgaatgctgtccttgccgtttgtgtcgatggtgtctagcttaagcaggttgcgggtcagcatctcgtccaggtaggcgtactccttctcctcgcgcgttcccttgaactgctccaccttgcccatgagctccagtacgtcgcgctgaatgtcctggattttgttaatagagttgagggtatgtggtgtctgtggcggcaatccagcggctccctcaactggcacctgctgctcaggttgcgcctgggtgtttagtggcgtcggtctgttgtgctgctgtggagcagcgtgtgcctgtggctgcgcctgcgcatatgcctgtgcctgagcttgggcctgagcactgggcggagcgttctggttcggtatctccttgtgggcattgatgatgggctcggagcgaccctcaacaaagatgggaatggtgcgcacataggtgccacccggggtctgtggagctggcggcggggtctgctgcttttgctggggatgcgtctgctggtgcggcgcatagtaggtcttgaactgctgaccctgaacgggcggacttgtctgggtgccaaacggttggctatgtactcccggttgctgatgctgttgctgctgctggtgatactgcagattctgctgctgctgctctggcggaggggcggagtgggatcgcagtccctgatcctgctcggcgacactcttcacgcccatgtcgacagtgtttcgcagtccgtgctggttcaagttagtcggcggggcacaatcaacctccgagcgaccggcaggatcctccgtctggatggcagcatcgcaaaggcgctttgaaggcgtctgcggcacctgctgctgggttggtccggcatagactggctgttgctggggcggcacaccgaactggaagtgcgtctggggttgctgttgggtgtactgcggctgtggctgcggctgttgctgctgtggaacttgtccgggtgcaggagcagctccggtaccacgtctgcctccgaaaccatctgggatatactggcggaactccgagggcagccgattaaagaagtcatcatcgtggtccatgtgagtgttggccccaccggccattcgacctcggcggcccatcgttgagaagcgggggaaaccaaagtctggatcgtcgaaataggatggaaagtcatcatcagcatggacttgaccactgggaccgtgcaaactgctccgcttacgtgagtcgccgaagccggcgaagggatcgtgcatcctgcccaggtgcgagcgcgggaacatgttgtccatgtccatgttcggttcgaatccaaaggtcggctgctatcaacagagagtaattataaataattaaattataatgaattcggaatgattctagctaagaagctctaatatgcaggtattcttttggtagcaaccacattctaatagttattacttttataatttaaatcatgtttattaagttgcaaatattggtttgaaagtaaaagtgcttttatccggttaaaaatcgtattttaaataaaataatcgctgtttcacatcaactatgtatttgttctgtgtagcaatagaggagtgcaaattgttcgactcggtgggcgaattgtttataaataacagggtgagtcagaaccatatagattgggtacgagtgtgggcaaacaagtgatgtcaattggcactgaatgaacagctgttggggagcggatggatctcgatgtcgatgtcgatgtcggaaccttaccttttgcctgctcaatttgttaactttatcaatgagctgtgctcactgctcgtcaattatttcgctacaagtgtatttacgagtatttagctatagcctgaatgtctttttagcttttgaatgcttttccgcttggtgacgtgatgcactgcgtccgattgtttacgtgcgaatgaggcgactcgtcggccgagaaggccttttaaagcgaatggcgcccactctcgaatccgctggctgattctggccacttctcgtagtttctgagacagtcgagtgttctcggttcggctcgacgaccgattttgagtctctcctaaaaggacgctctctctgctgttcaactcaattacccgaagtgacttgtggaagtacagtgaaataaaagattcggctttactgtatcacattttctgaattgaacggtagggacaagataagtgtgtttacttcaacaattagtattgttttacaatacccttcaattattaatgataatttactggctttcttacataagcgcacttgaagaaattgtcgtatatacgagtatgtatacaaatttgtatttttttaaggttttataaggctttttttaaatgggaaaccttttgtaaaacagatatatgtttaaaaacgcctttctgcggttacaagaagttcttaaacttctcgctatcatggcacctttatctgtttaaagtccaaagttcaccttagcacgtacccactgtacgttaagttggtgatgacgtttttatatagtcaacgtcaccaacgcattgccgaggcccccgcgttggccaagttgatgttgagcaaccaaaatccacccacgcttcccattagacaactggcatgcttccaccgatatgcgcacatatggagtgccattgtgtgtttactgtacggtgtgcccacctacagtggaagacacagacacgcacagcagactttgttaaagaatcaagagcgggccaatagtatagagcgttatttcgattcgaccaattctcagcgcccaaatagaaagaacgagagcattagcagcagagcaacgcgtcattagcttgtgtgttttcttctagaaattttcaaatattttctacgatttggtcgtgatagatttggattgctggccattagattaggccgcaaa

SEQ ID NO: 26000 - DNA, 1734 bp, DROSOPHILA
atcggacgcagtgcatcacgtcaccaagcggaaaagcattcaaaagctaaaaagacattcaggctatagctaaatactcgtaaatacacttgtagcgaaataattgacgagcagtgagcacagctcattgataaagttaacaaattgagcaggcaaaagccgacctttggattcgaaccgaacatggacatggacaacatgttcccgcgctcgcacctgggcaggatgcacgatcccttcgccggcttcggcgactcacactttggtttcccccgcttctcaacgatgggccgccgaggtcgaatggccggtggggccaacactcacatggaccacgatgatgacttctttaatcggctgccctcggagttccgccagtatatcccagatggtttcggaggcagacgtggtaccggagctgctcctgcacccggacaagttccacagcagcaacagccgcagccacagccgcagtacacccaacagcaaccccagacgcacttccagttcggtgtgccgccccagcaacagccagtctatgccggaccaacccagcagcaggtgccgcagacgccttcaaagcgcctttgcgatgctgccatccagacggaggatcctgccggtcgctcggaggttgattgtgccccgccgactaacttgaaccagcacggactgcgaaacactgtcgacatgggcgtgaagagtgtcgccgagcaggatcagggactgcgatcccactccgcccctccgccagagcagcagcagcagaatctgcagtatcaccagcagcagcaacagcatcagcaaccgggagtacatagccaaccgtttggcacccagacaagtccgcccgttcagggtcagcagttcaagacctactatgcgccgcaccagcagacgcatccccagcaaaagcagcagaccccgccgccagctccacagaccccgggtggcacctatgtgcgcaccattcccatctttgttgagggtcgctccgagcccatcatcaatgcccacaaggagataccgaaccagaacgctccgcccagtgctcaggcccaagctcaggcacaggcatatgcgcaggcgcagccacaggcacacgctgctccacagcagcacaacagaccgacgccactaaacacccaggcgcaacctgagcagcaggtgccagttgagggagccgctggattgccgccacagacaccacataccctcaactctattaacaaaatccaggacattcagcgcgacgtactggagctcatgggcaaggtggagcagttcaagggaacgcgcgaggagaaggagtacgcctacctggacgagatgctgacccgcaacctgcttaagctagacaccatcgacacaaacggcaaggacagcattcgtctggcccgaaaggaggctatcaaatgcattcaggcttcgataaatgtgctggaggccaaggccgaggagaatgccagagcggcatcaggagcagcacctgcacctagcgcaacagctccagcggttgacacaggtgcagttgctgcctcggaagcggccggacaaaatgcggagccagtgactccacagccacaggatgctacaaagatgcaggaacccatccctctaccagcaccaccaaatgctgctgccgtcgagggcgcagctgcttcggaagccaccgccgcggaggcgacacagtccgccgttcagtcggagacaaccacaacgacgtcggaatga

SEQ ID NO: 26001 - protein, 516 aa, DROSOPHILA
MDMDNMFPRSHLGRMHDPFAGFGDSHFGFPRFSTMGRRGRMAGGANTHMDHDDDFFNRLPSEFRQYIPDGFGGRRGTGAAPAPGQVPQQQQPQPQPQYTQQQPQTHFQFGVPPQQQPVYAGPTQQQVPQTPSKRLCDAAIQTEDPAGRSEVDCAPPTNLNQHGLRNTVDMGVKSVAEQDQGLRSHSAPPPEQQQQNLQYHQQQQQHQQPGVHSQPFGTQTSPPVQGQQFKTYYAPHQQTHPQQKQQTPPPAPQTPGGTYVRTIPIFVEGRSEPIINAHKEIPNQNAPPSAQAQAQAQAYAQAQPQAHAAPQQHNRPTPLNTQAQPEQQVPVEGAAGLPPQTPHTLNSINKIQDIQRDVLELMGKVEQFKGTREEKEYAYLDEMLTRNLLKLDTIDTNGKDSIRLARKEAIKCIQASINVLEAKAEENARAASGAAPAPSATAPAVDTGAVAASEAAGQNAEPVTPQPQDATKMQEPIPLPAPPNAAAVEGAAASEATAAEATQSAVQSETTTTTSE

SEQ ID NO: 26002 - DNA, 7401 bp, DROSOPHILA
ttcaacttatttcacagtgtgtaaacagtttcttgacaaactgtatgtatttcatcataacaaaacttatttaatagctcattagttagatgaacattgttatagaaattaagatatctacattttttatctatttatgtaaggcgtggtaatatctttttttttacattttggcatagctgtcgaaaccccatatgagtatgtccctaaaacagcaaattaacaaaaaagtcatgtagtttagtgtatcacaaaaaacaagctttttttaaaaattaaattatattccttctcagaaagaacgctattgcggtacattcattatgtttcccgttcaatgaattagattttattaatacactggaagtttgtataaacgggtcggaaccatttgcatgttgactctaaagcggctattagcactttattatgaataccccaaataaaaataaaaacatgtattttgatataaatattgcaaaaaatggtattaaaagtattttttaggcgaaaacgtatttcagtcgcggtatgacaagtgttatgtcatagtcttcgcgcgttacctattctgcgtattatatatattaaggaaaatgaacatcgtaagcactcaactagggaatagtttgtataactgcgtgcgatctaatctaagatggcccttgtggactcgatcacattttacctactatcctacacgtatgggaactggaaaacgaatgaatatgtttaacgccattaataacgcaatggatttggctctagacgaaaacaaatccgcattgttgtttggcgaggatgtgggattcggtggagtttttcggtcagtaaaacaatttaaacagatcatctgtattttattatgtttccattcaacaggtgttcagtaaatctacgggataagtacggaagtcagcgtgtttttaatacccccttatgtgagcaaggaatcgcagggtacgttatttagatgttatagagtaaaaaaccggaaatgatatgaaatgtatacaaatattaataatcaggtaatttttttcgatttcgatttgggcaaaatctttcgagctggtttttatgtgcttgttttgaaggcagaaatttgcaatatgattgcaatcaaaaataatatagatttaaagtctaagaacttctaaggtgaagggcatactttgacaaatttacaatacatgagcatatgtgtgcaaattatgttttaagtgtgtttcctgggttgtcccactccgcagtccaacgggtgatgtcgtcagtccgacttggccgacttctcgatcagagaggggagcggagatcttctctgctcgtggtgcgcaacgtttcgttgcgcagcttggtataagtttagtatatttcaggagaaccttctccgttattgacgcccttaaggctaggcaaccaatattaaaaaatgcagctttcgctgtagtagaattcttgagcgagtgctttttattataattgaaatcatactgaacttgtattttacaaaagctgatcgcggccggcaagccgaccgttcgtccagcaaagtgctgatactagcagaaatagcatatttccccatactgggaagaccaatgggaatcaggcaagtcccctacagacgtttttgctgaatctgcatacataatgttagggtaacaaccccggacttatatcgacttaagtttacccattagcagtgttaacttgcacacatacagttgtctgctatcactgtatgcgtagaaaagagctgttcgctgtagcgctatccgctctcgaacaaaaattcgagagagcctggagccacctctagagccacggcgaaaaaatagtgtgccaaaaaatcgtatggcgttactctagttattctagtgtctttggtatggccgttacgaatcttgtttttctagtgtctttgattcaacagtaagcaattgtttttaagacaacagaatggggaacatttttaacagttttaattactatgttcacagttacttttttactgtaccttgaccatttaagttgttaaattaaatatcattatttacgatcttatttatgtttttcgtatagaccatcaatagaccactgattaaaatttttttccttagtaaataagatctgagttgataatatacatatatacagtatgccaagaaactgcttacaagctgtgaaataagttaaatttttgactttaaaggtaaaaattaaattaattaaattgcttaattaaaccaaattttttatgaaatataattaaacaatatttattttatttttaaatcaaaaacaaattaaaaatactaaatatacatgaaaataaacaacaaattccaagcttacaagtatatatgtatacgtacgggtttcattttgtttacgtttattatatacagtaatatagaagtgcgttaacttaagtgtactaatttcttaatcagtactaaaaactaaaagtgtatattaataatcattattttgtaaagagtagaatgcctatgtcgcgtcactcatgtaaacatcgcacctttaaagacgctattaggctctacggcacatctgcggtataatactatcgtttgccatagttcaaagaatctgggttcggaaaaatcgaatttttaaaaacaggaatcgtttgcacattttttgcccatttctgtccaaaaatttttttttttaaccctgtccagtttatgtaatatacatttccgaaaaagttcaaaaatcaaaaagtttaccttttcaaacatttttttaaatcgcaataatattgtttgcccattctttagaattttgaaaaaatataagccatttaagtttatctcgatctactcatagcataaagcgtttgaccatctcttaaaaaagctttaataaacatttttatcgattccccacacttaaaatatttcgttagcccacctctttaaaataaaaattgtcaataaaaaacgttttcccagcctttaaaaatatattatcgtttgcccatccttaaaaattatttttttttcgtttgctcattctaaaaaataaataatttcatttgcccaccctttaatattagtttcgtttgcccatctttgaaaattatattttttcgtttgcccatccttgaaaataaatttttttcgtctgtgctatgcaattcagtttttcctattcattccctttcctaatcggctcatcggctttgatgcaatcaaaatcgctagttgttccaccaaagacataagaataacaaggtccataacggctgtatattagttttgcactatgcatttggtcaccgccaaaattgaaatctctccgctcgtaaaattgggagcgtaaaaatttaaaaatataaattgcttgcttgtttgagtaaaaacaattgttaataaacgtgaacgtatcgcaagcactagatcacaaagtggttatgcagaaagattaacctgtagacctgtgttactttttatgtttatttatcgataattattagggaataaaatgagaaaaaatttaaaaatggtttcaaagagtgcgcgtgaccggtttggcggctttaggtctttggagtgggcgtcctagaaagattattggaaatctatagaaatttaaacgactaacaatattatgaaaaaagtatccaaactatttttcaaaagtgtcagttttggacggttttagagcgttagggcgtggcaaaaagttttttttttcaaaagtgtgggcgtgatagttttgtgcggtttgtggccgttagagtgggcgtggcaacatgggtcaacaaacttacgctgcgtctgtctccagaatctgtatgctgaaactcaaccttctatcttttatagttcctgagatctcgacgttcatacggacaggcggacacggccagatcgacttggcaattgatactgagcaaaaatatatttactttacatggttagaagcgattcattttgcttgttacatacttttcaacgaactttgtgtaccgtttcattctacgagtaacgggtacaaaaatagattaaatataaaggaaatatgctaactgtgttttgtcaaacgtagcccacttaatcccagcgcgttgattccggcgtgttacaaaaagttttggtgcagatcgataaaatttacaagactattaaaaatatttaaaagtgtggactttaaagtgggcgtggcagcattaaccaaaaatcatgcgctgcgtctgtctctggaaactgtatacttaatctgaactctctagcttctatagttcctgaaatctcgacgttcatacggacggacagatttttttttgtattttgtttgtattgtgccgtacgctacccaaaataaagaatgaatgaattgcaattataattttagcgacttctgaattttaaagcacagaactcgttatacatgcataagtgtatgtaaaagaaagcactttgggattttgtaagacacttgaacttgagacaatccatcaaaggtctgcgtatttgggctgagcctaacgtactggtaaacgccatatcgtatacatagcatatatcatacagtttcaatggtttcaagcaaagataatttatatcgcaagcatactttacgcttttggaatatttgaatatttgtagaccaaaaagagcatgcgcgaatgtaggcaaggaaaagtgacatagaggggagacgttagatgatcgcgcagcttctctgcatatcaacaatacatacataagaaacgatataattgcacagcttcggttccatggatcagaattgtaattccaaagttacaaaatataaatgctggactaacactaaaggaagttgacataaaatattattacattatataataatttttcttttatttatttcatagctttgcaataggtgtggctaatactggagcaaccgcaatagcagaaattcagtttgcggactatatatttcctagttttgaccaaatagttaatgaagctgccaaatatcgataccgaagcggagggctatttgactgtggatccttaacttttagagtaccttgcggtgctgttggacacggagcactctaccattcccaaagtccggaagcatactttgcgcatacaccgggacttcgtgttgtggtaactcgcaattatacccgttactcgtaaagtaatagggcatactagattcgttgaaaatgatgtaacaagcaaaatgaagctcttctaaccatgtaaagtatatataaatatatttgatcaggatcaatagccaagtcgatctggccatgtccgcctgtccgtatgaacgtcgagatctcagaaactataaaagctagaaggttaaaattaaacatacagattctagagacaaagacgcagcgcaagtttgttgacccatgttgccacgcccaccgtaacgcccacaaaccgcacaaaaatgccacgcccacacttatgcaaaatgtgttgatatttttccagttttgtaaatttcaaacgatttgccaaaaaactttctagcacgcccactctaacgccctaaagccgcccaacaggtcacgaccacagttttatacaatttttaatatcccagacaaaaaatgaaatttcgcattcacactagctgagtaacgggtatctgatagtcgactcgactatgttattaatgaagtctggaatattcgaaggtgtactgtaccatttctataggtaccccgtggaccgataaaagcaaaaggccttatccttgcatgtattcgtgatccaaacccttgcattgtttttgagccaaaaactttatatcgagctgccgttgaggaagttcccgcggagtactatacatcacagctaggcaaagctgatatattgcgacatggtaaagacgtcacacttattggttggggtacacaagtccatgtgctattagaagtaagtccccatatttaaatagacttcagtgatactatactattttaataggtagcagaaattgcaaaatcaacgttaaatatagattgtgaagttatagacttggtctccattttgccgtgggacgctattaccatttgcaccgtaagtaattcaaatattacacatctaagcaagctcacgtataagtatcttttctttagtctgctaaaaaaaccggacgagttataattgcgcatgaagctccattaacacaaggatttggatcagaactagcatcctacattcaagaaaagtgttttttgcaccttgaagcacccgttaaacgagtggctggttgggatactccgtttccccatgtcttcgagcctttttatatgcccgataaacaccgatgtttgtcagctataaatgatattgttaacttttgaaaactgtaatatgggaaaataaaggtttgcattttattaattacttaaagaaaaaaaatttacgttaagattcgcacttacccgttactgccatagtaaaaggggataagacgttgaaaggagcgtttaggacccaattattattattatgtaaatacaaatatgtacatatgtttgtatatgtattgtgcagcactatttcacaatgccttttatagtatacgaagtgctacatacggacatatggaggggatgaagggaaaccttacattccagtaaactaatgttaattaatttaccatccctagctaaccatagaacgaacagtctttatgtgtaataatcctgacatggttagttagataaacttctctgttcaaagcagattcactcgaaattacgtacccctaaatttaaatttttgtagatctaactatgagttgcatgacccctccagagtattatgagctgactataataagctttatcctataaatcctgtcgctcttcctctcataaagcgaataatgctatctttttaacacattattagatcttattaatgtttatatatatcctcggatctttactgctttccatatcgtgctatgtctccctattttacttactaactatggtagcgcccccccgtctgttggttagatatagttaaatgggaaattaaaggtttgcatttaattaattacttaaagaacagtcactatcctactcttctgaatactcttcttccatgaatatgtaatgattggctataagtccgcgagtatatccctttgccaactagatgcttcggattaaaacataaaaacaaataacaacaaaacttgctacaactgcggagacgactgccaccttgactcatgccaaaaagtgtacaagaccaccaaaatgcaggaactgtagcatacccccacaactccataaatagaagcccgtcttcaaaacacaacaagatagcaataaatagcaataaaaatcaaaaacaaattaggactcgtaacactaaagcgccactccgctcc

SEQ ID NO: 26003 - DNA, 1079 bp, DROSOPHILA
atggcccttgtggactcgatcacattttacctactatcctacacgtatgggaactggaaaacgaatgaatatgtttaacgccattaataacgcaatggatttggctctagacgaaaacaaatccgcattgttgtttggcgaggatgtgggattcggtggagtttttcggtgttcagtaaatctacgggataagtacggaagtcagcgtgtttttaatacccccttatgtgagcaaggaatcgcagggtactttgcaataggtgtggctaatactggagcaaccgcaatagcagaaattcagtttgcggactatatatttcctagttttgaccaaatagttaatgaagctgccaaatatcgataccgaagcggagggctatttgactgtggatccttaacttttagagtaccttgcggtgctgttggacacggagcactctaccattcccaaagtccggaagcatactttgcgcatacaccgggacttcgtgttgtggtaccccgtggaccgataaaagcaaaaggccttatccttgcatgtattcgtgatccaaacccttgcattgtttttgagccaaaaactttatatcgagctgccgttgaggaagttcccgcggagtactatacatcacagctaggcaaagctgatatattgcgacatggtaaagacgtcacacttattggttggggtacacaagtccatgtgctattagaagtagcagaaattgcaaaatcaacgttaaatatagattgtgaagttatagacttggtctccattttgccgtgggacgctattaccatttgcacctctgctaaaaaaaccggacgagttataattgcgcatgaagctccattaacacaaggatttggatcagaactagcatcctacattcaagaaaagtgttttttgcaccttgaagcacccgttaaacgagtggctggttgggatactccgtttccccatgtcttcgagcctttttatatgcccgataaacaccgatgtttgtcagctataaatgatattgttaacttttgaaaactgtaatatgggaaaataaaggtttgcattttattaatta

SEQ ID NO: 26004 - protein, 329 aa, DROSOPHILA
MGTGKRMNMFNAINNAMDLALDENKSALLFGEDVGFGGVFRCSVNLRDKYGSQRVFNTPLCEQGIAGYFAIGVANTGATAIAEIQFADYIFPSFDQIVNEAAKYRYRSGGLFDCGSLTFRVPCGAVGHGALYHSQSPEAYFAHTPGLRVVVPRGPIKAKGLILACIRDPNPCIVFEPKTLYRAAVEEVPAEYYTSQLGKADILRHGKDVTLIGWGTQVHVLLEVAEIAKSTLNIDCEVIDLVSILPWDAITICTSAKKTGRVIIAHEAPLTQGFGSELASYIQEKCFLHLEAPVKRVAGWDTPFPHVFEPFYMPDKHRCLSAINDIVNF

SEQ ID NO: 26005 - DNA, 2807 bp, DROSOPHILA
tcggagatggtgattgaggacgaggcgcctccggattccaagtctgaaggccttcccgaaaccgagccggagaagaaatcgaagcaggacagccagcccccgttggaaatctttagtgacctggatcagactagaatctccgacagtcgagagaccttggatcgttcgagcaaccacagtggtcgcagccatgtgaactacaaggcggagatcgtggatgcagtagtgagatgtgccaaggcggtttggcagaagcgtaccctaataaagcgggccgagatggagcgcatgggcagaatgacgccgcgcaaggcactgacccataaggatacggaatcattcgatccgaacgatgccgcccagatggacaagttgctaaaggatggcatgcgagtactcaggaaggagccccgctatgtgctggcctgtctgccagacgcccacaagctgccagtgctgcgggagtgggtcaagaggaggtacggcaaaacctacagccagaaggagctcgaggagagtatagccgagtcgagcaggatattcgagctggtcaccatcctccagagcagtcccgccagtcccgatcttatgggcattgatcgcctgcccagatccaaggagaactttaacttctataagcagattaagaatacggtatatatatatatatatatgtacatatattttactatactaaaactatatttttcaggctgccctggctaagcaaacatatcacgatcagttgaatgcccgctacctaagcatcgtgagctccgcctggtacgccatgggcaactatctggtgcccggaggacctcctcggaagacctttttcgcttacatagcttccaatccgctggagatcatgcgtaacaagacgtggaatggggatttccggaactaccgctccatgcgcgacaagagaaaggagcaggagaagcttttgggcaaaaaggactagattacaataaattaaaactctttttcaatctgaaactcaattatatttgggcttggtgcgggccactcttttgccggtgaaccccttgctggccaaataatcacggatgccgcgtttggtgtgcaccttcagtttgcagatgtcgaactccagctccttgttgcagtactcggcgccctccatgcgttgaatgaaatggatgacgtggagcagcacctcgccgtccagctgctgaatcttggcgtgcagatcaaggtcctcctcggttgtaaagggctcctgctgctccgaagtttccaaagttgccggcggagtccaatcgggggtcggagtacattcggtggttggagtacatgaggggggcgcacccattatggagggggacacctccgagccgttcacctcgtcctccggcgatgatgagtccgattcatccgaggagctctcttcctcggcacgcactttactgccgctggagcagatgtagagctgcacctgggagtacatctcctcaaagatgatctgcagctgtttggccatgtggtagcacaggtgatcgggattcgtgtacagataggtgttgtagaaaatcagccttatgtctttggcgaaatccgcggcactgagatagcaacccgtattcaaacgatgcctcacggtggacagatccatgggttcccggacaatctcatggtaatcgtggaggcccagcagttgcggatccagtggctcgtagaaaacccaagcaatattcttataggtactggaaaacaaccttttaataatcaccttgcaggcattaatttccggcgaggaccgttcagtttcttgttttgcagccatttcagaaaaatatcttcgatatcgactatcggaaaattctattataatttctatcgttttgacaacttgaacgcaatacaactgacaatattcacactccgggttgccctgtacgatgatatttttagcttatgaaaacttttaggattgccacctcaatccgagcagaaaagtcaatccacaaatgcggtttggggcaacaaacaaattcagttaattatgcaagtggctccggccaggaaagtatttccatacattttgtgtgggagtgcggtcctttgtgggaatgctctgcctcaatcctgaagctatgatggttaatctaattccgagacccgtacaaacagtccttttttcggtaaacgtatttaaaatccccatcgagctgtgggggcgaaaatatttatggtcaaccgctgacgtttgctattttagagtgccgaaatatttcgttagcataaaagttttgttaggacacacaatatacatcatttttgggcaaatatttgcagggctttcatttgggcagtcaacaagttgggtttacaaaagttaaatcgaaatcctgtttaaagtcactctgttaagttggcttccacaggcatgaggggaaatcctgttcctgtggctctctccctctgttagcttgcgatccacaactgagagcaaccgatttacggagaccttcattttctcgctgttaacttacctgccacaaaatgttgcaaattgggtggcaatcggaccaggtcttggccacatcttggggcgcctcttcagtctgctgttgggcctttgggggaatggtcctgcgaatgggtcaattgggattgcactccactgacccacttgcgaatggggattcacctctgggcatcatctggttcggatgttgaccttcaaccccaagtttggagactttacacatagagtttgcgaaaccgaaagaaaaagagattaatcttcaaagtatatttaaaatatatataatcaaaaatac

SEQ ID NO: 26006 - DNA, 807 bp, DROSOPHILA
atggctgcaaaacaagaaactgaacggtcctcgccggaaattaatgcctgcaaggtgattattaaaaggttgttttccagtacctataagaatattgcttgggttttctacgagccactggatccgcaactgctgggcctccacgattaccatgagattgtccgggaacccatggatctgtccaccgtgaggcatcgtttgaatacgggttgctatctcagtgccgcggatttcgccaaagacataaggctgattttctacaacacctatctgtacacgaatcccgatcacctgtgctaccacatggccaaacagctgcagatcatctttgaggagatgtactcccaggtgcagctctacatctgctccagcggcagtaaagtgcgtgccgaggaagagagctcctcggatgaatcggactcatcatcgccggaggacgaggtgaacggctcggaggtgtccccctccataatgggtgcgcccccctcatgtactccaaccaccgaatgtactccgacccccgattggactccgccggcaactttggaaacttcggagcagcaggagccctttacaaccgaggaggaccttgatctgcacgccaagattcagcagctggacggcgaggtgctgctccacgtcatccatttcattcaacgcatggagggcgccgagtactgcaacaaggagctggagttcgacatctgcaaactgaaggtgcacaccaaacgcggcatccgtgattatttggccagcaaggggttcaccggcaaaagagtggcccgcaccaagcccaaatataattga

SEQ ID NO: 26007 - protein, 268 aa, DROSOPHILA
MAAKQETERSSPEINACKVIIKRLFSSTYKNIAWVFYEPLDPQLLGLHDYHEIVREPMDLSTVRHRLNTGCYLSAADFAKDIRLIFYNTYLYTNPDHLCYHMAKQLQIIFEEMYSQVQLYICSSGSKVRAEEESSSDESDSSSPEDEVNGSEVSPSIMGAPPSCTPTTECTPTPDWTPPATLETSEQQEPFTTEEDLDLHAKIQQLDGEVLLHVIHFIQRMEGAEYCNKELEFDICKLKVHTKRGIRDYLASKGFTGKRVARTKPKYN

SEQ ID NO: 26008 - DNA, 8033 bp, DROSOPHILA
gcggccgaggcgaaaaggcgcagcctgggatccaccgaccacgatcatggtggaactggtcaaggtgccgacggcgtgggagtcactccgtccgctactctcaacgagtcgtctgttcatctgctaaacgatctctgctggtttactaaggaggctggcgcctgcataatcaacgctttaattattaaactggacaggatcgaggagtcggaatctcattgagcgcacaacaccatactcgcagtagtcacgcctgtccctatattcaccacattttaatcccgctcagcagctacccacaccaaatcgcagtcgcattcctctttgtaaacgagtttgtatttgtattgtaagctctaataaaattatcgcaaagttaatacagattacaaatttattggtaatgaaccaaaccaaagcacatacaaaactttcggttcattgatactaaacaatttctttcacaaacaatcccaaaaattaaaacactagagtaagaacagaaatgcatgattggaattatcattgtttttatttgattattttaattccattcatttagtgtcgctttgttgattttgttattcaaatatatgaaaaatggtcgattagaaattgttttagggttgtgtttatgtttctgtttctgtttcgttttgtatcatcaacacggcagcagcagaagtaaaggattcatcctcgccagttctatctttttctaccactctcgcccacatccgttttactgatttttgtatacagccgcggccgcagaagcattttatcaaattactcttacacttgtaggttggttgtttgcattttgtttgttatgtttattttgttgtattctctgctagtcctgaagcaagtgcatatacaaatatgttgattcatatatgtttaccgtttaagttatcgttattattattatcattaatcgttagccaataccgctgatagccgggaacaaccggatatcggaatgagcctaatgggctcactccacttccatggagggatcgtttccggccgcgctctggccattgttatccacatccattttgtcgccagaattggccgctggctcgccgccattctgttccgcattcgcctcgtccttgggcggtgttgctgtcttggccggagttggcttcggtttcgccctgttgatcaccgaactgacgcacgaatttagagtttgcacctcttggcgcacggcggaaatctggacgggactgtcagcggtgcgcggcgactgtgtgaacttgggcagatttgcatccagccacgattgcgctttgtccgccgtctccgagatgttgatgaactcggtttccgttagatgatcgtacttgggcacacccttgcggaactcggccactgccagacgtgcaatggcaatgctgttcttcagctcatcaaatgcagctggtccctgctcatagtcgctggcgcgtagcttgatgggatccgtcttctggtgcagggcctgcaggcggctggtatagatgtcacgctcgcagtcctcgccatcctcgtacagccagttctcgagatcatttaactgcgacacgattttctcgcgctcagcctcaaccacgtatcgctcgaagggtccaccctgcaaaagagatggggcaagttttagatttaagaacttacaagaaagggatttcgagttcctggctatgccatgttggattagttacctgcagtttgttgcgcatatcgtagacgaactcctccaaggcattcttggcatcaatgcgttccgtttccttctgatcgttgccaatcatttttgactcttgctgtgtgtagttgctcaggtcgacggggctgaagccgtgtgtggtgcactccagcggcaattcggtggctttggaagccttcttctttttatcagcgccctgggcagcaaaagaaaggcaaatgattaatcgaaatgcataaacaaaatagttacaaagagttcaattcaacttttccaatagaaagagaaaattggagcggcaacaagacatcaacaataaagcgaagaggaataacagctccaagcgacagcctacaatatgagcacaatacattttcgtgggtgtttgttgtaagcagttcatatgagtaactgcgggtattggttttttttttaaatttgaaacaagggcgcgcttttttctcaggtgtgtttgaaataataaaaaataaaataaagcttttggatacaataaaataagatggcaaattgtgtaagatttttttttttaatacatttgttttttgttgggagcacatagggtaggcggcttatgagcggtcttcatcattcgtttcatttttggtggaaaatattaaacttaaaaatttcaaaaaccacaaaacggttagattcgtgcttttcaattttgtagtacatttcgttaatcaaaatttccaatatcttggcacacaaatatgggagcaaaaaattcagatttagcgtttttatttttctttttttgttggttttgtttttgaattgaaatttgagaaatttgaggaaaacgtaccgaaccaaaccagcccttgacccgctgtgcccacccttgtccgccaggtgatgaggctgttgatgtattattatcatcctcattctcacaatatgcctacgagagatcaaaacgcgcgcgttcgcaaacatatccaaaacaaacaaaaacaaatattgcagtggtatatttataaaaatgaatgatttatatcaaaaacacgttcgtatatacgtataattcaaacaagagcgctacagctccggtttttcgcatgtccgattatggtaacgatcgaaaatcttaatgagcaattatattgatgattgaagccggtaaaaatcatattttactgacttatcaaagtacaaaaactaaattgatttgccattccaaatttaatctttcctaaccagacatggaaaaccgaaacttattaaggaattagtccagaaatgcgacaataggaattgagttagtttccgcattttcatggtgcttttctttttttttttttcaactaaaatcttccttgcaattttgcttcaatagtttaccacgaatgtgtgaaaaccaatcttgaaaattcaattacacaatttaaagctattttatgttaaagatgagctttatgaagtgaactataaaaagataaaagtttagcactagaaactaaacgctggtttgataacaaaagccaaaatcaaattgatacagaaatgtaagaaagaaagaattttcacgctagtttttacggacagacgttattggactgctttacaacaaacaatatcagctaaatgcactacacccaactcgtttaagccagaagggagggattagtagaatacaagtaaaactaaaacaagagcaacacagcaacccctatccacaacaaaagatgatgagacagtgacagcgtgatttgggcgggagatggttgactcacctcttgctgaccatccgcaggttctccagtattgttggtctgatcgcctggtttttcttcactggcagcctgctcagcagctgcggcagcctcttcggcctccttcttttccaccaaagtggcggacgagattagcacaatgccattgttgttgatgcgcactttcagctttacatcctgaccctcgccgcgttccgtcggctttacatccttgaccttccacacgccaatcgtttgatctggatagggcacctgttggccatacacaatcgaaacgttgaacggtcccttgcggttgattgtcagcaggcgactgaacggagaagcatggtattgcgggaagatctcgatctctcccggagcagcggagccctcactgtcccacagcaccttaacggcgtagttctgtatatcagtgacgccaaactctcggacgcgtacagctggcgacatgatggcgcactgaagggctgctccgcgagacacagcttcgtcctggttaagagtggtgctagccggcttgttaaagacctacgaataataagcgaaatattacaaatgtgacatttagcatgggttgcatcatttgactaacctgctcaataagctgctttacggacggaatgcgtgagcttccgccaacgatctccacggagtgaatgtcgtccagctgcagcttagactcggctagcaaacgcttgaaagtctgctcgacgcgctgcaagacgggggcgcacagctcctccatctgcgaccgctgcatggacgacgagacgtcgatatcatccaagaagcactcaatgttcaacggcagcttggtgctgttggcggacatctgcttcttcagcttttcgatttcggttaacaggcgcagattggcacgggcattggtcttggcgttgatcttgtaacgctcctggaactccttggcgaagtaatcgcccagagccaagtcaatgtcgcgtccaccgatctggtcccaggtgctggccagcatcttcagtttgcccttggtgaaggcacaggcactggcctgcagtgacgagtgcccaaagtcaacaaagatcacgttacgtggcttgtcctcgaacagatcgttcttgtagaagccgtaggccagcgcggtggccgtcgtttcgttcatcaatcgcaggacgttcagtccggcgatctgggcggcatccaggagagccttacgctctgcattggtaaagaacacgggacaggcgatgacgcagtcgttaacctgcgtctgcatggcagccgccgatgtctccttcagcttggtgaagagcatcgccgtcagctgctcaggtccgaaatgctgatcctccccgaggtagttcaccttgatgccaatgctgccatcaccgcgcgcctccacgcgcgctggaatgctcgtgagttcgtgttgtacatggggatcgttgaatttgcggccaagcaggcgcttgaatccgccaactgtgtttttcatgtttgtcacctgctggttcttagcggccacgccgatgatacgcttcttgccatcgaaggccacaaaggagctgcaagattgcagggagtaaaaattgtcagttagtggatagatctgcaggccatataaggttcaaatatcttagttcagttgggattaagtcattacagtgggatgtggcacatatgtacaaaaattaaacaataagttttaaacttcatttttaatgttaatttaatgaaattaaatatgtaatattgaggaaattctggcaggacttatagtagagcaaaagcttctacctaaacatagcctcatatgcaacaggttacaggttctcgatccaatatcaaactcaattgaatgaatgatttttaatctttaatatatacaccagtaacatgattacagaaatttaataaactttgtaaactttgcagttaaaacataactttctgtatctttaatttgatctgcatctgcatcaattaagagtaaattacccgcacattaatggtgaactctttttataaaacggaatttgctaaaatcaagtacccattacaaatagttcaacatatgtacatatgtggtccccactgtgtctacatatgcgagtgtatgctgtctgtgtttgccggctttgaaattatttttgacagcttcgcacacgtttttctgtgctttttgcgcgctctctctctctctctccctctgcatctctcccgcttcacaacagctgctgcttgatttcgctctccgttctccgctctcttctcacctttgatgctgccttcttcttgaccgcatgacgcatgcatcgccagctcttttttttggtgtgagtgtgccaaaaaagtaaattcgtacaagtacaggagagtggggaagtgaggacgattggaaagatacgtaggcccacgcagtcaacggcatttaaatcaaaggcacccatacataggcagcggcaataaatcgaaaaagagaggcagcgggaacagcagaaaaagggagcaaatatgagtgtgccgccgcctcattaaaattgcaatttgcaacactttttatggaagtgcaatcggccaaatttaggcctcccgcaaaagcgaacaaacatcacagtaaataatgcacatatctggggtacacgtatgttattcgaagcgttacccataacaaccatggaattttctaggcgcgctctcttacaaacacatttacgcacacacacgcaaggcatgacttacaaattcgacataaccccaaaaaggcaaaaagtcgaacgattatgcagaccgcaaagcttatcactacaaactgggccgtaatccagagcatcggattgcggataaggcacaattacttacggcgtggcccggagactgtagtcattggccagcgtctcaattcctccggatcgggctgccgcaacatagcagctctcgttgccaaaatcgatgccaatcacggacattttttactcgactccttgtcgtctgaccgatgttccaaataaaattgattcagagcagacacacttcttgggcgtttgctgatttttcttgttttccttctctctttttgtttttgggggcggaacaacgcgatcgcagagttttctttgttttttttttcagctactgcaaaatatacaagttgtaaagagagggagacgtgaattagatataatgtatactgaacacacagccacgcacgtgtcggcttgctatctgttcttttcgtttgacaaacaagtccagaacattcgattcgatatatgcttttcacattcacatcaattatggattcgcttttcgcctgcgaatggaaatttctagcgtccggccttcgtagctcttttctctcgctcgcacgcacaggaaccgtggcggaaaattttgcgataaaatcgcctacgcttgtttggctttccacgattttttttattacttatctgtactcaaacagattggttacgcacgttttagttgataaagagcaatcacctttggattcacggtaatagcacagaaacttcaattcgacaccgcacgttttttttttactgattggtctgcaccatagagctggactaaccactagcgataggatcgatatatcgagcttattggtttttggagaaactatctaggtatcgtttgcgacatttatcgatagtgcaaaattggcaaatctttagaagattccaatttaacttttaccgccgacaattaaaaatcttttaatttattataaaattgttagcaattaccggtatataaatgagtatgagatcaaaagctacgatatctggcgataccgattaaagaagagtaactactaataattgagaaaacattgtttatccagtttgtggttaaatagtaaaaacgccactgcaaatacatttattgtaattttgaaacacccgccacccatcagcaagctcagggaaacgtatttgatccacgcatgggaggtggaccatcaacagtctcctcgatgagcagcggcgagctccagcgcattaggaagtaggcagatccggatttatcgtttgtcccggacaaccgatttccaccaaagggagtcagcccgtacgtgctacccgtgcatcgctcattcacgtagagattactagcggacattcgcagttggttcaggcagtgaaggataacctcatcctgacttgcgaatatggagccggagagcgcgtatctggactgattggcggcaagcttgagagcctcactgaaggaatcgtccgaatagacgaacaccggcaagaacggtccgcagcagggctcacacagcagtggatccaatggatccgacacccggacaatcgttggatcaacgaatctaccagtgctgtcatcacagctgcctccgcacaactgctccatgttcttggtgcgctgcagtagtttctgcatccgccggaagtcatttatatgcaccatcgctcctatatccgtttccgattcgatggggtctccgatggtcagttgctccgtggcctccaccaactcctccctgaggcgtggccacattgacgagggcacatacatccgggaga

SEQ ID NO: 26009 - DNA, 2654 bp, DROSOPHILA
tgcagaccaatcagtaaaaaaaaaacgtgcggtgtcgaattgaagtttctgtgctattaccgtgaatccaaagtagctgaaaaaaaaaacaaagaaaactctgcgatcgcgttgttccgcccccaaaaacaaaaagagagaaggaaaacaagaaaaatcagcaaacgcccaagaagtgtgtctgctctgaatcaattttatttggaacatcggtcagacgacaaggagtcgagtaaaaaatgtccgtgattggcatcgattttggcaacgagagctgctatgttgcggcagcccgatccggaggaattgagacgctggccaatgactacagtctccgggccacgccctcctttgtggccttcgatggcaagaagcgtatcatcggcgtggccgctaagaaccagcaggtgacaaacatgaaaaacacagttggcggattcaagcgcctgcttggccgcaaattcaacgatccccatgtacaacacgaactcacgagcattccagcgcgcgtggaggcgcgcggtgatggcagcattggcatcaaggtgaactacctcggggaggatcagcatttcggacctgagcagctgacggcgatgctcttcaccaagctgaaggagacatcggcggctgccatgcagacgcaggttaacgactgcgtcatcgcctgtcccgtgttctttaccaatgcagagcgtaaggctctcctggatgccgcccagatcgccggactgaacgtcctgcgattgatgaacgaaacgacggccaccgcgctggcctacggcttctacaagaacgatctgttcgaggacaagccacgtaacgtgatctttgttgactttgggcactcgtcactgcaggccagtgcctgtgccttcaccaagggcaaactgaagatgctggccagcacctgggaccagatcggtggacgcgacattgacttggctctgggcgattacttcgccaaggagttccaggagcgttacaagatcaacgccaagaccaatgcccgtgccaatctgcgcctgttaaccgaaatcgaaaagctgaagaagcagatgtccgccaacagcaccaagctgccgttgaacattgagtgcttcttggatgatatcgacgtctcgtcgtccatgcagcggtcgcagatggaggagctgtgcgcccccgtcttgcagcgcgtcgagcagactttcaagcgtttgctagccgagtctaagctgcagctggacgacattcactccgtggagatcgttggcggaagctcacgcattccgtccgtaaagcagcttattgagcaggtctttaacaagccggctagcaccactcttaaccaggacgaagctgtgtctcgcggagcagcccttcagtgcgccatcatgtcgccagctgtacgcgtccgagagtttggcgtcactgatatacagaactacgccgttaaggtgctgtgggacagtgagggctccgctgctccgggagagatcgagatcttcccgcaataccatgcttctccgttcagtcgcctgctgacaatcaaccgcaagggaccgttcaacgtttcgattgtgtatggccaacaggtgccctatccagatcaaacgattggcgtgtggaaggtcaaggatgtaaagccgacggaacgcggcgagggtcaggatgtaaagctgaaagtgcgcatcaacaacaatggcattgtgctaatctcgtccgccactttggtggaaaagaaggaggccgaagaggctgccgcagctgctgagcaggctgccagtgaagaaaaaccaggcgatcagaccaacaatactggagaacctgcggatggtcagcaagagggcgctgataaaaagaagaaggcttccaaagccaccgaattgccgctggagtgcaccacacacggcttcagccccgtcgacctgagcaactacacacagcaagagtcaaaaatgattggcaacgatcagaaggaaacggaacgcattgatgccaagaatgccttggaggagttcgtctacgatatgcgcaacaaactgcagggtggacccttcgagcgatacgtggttgaggctgagcgcgagaaaatcgtgtcgcagttaaatgatctcgagaactggctgtacgaggatggcgaggactgcgagcgtgacatctataccagccgcctgcaggccctgcaccagaagacggatcccatcaagctacgcgccagcgactatgagcagggaccagctgcatttgatgagctgaagaacagcattgccattgcacgtctggcagtggccgagttccgcaagggtgtgcccaagtacgatcatctaacggaaaccgagttcatcaacatctcggagacggcggacaaagcgcaatcgtggctggatgcaaatctgcccaagttcacacagtcgccgcgcaccgctgacagtcccgtccagatttccgccgtgcgccaagaggtgcaaactctaaattcgtgcgtcagttcggtgatcaacagggcgaaaccgaagccaactccggccaagacagcaacaccgcccaaggacgaggcgaatgcggaacagaatggcggcgagccagcggccaattctggcgacaaaatggatgtggataacaatggccagagcgcggccggaaacgatccctccatggaagtggagtga

SEQ ID NO: 26010 - protein, 804 aa, DROSOPHILA
MSVIGIDFGNESCYVAAARSGGIETLANDYSLRATPSFVAFDGKKRIIGVAAKNQQVTNMKNTVGGFKRLLGRKFNDPHVQHELTSIPARVEARGDGSIGIKVNYLGEDQHFGPEQLTAMLFTKLKETSAAAMQTQVNDCVIACPVFFTNAERKALLDAAQIAGLNVLRLMNETTATALAYGFYKNDLFEDKPRNVIFVDFGHSSLQASACAFTKGKLKMLASTWDQIGGRDIDLALGDYFAKEFQERYKINAKTNARANLRLLTEIEKLKKQMSANSTKLPLNIECFLDDIDVSSSMQRSQMEELCAPVLQRVEQTFKRLLAESKLQLDDIHSVEIVGGSSRIPSVKQLIEQVFNKPASTTLNQDEAVSRGAALQCAIMSPAVRVREFGVTDIQNYAVKVLWDSEGSAAPGEIEIFPQYHASPFSRLLTINRKGPFNVSIVYGQQVPYPDQTIGVWKVKDVKPTERGEGQDVKLKVRINNNGIVLISSATLVEKKEAEEAAAAAEQAASEEKPGDQTNNTGEPADGQQEGADKKKKASKATELPLECTTHGFSPVDLSNYTQQESKMIGNDQKETERIDAKNALEEFVYDMRNKLQGGPFERYVVEAEREKIVSQLNDLENWLYEDGEDCERDIYTSRLQALHQKTDPIKLRASDYEQGPAAFDELKNSIAIARLAVAEFRKGVPKYDHLTETEFINISETADKAQSWLDANLPKFTQSPRTADSPVQISAVRQEVQTLNSCVSSVINRAKPKPTPAKTATPPKDEANAEQNGGEPAANSGDKMDVDNNGQSAAGNDPSMEVE

SEQ ID NO: 26011 - DNA, 6909 bp, DROSOPHILA
cttgaccaaaaacaaagtggccaaggtggcttgcttcgctgagtgggtggatggtgcagcagggcgcagatttgccgacactttttactacgcgactttcgaactggagaaagcggcgcgactcgacgcgagaaaacgagaagcgcgaacggagagacgagacgagagatttatttggctgcgcggcttcgtctcttcggctttttggcgctcacaattattgcaccaccacaggcactcgctcacgtacatacattatacatatacacagatatctgtattggattttttttccaaagtttggattttgatgatatcctgcggggtatacagcgattttcgaactggctttgaaacttgaaactaaactttatggccagccaaaagcactttaagccttttaagtgtgaaaattaatattgcactttgagttggtactggttttcccttatgtgttttatcggtttagcggattgcattgggcagaatagaattttcgtttggacgcgatttctgctcggaacgcatccacactcgccagattctcgccacgaactgagtgcgctctgtggggccagatagctgctcttggggcacgattccttgatacctcgccattcgaacttgcttcctctcaattcgaatttggccaaaaccgttggggttgctttgagccagtgatgccagatgggttcgttaccctctgttaaccgcttccacaacaacgctagcggttcagaatgttggcagtttgcagagctatcgatataaaggtcaaagtgcaaccgttctgaattgccgccctgttttcaaatataaagcggtttatttgaatcctaatgcattcaacaaggtagtgtctaaaatgtcctacaaatagtatgttttctggttatcttcagtcgcatatttttgtatacttgtttcaagacatgcaatattttatgaccacatttaccacgttgcgcacctaatgatgaatcccattgaaaatgaaacatttgaattgatttcagttttatttacaaaagtatatatagtagcatatgtgccatagtataagaccacatatacttacacacacacacacatacataaccacataggaacagccatacacaaaatcatagaatgcccttaggatataagtcataaaatcatgtatccaataagaacccaaattctggtgacaataacaaatccagcctaccctaatgtaaacattaacatccgctgccgaatcagttattcccaccaaagggtcaaaaccgcttacgcagcccaagttctcggctgatcagtacccatgagtgatccactcaagaaggcacccaatccaacagacataaacatccgcagccgcattcgcgactcccaccagagggtcgaaactgctaacacagctttaagggtcaaaactttccacgtagctcaaactcggctgatctatatccatgcgcaatccactcaagagagcgcctaattaacgtaaacataaatgagagcctatgtacgctcaatatgaagaagtaaataagctcagccaagggtttgctaagcgttcgctttgcaaattagatttagattttattcatacttcaattgtgtaagacgtgaatttgtctccgacattcgcttaagtttttgatcaataaaaatacttttttttataaaccaacaaaccgcgaagttgtaattatatttatttactcattcaattcaacttgatttgtttagtttacgattttgcgatcgtttatttattaacatcaaatcatggatataagcgtagttctgaaattatttaaaattaaattcataattttaaaatgattattgcttttaaaactacaaataaaacataaatagattagtttttttttttgtttgcttttcttttagttgttttttgtttgtttttgttttcaatccagccttaatcgtatgaacacttacatgttatttatgcctaagctaacgaataataatatttttctaccttgcgtggttgccttttgaatgtacataaaatattttaagccatataaagaattgtacacttatataataatatattatatgcgtttcagttacggttaattcttgtttttgtgcgttttgtattgttttgttttatgtacagaatttatttgcttagcaaattatggcaaattagtctaattaaaaaaattttacaatgatgtatatatgaatacatatagtctgttctggggtttcaattcatgaatatttaattctttacttcttcaattgccattttctttttgtcactccatgtcagctgtggacttgtcttgtttgttgattcattgttagtaggattaatggtcgaatgaaatgcattagtagagttagatagattccctcgacttatatgctaattttagttgattagtcaagtactgtgctctgggccgctactgccccctcttctgtttgtcagttttagttttgttagttgctgcttggtgattggtgatatcaaatgattgactgactggttgaaagctaaacatgtatgattgcgaacatattttgttgtttcatttttgaggcacccaacttggtttgtgagagcgtcacaccactgaattctggatagtgttgtgctccttttcagcaggtattagtctaatggttaattcagttttgtctggtctgctatactataagtgtatgtgtatatatatatatataagcttgagcgctttatagatagtgtacatttaaaattatatttctgttttttctataaatacacaaagttaaatattaagctgagcgaggaaaatgattatatcgcgagttgagaatcaagagcgcgtagataatttcaaattaaatatgtttgtagcataggaattaggcaactaataacttttcacttaacaaaaataatttaaatataagaaacacttaacgtagactgtttgggcgggtgtggtgagtgtgagaggatgatggccaagagcagtgaggcgaatctctcagggattgcttctactgctgcagctggtcaccgaattgttgctgctgctcttgccgcccttgttactggcggcagtgttgcagcatgtggttgtggaggagatgccgctcctggcccccgtctcatcgccctcatcgcccaggtactcgtccggcttgtgactagaggcgggaggcgtcagaagactttcgggagcgcgcagcgcggtggccggggaagcttgaatcctagcgcgcatggcatgcgccgcatcctgggccataagcacttcgtcctgaaagatagaagtttcaataagtaactgacggaataaagtacgctttatattcagagtgaatcgaatacatatttggacgtatgcacacttctgtatacacttagatatacttacatacatatccatggtagttgtgtgcgtttggataatgtgcgagtcgtcggtgacaatattggggcagattagtcccaggccaaatttgttgctgacttgctcattctgctcgttcagctgcaggtagggggccttctgggagatcactcggaagaatggctccatccagcgagcacaaggctgaatcacctgccaatccagaccagaacagcgtaaagccatctccctaaaaacgaaaaatattcggtaagataaccatgtcgtatgggatgcaacttccattccaacttaccgactaaatgtatgactgatggcggccgctgccagcaccgagtaggaatagttggccatgcccacgtccagggtgcacagatctagcagctgtgaggtttgcacaaactcaaagccagagaattgcgggtagataaaggcatcgtccgcctccgcgctcttttgcctgccaatctgggagaacgaggccggagtgcggttgttcacattcagttgcatatagacgcccagccagccggtaatggtgatggggctgatgtcccagtcgagcgcctgcagcagaatcttctcgtggttaaggatgtcccgctctgtgcaggcgccatccgtcacataagcaaactccccgatctttggcggataaatctcctctaccttggcggccacaaacaggcaggtgatgccgatcaactgcaagtgcgtcttctgcaccttatgcgccacatgcaaatagcgatccaggtagtcgacggccaagtagaaggtctcccgatgcagcttgtaaacttcacagacctcgatcaaccagtccaagagaatggcacgcatacgtggttgcagtccgggatgctgttccagcatcgaaatgctgcgcagacgcgagtcctgctcatcccggtgacacatcaggcgccaaacatcggcggcgttagcccaggcgagcgcaggaagtgggcactggcgcagaccgttctccacagccggcgacatgggcgtccgcatgttaatcatcaggtcactgaccggatgatggatctgctcctgatgttttggcaggccgggagtacgctctccattcaccgcctgctgctggctgcagccggaggaggctggagaaattgtggaggagtagatctccacgtcgtcgtcctcctcctcaacgtcatcctcatcatcctcgtcgtacgagtagtcctcgcagctgtcgtccaaaaggtcatcatcctccgtcttctgcgtgaccaccgtactggtcaccacctgctccgcagcgtagcgcaccaccactggcgtctgcttgcttccacgatccggactcggcggactgtccgggctgtccggcagcggactgtgtggcgcctccgacagatcctcggccggtgagctacgtatgctgagcagctcctgggtactctggccatcaaccgagacaacgggcgaggtgtagaccgaggaggcaaccgatgacagattgccctgctcgctgccgtacaaagcgggcagtcgctgctggcgcttagctgatggaggctcaaaaccgagttcagggtcctgaaaatgaaggacagatgtttgaataagtaaatcatacaagtgaatgctttaaattgaaatgaactaagatagtagacaatcaaatataattactaagctatattcagatattactttcttaaatagtagttcatatttctcaaaggtgtcagcaattattaccatttcaataaatttgcgcttctgttccaacttcataataacatgaacaaatgagtggagaggatactcaagacaataacaggatcacacgactggcggaattagaaacgtgctccgaatttaattagcgaaggaggtttggggaaatttatgtgggcacgcctgtcaaaattggtaatccttgatagatggactgctggctggaccgaatgcacccgcacaaaatgaggagccaggacttcacacaaaagatcaaggactatggaatggcatggaggtaagacaatagcacttggttggattttctcgtgggaacgaacgggtttcgttttgctctttgtttcttttgaatatttttggtatgatcaacatatagacacgatatcgttattgcacttttaactttaatgttataaatttagtagcagtctttggaaataattttgttgcgtcgtttctctttggtatgattaaataattgtgcaaacagattttttggttatagcatttaaacaattttggcttcgttttgtttttttggtagttgttgttgttgttggtgggtgatcttggcaaatccggttcttaaattagttctttgcactcgttcttggtggtttatataaatatatttatcagtcttaacatttgctacttggcaacgaataattttggaatttcgaatttcgtttcagtttgtctgggtatgtattattatttggctaactccgctcttggcttgatcgagtaccaatcgcgttgacgtgcgctgtgcaactgagctcgacgttctccgttccagatcgccgatccccgaattccccgattaccgatcgtcgttatcctgcccaacgaatgcaacggtctcgaaaataggggttgcttttctctgcaacaacaacagcggtaaaaacaggatcgccaaactaacgtgccgtccctttccaacgggggttgcttgcctaagatatccccgtatatcttgagacgacaacttgtgttgtttttgtctttgcagcagcattgcatttttcgcctctgggtgtttatcggcccaacaacaaatcccactgacggctgtggctcctggatcctttttacaattatttttgtcaacattttcgttcaggtagacgcaagacgtttggaaaatcactacctacatcataatcctcaaaatagcgacacataatatagtacataggaagtatataaattacgatttgctagcttttggctcgagctgccagcggctgcattaagaatctcctgcatcttaaaggctactcaaataataaattatcttttgacattgatcagagggatggaggcggtgccaaagccaaaagtagagcgatcctaatggaacctcataagattacagcacaaaaatgacaaaaacaaaaaaacgaaaatggaaccgaaaatcgaaaatcgaaaacaattgagatccttgaccattgttcttcttgcagacagatgattgaaaacagaagccaaaatcagaaagtccataaagtacaataaaatgtagtcagcatgggacacagatgtctgagattgctgataccataaaaaatacataaatgaacgtatttcgcttaaaaaactattgggaatgttttgaaagttatctcaagaaacccataatttcttggctttctcttttttttttaatgcatagtaaaagatatttatttataagatactgaaatatatcaaaaatagcatttaaagctattctgaaagttttggaagcttggatttccatgttttaaat

SEQ ID NO: 26012 - DNA, 3897 bp, DROSOPHILA
cagttgcacagcgcacgtcaacgcgattggtactcgatcaagccaagagcggagttagccaaataataatacatacccagacaaactgaaacgaaattcgaaattccaaaattattcgttgccaagtagcaaatgttaagactgataaatatatttatataaaccaccaagaacgagtgcaaagaactaatttaagaaccggatttgccaagatcacccaccaacaacaacaacaactaccaaaaaaacaaaacgaagccaaaattgtttaaatgctataaccaaaaaatctgtttgcacaattatttaatcataccaaagagaaacgacgcaacaaaattatttccaaagactgctactaaatttataacattaaagttaaaagtgcaataacgatatcgtgtctatatgttgatcataccaaaaatattcaaaagaaacaaagagcaaaacgaaacccgttcgttcccacgagaaaatccaaccaagtgctattgtcttacctccatgccattccatagtccttgatcttttgtgtgaagtcctggctcctcattttgtgcgggtgcattcggtccagccagcagtccatctatcaaggattaccaattttgacaggcgtgcccacataaatttccccaaacctccttcgctaattaaattcggagcacgtttctaattccgccagtcgtgtgatcctgttattgtcttgagtatcctctccactcatttgttcatgttattatgaagttggaacagaagcgcaaatttattgaaatggaccctgaactcggttttgagcctccatcagctaagcgccagcagcgactgcccgctttgtacggcagcgagcagggcaatctgtcatcggttgcctcctcggtctacacctcgcccgttgtctcggttgatggccagagtacccaggagctgctcagcatacgtagctcaccggccgaggatctgtcggaggcgccacacagtccgctgccggacagcccggacagtccgccgagtccggatcgtggaagcaagcagacgccagtggtggtgcgctacgctgcggagcaggtggtgaccagtacggtggtcacgcagaagacggaggatgatgaccttttggacgacagctgcgaggactactcgtacgacgaggatgatgaggatgacgttgaggaggaggacgacgacgtggagatctactcctccacaatttctccagcctcctccggctgcagccagcagcaggcggtgaatggagagcgtactcccggcctgccaaaacatcaggagcagatccatcatccggtcagtgacctgatgattaacatgcggacgcccatgtcgccggctgtggagaacggtctgcgccagtgcccacttcctgcgctcgcctgggctaacgccgccgatgtttggcgcctgatgtgtcaccgggatgagcaggactcgcgtctgcgcagcatttcgatgctggaacagcatcccggactgcaaccacgtatgcgtgccattctcttggactggttgatcgaggtctgtgaagtttacaagctgcatcgggagaccttctacttggccgtcgactacctggatcgctatttgcatgtggcgcataaggtgcagaagacgcacttgcagttgatcggcatcacctgcctgtttgtggccgccaaggtagaggagatttatccgccaaagatcggggagtttgcttatgtgacggatggcgcctgcacagagcgggacatccttaaccacgagaagattctgctgcaggcgctcgactgggacatcagccccatcaccattaccggctggctgggcgtctatatgcaactgaatgtgaacaaccgcactccggcctcgttctcccagattggcaggcaaaagagcgcggaggcggacgatgcctttatctacccgcaattctctggctttgagtttgtgcaaacctcacagctgctagatctgtgcaccctggacgtgggcatggccaactattcctactcggtgctggcagcggccgccatcagtcatacatttagtcgggagatggctttacgctgttctggtctggattggcaggtgattcagccttgtgctcgctggatggagccattcttccgagtgatctcccagaaggccccctacctgcagctgaacgagcagaatgagcaagtcagcaacaaatttggcctgggactaatctgccccaatattgtcaccgacgactcgcacattatccaaacgcacacaactaccatggatatgtatgacgaagtgcttatggcccaggatgcggcgcatgccatgcgcgctaggattcaagcttccccggccaccgcgctgcgcgctcccgaaagtcttctgacgcctcccgcctctagtcacaagccggacgagtacctgggcgatgagggcgatgagacgggggccaggagcggcatctcctccacaaccacatgctgcaacactgccgccagtaacaagggcggcaagagcagcagcaacaattcggtgaccagctgcagcagtagaagcaatccctgagagattcgcctcactgctcttggccatcatcctctcacactcaccacacccgcccaaacagtctacgttaagtgtttcttatatttaaattatttttgttaagtgaaaagttattagttgcctaattcctatgctacaaacatatttaatttgaaattatctacgcgctcttgattctcaactcgcgatataatcattttcctcgctcagcttaatatttaactttgtgtatttatagaaaaaacagaaatataattttaaatgtacactatctataaagcgctcaagcttatatatatatatatacacatacacttatagtatagcagaccagacaaaactgaattaaccattagactaatacctgctgaaaaggagcacaacactatccagaattcagtggtgtgacgctctcacaaaccaagttgggtgcctcaaaaatgaaacaacaaaatatgttcgcaatcatacatgtttagctttcaaccagtcagtcaatcatttgatatcaccaatcaccaagcagcaactaacaaaactaaaactgacaaacagaagagggggcagtagcggcccagagcacagtacttgactaatcaactaaaattagcatataagtcgagggaatctatctaactctactaatgcatttcattcgaccattaatcctactaacaatgaatcaacaaacaagacaagtccacagctgacatggagtgacaaaaagaaaatggcaattgaagaagtaaagaattaaatattcatgaattgaaaccccagaacagactatatgtattcatatatacatcattgtaaaatttttttaattagactaatttgccataatttgctaagcaaataaattctgtacataaaacaaaacaatacaaaacgcacaaaaacaagaattaaccgtaactgaaacgcatataatatattattatataagtgtacaattctttatatggcttaaaatattttatgtacattcaaaaggcaaccacgcaaggtagaaaaatattattattcgttagcttaggcataaataacatgtaagtgttcatacgattaaggctggattgaaaacaaaaacaaacaaaaaacaactaaaagaaaagcaaacaaaaaaaaaaactaatctatttatgttttatttgtagttttaaaagcaataatcattttaaaattatgaatttaattttaaataatttcagaactacgcttatatccatgatttgatgttaataaataaacgatcgcaaaatcgtaaactaaacaaatcaagttgaattgaatgagtaaataaatatatacttttgtaaataaaactgaaatcaattcaaa

SEQ ID NO: 26013 - protein, 602 aa, DROSOPHILA
MKLEQKRKFIEMDPELGFEPPSAKRQQRLPALYGSEQGNLSSVASSVYTSPVVSVDGQSTQELLSIRSSPAEDLSEAPHSPLPDSPDSPPSPDRGSKQTPVVVRYAAEQVVTSTVVTQKTEDDDLLDDSCEDYSYDEDDEDDVEEEDDDVEIYSSTISPASSGCSQQQAVNGERTPGLPKHQEQIHHPVSDLMINMRTPMSPAVENGLRQCPLPALAWANAADVWRLMCHRDEQDSRLRSISMLEQHPGLQPRMRAILLDWLIEVCEVYKLHRETFYLAVDYLDRYLHVAHKVQKTHLQLIGITCLFVAAKVEEIYPPKIGEFAYVTDGACTERDILNHEKILLQALDWDISPITITGWLGVYMQLNVNNRTPASFSQIGRQKSAEADDAFIYPQFSGFEFVQTSQLLDLCTLDVGMANYSYSVLAAAAISHTFSREMALRCSGLDWQVIQPCARWMEPFFRVISQKAPYLQLNEQNEQVSNKFGLGLICPNIVTDDSHIIQTHTTTMDMYDEVLMAQDAAHAMRARIQASPATALRAPESLLTPPASSHKPDEYLGDEGDETGARSGISSTTTCCNTAASNKGGKSSSNNSVTSCSSRSNP

SEQ ID NO: 26014 - DNA, 2653 bp, DROSOPHILA
ccttggcaattgcattgcccaacaacaaaacacccgcgcgagagagcgcgagagagtgagagacagggcgaccgttcgatgcgctgctccgcttttctagtgttgtgaacgcggcaagcgttaaatgcaatctgagagaggaaagcgctgaaaagccagcgccaagtcgcggcccctcctctgccgctgcctcggtcgacgtcggcagaagccgcgacttgttttgggtgcccgaaaaaataacgaaaagaaatacaaaaaaacagagccccaaagcaaaacgaacgcaatagaaaaattccactaatgtgacttagcagtgttggaaattcgtattacatgcacttgagaaaagaaaattttgtttgctgagtggcttatatgcacatacacatatacacattgtataacatagttagccaggtgtttttaggtttgaaaagaaatactaacttccaaatataatatttgtttaaacaaaacttatattgcagaatatatttaaaaaataatggattcaatttgagtttttgaatgtatttagtaaagtgcactttaccaaacatatacatatgtattactggtggttaattcttttttttcatcagtgtatgtgacttaatagacatttgcaaagtgcattcgggtaaagtggatagaatggcttgagggaaaggtgatgggagacagaatgagaatcgagtggaaagaatcaaaagcgacatatgtgagcaactcttgaactaaattgagtcaattaaaagtaatggaaagaaaaatcaaaggaaaatgagtcagggaactgggctgttcagggtgcaccggattattcaacgaattggtctgaaatgcgtaacatatgagagcgatgtaaatagttgaaccgacaaaatacatttttttgcacccccttttattttgcaaagttttcttgaaaagtataatttcagtgtaatagtgtaaatgtgtgattgacagcactattatgtattgacacccttcagagggctccgcagtcttcgataattactttcttgctggtcttcccatcttgtgaaccgtaagattctaccttctggacgatatccattccctcaacgaccttgccgaacacgacatgcttattatccagccatgtggttttcccggtgcaaatgaaaaactgagatccattggtattggccccagcattggccatcgaaagtacaccagctccggtatgctttagctcgaaattctcatcgggaaacttgtttccataaatggagcgtcctccagttccgttttgattagtgaaatcaccgccctgacacatgaaattcgggatgacgcggtggaatggtgatcccttgtagccgtaccccttctctccggtgcagagggcccggaaattctccgccgtcttgggcaccacatccgaacgtagttccatcacaattctacctaacttctcacctcctgcggctatatcgaagtaaacgcgtggcaacgacatcttcgcagatgccgaaaattttcggagaaaagccagatctattaggtttaaaatcgaacgatgccttgttcaaaaacaagaaatatatttaccggataacttggtggtgtcagctttatgataaaaaaaagtaacgactttcaagagaaccgtacagtagaacagctggaactgaactgacgaatattctgggctagtcagggatctgaagtaagggctcgttgaaattcatttcacagccttctttataaaatccagtagcaaaaaaaaatgcctgctttggcttccacaatttttaatacattgcaaatgatcggtatatttggatattttaaggtaatattgtccttaaaatacctttatccgtgtctaatcttacagaccttatttactcttctaatttgtttaaccgccgccttaatcaacgcaaaactcacagatacttttaaagccggctatatttacctttcatttgcagttgtgtacaaactttatatatccatccacgcgatgagtgtatgtttgtataattaggcaaaaaaaatagtcaatatttatttgccaaagcaaatacaaactgtgagaattatccacgttttaaagaagctgctattgcatttatatttattcatttgtttgttgtctatatgaacgcatagcactcctttaaaactcttctatccccgacttctttgggtttagcacattttgtgtatatattaaagtccagggcctagtgagtttccaagacaacaattgctatttgggtatacatatacataagaattgttataaggggaaaataaaggaaggttgaagtacgataagattggctagtaaccgagaacgttgtaaacacaatgttcgataaagtaggtttggcatatttaataagttgcacggactttccctttataagctttataatcattttttatgtatttttcgctcataaataaaaataaaaattaaaaacaagctacttcaagacccttagataatctcccctcaaaatgccaaaagttcaagatgatttaacgaaagaaggttattcgcacgtaggtcgtaattgttaactcgactctccactgtctcattacttataataaattgtagtgcgaccgaatagcgaagacaagaaagatacaatccatagtt

SEQ ID NO: 26015 - DNA, 561 bp, DROSOPHILA
actgtacggttctcttgaaagtcgttacttttttttatcataaagctgacaccaccaagttatccgatgtcgttgccacgcgtttacttcgatatagccgcaggaggtgagaagttaggtagaattgtgatggaactacgttcggatgtggtgcccaagacggcggagaatttccgggccctctgcaccggagagaaggggtacggctacaagggatcaccattccaccgcgtcatcccgaatttcatgtgtcagggcggtgatttcactaatcaaaacggaactggaggacgctccatttatggaaacaagtttcccgatgagaatttcgagctaaagcataccggagctggtgtactttcgatggccaatgctggggccaataccaatggatctcagtttttcatttgcaccgggaaaaccacatggctggataataagcatgtcgtgttcggcaaggtcgttgagggaatggatatcgtccagaaggtagaatcttacggttcacaagatgggaagaccagcaagaaagtaattatcgaagactgcggagccctctga

SEQ ID NO: 26016 - protein, 164 aa, DROSOPHILA
MSLPRVYFDIAAGGEKLGRIVMELRSDVVPKTAENFRALCTGEKGYGYKGSPFHRVIPNFMCQGGDFTNQNGTGGRSIYGNKFPDENFELKHTGAGVLSMANAGANTNGSQFFICTGKTTWLDNKHVVFGKVVEGMDIVQKVESYGSQDGKTSKKVIIEDCGAL

SEQ ID NO: 26017 - DNA, 3963 bp, DROSOPHILA
tctttgttttccccatgtttaacaaatttatgaatgaaataaaagtaggcagtcccacgttatcaagaaaaaatgttcaaatgatctaaaaaaaaagtcgaaaatttgatattcttcgaacaacagatcaatgcgaactaattaaatgtgtctaaatacttttgccacggcccaaatcgttgcctgtctagctttcttataagcacaaggataattgaaaaggtaaacagccaaacttacccttcgtgtgtaactgtaattgcactttttgttttatcatcaatagtttacttatttatttgactgtactatgaaaagcccggcagtttcaagctaatggtgtctaaatacttatgcccactagtgtatgtacctttccagtataattttaactcagctgttacatttacgctcaaataatcacgacccagcctaaatatagcgaaaaatagttacattattttcctgcggcgatacaaccaatgcccatcgattaaggtcgacttacatatattaaataacattgttaaattcacttgacttttcgacaaactacaggcgaagttatagttgatttcctctacaatctacaattgtcaaaaaacttttgatatgcccgcttcactcggatctgcatgtttaatcgcaacccagttttatagttcccacaatcacatcgttcatacggacatggacaattcgagtcttatcttttagggtgggatcgattatttaatttttttagtgccggaaatgttgcctttacctgataaatattttttaacaaagaatatacactattgtacctatatagttgaagggcatccccaactaaggaatgaccaagaagagatcagaatacttagtggatcaaattacagttatctatttcagtttacaatcttcagtataatcaagcttattttctttaagagggataacttaataatagcaatgcagaacagttacagaacagttaatagaaattcaatgtgagattaacttacggtatggcgtttttaactttcgcttgatcatcatctgctaagctctgaaatcctggcatatcttcacctgacgcaaaccagccaagctcagagcgcaattgggcgaagcattccaaatgatgccacaaaggttggcctccgtacttcataccaacttcagtatcataaacagttttacgtaagcgaactagatccttgtttattttttgttcacatccacgacacgtcgatcgactagattttgcatattcaatcccaaagtcttttaatgctaagttaaaagccttcgatcgcttttttcctaattgtgcgcttataacttcttgtatattttctaagtacatttcaaaatgtttttaaattgatatagatcaattttaaatactaacccacaagatccgttaattccttttgatcggcaaatcggagatttccaatgttttgtatgtctcctactgagctgggacgctggtttttaaaaaagcaggttttatgaaaccaattcggaactttggcatcatgaaatgcagactaaaaaataagaaatacaataaaatagtttctttgtctttcgttcgtttggtgtaaccgtttcaattaaaaaataataataaaacgatttttcaaaagtgtgtgcgtggcagttttgtgcaattttagggctttaaagtgggcgtggcaagtcgatagaaatttacagaactaataaaaatgaaaaaaaaaaatatcaacacgtttttcaaaagggttggcgttgcagttttgtgcggtttgtgggcgttagagttgccgtggcaacatgggtcatgctgcatctatgtctctagaatctgtatgctaaatctcaaccttctagattttatagttcctgatatctcgacgttcatacggacagacagacggacatggtattcttgattggccttgtccttttgtatgaaagctatgatctcgaaaactataaaagctagtattcatgtttcgctctgtgaaagtttgtttcagaacgatcatcaccatgtgaggacatggcgaaaattcagctggtcttacaatttttgcggccccaaccacagaactgcagcaagccactggcactcttagtacacccgcacccaccaactgggtgtctatacccccgggtgttttttgacactctactttcggcaataaaaaatatccgagtgtttcgcctgctgcgaaataaccctttgggtgagcgactcacaagcaacatttttataggttgaagcgtgacggtagaagaaatgaagggtcggtcccactgtcggtcccgctgtcggtcccactgtcagtcccactgttggtccgactgtcagtcccgctgtcggtcccactgttaatcccactgtcggtcccacgtcagtcccgctgtcggtcccactgtcggtcccgctgtcagtcccactgtcggtcccaccgtcagtcccgctgtcggtctcaccgtcagtcccgctgtcggtcccactgtcggtcccaatgtcggacccactgtcggtcccaatgtcggtcccactgtcagtaccaatgtcagtcccgctgtcgttcccgctagtttcgatttcacgtgatgtttgaggacctgttttcgtttcttcggccgcacgcattgccacacgcacactgggccagagaactgcagcaagccactggcaccctgtgggtgagcgacgcaagtatttgtgcccccaccgctacacgatttaccgctggcaattacatgccgcagctgtcgacgaccgatgggactaacggcgaatcgggatcttttaaagtttcgtaaatcagtatcagtttaatcaaattcattttcaatcttttatctgcagactacttacgtatgtatgtaccacatagtaacttacttgaaccatgacagcaatccgaagagtatctttagatatagtacttttacatcctttgcaagtggctcgtccagttcttgcatactcagcaagataaggtaattcaatatccatattacactttaaaggaagtcaatttcaagacatttattatttatcgaattatgttggcgatattttcctaaataataaaattgtatatcgatgttaaagactacaaaaatattattatagacgatttccaatgattctaaagaccttgtacaggagctcattccgtaattaagctgtattctgttataagacgtacgactgttaactatataactttgtaattgaattcggcaacattaaaattctgtgtcgattatacaccagctagtttaacaagaaagggtggtcatttggaagattaagaaggaatggtaattatgttcttactgaataataacaccgaccgttttaattaaggtctgaaactgaactcaacaaattgatatggattgattgactttgaatcctcggcctcgagctttataaatatgggctttggattttggagttccaatgaaataaacagagctttggagttactaacattgatttgtctttgcatttctcttggactcgagttcattcgctattggatacaaacgctcttagatcctcacgactttgtttattgaaatcttaaaataaagttttcgattatcatcctgtatacgactttgggcttattccagtcaggattgcttttggtttactagtgttgttcttctataataagaagctgtgtgtaggcatgtgcttaagtctaatggacttatggatatgccactcccccaaccattagttttggcaaagacactagaataacaagatgcgtaacggccatacattggtttggcactatgcagccacttttttggtgacggccaaaattgctctctttccgctcgctcacgctgagaacataagaaatctaaaaatagaatttgcttgcttgtgtgagtaaaaacaagagacgagaacgcgtatatgtgtgcgtgttgtgctagaagacgattttc

SEQ ID NO: 26018 - DNA, 654 bp, DROSOPHILA
ccaacataattcgataaataataaatgtcttgaaattgacttcctttaaagtgtaatatggatattgaattaccttatcttgctgagtatgcaagaactggacgagccacttgcaaaggatgtaaaagtactatatctaaagatactcttcggattgctgtcatggttcaatctgcatttcatgatgccaaagttccgaattggtttcataaaacctgcttttttaaaaaccagcgtcccagctcagtaggagacatacaaaacattggaaatctccgatttgccgatcaaaaggaattaacggatcttgtggaaaatatacaagaagttataagcgcacaattaggaaaaaagcgatcgaaggcttttaacttagcattaaaagactttgggattgaatatgcaaaatctagtcgatcgacgtgtcgtggatgtgaacaaaaaataaacaaggatctagttcgcttacgtaaaactgtttatgatactgaagttggtatgaagtacggaggccaacctttgtggcatcatttggaatgcttcgcccaattgcgctctgagcttggctggtttgcgtcaggtgaagatatgccaggatttcagagcttagcagatgatgatcaagcgaaagttaaaaacgccataccgtaagtt

SEQ ID NO: 26019 - protein, 197 aa, DROSOPHILA
MDIELPYLAEYARTGRATCKGCKSTISKDTLRIAVMVQSAFHDAKVPNWFHKTCFFKNQRPSSVGDIQNIGNLRFADQKELTDLVENIQEVISAQLGKKRSKAFNLALKDFGIEYAKSSRSTCRGCEQKINKDLVRLRKTVYDTEVGMKYGGQPLWHHLECFAQLRSELGWFASGEDMPGFQSLADDDQAKVKNAIP

SEQ ID NO: 26020 - DNA, 7472 bp, DROSOPHILA
tcgaaggaaataatttgttcatttttagttacgcaaattttattattattatgatatagcttgcgtaaaatatatatttcattcatggcttatcaaaaagattatcacatacgaatctggcgatctgtcgatgtcatgaaccggaatattaatcagatagtgtagaggtaattgattatttgcattataatcaaatcgcacttgtttattgtttaaaatttattatttttgaaaaatttctaaacaaagaagctgattatagttatagttgttgtttgtgaatatttgttttgcctctttatctgaatttctaatagttcacaccaaactgtgctaaattattagaaacagcttaaccacagacacagtcttaaatcaaagttcaaccattcatagacacacaatcgaatcactttagttatttggcattacatttagaacgtgtttcacgatttaacaacaaattggtttgcttagaaaaaactaaccgatagcaactagtggcactactgatctcaccagaggatggtgaccgaatgcgtctagttctacgatcgaactgagtttctgattttcagagagcaatattttcagagaggtcgaaaagcgagactaatttggaaaattagcagctcagagtatcatattattatcagctgcaaaacagagtgcggcttacccggcgtatacgttattttacatcccattactcgcagtatatagttaatattgcaattattttaaaatgtctttttcgagatgtataagaaagaatccggtctggtatttaaaattaaaaaatatatatattttgtatgaaattcattacaatgcatactatgttagtcttcaatcttaatagcttgattttacgctatattagccgcagaaagtgaatttaaccattactacttgctattaggaaataatttaaaaggtctttcacctcccattctttatatatccacttccaattcagaaatgaaaagactttcatcttgagatacacgaatactagagtattaaatagtttatttaagcgactttaaacattcataacattcctgctgaaatcaagagttgcttctcttagtgagctgatgagaggctggactgggagctgggtaatctagagcagttgctggatggagcgggacatctgatggtagtttcgctccttccactgaacattggtgagcatgatctccagtgtctgttggatggcctgttccaatcccttcagcgactgacgggagttgttcacgaagtccttgaactcgttgaagtcgctcagcgtgatgacctgctcggaaagcggtgagagtaggcgggacatgtccttggtgagcggatggtagctaaaaaaaaaaaaaacagaaacccttagccgaggttctatccatcacagatgcgaaaacttacaacttgtagatgaagtcgacgttgtccatgaaatactttttggccagcaggaagcccacctcattgaaggccaccgcttggaaggcccacatcgagtcctgcttgcgaatggcctccttggggtcaaaggtcagctccagataacgctgcagcagccacacttccctcgaacaacccaaagcagtcagaatggtgcgcttctcagccgccacattcgacttcttgtaacgcgtccacaggaattcccaatccgaatcggatccgtgctttatggaggtgcagtacacagtgctacgaacgttgatcggaaccggattcttctcgtcgggattagcctccgctcgccagttgcggtagtaggccagggcctggggcacacaatcgcccacctggtactgacacgcccagttgaccaccattgtcttcagcagcacctgatcctgctgcggaatcgcgctgaatgtgtcgttgatgccattcaggtgctcgtagatcggcagaatcagcttcttcatgtagcgctgcattgaggatgaataaattcatttaaaaggactttaataaaagttcatatacccggcatttgtcaaattataaaatatctagtgctatctagtcagacttacgacaaagaacaactgtcggtgggttgcccatgacaagttaggtgtatagatgaagttaggtgtgagcaattttgaaaggattgtttcgaaatacaaatgagaatgagattatacggggagcacgtggtagaagagcattaggatactttaagagaccagaacccaccttgaagaactcgaaatcgggtgtctggcggacaatgcggcccacacgcttcagattctcgaaggccgacttccagggcaaatactcccgctcccgctgcagatactcgatcagtctcatggcgatctcgtagtcctgttcgccggtccaggccagatatagggcatcgtcgatcagctgagctcggttgatcacgtgaatgcgttcgaaatctccattggtcaaggtctcaataagaagcttccagttctgggcatcgtagttgaccttgtacagcgtcgagagctgcgtgttaaagatcacccactgatcgggtcctggcaggtcctgaatggtcttgggcaggctctcgccattcttgccgcactccatccaggccttgggtgccgtgttgttgaagtcctgcaccgcctgtgtggtgtaactcagtggcacccaccagcaaccgccgcgataagctcgggctacctgggtgttcaggagatagcgctcctggttgagcttggccgtcctggcagcgtagtctcgcgtcacgttgatcacagggtagctgtcagagaaaggatatttagtggtcattcttaacaagcttatcctgcaaggacctacccagtttgcagggtccatgagtccatgatgctcttgatgtcatagctcttgggcagagatcgatacttgtgagctgcctgggtgagcgactcccagagattgtcctgctcagcattcttgtaggagaacttctgcagataggcctgcagaccggagcggaaggactcctcgcccaggaacaagtgcatcatgcgcagcaccgtggagcccttctggtatgagatctgatcgaagctctccgagatctccgacaccatttggatgggtctcgagatgggatggctgctctccagggcgtctctgcggaaaatggtcagcagattggacagcgactcctgctccatggaacgccattccggattgatattctccacacccaaactggccacataggtggcgaatccctcgttcagccacaggtcggtccaccacttcatggtgaccaggttaccaaaccactggtgcgccaactcatgagccaccacgctggccactcgttgcttatccgccagcgaggagtgtgccgccgagtagagcagggcaatctccctgtaggtcaccagaccccagttctccatggcgccggcactgaaatcgggcactgcaatctgatcgatcttgggtagcgggaacttgatgccgaagaactgctcatagtattgcaacactttgggtccgaactgagcggcatagtcgcactgatcgatggcattgggtctggcccaagttcggaatagagcgctatttggcagggtggagggcttgtgcgagaaatcgttcacggagtaggcaaccaggtaggtggacatgggcaccgactcctggaactcgcaccatatgtagtcggcgagggtttcactggaagaataaagttaatgaagtctctgtggaaagttctgaatgttatgtgatgactaactgtggcttggtttccttctcgggcatgttgcttatagccgtatacttcttatgatatccaagggtaaccacgaaaggagccttgaaatcgggctcatcaaagcaggggaaggccaatcgagccgatgccggttcaaactgggtaaccgagatccatctgcaataggaaataacccatcaatacctggctctatgtcttcataaaagtctgcaaacgcacttggtaagattggccacgggatccttgtaggagctgcggtaatagccctcaagttgtcggttcaggtcggcggcgaagggcatgtacaactcgtaggtgttgccggccaaaagttcctggcaggtgttgaggatgtagaagtcatgggatggattcaccgccgtggaggacacgcagttctccttcttgccctctccgccgatctggcgcagggtgatctgggactcatcgatggtcagattcttggagtgcagcgttacgttcttggtgttttccagggcttcgatcaggatctttacggaaccggaaaaacgcaggtcctccggattctccagcagtgtcagaatgcggagatggtacttctgcgggcgcagcgatgtgggcaggcggtagtagttgtaggtggtctcgatggagtcggcggatgagtcggcggtggctaatcccaggccaagggccgccacgaacagcagaaaccacttcattaccaaaactgtggggaagagcggaaggcgaatcacttattagcggggcgctcaatcagagcaaactaaagcaattaaccaaatcactttgccaaatcataaacagtgggtatccactaacagaaaactcggataattctacttaaagtgtaatcaatttgaatacaatttattcaaaacttgggcttcgctttctctcgcccagttaatgataaacaattatttttttttgaacaaaacacaatggttgactgatgtccactgtataattcgcaccgcgctttttgctgcctatgcggtttcgctgatttacttcaaattaatgcaaattgttttatttattatgttaggatcgttatgccgggcacgtattaaggtctgggccaatgaaacccgattgaaactctcctcacaattggcattatgcgctggctacctgataaatgtacatactatatatatgtagttgattaactatggcccttgccaggggtaccaaatgaaatcggaatatttgtagttgatcagctgatcgagtaaagaataaatattctgccgttaactgcacatgggaactaagagaaactggtctgtttgttttaatatctatagttgtatatcataaatataagtttactttttaatactatgcctaaaaaacatctataaatcttggttgccttcaaagttagtttattatactcatcaactatattcccacgccttcacttcggcttttgaactttttgtacaacgtttaactattttgttaagtaagcacgcacactttaacacttgaataccttgacgtagtaactgggtatctattccatacggaatatcccaagggagctaagaaggaaacctgcaaaggttcttgtactgtactggattaaccagattgcaatccctgctgctggtttttatttttctggacttctttcagcttcactcttaattatgcaaaagttgttctcttggtttggctttctgggttctttggttgcatataaataaatgtaaatgcgggtcaatgaactttgcagattatcatatgataaccaaatgtagattgggtccgcatagagaaagtataatctaatatatgtttttgatcaggtaagtatcaataaatagttctgatcaataaaagttcattgaattcattgttttagtgttttaattaaatacaggaaatacaggaagaaaacgtgaaaataaattcccgaatcgaaagacaataaaactgcccgcttgaaattgaattaaatacaattgttaacttgttgtgatttctcaaaaaatttcaaacacgtgctgctgtgacattgacccatcaattgatcccttcgagttaactgggagtaagtacagcagcggtcaagaaactagcttccagaacattgaataatttcaaagtcaataaagcaagtaaaagtgctttgaagtgctaatacatgtgaaaggtattttaaaggtaattataatttaatacaatgagttcaaaaaacttcttaatatgcacattgataatttctttctaattgataatttctttctaattgataatttctttctaatttataatttcttcctggatttgcggacttttgtcttaacagaggacagttttaatataaaaaatattcactaagaagacgtaatggaattatttttgacaacacattatttatggtgcacagttcagcacttaaacttgttttttcttggctttgggtatatgtatgtacatatattcttttggtttgtgttcttaacacacttgtgtcactctattccttttttcggcacttgtttcgagtgcgtagttgtacttgtctcgtgatttcggggtcaaatctggcgttcttttcttttttttttttttttgcgattcaattccgttcaagctgcactctcgaggtgcttgacacacaaagattgttgggaccaaccgttgccagagcctcagtcacagccacagaaaagcgaaaaaaacacacgcaggagtgcgacctgttcgacggtcgacgcgaatctaaagtttactgagcacggcgcttttatcttatacgatagcccgtggttacaccgctcacccatacagatggaaaagccgaaagccgagaaatggagagccagtgaaacgtcgacggcttagagattgaaacgctgctttgcgtcggcgcagagaatcgcagattcagtatgctagttctatcgtagagcatgcaatgtagttgaacagccaagcaaaggaggtaaaaaaaacaataaaaaaggaagaaaaaaacagcacatgtgtgacccacacgaaacgcacagcgggcgattgcaatgaaataatggcagggcttacccggcgtatgcgcaattttgattcacgctgcacacatacgcagcgatgtcactacgtgtttttgaccctaattgcgctgattaacccatttctttctatttcgtatgccactgggcacttgagccactcgaccctagagttcacccagtcactcaacctgaaacaccccctacttttggaccaccccccgtggcggaagcgccgaagataaggggccacaaaaagtggcaaaaaacaaaccataataaaccaagtgcagacggacagacaaacgcagcatgcgggctcacaggaggggctttagcgggttaaccctttggggaaagcctcatatctaggtcaccgattaaagtatttatcaaattttgaatgttttatttatacatttacttgttggttcgaattaactttgattatttgaattgctaattataatttattatatttactacatgccagtcttcagagggttaatttggcatggaaaatggcatgtaactcgaaatattactgcggctagggccctgcctttggctaattgccacaaacctcgtttggctttcatccacactttttttgaggattaaagatttgatagttttaaggagaaattgaaatgggtgtgaaagggaattggaacataagctataaacgaaaataatctgct

SEQ ID NO: 26021 - DNA, 3007 bp, DROSOPHILA
cgtcgaacaggtcgcactcctgcgtgtgtttttttcgcttttctgtggctgtgactgaggctctggcaacgttttggtaatgaagtggtttctgctgttcgtggcggcccttggcctgggattagccaccgccgactcatccgccgactccatcgagaccacctacaactactaccgcctgcccacatcgctgcgcccgcagaagtaccatctccgcattctgacactgctggagaatccggaggacctgcgtttttccggttccgtaaagatcctgatcgaagccctggaaaacaccaagaacgtaacgctgcactccaagaatctgaccatcgatgagtcccagatcaccctgcgccagatcggcggagagggcaagaaggagaactgcgtgtcctccacggcggtgaatccatcccatgacttctacatcctcaacacctgccaggaacttttggccggcaacacctacgagttgtacatgcccttcgccgccgacctgaaccgacaacttgagggctattaccgcagctcctacaaggatcccgtggccaatcttaccaaatggatctcggttacccagtttgaaccggcatcggctcgattggccttcccctgctttgatgagcccgatttcaaggctcctttcgtggttacccttggatatcataagaagtatacggctataagcaacatgcccgagaaggaaaccaagccacatgaaaccctcgccgactacatatggtgcgagttccaggagtcggtgcccatgtccacctacctggttgcctactccgtgaacgatttctcgcacaagccctccaccctgccaaatagcgctctattccgaacttgggccagacccaatgccatcgatcagtgcgactatgccgctcagttcggacccaaagtgttgcaatactatgagcagttcttcggcatcaagttcccgctacccaagatcgatcagattgcagtgcccgatttcagtgccggcgccatggagaactggggtctggtgacctacagggagattgccctgctctactcggcggcacactcctcgctggcggataagcaacgagtggccagcgtggtggctcatgagttggcgcaccagtggtttggtaacctggtcaccatgaagtggtggaccgacctgtggctgaacgagggattcgccacctatgtggccagtttgggtgtggagaatatcaatccggaatggcgttccatggagcaggagtcgctgtccaatctgctgaccattttccgcagagacgccctggagagcagccatcccatctcgagacccatccaaatggtgtcggagatctcggagagcttcgatcagatctcataccagaagggctccacggtgctgcgcatgatgcacttgttcctgggcgaggagtccttccgctccggtctgcaggcctatctgcagaagttctcctacaagaatgctgagcaggacaatctctgggagtcgctcacccaggcagctcacaagtatcgatctctgcccaagagctatgacatcaagagcatcatggactcatggaccctgcaaactggctaccctgtgatcaacgtgacgcgagactacgctgccaggacggccaagctcaaccaggagcgctatctcctgaacacccaggtagcccgagcttatcgcggcggttgctggtgggtgccactgagttacaccacacaggcggtgcaggacttcaacaacacggcacccaaggcctggatggagtgcggcaagaatggcgagagcctgcccaagaccattcaggacctgccaggacccgatcagtgggtgatctttaacacgcagctctcgacgctgtacaaggtcaactacgatgcccagaactggaagcttcttattgagaccttgaccaatggagatttcgaacgcattcacgtgatcaaccgagctcagctgatcgacgatgccctatatctggcctggaccggcgaacaggactacgagatcgccatgagactgatcgagtatctgcagcgggagcgggagtatttgccctggaagtcggccttcgagaatctgaagcgtgtgggccgcattgtccgccagacacccgatttcgagttcttcaagcgctacatgaagaagctgattctgccgatctacgagcacctgaatggcatcaacgacacattcagcgcgattccgcagcaggatcaggtgctgctgaagacaatggtggtcaactgggcgtgtcagtaccaggtgggcgattgtgtgccccaggccctggcctactaccgcaactggcgagcggaggctaatcccgacgagaagaatccggttccgatcaacgttcgtagcactgtgtactgcacctccataaagcacggatccgattcggattgggaattcctgtggacgcgttacaagaagtcgaatgtggcggctgagaagcgcaccattctgactgctttgggttgttcgagggaagtgtggctgctgcagcgttatctggagctgacctttgaccccaaggaggccattcgcaagcaggactcgatgtgggccttccaagcggtggccttcaatgaggtgggcttcctgctggccaaaaagtatttcatggacaacgtcgacttcatctacaagttctaccatccgctcaccaaggacatgtcccgcctactctcaccgctttccgagcaggtcatcacgctgagcgacttcaacgagttcaaggacttcgtgaacaactcccgtcagtcgctgaagggattggaacaggccatccaacagacactggagatcatgctcaccaatgttcagtggaaggagcgaaactaccatcagatgtcccgctccatccagcaactgctctagattacccagctcccagtccagcctctcatcagctcactaagagaagcaactcttgatttcagcaggaatgttatgaatgtttaaagtcgcttaaataaactatttaatactctagtattcgtgtatctc

SEQ ID NO: 26022 - protein, 932 aa, DROSOPHILA
MKWFLLFVAALGLGLATADSSADSIETTYNYYRLPTSLRPQKYHLRILTLLENPEDLRFSGSVKILIEALENTKNVTLHSKNLTIDESQITLRQIGGEGKKENCVSSTAVNPSHDFYILNTCQELLAGNTYELYMPFAADLNRQLEGYYRSSYKDPVANLTKWISVTQFEPASARLAFPCFDEPDFKAPFVVTLGYHKKYTAISNMPEKETKPHETLADYIWCEFQESVPMSTYLVAYSVNDFSHKPSTLPNSALFRTWARPNAIDQCDYAAQFGPKVLQYYEQFFGIKFPLPKIDQIAVPDFSAGAMENWGLVTYREIALLYSAAHSSLADKQRVASVVAHELAHQWFGNLVTMKWWTDLWLNEGFATYVASLGVENINPEWRSMEQESLSNLLTIFRRDALESSHPISRPIQMVSEISESFDQISYQKGSTVLRMMHLFLGEESFRSGLQAYLQKFSYKNAEQDNLWESLTQAAHKYRSLPKSYDIKSIMDSWTLQTGYPVINVTRDYAARTAKLNQERYLLNTQVARAYRGGCWWVPLSYTTQAVQDFNNTAPKAWMECGKNGESLPKTIQDLPGPDQWVIFNTQLSTLYKVNYDAQNWKLLIETLTNGDFERIHVINRAQLIDDALYLAWTGEQDYEIAMRLIEYLQREREYLPWKSAFENLKRVGRIVRQTPDFEFFKRYMKKLILPIYEHLNGINDTFSAIPQQDQVLLKTMVVNWACQYQVGDCVPQALAYYRNWRAEANPDEKNPVPINVRSTVYCTSIKHGSDSDWEFLWTRYKKSNVAAEKRTILTALGCSREVWLLQRYLELTFDPKEAIRKQDSMWAFQAVAFNEVGFLLAKKYFMDNVDFIYKFYHPLTKDMSRLLSPLSEQVITLSDFNEFKDFVNNSRQSLKGLEQAIQQTLEIMLTNVQWKERNYHQMSRSIQQLL

SEQ ID NO: 26023 - DNA, 4292 bp, DROSOPHILA
gcagcgccactacgaactggaggcgaaccggcacatgcatcccaatcccgtgcccggcgagatggcggtggtcaagaacatcaaccgctacgagcgggtgcacattgtcagtgtggaaagcaatgtcatggtgttggtgcaactgttggacacgtccaccgaatgtttttcctacaaaaccagccagctgtacagctgcgataagatcttcaaggtatggccatacatgatgatagatgatagtagtatggattcactgcaaactgttgttctctgtcacaggattcacccagagaagcgatggatttgaggatccttggcctgcagcccgagagcctcgatcgcatctggcccgatgacgcccgcaatttggtgcgcaaggatttctttcgtcgcacgcataacaagcggaatcgccaattccacgccgtcgtccagtccgccatccatcgcacgatcttcgttcgcaacatatacgacgacgagggcaacgacctgctcagcttcgtcatcaatcgctttcgctcgcatcaggatgagtgctgccagctcaagctcgatgcgatggtgatgagctccaaggactgtccatatatgtagcttctagtttcatcactgtccactgaccactggccagcattctcttgcgaaagaaaccagcttcttcggaaaaccaattcaatttcctattacatttaaacgcatttatataaatatttttcaaaatattgttttacaaatattaatgataatcgaacgtgagctttaatcgttcgacatcatcggattcaaaatatttgagcaagctaagatcttgccatgtgctattcttaaacttgaacttgaaagtgaaataaagggcatgcgctcaagagttttttttttaagtgtactgagtgctttcgtttgttacatgttcatagctaacaatcgatatacctagtctagatctcctagatctagttgagagattagctgccatatctagccaaagaaccgtttcatttccgtgcaaaggtgtatgtccatgtgtgttaagttcgcaacttgcgcatttaatgtcgttttccaatgtcctaatcatgcgacagcccgacgaggtaggctccaaacgcatccaaacgttccatccgtagtgactccaccttgatttccagggcaagtgccacatttgcaagcgtgtcttctgttgcggcaaatgccgccagaagcatcagttcaaagcgcacgccattgctgtgcgcgagccattgggattgaggtctgccggcggcggtatcatcgagcatcgccatcaaatggagtccggcgcgaccaccatctatgtgttctgtccgatctgcgagcggcgtcccctgctgctgcgcgaggagatgcacggcgagctgctggcccacatcgagacctgccacctgccgctgcgatgccgcaagtgccagcgcaactacacgcgcgtcgatgacctgcgggagttcagcaagtgcgtggaccagcagcagagctgcactgatgtcaccggcgccacggagacatcgaaggcgacgctaaagaaggcagcgaatagcaccgccatttcaacgcaaacgtcgccgtccgtaacgcccatttcactgatcaacatgcgctggaaggccaagagccgtgtcacccacgaggagttcatcagcgacagcgtctcctccatacgcaacctgtcgtcgttcagcaacagctccattcgtcgctccattggccaactgggcgtgaatccgtccgaaacgatggagaagggcaaggtcatacgctcgacgtccacaccactgcacgtggagtccgtgttcgccaagcccaaggagccgattaccttcaatgcttccactggcggccacgtgtccagcatctaccacgaggagcccagtccgacacccgaaagcaatcccgtccagcagcagcagcagcagcagcagccgttgcagcagcgcgcctggaaaatgggcgcccgcaacaagatgagcgccgcaacgccgctgcgccaggtcatgtccaagagcattcagaaggccttcgtcgagcacggcggcatgatggtccaccagccaccatccgcagtggtgcaacgtcgcgtgcgcctcgatctcagcgagcacagttcgcacgaggcagcaggctcgtccgctctggacctgcgactctcgccagctatgcggcgcacccagagcgagtccagcgcctcggaggtcaacagcggcagcagctccagctacagcacctcgcggaatgccgatctatgcaagcggcagttcttgctgtccgcacagaaactcaccaccgagtcgatcatcatcacgcggacgaactccagctcacagaagacctcttccacggtgtacaactcatgcgagagcgtcgagatcatacgctccacctcggaatcagcggaagtgtgccacgtgccggccataacgcccatccgtgtcaccggtgccggcatcaacaagaagcagatcaagttcgagacgccgcccaagagcagccaacagatgcgatcgaatggcgagggcgatgaaaccaaggaccagtttttcacgccggaaccgggaacgccggaaattccagagcgtcgtcatcgccaggcgattgtgccgcgccagctgagcggcgagttttcgcccaagaaggataagccgaaggagaaggggctggcggtgatggccctgatctcgccgccattgcagcaacccagggtgcgtcctccgttgcgggaatgccgtcagcagagggtctatagcggcgtgcaggatgtgggcgagccggaggtcgtggacgcagaagaggaggacgaggtgttccgccccacaaacgcctccacgtgcaacgacaaaaagctggaggcgcccaactccggtcgcctgtggtcgctgatgagttccatgatgcgactgccggccagcttgcgcggcgaacgcgaaaaggacagggacagggacagggattcggataaggagaacgctggttcgggctcactcatccgtcgctgcgcctccatcgctggatccctggtgcgccccagtgcaagggactcctccatggaggaccagcagtgcctcaagagaaagcgcactcagacgctggacagccagtactgtagcccgctgtcgccgtccagctcctcgaagcgctaccgcatccggcccagggagcccatcgagcgcatgcgtcgccagtaggttttaagcttttgcctgcgaatctgtgttttaattgtgaaattcttctttttttttatcgtttaataaatgtttggtcttgcattaaccgttatgcgcagcaggagttggcaggtccaggagcttagctcgtctcattcagagctgccaactctatctattgattctgttattaattagttgcgcacaagatcgaaaagcttaacggagcgcccatggcgaaatcacaagcaggtcagactgtcgagccggaggcgtccaagctgtggatccactgcaacagctgctgcgccctgttctgcgataagaagcacaccttcttcctgctcgcctgccatcacgtgttctgcgagcggtgcgtcaaggtctccgccggccgcacgcccagcgacgcgcccatattcgaatgctccacctgtcggcggagcgtgcgcggccgccagttgaccaactcgatgcccaaccacttcaagcagctcttccatccggagcccttcaccatcggcaacgactttgtggagacgttccagcgcggcaatcatcggcacttcgacaagtacaaggagaggaaggaactggagatggataagctgttcaaggacatcgaggtggccaagtccgtgtgccagaaacgcttcctggaggcgcagatgctgcgcgtggagcgcaagaagctgatgcagaggtcgcgctacattaaggcggaagtcgccaatcggaaggcggaaatgcatcggtgcgacatttggattccattgaaaatagttcccattaatgcattatatttctacccgccttaggatggcccaggcctaccgaagccgctcgctgacttcgcaatcctcgtcatccgcccaacgctcggcgcgcggacgtcctcgtggccgtggaacagccacacagtcctccagtcgacgccgatcaacggaatcagcaaagcggcagcaaatcaccagcttcatacacccgccgaacaactcgttcgatctgtgagctagtgctgataggtaaagctctgttttacaaccgagtatatattttttgtaaataatcagcttaaaacaataaaatggtgtcataagcttt

SEQ ID NO: 26024 - DNA, 2235 bp, DROSOPHILA
ttcatttccgtgcaaaggtgtatgtccatgtgtgttaagttcgcaacttgcgcatttaatgtcgttttccaatgtcctaatcatgcgacagcccgacgagggcaagtgccacatttgcaagcgtgtcttctgttgcggcaaatgccgccagaagcatcagttcaaagcgcacgccattgctgtgcgcgagccattgggattgaggtctgccggcggcggtatcatcgagcatcgccatcaaatggagtccggcgcgaccaccatctatgtgttctgtccgatctgcgagcggcgtcccctgctgctgcgcgaggagatgcacggcgagctgctggcccacatcgagacctgccacctgccgctgcgatgccgcaagtgccagcgcaactacacgcgcgtcgatgacctgcgggagttcagcaagtgcgtggaccagcagcagagctgcactgatgtcaccggcgccacggagacatcgaaggcgacgctaaagaaggcagcgaatagcaccgccatttcaacgcaaacgtcgccgtccgtaacgcccatttcactgatcaacatgcgctggaaggccaagagccgtgtcacccacgaggagttcatcagcgacagcgtctcctccatacgcaacctgtcgtcgttcagcaacagctccattcgtcgctccattggccaactgggcgtgaatccgtccgaaacgatggagaagggcaaggtcatacgctcgacgtccacaccactgcacgtggagtccgtgttcgccaagcccaaggagccgattaccttcaatgcttccactggcggccacgtgtccagcatctaccacgaggagcccagtccgacacccgaaagcaatcccgtccagcagcagcagcagcagcagcagccgttgcagcagcgcgcctggaaaatgggcgcccgcaacaagatgagcgccgcaacgccgctgcgccaggtcatgtccaagagcattcagaaggccttcgtcgagcacggcggcatgatggtccaccagccaccatccgcagtggtgcaacgtcgcgtgcgcctcgatctcagcgagcacagttcgcacgaggcagcaggctcgtccgctctggacctgcgactctcgccagctatgcggcgcacccagagcgagtccagcgcctcggaggtcaacagcggcagcagctccagctacagcacctcgcggaatgccgatctatgcaagcggcagttcttgctgtccgcacagaaactcaccaccgagtcgatcatcatcacgcggacgaactccagctcacagaagacctcttccacggtgtacaactcatgcgagagcgtcgagatcatacgctccacctcggaatcagcggaagtgtgccacgtgccggccataacgcccatccgtgtcaccggtgccggcatcaacaagaagcagatcaagttcgagacgccgcccaagagcagccaacagatgcgatcgaatggcgagggcgatgaaaccaaggaccagtttttcacgccggaaccgggaacgccggaaattccagagcgtcgtcatcgccaggcgattgtgccgcgccagctgagcggcgagttttcgcccaagaaggataagccgaaggagaaggggctggcggtgatggccctgatctcgccgccattgcagcaacccagggtgcgtcctccgttgcgggaatgccgtcagcagagggtctatagcggcgtgcaggatgtgggcgagccggaggtcgtggacgcagaagaggaggacgaggtgttccgccccacaaacgcctccacgtgcaacgacaaaaagctggaggcgcccaactccggtcgcctgtggtcgctgatgagttccatgatgcgactgccggccagcttgcgcggcgaacgcgaaaaggacagggacagggacagggattcggataaggagaacgctggttcgggctcactcatccgtcgctgcgcctccatcgctggatccctggtgcgccccagtgcaagggactcctccatggaggaccagcagtgcctcaagagaaagcgcactcagacgctggacagccagtactgtagcccgctgtcgccgtccagctcctcgaagcgctaccgcatccggcccagggagcccatcgagcgcatgcgtcgccagtaggttttaagcttttgcctgcgaatctgtgttttaattgtgaaattcttctttttttttatcgtttaataaatgtttggtcttgcatt

SEQ ID NO: 26025 - protein, 696 aa, DROSOPHILA
MSFSNVLIMRQPDEGKCHICKRVFCCGKCRQKHQFKAHAIAVREPLGLRSAGGGIIEHRHQMESGATTIYVFCPICERRPLLLREEMHGELLAHIETCHLPLRCRKCQRNYTRVDDLREFSKCVDQQQSCTDVTGATETSKATLKKAANSTAISTQTSPSVTPISLINMRWKAKSRVTHEEFISDSVSSIRNLSSFSNSSIRRSIGQLGVNPSETMEKGKVIRSTSTPLHVESVFAKPKEPITFNASTGGHVSSIYHEEPSPTPESNPVQQQQQQQQPLQQRAWKMGARNKMSAATPLRQVMSKSIQKAFVEHGGMMVHQPPSAVVQRRVRLDLSEHSSHEAAGSSALDLRLSPAMRRTQSESSASEVNSGSSSSYSTSRNADLCKRQFLLSAQKLTTESIIITRTNSSSQKTSSTVYNSCESVEIIRSTSESAEVCHVPAITPIRVTGAGINKKQIKFETPPKSSQQMRSNGEGDETKDQFFTPEPGTPEIPERRHRQAIVPRQLSGEFSPKKDKPKEKGLAVMALISPPLQQPRVRPPLRECRQQRVYSGVQDVGEPEVVDAEEEDEVFRPTNASTCNDKKLEAPNSGRLWSLMSSMMRLPASLRGEREKDRDRDRDSDKENAGSGSLIRRCASIAGSLVRPSARDSSMEDQQCLKRKRTQTLDSQYCSPLSPSSSSKRYRIRPREPIERMRRQ

SEQ ID NO: 26026 - DNA, 6158 bp, DROSOPHILA
aaaacagaagagcttatcaaatctccaaatgccaacagctaaactccagacaaagttataaaatatcgtattgcttggttaatactttaatgatgcttttaaattaactgacaacataaaacgtaaataacacaagtgggaataaatatataataataataaaattttaagtgcattttaaattgcaatttaactgactcgaccgaaattcctaatttaataaaaagcaagccgatgtgtgcatcacaacgggttaatcgatgtataaatatcccaggcactatcaattcagacttctgttggcttccacacccacatgaagtcgtggcaattaccgttgatctctggcttagagcgattcataatcaagacacaagttttaatttaaatatgccccaatgctcatttatctcgcaagtatctcaggcccacaatgttgcaagatcttacggatcgcatcgctgtgctgcacagcacagatctaagtgggccaacttctggccgccggcgcagcgggttgaggctcattgcgaataaatcggacactccacaaatctcccgcaattacaatactttataaacatatttttcttctccccaatgtggcgggtcttgtattatcgtctaattgcatcgtcgacgctcgtggcatttagcgcgtcaacaaacgagccgccgccgcgaccccagcccccaaaagatacaccacacccgccagccccagccgcttcttaatcctatctcacacctcaaagtagcggttcgaagctgagaaatgaaaatatactcgtataaaaggaaaaaaacaaaaaaaaaccaaaaacgaaaagcaacagagcgaaccgcaggccgttccattcatcatttttcgtttagtgacgcgcgtgcctcgtgcgcctcaaatcgagtgtgatttttttcacagattttcaaattgagacgtcatgatctgaccatcggttccgtcggatctactcgtttatgcttaggcgatgatcatttttcgttgggattcgtgtacaacatttatttgtttcataaggcactgcggcatgcaactaacgctaagatagaacatttatgtttatgggctacgagtataatttagcgagtataaaactgcgaatactacaaagatcagtacaatatgaaatacaacagcaaatacaaccgagtcttaagttcaacttagaactacgcatatactagtagatgttttatggtaatatcttaaatcaacattaaactaaaagtaaattcgagtagctgcttgtttttggttttacgcctttggtgcaattttggtaaaatgtttcaagagatttacagacttaaatgagagttatatacataaattcgagtgtagtatgatttgtaggatttttttatgcaagccttagatctttcgaagatttattaggattcaccctaaaggacacttcataatctctagttaacaatttgactttggttcaaaaaccaggcttgaattgtcctgatctcatctaaggatcctgattcgtttaataattacaccacttctgcaggttgtccgtttcatcttcctcctcgtcgctagtcgagggcggtgtatccagattggcgatatccacatcgaggtagtcctccttcgtctggagcagcttgtccatatactcaacaatttccgtaaaaggtggccgatcgtcggcgttgaaatgccaacattgtcgcatcagaatgtagatgttcatggagcatttcgctggtttctccatccgctgaccggacatgagataggtgtacagctcctcagcggacatgatagttggatatggttgctgcccataggtcatgatctcccacagcaggatgccatatgaccagacatcgctcttggaatcatagaatttctcctgcagcgactccggtgccatccatttgatgggtagcctgccatttgtgttcttccgatagtaatccgtgctttgaatgtccctcgccagtccaaaatcagcaatcttcagcacataatcatcgctgacgagcacattcctggctgccaaatctcgatggatgcatcgccgcgaggccaaatagtccattcctctggcaatttggtgggcaaatttgatcagatccttttcggttatcacatgagctggtggcgatggcggcggttgcgagctgtccctatcctgatcccttccgaagggtcgatttttatagaggaagtccttgagatttccgtgtggcgcatactcgacaatcacatagagcggaccattttgactgcagcaaccaagtaagttaataatattgatatgtcgcccaatgatcttcatcacttccatttcccgcaccaagctggcaatgtcatcatccgtgtgtccttccttcaccattttcacggcgacaatggcattattgacctccgccatgaccactcgtccgaaagcaccttctcccaaagtggcacccagtaccaaatgacttctgggcagttcccagttcgagtccagtggaaattcatattcattgaatggagccggctcgttgccattctgaagaacagtggtgcgctgtttctgtatcctaaccaccggcataatcatggtgtccatggaaccactggagtctccgccaccttcgggcttgaagatgatcactttcttggtccactggtgaacggtttcgatgcgttgtttcaacaccttttcatgtttcatctttcggatggcatagaacacaaacagggtggtcataaagatgaaaataagtccgccaaagacgaagatatacacgaagctggtcgagtgaagtgaaccactggcaactccggcttccaagacgtgaagacttcgcaccactcgcagatatgcagtgctattggattgacccaggctgttgctttcgacgcacgtgtaccagccctcctgctccatcctaacgttcacgaagtccaactgatccttatcctcggcaatgatggatcgattgttggagcagttggtcatgccatggcagggcacaaagatccacgccttcttgctggtcaagtccgatagatatttgcagtgcatgctgcctgtggaattgaccaccagtgtgagattcaatggaccggtcatcaggatcggtttgtgattaactcgatcgcttacaatcacctgggtgtcgtgacgaatgcaacccaatgaattgcacaccttgcaggtgtagttgccacaatcgcccggcaccagatcctccatcgtcagggtccatcgattccgcttcaggctcccatagccgcgcgtccagtcgacggtgccattgcgataccatgtgatattgggctcaggattgcccagggcatggcaattgagggtgagcagtgagcccgagggtcgcgtctgcagaaaactcatctttttgggattacgccagtagggtttcgaactgacattcaccggcaaatcggccttgttatcatcatcatctgcggcgccatcatccaaatccgcactggatgtgctcgattgattagcattgttcgtgatggctggtgtcttgttttgactcctggctcccaaatgatccttgatcatctcctggctattggccatttggcgtcgtccttcaacctgcacggctggctgccaaatcgaaagcaacaggaagagcactaccagcgatccgcttgtcattgtgatcgttgagtgactggctcgccaactccaggcggcagccatttttggtatatttatttttgtaactcttgccggaggcagggcagcaccctcgaatgtgcaacagcgagtgcaactggatgtgcaactgccactggatgtgcaactgcaactgcgacggcaactcccttgttggagttttgtcgcatgtgctgcttggttttttattcaccggaaatccactttagagtgctccgctctatatggaccgctctccctcttctttcgccagcgccggaagaagatcggtgatcttctagtttctaatttataatggaaaaaacaactgcaacagtggcctcttcagtgcaacatgtgtgcctttgaagtgatcctccactccacccacgattgcaatcggatgctgttgatgatgagatgaggccaagatgatcctctcgatgatcacctatctctcttctcgatgtaacggaaatactttcccccaaaaatcatctacttatgggggagggggggggggatgagatggctgctcgtgtgatatactcagtgagttgatggatctatggcagccatattgtcaccaaaggagctccactcgtgggcgtggatgacggtgagttccatagatcattcgatggcttctggagggtggattccttggatcgcttttgatgtgactgctgcaacacctgaaagaaagaatgcatgcgattagatttatgttcactttgggtgcataagtttagctacacgaaaactttcaaagatacaagaacatgtgcaaaaaatcggaaatcggaaatgtactagatacatccgctcaatttctttgactaaatgaatttcctttccattttgtttataggctcactcgcttgtatagtaagtaaactttcgattctttcgcagagattcgttttggtcttgactcgattaaaggccatttccatttggcgaacttaattaaaatgtcgcgcacatttccggtaacttgttcagcatttctcgtatacccgtttctgatttttgtccagcgcgtgccataaattaaaaatggtccagtggaatgagctcagaatgtacatataacaacaaatactgatggttttcatcttttacgcgttgcatattttatcgattttcaaaatagctttatggccacacaaaaatgtttcggctggcactctttttaataccgtcataaaataacgacctgtcttttcgtttacctttttggcgttggaaaattcttttcaacttgttgtcagtttacttaacgatgggattctatatatacacatacactgcgccctaaaatgtgattctatttttcgcacaactcactcacgtttttccgattttctagaagggattgcgcagatgtgtctgccgacttttgcgcttttcaaattcgaaattttgtgaatttttacggagccaagcgaaaaactgttccaaattggtccgcgtagtccgatgtactgaatatgcccaatgccaattccgattccaattctagtggtgatcgcgactattccgattctctacctctcttaaatctcccacactctctctctctcgctatctctctttaactccccggatccgatcgcccttctctctttcaccatctctctcccacacacaatgtcctactcaatgcgccggcgtcggaaaaggcgactcaatttagtgggccctcgagtcgcttccacttttgccgttatatttccaatgcctaataccctgtaatgtaagggtgaaatgggttatgcacgggtttgatcaaataagcaatcgaagtgatgatatgatcataagagtaaagcgttgaaagcttcgtgcatcgatattaagatcctttttaaacaaatctttttttgtgaaattattcaagtactaagtataatatatagatgatatacatttgttacctaatggcatgattggtatatattggtatatcattataaaggacattttttttttttcgagtaaagtcgagttgccaaattgccaggtatgctatagtcaataaattgacaagctcgctttttcattcacattgcggttctgttctgtttggatggtcgttgcctttagcgtcccgcatcttttcgctttcaacggcagccttaattttccacacatgccagccccgtctggctttgtatctcagtatcggcggtatctctcagtttgcactgggtattactctcatctttaattaaaacagacacagtttctctccgcgttctgggtctgatctttccagtccgcattcaacattcagcccacatctggcggacaaaaaaaaattaaagaaattaaaagcaacaaaaataacggccggcggagaagactactgtgttcagttgtctctgttctcccgcccccgtcgccacgcccacagtcagagtcagagcagagacaagggcaaatattgtttcggcttgcatttgttgctctattgttgactgcaac

SEQ ID NO: 26027 - DNA, 3618 bp, DROSOPHILA
cagtacatcggactacgcggaccaatttggaacagtttttcgcttggctccgtaaaaattcacaaaatttcgaatttgaaaagcgcaaaagtcggcagacacatctgcgcaatcccttctagaaaatcggaaaaacgtgagtgagttgtgcgaaaaatagaatcacattttagggcgcagtgtatgtgtatatatagaatcccatcgttaagtaaactgacaacaagttgaaaagaattttccaacgccaaaaaggtgttgcagcagtcacatcaaaagcgatccaaggaatccaccctccagaagccatcgaatgatctatggaactcaccgtcatccacgcccacgagtggagctcctttggtgacaatatggctgccatagatccatcaactcactgagtatatcacacgagcagccatctcatccccccccccctcccccataagtagatgatttttgggggaaagtatttccgttacatcgagaagagagataggtgatcatcgagaggatcatcttggcctcatctcatcatcaacagcatccgattgcaatcgtgggtggagtggaggatcacttcaaaggcacacatgttgcactgaagaggccactgttgcagttgttttttccattataaattagaaactagaagatcaccgatcttcttccggcgctggcgaaagaagagggagagcggtccatatagagcggagcactctaaagtggatttccggtgaataaaaaaccaagcagcacatgcgacaaaactccaacaagggagttgccgtcgcagttgcagttgcacatccagtggcagttgcacatccagttgcactcgctgttgcacattcgagggtgctgccctgcctccggcaagagttacaaaaataaatataccaaaaatggctgccgcctggagttggcgagccagtcactcaacgatcacaatgacaagcggatcgctggtagtgctcttcctgttgctttcgatttggcagccagccgtgcaggttgaaggacgacgccaaatggccaatagccaggagatgatcaaggatcatttgggagccaggagtcaaaacaagacaccagccatcacgaacaatgctaatcaatcgagcacatccagtgcggatttggatgatggcgccgcagatgatgatgataacaaggccgatttgccggtgaatgtcagttcgaaaccctactggcgtaatcccaaaaagatgagttttctgcagacgcgaccctcgggctcactgctcaccctcaattgccatgccctgggcaatcctgagcccaatatcacatggtatcgcaatggcaccgtcgactggacgcgcggctatgggagcctgaagcggaatcgatggaccctgacgatggaggatctggtgccgggcgattgtggcaactacacctgcaaggtgtgcaattcattgggttgcattcgtcacgacacccaggtgattgtaagcgatcgagttaatcacaaaccgatcctgatgaccggtccattgaatctcacactggtggtcaattccacaggcagcatgcactgcaaatatctatcggacttgaccagcaagaaggcgtggatctttgtgccctgccatggcatgaccaactgctccaacaatcgatccatcattgccgaggataaggatcagttggacttcgtgaacgttaggatggagcaggagggctggtacacgtgcgtcgaaagcaacagcctgggtcaatccaatagcactgcatatctgcgagtggtgcgaagtcttcacgtcttggaagccggagttgccagtggttcacttcactcgaccagcttcgtgtatatcttcgtctttggcggacttattttcatctttatgaccaccctgtttgtgttctatgccatccgaaagatgaaacatgaaaaggtgttgaaacaacgcatcgaaaccgttcaccagtggaccaagaaagtgatcatcttcaagcccgaaggtggcggagactccagtggttccatggacaccatgattatgccggtggttaggatacagaaacagcgcaccactgttcttcagaatggcaacgagccggctccattcaatgaatatgaatttccactggactcgaactgggaactgcccagaagtcatttggtactgggtgccactttgggagaaggtgctttcggacgagtggtcatggcggaggtcaataatgccattgtcgccgtgaaaatggtgaaggaaggacacacggatgatgacattgccagcttggtgcgggaaatggaagtgatgaagatcattgggcgacatatcaatattattaacttacttggttgctgcagtcaaaatggtccgctctatgtgattgtcgagtatgcgccacacggaaatctcaaggacttcctctataaaaatcgacccttcggaagggatcaggatagggacagctcgcaaccgccgccatcgccaccagctcatgtgataaccgaaaaggatctgatcaaatttgcccaccaaattgccagaggaatggactatttggcctcgcggcgatgcatccatcgagatttggcagccaggaatgtgctcgtcagcgatgattatgtgctgaagattgctgattttggactggcgagggacattcaaagcacggattactatcggaagaacacaaatggcaggctacccatcaaatggatggcaccggagtcgctgcaggagaaattctatgattccaagagcgatgtctggtcatatggcatcctgctgtgggagatcatgacctatgggcagcaaccatatccaactatcatgtccgctgaggagctgtacacctatctcatgtccggtcagcggatggagaaaccagcgaaatgctccatgaacatctacattctgatgcgacaatgttggcatttcaacgccgacgatcggccaccttttacggaaattgttgagtatatggacaagctgctccagacgaaggaggactacctcgatgtggatatcgccaatctggatacaccgccctcgactagcgacgaggaggaagatgaaacggacaacctgcagaagtggtgtaattattaaacgaatcaggatccttagatgagatcaggacaattcaagcctggtttttgaaccaaagtcaaattgttaactagagattatgaagtgtcctttagggtgaatcctaataaatcttcgaaagatctaaggcttgcataaaaaaatcctacaaatcatactacactcgaatttatgtatataactctcatttaagtctgtaaatctcttgaaacattttaccaaaattgcaccaaaggcgtaaaaccaaaaacaagcagctactcgaatttacttttagtttaatgttgatttaagatattaccataaaacatctactagtatatgcgtagttctaagttgaacttaagactcggttgtatttgctgttgtatttcatattgtactgatctttgtagtattcgcagttttatactcgctaaattatactcgtagcccataaacataaatgttctatcttagcgttagttgcatgccgcagtgccttatgaaacaaataaatgttgtacacgaatcccaacgaaaa

SEQ ID NO: 26028 - protein, 729 aa, DROSOPHILA; identical to SEQ ID NO: 16098

SEQ ID NO: 26029 - DNA, 3862 bp, DROSOPHILA
cgtcgaacagctcggagtccctaaacaagatgaagtctcttgtggggaagatgatcttcatgcaagtcaccgaacatcttttcctaagggcgcagcagttgctggattctgatgtcagcatagaagaacgtgtgcgcagaatggaggtccttaacaacaacatgaagtggttcaattccgagcgtacacgcatcctagagcagttgcagctgaatatattcggtcagatttcggtggagcatcataatgcgatgaatatgagtgagaatctgtatgagctgcgcgagggactagacggactcagccgtaggatggaaagtatgcaagaggacattacctgttcgatttgcctctcaccctggtcttccaatggcagacatcgagtggtctctctccgatgtggacacctattcgggaatagctgcatcagaactgccatccgcagatcacatcggtgcccgatatgcaggcgtagggctctacacgctgatgtgcgcaggatattcagtcgacgaataagtcattaacactggaaaccactgcgttctagttcaatgtttatatattcaaaacgtttcaattacttattgaacaaatagctgcgattaaaaattaaacagcaaaagcgatactcgaaatgatccataaaaagaaaacgcctttctaagacttgttcatcttatagcttgaatgaaattatagtatttatatccacaaaaaaaaaaaaaaattataattagaaactaaattacaaaacattaactttgtctaaatttttttaatatctagtaaaggaaaagctctacaaattatttatatatgaaagaatgcaatgtcgcttacgatgaaagcttacaaatgaaaaaattaaattaaatcttgaaggtccttaattctcaaataacttaagtaattgaaaaaccgctaaaaggttgcgttggtcaacaccagcaattgcataagcatggactgggaatccaattaaaaacacttcatatttcagtctttaacaataaaataaagttttatttttgcattttccgtttgtgtgtttgccattgaatgcttcaatgatgttctgcatgtttttatttgttttatacacttataattgttcgcttgccgctgggcattcgctatgttacaccgactatcgataattgctataattaatatgcatttccatcagcttaaatgctacacaaatctggcttggacataatttcacgtattactagtgccaatttaaattgaggactcaattaaatgcgcagaaaacaaatgctcaacagttggcaaacatcgcatcctttcttcctttcggtgatttctcatgtgtctacaaatatttaaatggcagtttcaactcttatttagttggggtgaagggaaaaatttccataaagtggcaacaaaattttgcgtgttttgtttgtttgttcgcttaagtgctatgactacaacgtcatttaaaaattgaattaaaaattattccattacgcgtttagaattaattagttcaacaaatatacaattacagttaaaattacaaatacagttagagttatagttaaaattataataatcgtatttgcagtaagtttagcacatggaggacatttattgctacataatacatttatatagtttatggtttccttttttgtttatacatacatagatgaagcatagatgtgagcaccaacctgcttgggtatatgtacggattgtgtgctctatatgcatatgcattattatgtctgggttgaaaataatttcttctgtgactaatgaatgaaattttaagccttggcttataaaatctactgcagagcagccggggctcacatcctttgaatgcctgacgttcatatcgttatcgtaatactctatttatagctacattctcattaattgtagggcacatttaaagctttcaaaaaatcggaacctaacttaaaacttgcgtcaaaaatgaaatatcataggtgctacaggttcgtataccgcgatagcaatgaaatcctacaaaatacaactcgacttagagctagagtctcaacttatacgcatagttttggttcaacaagcttgctttcgtatcaactaatgtacttttaattcaaacaatagcctagggtcaacttttgattttctcttttcatggattttcggggacatatgtagatgatgaactttatacaaagccactaagaactacgactgcgtgttattttttttttttttttctgggcatagggaacgtctatgtgctaaactctaagtaactttcgttagccgcctccggatcgggagtaaggggcgtggacttggccccgcccgccggacccgtctcatactagacgtacgcctgcgcccgggtccggggctccttgccctgcaacctctccacgaagttccgccagctgaccatcgtcttgctggaatacagccaaacgctggaagtgacccccaccagcatggagcaaaggtacttgaccataaagatctgaaagatggggcgggcttctggagatcccggcgccctggctgccgggcacggaattgagaagggcttgcagatatccctgtgccattggatcatccactcgtcaaagttgtagtactcgtagaacaagcagcccagtaatcccacggcgggcagaatgaaaagtccagagaagaaacctattcgcaacatcaggcgctccagtttgtctgtcctctttccgtccgttttcataactgtccggatccggaaaagcgaaataaatccggccagcaggaatagtgctccgatcgagagataaatgcagagtggaaggatcaggaacgcgcccagggagtgcgtgtccagctggcccacgaaacaaacgccagaaaggatgtcacctgaaagttgaataaaacgaaaaaatttactatagcatttgatgtatctaaataaaagtatcgtattttaaggtattgtattaaaaattattgaaagttataagtcaatatgaattagtcacttatatagctttcaaatccttttttacctttgcatattttcaaatgttgtaagacaaagtgataattcattatttattaagacaacatgtaaactcacttattgggacacttccaacgaaacccattgaccttttaagctaaacattaattaatgtcaacaattgcgagggatatgagttgaaaatacccgtttattgccaaagggggaaaagcgggagataaacaatgtttaattttaccatttcatgtacctctttcggggtaaatatttactcaacgattaccccaaacagcagcgtctgtggggccactccaccccttttttttagttcaaagtcaatgcgccgcttgtttaaacattttacgagcggttaggttgcaccacctcttgccaccaaccgatctcccccgctcattagcgttatttataaacatgttacaatatacccaactcacacctgcccccccgattcccgtaccacaaattaatccatcattcgttaggcgtgccatatttccgctcataaattatcgattagcccctcgtcgaagcttctgccttttcgctctttttctccttataggtgacatgttaatttcggtttccctgtgaaaactggtcgcgcctttccacgctgcggccgctgggaaatttgccacgcttcgttgagttggaaatgctttcaattaatgcgtctcgcactcttgttttttatgtattagtaatcaacatttttttttgatatgtttcatatagacaatttttaactaattaaaaacccttcaaccagttgcaaccaatttttacatttgtggtttttaaattttttgtttaacttttctaagg

SEQ ID NO: 26030 - DNA, 1862 bp, DROSOPHILA
gccagctggacacgcactccctgggcgcgttcctgatccttccactctgcatttatctctcgatcggagcactattcctgctggccggatttatttcgcttttccggatccggacagttatgaaaacggacggaaagaggacagacaaactggagcgcctgatgttgcgaataggtttcttctctggacttttcattctgcccgccgtgggattactgggctgcttgttctacgagtactacaactttgacgagtggatgatccaatggcacagggatatctgcaagcccttctcaattccgtgcccggcagccagggcgccgggatctccagaagcccgccccatctttcagatctttatggtcaagtacctttgctccatgctggtgggggtcacttccagcgtttggctgtattccagcaagacgatggtcagctggcggaacttcgtggagaggttgcagggcaaggagccccggacccgggcgcaggcgtacgtctagtatgagacgggtccggcgggcggggccaagtccacgccccttactcccgatccggaggcggctaacgaaagttacttagagtttagcacatagacgttccctatgcccagaaaaaaaaaaaaaaaataacacgcagtcgtagttcttagtggctttgtataaagttcatcatctacatatgtccccgaaaatccatgaaaagagaaaatcaaaagttgaccctaggctattgtttgaattaaaagtacattagttgatacgaaagcaagcttgttgaaccaaaactatgcgtataagttgagactctagctctaagtcgagttgtattttgtaggatttcattgctatcgcggtatacgaacctgtagcacctatgatatttcatttttgacgcaagttttaagttaggttccgattttttgaaagctttaaatgtgccctacaattaatgagaatgtagctataaatagagtattacgataacgatatgaacgtcaggcattcaaaggatgtgagccccggctgctctgcagtagattttataagccaaggcttaaaatttcattcattagtcacagaagaaattattttcaacccagacataataatgcatatgcatatagagcacacaatccgtacatatacccaagcaggttggtgctcacatctatgcttcatctatgtatgtataaacaaaaaaggaaaccataaactatataaatgtattatgtagcaataaatgtcctccatgtgctaaacttactgcaaatacgattattataattttaactataactctaactgtatttgtaattttaactgtaattgtatatttgttgaactaattaattctaaacgcgtaatggaataatttttaattcaatttttaaatgacgttgtagtcatagcacttaagcgaacaaacaaacaaaacacgcaaaattttgttgccactttatggaaatttttcccttcaccccaactaaataagagttgaaactgccatttaaatatttgtagacacatgagaaatcaccgaaaggaagaaaggatgcgatgtttgccaactgttgagcatttgttttctgcgcatttaattgagtcctcaatttaaattggcactagtaatacgtgaaattatgtccaagccagatttgtgtagcatttaagctgatggaaatgcatattaattatagcaattatcgatagtcggtgtaacatagcgaatgcccagcggcaagcgaacaattataagtgtataaaacaaataaaaacatgcagaacatcattgaagcattcaatggcaaacacacaaacggaaaatgcaaaaataaaactttattttattgttaaagactg

SEQ ID NO: 26031 - protein, 166 aa, DROSOPHILA
QLDTHSLGAFLILPLCIYLSIGALFLLAGFISLFRIRTVMKTDGKRTDKLERLMLRIGFFSGLFILPAVGLLGCLFYEYYNFDEWMIQWHRDICKPFSIPCPAARAPGSPEARPIFQIFMVKYLCSMLVGVTSSVWLYSSKTMVSWRNFVERLQGKEPRTRAQAYV

SEQ ID NO: 26032 - DNA, 4699 bp, DROSOPHILA
ttttggttacttgaaacgctaagactgaaatggcttgttatggagaagaaaacacgtcctgcaatacattatataataaaaagaacccagcaattttcgcatcaccacattacagacaacaaagtactttgtcctcatcgttctgtgtgatccagatccccgactatatatgatatatacacctagctagatttaagcgatttgtacatacagaagcaaaagcaaaacaatataccagaaaattgcctgttaaatacatttatatacacatatgaatttagttatatcacgatgactagtttttagttcttagaggttatttagttagtaaggagcccaactgacgtaacgtgaataaatcaactatatatgtgcccatatataaagcgtactatttaattatttagtttttactggacttatgacacaacgagccactgtaatgtcttattcagctcaatgctcataaacaaaataaatatttttggaaaaaatactgtagttcttcttatttagccaagacgtccaaacctttttttaataaatttaattgagatgaagatttgcattcgaattctatagaagcatcaaacaaatattacaacagtatcgagtgggttattaaaaattaaatatgtaaaaatcgctcattgtgttaaaatattaattataatagattagctcaaacatcttaaatcgacattttgtgcaacacataaaaattctcgcagacaattggcagctgattacgattaaacaaaaccgaaattagccgttttcctttaaagcaatcagcattcgtgatctcttgtttggttacctcacaatgctagttagttatagcgccataaaaccccattttcaatgtcagggaaatcataaggtcataaggttatccccacgatcgttctaatgtgatcacagccacaatctataataaccagttcccaatagatagacaagattagaaaacgcagcttggtagagttttttatattttataatttaatttattcagagtgctttcttgggtatcgggtcagacaattgaaacagcattaatatcatattcgcatgtgtggcctgtgggggcagcggagaggagataacaaggggctggccatcaaaggtacaacatacggacatactttccagcgaaagctagacacacataggattaaatatagcacatagtataacagaatatatatggaattgaatactttgaacttgagtgtagcttagtttcgtacgatagaatgtttggcttttaaagttagaaagatgtgtttataaaaaagtgtgtataagtgctgtgttagagaaatgcgtaaagtgttgttttggaatgtacatgtgcaatggcacacacgcaacattaatgtattcttgctgagaaacaagtataaagcattttcgctatactgaaaccgaaattcgttagaaagtaaaagtatgttgctcctgtgtctgcccacaatcgctccaactagtgaactctgtccttaaggtaaccaattggactagcccacttaatgctgcttggccttcaggctagctggcatctctggtggtggtgggcggggaatgcccagggcgaccttcacaccatcgtagatgaaccactgcagagcggtcagggtaccgatcatgataatacgaggagtcaatccgttccacatgccactgaagcccagcgacttggccacgctgatggcgctagctcccttggcctggttcagcttggacaccaccacatcagcgggatgcgacaccacggcacagaacacaccggcgatgtagccagcggcgaaggtcacgatcagctgctcgcccttggtgcagtcggcacgaggcttgggcaccacatacctgggaaaagttgcatcattagtattgatttaacggggttcgttggggcttgacaacccgaactgtgaacggtattgctctagtttttacatttgaactttcagtggctacctgctaatttgcacttcaaaaggaatgctttgctttttttattttatccatagtaacaaactagttctgaaataatatgattttcctatatttgaacaagataagcattcgtcgttggtttttattctggcgtgccatttattagatacgaatggcattcttatctgctgacgcgctaaaagtttattttattatgaatactttcagttttgatcaattagcatatcacttttgaaatttcacagattaacagtctacctttaaactattgtaatagcaaaacgctaatacgaatacagatattgtgcacagcactggtaagtttttccgctgtagaaactagaggatacctaaagaggaaatgttacttacttgtagagcagctccacggtgcgctcgaagcaagcgaacttcatcatggtgtatgggatctgtcgcatccacaggggaaccagacccttgtagaaggcattgacgccctcctcctttagcatcttgggcactgcctcgcggaagttgttggcgtatccgggaatagtctggatcttcaccttggcggcctcgaacggcgccagagcgatatcggcgaagaactcggccgaagcggaagcagccagatacaaggaggtgcggtacaggtaggcgttctcctcgccaatgatttcggcgtacttcaccttgaacaactcgtacagaccgaacttgcacagaccctgaaagatacagaaacgcggattagcctgctgtttctcagaagttatttttcagtttgcagtagtatccaagattttatcttcggtatctgtttctcccgtaaccataaagttgtcaaaggtgtgttgttattctgaggtatactaagatatcagcctaggaatcaaacttcctaatgttcgattcgaatcacttttatctgcttcaagcccggaaccgatgtaattaaggtcagccgacctggtcacgagcatataattcgcctccagacgattatgcaacccataaagtgaagcccaatctcacctgtgccgagtagccgagcagagtggggaaccagcccttagccagtccgcgggcgccctcctccgccacggtgaccttgaatccgtgcaccagattcttgtacttggcctggtcgacctgcagacggcacttcaccagatccagtgggaccacgaaggtgtgggtggtgccgcagctgagaatgccaccaattccgcacagagcgaagtacttggtgctgccgaattcgcacgaatcctgctggttggccaccggggtagcggcggcggcgatctggcgaccctcaaccggctggggttccaccactggggcggcggcatcgcatcttgccatcgacatgggggtgcggaatggcgagttccgggcagtttcaaagaagctggagaacatcttgattctgttcttgttctggggtcggctgaaagtagagagaccatccattagttacgtatatatgtacctcggaggcgacatgtgctttatctaattatatatatagctgggtaatcagctgcttttcgcttttgtaggttacataacggcgtgcctcgaattccgagcacccggacttacgacaccaaatttacccgaaaagcgaaggattttaagcaaccacgtaaatttagtgtatgttaagggagcgatagagcaccgctcggctactttgatttcgattttacaaaacttatgcaattttcgctcggaattttcgcacttactattcgtcagcaacgttagcggctcgttggcgaggattcaaagaatgagggggggctcacggaggtgcagcgatttctcacgaataccaaaacgccttaatggttttgccgtggagaggtgtaactagcggattgaggatagttggccacactcatgtcaaaatcttcggctatggactgcaaccttggtgcaaaactttggtggcgcctgagcgtggactcgaaccatctgcatacgaggtatcaggtgagattattttaatgccattgccttcgttgtgaataaaatattaattattaatattaatttcatattgataacattagttgtaaatattttgaaaaaataataaattcatttgtaaaatcctcatatttttgcatagtatttgtgatttgttttctatttttacacaataaaacaaattttaatctaaagctttattgtatttagaactctctgtaaaatatataacaattttcaattatatgtacattttaaatttataagttatagccccatggtaaaactggataattttatgagtaaatatgtgaaaataaagttctgccatgatttcacatggggttggcccaatccttcactttttacgcacggacaggaaattaggcctttgtattccattttatatttcactctgcaagtgaagcaaaattcaccctggtgatcttcagttaataagatttgacaaccgatttctggtgaccaaacgcagcagactttggcattcatagtatctgtaaaattaaaaaattagtcttttattactattcaaatgcttcttataccgatatgcagtccgggtggaacgcaaacaccctctttattggttgtttttgggaattcaccttgtagacgacccaatcgcctataaaagtttccttcataacaactgaatcctgtctctttaatccgacacatttccgtattttccttcctacaatctaagcatctc

SEQ ID NO: 26033 - DNA, 1740 bp, DROSOPHILA
aaattgcataagttttgtaaaatcgaaatcaaagtagccgagcggtgctctatcgctcccttaacatacactaaatttacgtggttgcttaaaatccttcgcttttcggccgaccccagaacaagaacagaatcaagatgttctccagcttctttgaaactgcccggaactcgccattccgcacccccatgtcgatggcaagatgcgatgccgccgccccagtggtggaaccccagccggttgagggtcgccagatcgccgccgccgctaccccggtggccaaccagcaggattcgtgcgaattcggcagcaccaagtacttcgctctgtgcggaattggtggcattctcagctgcggcaccacccacaccttcgtggtcccactggatctggtgaagtgccgtctgcaggtcgaccaggccaagtacaagaatctggtgcacggattcaaggtcaccgtggcggaggagggcgcccgcggactggctaagggctggttccccactctgctcggctactcggcacagggtctgtgcaagttcggtctgtacgagttgttcaaggtgaagtacgccgaaatcattggcgaggagaacgcctacctgtaccgcacctccttgtatctggctgcttccgcttcggccgagttcttcgccgatatcgctctggcgccgttcgaggccgccaaggtgaagatccagactattcccggatacgccaacaacttccgcgaggcagtgcccaagatgctaaaggaggagggcgtcaatgccttctacaagggtctggttcccctgtggatgcgacagatcccatacaccatgatgaagttcgcttgcttcgagcgcaccgtggagctgctctacaagtatgtggtgcccaagcctcgtgccgactgcaccaagggcgagcagctgatcgtgaccttcgccgctggctacatcgccggtgtgttctgtgccgtggtgtcgcatcccgctgatgtggtggtgtccaagctgaaccaggccaagggagctagcgccatcagcgtggccaagtcgctgggcttcagtggcatgtggaacggattgactcctcgtattatcatgatcggtaccctgaccgctctgcagtggttcatctacgatggtgtgaaggtcgccctgggcattccccgcccaccaccaccagagatgccagctagcctgaaggccaagcagcattaagtgggctagtccaattggttaccttaaggacagagttcactagttggagcgattgtgggcagacacaggagcaacatacttttactttctaacgaatttcggtttcagtatagcgaaaatgctttatacttgtttctcagcaagaatacattaatgttgcgtgtgtgccattgcacatgtacattccaaaacaacactttacgcatttctctaacacagcacttatacacacttttttataaacacatctttctaactttaaaagccaaacattctatcgtacgaaactaagctacactcaagttcaaagtattcaattccatatatattctgttatactatgtgctatatttaatcctatgtgtgtctagctttcgctggaaagtatgtccgtatgttgtacctttgatggccagccccttgttatctcctctccgctgcccccacaggccacacatgcgaatatgatattaatgctgtttcaattgtctgacccgatacccaagaaagcactctgaataaattaaattat

SEQ ID NO: 26034 - protein, 356 aa, DROSOPHILA
MFSSFFETARNSPFRTPMSMARCDAAAPVVEPQPVEGRQIAAAATPVANQQDSCEFGSTKYFALCGIGGILSCGTTHTFVVPLDLVKCRLQVDQAKYKNLVHGFKVTVAEEGARGLAKGWFPTLLGYSAQGLCKFGLYELFKVKYAEIIGEENAYLYRTSLYLAASASAEFFADIALAPFEAAKVKIQTIPGYANNFREAVPKMLKEEGVNAFYKGLVPLWMRQIPYTMMKFACFERTVELLYKYVVPKPRADCTKGEQLIVTFAAGYIAGVFCAVVSHPADVVVSKLNQAKGASAISVAKSLGFSGMWNGLTPRIIMIGTLTALQWFIYDGVKVALGIPRPPPPEMPASLKAKQH

SEQ ID NO: 26035 - DNA, 7314 bp, DROSOPHILA
gtatgcagcatctttttggttcttttaaaagcgagtcagaggagtctaaccaatctttgaatggttttaaaactgctcgacaaatgctcgaagaaaataattcaaaactcgagggcgtacctgaaaaattacctattaaggatggtgaaaagagagttttagaaaacagggccgattctattggatttacttcagccagagaaatgttagagaggagcaaacaaagggaaggggacgataagtcaagcaacaaactcgaaaaactgggatttatttcagcccgggaaatgctggagaaaaacaaacttaacgaaagatgtttggacaaaaaagacgttaaggaaaagaaattagaaagtagggaaaccaaaagatcgctacaaaacaacgaattacaacataagcaagaggaagaccgtaaagacaaagcatcccacaggaaaacgtcaaaggaatcgttatcgaacttgaagaaggaaggatccgactccagagttttgcaaaaggatacaaaaccagaaaccagaaaccatcaaaaaacagatgtcagcaaaaatgtggtgcagtggctcaatccgtattataaacgaaaaatagccaccaaagagcttttcaaagctttggcaaaattgctcactcagcgcatttgtgatggaagcttaggtaagatattcatacttcctgtctgttaatacctttaaaatggaccataaatctctaggagatggcgatgctggaaagtgctatataaaggaaacttttcatggcctgcagatgataaacaacgatcaggacattgaaaaatatttcataaaatccaagtgactaaaaatctcctaatgattttatcacgacatattgtttcgcctcgttaaaagttgcatcatctttttttttcgttagttactatttttgtatataataagcgcattaattatcaataatacatttaaataagacgtttttatttggacagttttaatagaaaaactattaatttgggatattattcgctcgtacaaaatttatttgcgttgaatcttatttattaattgaattagatataacattcgtgatgctcgatgtattaagcttataaaaaaaacaaaacagggcagccgattaagaactttaaacctcctcggacgtcgattttgtacattttcgattcgatgatggcaatttgttttcttgtgggattacaattagctgggagacgggtatgtgaacggggctcttacttctaagctggagctataaatattacagtccacgctaggcgagaatcgaatgtatatctctttctcgccaaacttcacgggatcgaccatgtcattctagatcaccgtggacacctaaacgcagggtgatgagtatgtccagcaagaagaccagcgaggtaaccaaggcaatcgaggcggaagccatcacgagatccaaacgatgcatattcgggtgccagtagttgcgatccttggtggtggaccaatcccggaaaagcagggcggttacggccacgaagagcacaaaggccactagattccacaaagtagccgtacgccatggagtcctatgtgtacattaaatatatcagtactagcattttaattaaatcaaactttaagcatacaaatcaccgaagagcgccattatcagatagattgccgtgtagatggtcagtgctccaaaggtcacatagcaaagggaagccactcggggagtgatgaacacccgcagatgagaattggtggccggctcgtcgatcagacccaaacagcatataagcaggcactatgggaaacgacgaatagttttcataaattatttgtgtttttaatcattttttttaacaatttaggcattactgggaagccgtctcaaaatgctgaatctttataaaatgtaattggacaccatgaaactagtttcttatctgatttttaaaagttattcaaaagatttccatttaaaggagtatttaaatttaacaaaaactcaccagttccacaatcttgatgcatatcaccgtgtaggtggcctttttgtttccatgagttgtggcaaaggaattatcgtcagccggcgacatttcgacgcgtgagatttctgcaccgagcaattaaacaattaattaattaaagaacactatactatatcaattggtattttggccactttgacatttgctcggagcgaggaaagaatgacaataaaacttattgtatatgtacctatcgatcgcaagtagctcattttgcagagtctgatttggatacgttttcgacctacagaggaaacggaatcttcaattttggctttttagtgttcagttaaagtcgggtttagtggccatttttggcctccatgtctgggttatcggatatttgttattggatggtcagtggagcgtgcaaacgagtaaaaccgaacaatctacgttctgttgtggatttgtgtcaattgatggccgaaggtcttcctctcccacatgaaatacatccagttgcagaccgaattgattaagggcacattctgcgatgatctcatatattgggtgtgtgggacttttgggtggggtatatatctatgtatctatgaacatatggggctatattcgacagcgaggtgccgagatgcataccaaattcaacctgggaatgcgagcagcctacgtgagtttgcatcaaaaagtcgtatgaataataaatccaactataatcgctgtcttgtgaaccgtcatctataattccattattttcaatcattaattgcataccgacaatgaagctactgtcgctcaattgtcacctcttttggacacaattcaacacctgttttgatatatagttctttattctgattctacactaaaaaataagtgtatcgaaccggaaagtaaccaatttctgtatatcaagagagaatttttccaaaaaaaagtttaaacgaatgccactcataatttagaagttctctattattggattctttaatatcaaatatttgcatactattgaaatttacttggaattcagcttaaatgattttctgggttatcataaccggtaactcgtttttgccgtgtataaagtggggaattggatctccacttcatgggcaacaatggtccccccattgattgaagctaattgcatcacataaagaacaaagcataaaatcccaatattagccaaaggcacgttcagcaaaagtgaaggggcggacaaagagtagggaactgtgctagttaaccccacgatgcgtaaccccataaacaacaattaaaatgtgaggggggggcggggaaccagaaaaaataagtcaaactcgaaatgaaactggaaactcaacacaaaccctaaaaaagggccacgcacaactttcactgcgttcggggagggggaaaatgtgaaagggagtgagatgggaaagagctgtagagaaaaatggagggaaaatgataaaaatgggcccaagacactccctatttacaaaacgagggctcggagctaataaacattttagtgtctaggttctggttgcaaaggtaaacagcaaatgggtaaagaaaactaccactattgaaagcagtggaatgtagttagctttttgtattaatctatttgaatccaaagtgataatttcatatactaacagtaactctccacatcaaaccaaatatataaaagtttaggtttatatcaaaaagttttaaactttagttgttcactttattgtaaaacagaattgtatatataaacatatataatagatttcttttaagccaattctctacccgttaaatctccccactaattttcgagtatgtggctctccaagatgggaatttcagtgaataactgcttgcgtgttgttgctaacgagtgcttcacgttttggcccacactcgaacaccccccgcagcacccctttgaaccaaaaaaaataaacaagttttctttggcggcgcttagaagaaagcccaaaaagcagaaaccaaacaaaacacacgcaacaagccacgaagctgaaaaaaaggtaaacaaaacgtattggctaagaaaacttgttttagaaaaaagagcatttggcttaaagagaggatctaagagttcgactacctgccacacctgcgtattttaaaggggatattttctctcgaaaggtaggcataatttagtggccagcactgtgaattaacctcgtttcgctttcaggctcaaaagggactgtttcacactaagcagccctataactggtctgagttttgggtcaatgactcgattctccgtttttgttttggttcttcgattctatccaaagaatttgtttaagccattcccatcttaacttgggtttatatctctcatttccggacaaccagagatccaaagagctacatcatctgtactatctgtatttctcagctttcaatcgcagtcttgggcaattgaaaaatgcaacaaaacttgtttgcttaccgcccccttttttgccccccgcgcgtgtcttaaccctcacccatcacttgcattgatatgcacaactgcaaactggttgcaggcgagagcgacagggacggacgatgggggagtgagagggcagaaccacctgaaacacaaatacatatatgcaaaaggcgcctactgtacttggtcatcgccatagtttttactgcccgcgaagggcagttcgcgattttccagctgcattttccaaacacggtcaatacccatagagggtatgtatatattgtaccaagaggaatcattttcgcgtttaacttttacatataaccaattattttttttttaattaaactaagatgtgtcctcaatcaatcagaaagcgtttaaaaaaaatctataatgtaaaattttgtatttattttattttatggttttagagagtaatatccttacgttttgttgacaatatttttgttatcactttacttaatactgttgtaaacaaaaagtaatggcaagccataaatcttatgaatgggaattttgaagccttacaacttgaaaagcaatgttcatggcggcatttttgcaaattatttagatattcctacaatatctattgctactgcacttgcctttgaccccattgagacccacaccacgtttggtatggggaaacatttggtttggggctaaaacatgcaacattttgcgatgtgggcttacgagggtggttggtgcttgggggagttttctaggcgactcccttaggggttgttggtaaattcaatgccaaagcaattggccaaggctcgtcgggatttaccatgagtgtactggcgttactgtcactgttattgtttcgtgtcgggcctgtcattgaaggtcagtgcccataaatgatattggtattgaatcgaaagggttcagttagcaaaagggaacgtgtaattgagtgctaatataaacaacaactgggttcagagtttttgccatattgtttacatattgacagattttgaactaacagcgttcaaatatttaatgtgttttcaagaacggtaaagaaattaaaaagctcattaacttaataactgctcgtaagtgctccaagaattcgtatactttagttgagcactacctaattgtttttttacgccaacgtaagatatctgttttttcgctttataaaccccagtatttgtcacctaattaaagctgcatcaaagggaaggggccgcattgatggtgagaaaattgtcagtgagtcacattaaacaaactaatttgtgttagccagtgtagtgttgtgtgtagattgtgcaaaattagcatgtctaacaataacaacaaactactgcgatcgtcttgctgatgtagttattgttgtatctgtgcttgtttactgtacaattagctctgggtggggccctccgatctcacagactccattcgtatgagaagatctttgggggagaatcaaaacttcaacggaagctgaacaaattttacgttttcttgtttagtgcattttcaacttgtttaaacattagtaactgccgagcaaacgacaaactagttttagtttttactcagaatttcatttttgggttattatattacatttttcaaattttcgttgagttgcagataggtgcggtacacaagtgcagccaaatgatttgggttagctgttaagttatatctcacactaaatacacagataaatcaatgaattctttcacgcgcgttaaatagtttcagtagttcagtttaaactgcgactcagagcggaaattggttttttaaaaaccgtctttcaaaaaacctctgaaaccgacgacacgccaacgacaactgttgtaacctgaacccaaaaccgaatccaaagcccgccaaacgagctattgagccacagcccaaaaataagagaatatttcccaatgagaattattcccaagacgtgtgtcaacgcttgctgaacaaatattaagtcatattatggcggcttaaaaattagcacatgcacgccatgtatgcaaacaatttaatctcgagttttgtttgaaacttaaatgctctattaaattttgaagtaaaattgtgtcgttggtttaaaaaaaaacattttaaaaacaaagcccagcttagtgggaagcgactgttgaaagcttttatgaaatttccctgctataatagtaaagacgtcaaccgaaacctaaaatcggtaccatacaaatttaaaaaaaaaaataaagatatttagggtcatttagtgtgtgtttagtatttgccaaagaaaacaaaaataactacaataaaacataggtctaaataagtctcaccattgtatgatgaaaaatgcatttttaaaataaaaaggcgagaaagctaacctcctgtgctataatgggtctcagaaaataactattaaatgaaactcaataatttatattataacatttatcatttgatttctgtttaatgtaattaattttctttaattattgttttcttttaacaaatatattcacagatgtagagatgaaataaagacaaaggcagtaaaaacacttgaataaatacaattaaagttaaactgtacataattagagtgacaaatttttgcgaaactatgtacagaaaatatgtaaaactgttaaaatcgtgaaaaacaaaacttaaacacagtctttccgtttacagaactctcaaaaacaattgctgctagttatttgctacgactaaaaataaatttaagaagtaattacaacaaaacatgacgtttgtatatacattctaatctactttacatccagtcagcataaatttgttaatttatttt

SEQ ID NO: 26036 - DNA, 988 bp, DROSOPHILA
tgtcgtcggtttcagaggttttttgaaagacggtttttaaaaaaccaatttccgctctgagtcgcagtttaaactgaactactgaaactatttaacgtcgaaaacgtatccaaatcagactctgcaaaatgagctacttgcgatcgatagaaatctcacgcgtcgaaatgtcgccggctgacgataattcctttgccacaactcatggaaacaaaaaggccacctacacggtgatatgcatcaagattgtggaactgtgcctgcttatatgctgtttgggtctgatcgacgagccggccaccaattctcatctgcgggtgttcatcactccccgagtggcttccctttgctatgtgacctttggagcactgaccatctacacggcaatctatctgataatggcgctcttcggtgatttgactccatggcgtacggctactttgtggaatctagtggcctttgtgctcttcgtggccgtaaccgccctgcttttccgggattggtccaccaccaaggatcgcaactactggcacccgaatatgcatcgtttggatctcgtgatggcttccgcctcgattgccttggttacctcgctggtcttcttgctggacatactcatcaccctgcgtttaggtgtccacggtgatctagaatgacatggtcgatcccgtgaagtttggcgagaaagagatatacattcgattctcgcctagcgtggactgtaatatttatagctccagcttagaagtaagagccccgttcacatacccgtctcccagctaattgtaatcccacaagaaaacaaattgccatcatcgaatcgaaaatgtacaaaatcgacgtccgaggaggtttaaagttcttaatcggctgccctgttttgttttttttataagcttaatacatcgagcatcacgaatgttatatctaattcaattaataaataagattcaacgcaaataaattttgtacgagcgaataatatccc

SEQ ID NO: 26037 - protein, 162 aa, DROSOPHILA
MSPADDNSFATTHGNKKATYTVICIKIVELCLLICCLGLIDEPATNSHLRVFITPRVASLCYVTFGALTIYTAIYLIMALFGDLTPWRTATLWNLVAFVLFVAVTALLFRDWSTTKDRNYWHPNMHRLDLVMASASIALVTSLVFLLDILITLRLGVHGDLE

SEQ ID NO: 26038 - DNA, 4631 bp, DROSOPHILA
cacatctaagccgcttgagaagttgatcgacgagttctgaatccaacacatcaatttgccgatactcactgcagagcaacagagcagattgctggcggcaatccggaccttcttggacgaggatcaagagagtgggatggctgtcagtcaggagaagctccattcttctgtgatctggagaacggaagaacaaagtatataatgtcaaggaaccgaacaaatatacttcccgtacagcgtgggcatcacgtaaggcgccgtttaactgcttgactacatcagtgccgtgttgattcttccaagctactaattatttaatcgttatgccaaaacacagtgtatcgcttttcgaaaactttagtaagtgttgcaggtggtttcgatgatgatagggccatatcgatagagcgatggctttggtggcgccccatttgcacaaaagagcacttcctaagtaaaataaagcctaaaggttgctataaacggattgcgcatcaactggagtcattggaaaatcttacacacaaagtacatattcgaggctactttattcagctgtttcatcgcaggcaacttctacatcagcgagaacatcaactggggccatatatccaccatggtgtgctctagcaacggtccgccagatacgagcgccaccatcactcagctgcggttgtccaaactcctgacgaatattctggatttttactcaatagctaaatggacgcggacgcacgtttaaaaaagaccaagtcaaatcctcattttcccaaaaactttataatattctaaatttatttttatcacaaaaaaatatacataaatttaatcactaataattaaatattttaaagtatttcaagtgtttggcttttggaaactgtcaaattcaaaaataaaaaattggtttttttgttctatgaaaacttatacttataaataatagttagacaagcggtttctaataatcaaaactatgagttccttcattacattgagtagagcaatgttccattagtgatggcaggagagtatccgacgaaggctgtctaagaaaaataagcagcttaatagtaaaattttttaaaatctgaaataatttacctggctgttgacatatgatatgaaccaggtgctgaattagatcgacctgcgcgtatgaacctttcaatcctcgagcagcccgcgagtgatgatgatgttccagaacatccttttacaaacgggttgccaaatgaatgcttttttaacattgttttaattaatataagtgtgtccaatttaggaatgctgcgcacgacggagtctatatcttcgtcgtctacttgtaccaagcaacaattttcttcttcggtcggcaagggatagtccccatcagaagttacccatttactagtctaaaaataaaattattaatagcaatacaaaaaatcagttagtttagcacctttaactggggaatagtaattctctgcgtcggattcttttccaacatttgaactatgcaactttttaaattttcagttactttgtggttttctggaaatttgacagaatcttgtttaattttttcatacagtaagggtactgaatcagctagaaacggcacatttccgaatattaaggaatatagagtagcgcctaaggcccagacatctgccgccctgccacaatattcgttctaaataaaaaaaatgtaatgaagaatgcacgtaattttcattgttaattatttgttatctaaaaaaaaaactgtatacctgtccagggataagagtttcaggagccctgaaagctggagttccagccgttgatccattacttattgttgcatcatctccaaggaactcattgcatacgccaagatcagctatttttacatgtccaaattcagttaataataaatttccaggcttaatgtcggcatggataattttttgatgatgcactgtttgtacaaaacgatcaaaaataatacattttaaaataaaaaacgaaatacaaatacccgtatacacgaagatccgtttcaaagatattgccgaggaagacaacattgtgtctacaaagtttttatatttgtggttatagggtgaggcgtgcccaaaatataaatagaaattttcaaggcatgtaatataaataaatgttttgttttaaatgttttaaatgtgaatgttttaagggcgtagagatccgaaatgtttgatgtgtatggatcggtattagcaagagcaaaataaaataaatttaacagtgtgttgggatgacgatcacataaaactatcacgtaaccgtgtgggaatagaaataggaattggcaaataccatattaaaatgaaaaaaaaaatccaaacaattttcaaaattttgggcgttattgggcagtttgtgggagttgaaagtttatgggagcatgacatcatcagaagagaaacttgcgctgcgtctatgcctctggaaccctctcatgctaaatctccactttctagcttttataattccttaaattcatacggacggacaggcaaacagacgggcggacataacccgatcgacttggcaggtgatccttagctagaatatttattgttcttgtacattaaaagagcttagtaggaaataaattaaaaaatacaaaacaagatcgagttccccgactatcagataacgagtaataaagacgattttggctggctggacgtggccaaagtgtttttggtatacagataaaaatgggcaagagaaacaattaaacgaagaaaaatctaaacgaacttgcactgcgtctatgtctttaaaatctttatgcttaatcgatttctgttacataccaatctagtatacccttttactctatatttatacccgtatagtaagccactttatactgcataaactacatattaactcctatgaccggttgcaacatatataggcataagtgcttttggagaatctaacaactcttcttttgcacttataaagatccattagtcggggtcgggataccatttttgcttttgtgtatatgtgagatttgaatgaggagggttttctttgcggcataatcctagaagggtcataagttgcccctccagacatttcatccgcgttgattgaaccagaaaattgcttcaaattttcaaccacggttggtgttctaaaagggcattctgtgtctcctatgcgttctactttataccgcgcatgttttttaacagcaattattattattttcgattgaaactcttttttttgctatgttctactcacaatattccaatccaagtaaagactcccgaaatatactccaagcccttttttcagacaagggattatctgttggaatcctaagaacttcaccttgttttaccaattcaaaaaccatatataatgaatcttcaagtgggtcatccagcacttctaccaactttacgacgtttggatgatcaagtttctttaaaactgctatttctctgtaaactcgatctagaggtgatgttgctttccgaggtcctcgccgcataagaccagcttgacgcaggagacgtttttttgaaagaattttcattgcataatgagtggaatcttcttcggagtaagccaatttaacgagtccgtaggatccctagaagtaaacaatgatgtttaatatttatgatttataagaatataaaaacgttttcaaggaactgatacatagattgatgatttttttaatatacctgttactcgtagaataatatcccagattcgttgaaaagtatgtaacaggcagaaagaagcgtttccgactacataaagtataaacatatattcttgatcataatcaatagccgagtcaatctatctatgtccgtctgtccgtataaacgttgagatctcataatatatagatataggtataaaagctagaagtttgggattcagcatacagattctagagacaaagaagcatccaaagtttttgacccatgtagtatactagaataataattattcaagtgtctttggtcacgcccacatttttaaacaatttttgcatattttttcataatttagtcttaaactagtcttgtaaatttctatcgtcaaacaactctttgccacgcccactcaacgccataaagcctccaagccggtcacgcacacaatttggacattttcaaaattttttctcattttattacccaatatttatcgatatcccagaaaaatgatgaaacttagcattctctctataaacctttccaacaattgtatatctttaaggaccttaccgtcggtccatagattgaaatattggttaattgatactagtatattagttcttgatgtttctgccattctctttttatttttaaaatggttatttttttagagttgtttttttttctttatcgtcaaatatacaacttgtggaatagcaacattgaaatatacgtaagagattaacataacgctcacaaagcaatgctagctgacagtttagtcataaagcagcacagatagatgaattattacaattctttattttgaagaacacccattatttaattttacttgacttgaccttttgatctagatttattgacgttcaagactcgatctcgagccttctaaatatg

SEQ ID NO: 26039 - DNA, 1174 bp, DROSOPHILA
ggatcctacggactcgttaaattggcttactccgaagaagattccactcattatgcaatgaaaattctttcaaaaaaacgtctcctgcgtcaagctggtcttatgcggcgaggacctcggaaagcaacatcacctctagatcgagtttacagagaaatagcagttttaaagaaacttgatcatccaaacgtcgtaaagttggtagaagtgctggatgacccacttgaagattcattatatatggtttttgaattggtaaaacaaggtgaagttcttaggattccaacagataatcccttgtctgaaaaaagggcttggagtatatttcgggagtctttacttggattggaatatttgcatcatcaaaaaattatccatgccgacattaagcctggaaatttattattaactgaatttggacatgtaaaaatagctgatcttggcgtatgcaatgagttccttggagatgatgcaacaataagtaatggatcaacggctggaactccagctttcagggctcctgaaactcttatccctggacagaacgaatattgtggcagggcggcagatgtctgggccttaggcgctactctatattccttaatattcggaaatgtgccgtttctagctgattcagtacccttactgtatgaaaaaattaaacaagattctgtcaaatttccagaaaaccacaaagtaactgaaaatttaaaaagttgcatagttcaaatgttggaaaagaatccgacgcagagaattactattccccagttaaagactagtaaatgggtaacttctgatggggactatcccttgccgaccgaagaagaaaattgttgcttggtacaagtagacgacgaagatatagactccgtcgtgcgcagcattcctaaattggacacacttatattaattaaaacaatgttaaaaaagcattcatttggcaacccgtttgtaaaaggatgttctggaacatcatcatcactcgcgggctgctcgaggattgaaaggttcatacgcgcaggtcgatctaattcagcacctggttcatatcatatgtcaacagccaggtaaattatttcagattttaaaaaattttactattaagctgcttatttttcttagacagccttcgtcggatactctcctgccatcactaatggaacattgctct

SEQ ID NO: 26040 - protein, 338 aa, DROSOPHILA
MKILSKKRLLRQAGLMRRGPRKATSPLDRVYREIAVLKKLDHPNVVKLVEVLDDPLEDSLYMVFELVKQGEVLRIPTDNPLSEKRAWSIFRESLLGLEYLHHQKIIHADIKPGNLLLTEFGHVKIADLGVCNEFLGDDATISNGSTAGTPAFRAPETLIPGQNEYCGRAADVWALGATLYSLIFGNVPFLADSVPLLYEKIKQDSVKFPENHKVTENLKSCIVQMLEKNPTQRITIPQLKTSKWVTSDGDYPLPTEEENCCLVQVDDEDIDSVVRSIPKLDTLILIKTMLKKHSFGNPFVKGCSGTSSSLAGCSRIERFIRAGRSNSAPGSYHMSTAR

SEQ ID NO: 26041 - DNA, 16680 bp, DROSOPHILA
ccgcacacaaggattccgacagttatcctgcgaacgggaggtgctgctgggtgctgcgcagaaagggaggtcctcgatggaaatgaacgaattgatgtacacgccacgctggccaaatccggaacagcataagttgcagcaggagtcgaagttcaaaaaagtgttaagtgctctcactgtttcttgcagcaatcattgtcagcaagcagccagaaccgcaatcagaccgcaggaagcggaggaggatggccttgtgggacagatgtgttcacatggacgtatttcggaaaatttttaaattccgcttcgcatgtacagttttttagcatttaattaaattgaagaagcatgtatatgtatattgctagcatttatcaatctctataaatttgtccttttttggagtttatgataaggatgatagccaagtaacattcaattggtttaaagcatctaagaagatcccgaatattcttttttctataagctcggatttttgtctggttcatcttttgaactcttttacggtatagttaatgcatatatttaattcagttgactttcaccaaaatcttttttgagtcagcaatatgccagcactgttagagaggatgcaggatttatatgcagccgtaagattcaatacagcagagtgcatggagcgaaacaaaaaaggatttacactcttctcttctgatttctttttagttttttttgtttttttttgtttttgtgagctgcagctttaaaatcaaatgcaaatgcaaacaacagttggcatcaatcgaagctgtcgggaacgcctcgcaggattccgcctgctgcccccactttattgctggaattaatgatggcagagggttggtggatactccttgggtcttggttttgtgtgttttatgtggaatcaagtggaaattcaattgatttgctttggctttgcattcggctccacagggtgctatggccagggggcgtggcgtgttataataatggacggatggctctggacgggatgtgtgcggcttcaaaggaaatcgcacccattcccaaacaaaacgcacttgagtgagaaatcattttgcgaatattacagaactacacgggctgctcattttgccatttctgaagttactgctggtgtcagcatgtcaaatacgagcactctgaagttaactcggctgtttctcccctttgtccaatcaattgcaaaatttattcaattaaaggcaccgagtagtcggtgcagtcagctggcagtgatgattcttaatgaagtcgcaactgaacaggattatcttcaacttgcatgtcacactcttctcttgcaggtttccacatgtaacctggtccaatctcatccgaagaatcctcgatagccaaggagaagcccacaatgggtggattgaagccacaggcggctatttggctgcttctgcttatcgcacacactcaggcagtgagagaaagtaattattttccaattctatactaaattatttaaaagcaaaaggctatctatttcataccaaagatataatcttcttaccttcttccttgtagatccactcaaagatccgcggatttgcggacggcctcaatgtgattcgaaaagtgctaagttcaattatggcgaacaactctacaaatatcaatacacggtggctgtgcgcaccgagttcgccggatccggcgacaatagttctgacctcttgctgaagtccgatttggaaattttcttcccaaagccctgcgagggctacttgaggatcaacgatgccaagctgtacgatacgttggacgagctcaatgacaacgagagcgattcctccgagaagaccaaagagtacgactactatgacaatctggctaacgaagaatccgagtcgcaaaactatgataatatgcaccctaaaagctctgatttcaatgtggatcttaccaagaatcttctccgatttgctttccacgacggcctcatcagcgaggtgtgtccgcaggagcaggagacaccatgggtgctcaacatcaagaagggcatcctttcggcctttcagaataccatgatgcgtttcgacgtcgatgctaatacaactgaaaccgatgtctccggtcaatgccaggtgcagtatgcactggaagacactgacagttcctatgtcacgatacgcaagaccaaggacatcaactcctgccgacagcgatatgccacccactcagttctccagactacgccttacacattccgcgacgacaagaccatttggccaatccttaaatcccaaagtcactgcaatgtaagtgcaatttgtaaaataatcattgtctcgaaactaattaaataaattcttatataatttgacttagctcaccattgataataacgtttataaagaaatcaaatgtctggagacacaccttctggtgcccttctccaacgccagctcaggtgccctgactaccagtaccagtcggctgaagctcgacggtgtggagtcttacagcgccggagagttcttagaacagagtaaatcatttcttattgattcaataatgaaatttataaacgagtattgatccacagatcccgaactagtcgaaaggcgtgccactctggtatttgatcatacacctgccgtaaagccctcgcatgatgaaattaaggctgccagggaacttttggtggaaatgtgtagagttggctttcccaatatccagcgtgagttcatcgatgtattcaccaactttctgcagacctccaagagcctcgactacaagacactatccgtgctgctccagcgatctgctagtacctgcgaacagggcaggtaagtaagcatactttagagcaactagttaatatatactttaaataacatttctaaatcgtctactgcagaaatcacctattggaatcgcttcccttcattggtagcacagcctcatataaagtgatgcgtgatcagattatcaacgaaaaactgaccaagcaaatggcacacgactggatgaccgcattgtccttcatcacacggcccgacgaagagaccctggagacattccattcgatccttgaatacgccaagaatagactggacgcggaatacaccctgggagccactgcggtggtgcacagcttttgcaaacaccacgaagcgtgcgaggagaaccttcgagttcagcagattatcaatcttctagagaccgagtttctaaacttgtacaacctgtttaagggagagcgtcgcacccgggaacgtatggtgatcttgctgaagggattaggtaacattggagtggtgtcatctgcattcgccgaacagctacagtggattattcgtgaggacgaagcccctgtggatattcgcctacacggtattttggctttccgaagggttgactgtgctcgacaccgaagctacttcctggataactacggcaactatacattgaattcggaactgcgtatatacagctacttgcaggccatgagatgtcccgactacatatcagttggggtcattaaatcgatcctggaacatgaggaaatcaatcaggtgggctccttcgtgtggtcccatctgaccaacctggcgaaatcaaattccccagttcgcatcgaagctcaaggtttgctgcttaatgatgagctctctgaacgctttaaaatggacatccgcaaattctcgaggaactacgaacacagtttattctttgacgagtacaattttggaacaaccacggatgcgaatgttatctttggaaccgattcctacttgccacgcattgcgagtgttaactttactgccgatctcttcggccagtcagttaacttctttgaattcaccgcccgcgctgaaggattggaggagttggcggctaacgcttttggtcccaaaggacctttgagcggtcagttgctgcgcaagaagctctccttcctcaatcgctggttgggcaatgaaagcgccgaggaagacgataccctcgaaaatctgctgagtctggataatctgcgactgaagagaaaggctcaggaacaagctcgtgcgtccgaagaggaagtggacgaagattacgactttgaggagtccttagaaggtaataagcgacaaaagcgagatgtcagtaccacgcgaaagcaggagatcgatcgcaacgttgacagtcttggttataagctgaagtacgactacaataatccacgggcacagtttggattacgggtctttggcaacgatctgcgctacttcaacgtagagtcattggtggaggtgatggccctggctgccaaattcaatcccttccagcaggcaaagaatgtactttccggcaaggagtttacgtatacaaagtcccgggtatttctggatgcctcatatacagtgcctctggcagtcggacttccattggccattcatgcatttggagcttcctccatagatcttcgtgttagtggcaacctggatgaaatggatccgccaaccgattggcactttgatgtcgaaggtcagtttaagccctcggtgtccgtggatgtgatcaccaccatgcagacggacatgttctgggaacaatccggcatcaaggtgaagagcaatctctattctaactccgaactggtggccaagcttaaggtgcgtggccgtaatctggtctcgttctcgtttgatcttccccgggacaaaaacgagatattcagtgtgcgatccgagttgttggttcagaagcgggaggagcaactgccccaggcgggcattgccaatcgaagtgcaaactccacatgcacctggccagttctcgatcaggccattggattgcagatgtgctcccactacagtgttccagatctgagcaatgccaccgaaatttacccaagccttttgctggcaggaccacttaacttcagcttgattctgaagaagtctgatctaagtgctaagaagtacgtgttcgagtacaaatgggatcagcaagaagaggacaacaacttttcgctggtgtttactactccgggctcaaaggttccccgggttctggttgcaaatgtgaccaaggtgcccgatgccttcaatgcatccgtggcttttgtgaatggacctaatcgtgtctccgctgggtgcagctatgatggaaacccggatttcagacgcttggatatctacttagatacgaatggaaatcgttcgttggaccttggaatggagctgcgaaggcaccaggacttcactgcctggatctacaatcctcgtatgctgctggccattaatggtgtcaacattactggtctggctggcaccgtcaaagtgaacgagaagaatggtatcaagcaacatgatgtggatctctcatttgagaccaagaagctgcaggctgtgatcaagggcaacgtcgtccaaagtgagataaccacctcaaccaacatgaccattaaatacagggttagtatctgcctaattaattaattaattaatcaattaatgaaggtaattttttgttctaatctagttccaagcaaataagattgaggagattaactttgccggaaagctggttaataatggagataagagcaagacggagtatcgcggtaacatgaagctacaaacatcggcatatcccaagctaaacttcgcatcggaatccacgtggcttagtcttcaaggccacaccgaaggaatgatcacttacaataatgcgcccgattatgtcaatcccaattacaccagtttggttcgtttgatctttgctcgctcccattcagaggactccttcttggatggaacgcaaacgcgagccagtcttgaactgaagcttccaaggtcaaagattgactaccgcattttagttaagtaagtatatgtttaaatcttttattttttaaagttttttaaatgtgttatccttatttgaaggcacaaagaacacatcaaaaacggaaccgagcacaatgtcatcgttggtctgaagtacactcctgagaaggaaatcactggactgttttctgtccatttgccaagacggaatctgtttgccattgatgcctacatgaacgtgaccgtaccggagttcaattcgtgcacagccagtcttaaagtgaacgagaaagccaccaaggattatatcgtaagaattactttttttgtttaatgtgcgtacgaactttatttaatttaaaatctctttagatctttattaacggctcatggtttactggacactcagtcgcagtcaaggccaactacaaggatcgcagctcgcgtgttcaggctcttcaccatcttaaaatgattgtggaaagtccatccttcaatataacctccctcaacattatctatcgccgaaaacagttgttgatcttttatgatattcaagccaaatatgaccaagatccttatggcctcacaatacagtatgcttccaatgcccataatcgcaataccaatgcggaggtgcgactaaaggtcaaggaacgtgactactggattaatgccaaattgttgtcagagcagcctaaactcctgcagctggaaatacacatggataagtaagtctaaatcacattttctaagacagtgtctttaattcatgtctaacaaccttagaatacgggatgtacatattcaagttggcctgctaaatgtggacaagcgcaaggagctgtctctagaactgaagtgggatgctaatcgcgatcctagccagagactgggtctacttgcggaatacaatagtcctggaacaaagcactacgatggaaatctgatgatcacctatccggagcgcaccattcactttggttttaactcctttaccggaggacccaaatacttcggaaaggtccacgcctcgtggagcatcaacgaggtgatcgagttcgagtacgaagcgggtattctgcctggccacacactccataactgggttaaagccgagttgcggacgcctttcgatggctggcgagtcaacagccttgatgctggcatttatagtctgaaaaatctgatccttgtcaactctacgctcttctgggcagatgatcagaagctgcaggtgggctacaagagcgactacgacgtcaacgatcaactaatgagttttgatgttcgcttcggcatcaatagcaccatccgggatattcccacgattaatgtaaaggtaaagcattggatggatgttaaaaaggttgacacagagctctatcttggatacagtggacagaatgatacatttaacacctacagcatggactccagttgggagattgagaaaaaccaacgatacaataattattctggtttagtgcatctggtaagtccattcaagggctacgagaaaggtggtctggtggcccatttctcactgagcgatcaacgggtggtcagtggagcagcttccctcaacttcgatcttcgggagttcactttgacaatgaacggatatgtcaaaaagtttacggataacatgctaaccgttaacatcaccactccattggagaaatttggcaccattaacgctcgctttggtctaaacgaaaagaaacgtcatgccgtggcggaggtcagggctcccacggcagctcttggagtggaggtcctggcggatattaagaatctcctgaacttcgatgtcaagctgagtgtggccacgccgatcgaaagcttccaacaggcggcaatatttgcactgtttaatccggagcgtgttgacatgcgtggtttgtggaacaatgtcaccctgggattcactggcgtatggcacatgcagaatataaccgattttgagtactcctaccacgtattcaccccactggctggctttgaagagaacggtttcattgttcagctactgaagaggaaggagtttgtctttcagttgcacggcaagatgtccaactataagctgggtgtaaaaatcaatggagaaccaaagtctgacttggtaaatcaactgggcagcaataaaatggaattggagatgctctacgacgcggacttcaaaccacttaatgctgagacggattacaaaccagatgccgatgaggagtatttctcctacttcacgaacttccaggtggacactcttgtgtggccaactattgtcggtaatgtggatattcaggagatcatagatttctatctggttgtaggccatgtggaactgccacagggcaaagtggagttcaaggatcgcctccactatcctgactacataaatgtccacaatcttttgaccgtgactacaccatttgcggtggccaagaatataaagtcaattgtggagtatcatgttgacttaaacttcaacgcgttctatgagcgcgtcaaatttatagtcaacgatgacaaggacaacactcaagagctgggttttgtgtttaactacaccgcactgcaggataatgttaagcccaaggcgcatgatgtccaggttacgctcctcacaccctacgaaatgcttcacgaaatctacgttcacggacacatcgaactggatgacaatgcctataagggcaacatcagtgcggttacggcccatacacatctttcgatggctgcctccatagaggttagtactagtgtctaaaaacgaagctaatttattaacaattatattaaacaacaaaattttgtactcagaacgaggacaacttcttggaaacttccgtgggcattcagttggagacggacgctattccccactatggatgccaggtgtactttaagaaagacttctcagccgtggataaagccattgatattcgattcgaggtaaccgacaatggaacactcaaccaggtaataccaaaagtaatagtatattatacagcctacttatcctattttctttattagcttcacatttccacggattggcacactgatccttcttatattgttaacgctaatggaaggattaagaccaccatgttgccacttcagatggcgtccacttctgttctggtcatccagggtcagaatccccacctcaatttcgatcttaacttattgagccagaatggccagagtatagcctacggagcgcgtgccaataagaaaaaagatgtctttaacattgaggtgtggactccaatgaaaaacttccgaaacatttccatgcacggtactgcgattagaagcccccgcgatcccggccgatatgatgtctcagggttcttgtacagaaatatggcaacatatgaagtcacaggagccgtccgcatgaccaatagtctgccaatcgatgtcgttttaagggtacagcccaaagctggcggtcgagatggtgtgattgaacttaacatccatgaggcgggaccgaagaagattcgcttttcttttagcgccattgaggatggcaaaatgtgtcagatgtcaggaggttacagtgtcagcaagaccaacggagcgatggatttctcagttctagtggagagcacggaaccagaaatcgctcgcattaatttctacggcaatcttagtcccaactccgaaggttccttggtgggagacttgagcttggagaccccatggaaggcgctcggaatcgatacggtgcacctgcactccgacgtcggtttcctcaataaaggaggccacatagtgggcgagtataagatcggtcagtatataggccgaggtagttgcctgtggtcttggattctagccgaggacatgcagctggtactggaaaactacctggagagaccaaatgctaagccaagaattgttcacgctagtgccaagtaccagaacccgggacaaacatttacccagttacaggcgggtggacgactgagcgtcgattccaaatggaatctcgacgtgaatggtagtgcagaatataagtcagttgatgattttaagttcagagttattaccgcattgcctttgcctgttggagatcgccaccagctgagtgccagctatcagggcaacgtgattagccagcagttcaacaatcctgattttgtcctcgaggccagctacgagagttttgaagcacagaataagcttttatctcgaatctcctataaaaatgccaccaataaccttaagggcttgggccacgtcgagtggggtaagattcaaaacttgtctgtagtggagggtgactttgagttgctccacaagcagggagcccaaagagagttctctgcaaagataatcacgcccaaatttaaaaatgagcacacctttgccctaacgggaagttatgacttggaaaagtcgggtcaccacaacgtggtgggatccttggattatcctgccagtcgtcgcattaccgatctggatgtgtccgtcagttcgctaagcaatatgcatggaatcttcaacagcacactgccaaccttcctcaatgtcagttggttaaagacagattttaactttaccaccaacaagtgagttaacgaacaattactcttaattcattttataaatattaatttaccttgcagtggaaagagctaccgctactgtcgttgcttctggccccaggatactgcctacttcaagttgaacagcaactatgatagcgacagcagcaactttaaccacaatctcaatggcaatgtggaaatagaagttccattggcaacacggcatcgagcggatattgtgtatggcttgcaaaagcgtcgcaatcaggatgcaggaaatgtcaaggtcgtctacaatgagaagcaagtgctcgatggcaagtacaagcggttggaacaggcgaaagcgccaatatataaggagacaacggacatctcgctggagaacgaagtgaaaccgctgggaattcactttgtcagcaccagggatgccagcgaccccgcaggaagccaggacgtgaagcacattgagatctatgagctaaggaacacgcagaacttcaatctgaccggtgaattgcactcacgggccacgctcaaggcgcaggacttcaaggtggtggccattcatccgaatcgtgccgtagtgcttagcactaagtacgaggatgtcagccccgaagttgtcaggcatcactcaaagttggagttgtcggaaacagcatggattggatacaatttggagctgggtaatttcagcaaggtaagcgaaacgatcgatcatgattagaatgataacctaataggaattcttcccttaggttggcaatgagtcccagagctttgccctggaaattttctatccgaagcgcaatctctcctcctcaggacagtactacatgacggacacaaactttaactccgacctatctttccaatggctgggcggcaactatgaccaacagcccaagattatacacagcaatctgcaatggaaggcagaacccctgcatcgtggagatcgggagcatcgcaccatcgcgctgacggtggcacatcccctcctggagaaggatataaactgcaaggcgacgtactatcgtggactgcgtgatctgctaaggacacacttgaccatcgactactcggaatatcctgaccaacttattgagctgggtgctcagctgacggatagatacagtgaattgggccacaccaactacaccttccacgtgtacggcaaacatattgcttccgaactggatgtccagttaaatggaactttggcggccatgaactcttactataagacggagtctacagcccactacaagcgtgatatcttcccggcgagatatggtaaatttctggctctgctcgatgtgaataagcgggaactggaatacgaacgccagtcaccattccacgcagtgcgactacacttgctgccaaccatacggtatccgatttacggattgaatgccacaatttgggatactcctgatacaaaccactcgggctacatatacatggacattttggagcgctatgctcgaatggacttcaacttgacggaggacgccagtcagaatcttcaaatggtcggttacattccggatacacgcagtgcattcctggacatttggcgcaactacgaggagatacgtgtgatcgatgtcagttcgtatctaaagatgaatcactctcgtcttattactggccgcttccactggcgtccatcaatccggcaagaagttcgcgagaaaatccaagccgtgggcaaatcggtgtacagctctttctcggaaggtattgatttttggattaaatctatctatacggaaaccaccgaatccatgggcgtggtgtggaacacagccaaggagtacaatagggatttcatcgacgatattggccagctgagcgttttggaggaggatcttgctgatctgcgattgtttgtaaatcagtcgtacgaggcgaatgatttctatatcaagaacgtagtcaatttcacgctaactatcctggatgaactcgccattagagatcatatcgagtcactgcccaagatcttctctgaactgtggcaggcaatgggagattctggaaaggctttgcggaacagcattgtgtggctaatcgaaaccattaaaaccacgtataacaatcttctggatgcggtggcccgatttttccatggcgagagtctcgtctatatatccggtctgctagagaagggcatcgcaaaatacgacagttttattaaagatctgcacatcaagtttataaaatacattgaaaacctctggcacaagacatggacattggcggagaaccactggaaggcagtcctaaagcgattcgagcctcatcttttcaagatgattagctttatagagacaacagcctggaacctcagcaaggaggtatttgatttcatatacaagcgcaccaatgagctggcggagtctccgtacttcaacaaggtatccagttttactgctgatgcggagcgactttaccgggacttcaaggctaacgatgccatcaccaacattaagaagtattcaacgatagcctggaattttgtcaaggagaagtacttcaagctggtacctttcggcgcagaattgaacgaggttcttaccgaaatctggcaggaaatcaaagaacttgagaaaattgatcaggtgcagattatggtgcagaagtactatgaagtaatggccaaggtcgattgggtggcagacgaactgcaactggaacaccgcctgcatcaggtctacggtctggtgaggaataagttccgtaactacgccatgaatgccttggaaacagccgacatgtacagggaggcaaagaccaagtttgtctttgatccggaagtgggcattatcgaccttgaacagaagctacccatgtcctggcatgcatttaacgagacgccccggttcgaggagattcccgagtaccaggtgctcgccaaggcgcagagcttctttagtgagaccaactcatcgatcgtcatgaagctctataacatgcgcacccatctggatcccaagacctggctgccaccgtactactgtgagtttattgaagatatacttatttttaaatttactttaattattattttattctatagctcgcgccttgctgattgactcgcgtcactacatgaccttcgatcagcgttatgtgggtctgaatcttaactttgacgagttaggaaatggacgttccacttcgcaatgcagctatctgctagcccacgatttcttcaaacgaaacttcactttgcttttggaaccagcggtaggtatatagggaatataccttgtttacttaagtaaatatatttctttcagagcaaatccctggctggccaaggactaacacgcaagttgagctttattgcgaatggtcaactgattgaaatcgacctcgaaacagatgtgagttaaccatataaaccgatcttttccagtagatatttatctcttgaacttatattcagcacataagcattaatggcaatcctcaacccatcctacctcttaaactcggagatgtgaacatccatcgtgatctggacgtactctccatcacctcagataccgagtttagtctgcactgcaatgttcagtttgatctctgttggttcgaggtgagtggttggtacttcggcagaacagcgggattattgggaaccttgaacaacgagccctacgacgagtacaccatgtccagtggcgtgatctccaatgagacgcagctgttcacggattcgtggagcctgaagcagtgcaggcagaataagctggctcagacccaagaggtcagccaggaggtcagtgatgcctgtaccagcttcttccgcaccggtatactggccacctgtagtgcagtcctcgatccaactcctttctatgaaatgtgtatggatttgggcatgaagtcgccgccaattcgaaagggacacccggcggtgaaaggagcctgtgcagcagctttagcttacatcgaggcctgtacagctctgaaggttccaatgcgggtgccttctcagtgtgtattgtaagttgattaaccttctaataagcaaattttgggtattaatcattacttgtttagctgccagctctcgaatggctcatacgtgccagagggaacattcatggagctctcagggccagagattccaaaaagcagcgacgtcgtcttcatcgttgaagctaaggaatgcaatgccaatcttaaaacttccaagaacatcatgacagtggtgagcagcatagaagagcagctgcaggccgctaagataacgaacaatcggtgagtgttttccaaaatgtttttgtttcacctgcatgaacgtttcccaatccttaaaaccaaccaggtacgctgtggtggccttcggaggagtttctccatatgacaaagccaggagtgtcatatacgaacacaacgaattcacttccaagccggaacagctggcggactactttggtcacattaacaccggaaatggcagcagcaacgatatcctaatggccatttccgcggctgccaagctgaacttccgtccgggcgtatcgaaaaccttcatcctgctctcgtgcagtaaatgtgcggccagggatatgcgcttcgactacacctcgatcctgcaatatttacttgaggagggcgtaaacctccacatcctggccgacacggagtttgactttgagcgaaacaaaaagctgcgacacttctttggcttggacagcaagctggtctattcaaagcggttccccgaaggtgatgcggaaacccgcaacacaacccacattccgaagagcaatctgggaatctgtacaacgctagcggtggaaacacagggatctgtgttcagtgcccgcaagctgcagccggagagaaagtatccgatcaagcgattcgccacaattttcgccaaacgggtcgccttgagtgccacgcccatccagagccagacctgcgagtgctccgcccacaacacgggcgtctcctacatggcctgctcaccacaggctctgccagaggagaagtacgatctagacgactatgtaagtggctataggaaaggctgattaacttcgaaccttatcatttcattctatatttattctatttattcacatttgcaggactccttcaataactgggactggggagacgagccggagagcgagacaaatgtaatgtcgtagtttatagtccgccacaattagttagctagttcagttatgtccgtgcagaatttaaggtttttctaatgcataaccgacaggcatattttgtaaaaataaatcaaaccatatataaatgcatttggtgtcataattttcaggccatagttggccaaagttaacaagtgacacgcccgaccagttttctgcttcctattcattgtctgccccaatcgcggttgctgattaaaagttgcccgaccgcctgcagcagcagcagcagcagcaacgaacgattgcatgcggcatgctgcatgttgcaagttggtggcagccacttgcggtggaccatttggatgactatcacttttgcagctggtgccgccacggccacggttgacggaaacggcaggcagaactcaagtacgtgtaacaaccttaaccctaaagcgaggctagccaaggcgattcgagatggaatggaccatgtccgttcactcgaaccacttgatacccagttgaacccaatttgttgatataacgtttccctggaaaagcgcacaatggaaattatgcgagccgagtggtaatgcaatactttctatttcaatgctatggttacatcaaccggccgtcctaggcccaattgcgaatctttcacttttgggcaagctataaaaaccagcggacagattgcagccattcgcattgctgcacagagatccggccaggtagccacggacatagacaaaatgtggagattcgtaagtgcagccatgggaataggaaatcatcgaatccgacttcaacactggattgtcttccagcttctgatttgtagtattcagctgatttgcgcatcagagcatagtggcgaaggatatggcgatggttacggatacggcggaagcggaggcggcggcagtggatcactaggcagcggcggaggaggcgatggccactttcaccaccacacacccaccacgtactcggagatctcgaagcatgtgccggtgcatgtgatcgaaaaggtgccactgcccattccccatccggtcgccgttcaggtgcccaacgtaattcggcttcaaattccggaaccctatgccgtccacgtgcccgtccagcaggagatcc

SEQ ID NO: 26042 - DNA, 13154 bp, DROSOPHILA
atggctctggacgggatgtgtgcggcttcaaaggaaatcgcacccattcccaaacaaaacgcacttgagtttccacatgtaacctggtccaatctcatccgaagaatcctcgatagccaaggagaagcccacaatgggtggattgaagccacaggcggctatttggctgcttctgcttatcgcacacactcaggcaatccactcaaagatccgcggatttgcggacggcctcaatgtgattcgaaaagtgctaagttcaattatggcgaacaactctacaaatatcaatacacggtggctgtgcgcaccgagttcgccggatccggcgacaatagttctgacctcttgctgaagtccgatttggaaattttcttcccaaagccctgcgagggctacttgaggatcaacgatgccaagctgtacgatacgttggacgagctcaatgacaacgagagcgattcctccgagaagaccaaagagtacgactactatgacaatctggctaacgaagaatccgagtcgcaaaactatgataatatgcaccctaaaagctctgatttcaatgtggatcttaccaagaatcttctccgatttgctttccacgacggcctcatcagcgaggtgtgtccgcaggagcaggagacaccatgggtgctcaacatcaagaagggcatcctttcggcctttcagaataccatgatgcgtttcgacgtcgatgctaatacaactgaaaccgatgtctccggtcaatgccaggtgcagtatgcactggaagacactgacagttcctatgtcacgatacgcaagaccaaggacatcaactcctgccgacagcgatatgccacccactcagttctccagactacgccttacacattccgcgacgacaagaccatttggccaatccttaaatcccaaagtcactgcaatctcaccattgataataacgtttataaagaaatcaaatgtctggagacacaccttctggtgcccttctccaacgccagctcaggtgccctgactaccagtaccagtcggctgaagctcgacggtgtggagtcttacagcgccggagagttcttagaacagaatcccgaactagtcgaaaggcgtgccactctggtatttgatcatacacctgccgtaaagccctcgcatgatgaaattaaggctgccagggaacttttggtggaaatgtgtagagttggctttcccaatatccagcgtgagttcatcgatgtattcaccaactttctgcagacctccaagagcctcgactacaagacactatccgtgctgctccagcgatctgctagtacctgcgaacagggcagaaatcacctattggaatcgcttcccttcattggtagcacagcctcatataaagtgatgcagaccctggagacattccattcgatccttgaatacgccaagaatagactggacgcggaatacaccctgggagccactgcggtggtgcacagcttttgcaaacaccacgaagcgtgcgaggagaaccttcgagttcagcagattatcaatcttctagagaccgagtttctaaacttgtacaacctgtttaagggagagcgtcgcacccgggaacgtatggtgatcttgctgaagggattaggtaacattggagtggtgtcatctgcattcgccgaacagctacagtggattattcgtgaggacgaagcccctgtggatattcgcctacacggtattttggctttccgaagggttgactgtgctcgacaccgaagctacttcctggataactacggcaactatacattgaattcggaactgcgtatatacagctacttgcaggccatgagatgtcccgactacatatcagttggggtcattaaatcgatcctggaacatgaggaaatcaatcaggtgggctccttcgtgtggtcccatctgaccaacctggcgaaatcaaattccccagttcgcatcgaagctcaaggtttgctgcttaatgatgagctctctgaacgctttaaaatggacatccgcaaattctcgaggaactacgaacacagtttattctttgacgagtacaattttggaacaaccacggatgcgaatgttatctttggaaccgattcctacttgccacgcattgcgagtgttaactttactgccgatctcttcggccagtcagttaacttctttgaattcaccgcccgcgctgaaggattggaggagttggcggctaacgcttttggtcccaaaggacctttgagcggtcagttgctgcgcaagaagctctccttcctcaatcgctggttgggcaatgaaagcgccgaggaagacgataccctcgaaaatctgctgagtctggataatctgcgactgaagagaaaggctcaggaacaagctcgtgcgtccgaagaggaagtggacgaagattacgactttgaggagtccttagaaggtaataagcgacaaaagcgagatgtcagtaccacgcgaaagcaggagatcgatcgcaacgttgacagtcttggttataagctgaagtacgactacaataatccacgggcacagtttggattacgggtctttggcaacgatctgcgctacttcaacgtagagtcattggtggaggtgatggccctggctgccaaattcaatcccttccagcaggcaaagaatgtactttccggcaaggagtttacgtatacaaagtcccgggtatttctggatgcctcatatacagtgcctctggcagtcggacttccattggccattcatgcatttggagcttcctccatagatcttcgtgttagtggcaacctggatgaaatggatccgccaaccgattggcactttgatgtcgaaggtcagtttaagccctcggtgtccgtggatgtgatcaccaccatgcagacggacatgttctgggaacaatccggcatcaaggtgaagagcaatctctattctaactccgaactggtggccaagcttaaggtgcgtggccgtaatctggtctcgttctcgtttgatcttccccgggacaaaaacgagatattcagtgtgcgatccgagttgttggttcagaagcgggaggagcaactgccccaggcgggcattgccaatcgaagtgcaaactccacatgcacctggccagttctcgatcaggccattggattgcagatgtgctcccactacagtgttccagatctgagcaatgccaccgaaatttacccaagccttttgctggcaggaccacttaacttcagcttgattctgaagaagtctgatctaagtgctaagaagtacgtgttcgagtacaaatgggatcagcaagaagaggacaacaacttttcgctggtgtttactactccgggctcaaaggttccccgggttctggttgcaaatgtgaccaaggtgcccgatgccttcaatgcatccgtggcttttgtgaatggacctaatcgtgtctccgctgggtgcagctatgatggaaacccggatttcagacgcttggatatctacttagatacgaatggaaatcgttcgttggaccttggaatggagctgcgaaggcaccaggacttcactgcctggatctacaatcctcgtatgctgctggccattaatggtgtcaacattactggtctggctggcaccgtcaaagtgaacgagaagaatggtatcaagcaacatgatgtggatctctcatttgagaccaagaagctgcaggctgtgatcaagggcaacgtcgtccaaagtgagataaccacctcaaccaacatgaccattaaatacaggttccaagcaaataagattgaggagattaactttgccggaaagctggttaataatggagataagagcaagacggagtatcgcggtaacatgaagctacaaacatcggcatatcccaagctaaacttcgcatcggaatccacgtggcttagtcttcaaggccacaccgaaggaatgatcacttacaataatgcgcccgattatgtcaatcccaattacaccagtttggttcgtttgatctttgctcgctcccattcagaggactccttcttggatggaacgcaaacgcgagccagtcttgaactgaagcttccaaggtcaaagattgactaccgcattttagttaagcacaaagaacacatcaaaaacggaaccgagcacaatgtcatcgttggtctgaagtacactcctgagaaggaaatcactggactgttttctgtccatttgccaagacggaatctgtttgccattgatgcctacatgaacgtgaccgtaccggagttcaattcgtgcacagccagtcttaaagtgaacgagaaagccaccaaggattatatcatctttattaacggctcatggtttactggacactcagtcgcagtcaaggccaactacaaggatcgcagctcgcgtgttcaggctcttcaccatcttaaaatgattgtggaaagtccatccttcaatataacctccctcaacattatctatcgccgaaaacagttgttgatcttttatgatattcaagccaaatatgaccaagatccttatggcctcacaatacagtatgcttccaatgcccataatcgcaataccaatgcggaggtgcgactaaaggtcaaggaacgtgactactggattaatgccaaattgttgtcagagcagcctaaactcctgcagctggaaatacacatggataaaatacgggatgtacatattcaagttggcctgctaaatgtggacaagcgcaaggagctgtctctagaactgaagtgggatgctaatcgcgatcctagccagagactgggtctacttgcggaatacaatagtcctggaacaaagcactacgatggaaatctgatgatcacctatccggagcgcaccattcactttggttttaactcctttaccggaggacccaaatacttcggaaaggtccacgcctcgtggagcatcaacgaggtgatcgagttcgagtacgaagcgggtattctgcctggccacacactccataactgggttaaagccgagttgcggacgcctttcgatggctggcgagtcaacagccttgatgctggcatttatagtctgaaaaatctgatccttgtcaactctacgctcttctgggcagatgatcagaagctgcaggtgggctacaagagcgactacgacgtcaacgatcaactaatgagttttgatgttcgcttcggcatcaatagcaccatccgggatattcccacgattaatgtaaaggtaaagcattggatggatgttaaaaaggttgacacagagctctatcttggatacagtggacagaatgatacatttaacacctacagcatggactccagttgggagattgagaaaaaccaacgatacaataattattctggtttagtgcatctggtaagtccattcaagggctacgagaaaggtggtctggtggcccatttctcactgagcgatcaacgggtggtcagtggagcagcttccctcaacttcgatcttcgggagttcactttgacaatgaacggatatgtcaaaaagtttacggataacatgctaaccgttaacatcaccactccattggagaaatttggcaccattaacgctcgctttggtctaaacgaaaagaaacgtcatgccgtggcggaggtcagggctcccacggcagctcttggagtggaggtcctggcggatattaagaatctcctgaacttcgatgtcaagctgagtgtggccacgccgatcgaaagcttccaacaggcggcaatatttgcactgtttaatccggagcgtgttgacatgcgtggtttgtggaacaatgtcaccctgggattcactggcgtatggcacatgcagaatataaccgattttgagtactcctaccacgtattcaccccactggctggctttgaagagaacggtttcattgttcagctactgaagaggaaggagtttgtctttcagttgcacggcaagatgtccaactataagctgggtgtaaaaatcaatggagaaccaaagtctgacttggtaaatcaactgggcagcaataaaatggaattggagatgctctacgacgcggacttcaaaccacttaatgctgagacggattacaaaccagatgccgatgaggagtatttctcctacttcacgaacttccaggtggacactcttgtgtggccaactattgtcggtaatgtggatattcaggagatcatagatttctatctggttgtaggccatgtggaactgccacagggcaaagtggagttcaaggatcgcctccactatcctgactacataaatgtccacaatcttttgaccgtgactacaccatttgcggtggccaagaatataaagtcaattgtggagtatcatgttgacttaaacttcaacgcgttctatgagcgcgtcaaatttatagtcaacgatgacaaggacaacactcaagagctgggttttgtgtttaactacaccgcactgcaggataatgttaagcccaaggcgcatgatgtccaggttacgctcctcacaccctacgaaatgcttcacgaaatctacgttcacggacacatcgaactggatgacaatgcctataagggcaacatcagtgcggttacggcccatacacatctttcgatggctgcctccatagagaacgaggacaacttcttggaaacttccgtgggcattcagttggagacggacgctattccccactatggatgccaggtgtactttaagaaagacttctcagccgtggataaagccattgatattcgattcgaggtaaccgacaatggaacactcaaccagcttcacatttccacggattggcacactgatccttcttatattgttaacgctaatggaaggattaagaccaccatgttgccacttcagatggcgtccacttctgttctggtcatccagggtcagaatccccacctcaatttcgatcttaacttattgagccagaatggccagagtatagcctacggagcgcgtgccaataagaaaaaagatgtctttaacattgaggtgtggactccaatgaaaaacttccgaaacatttccatgcacggtactgcgattagaagcccccgcgatcccggccgatatgatgtctcagggttcttgtacagaaatatggcaacatatgaagtcacaggagccgtccgcatgaccaatagtctgccaatcgatgtcgttttaagggtacagcccaaagctggcggtcgagatggtgtgattgaacttaacatccatgaggcgggaccgaagaagattcgcttttcttttagcgccattgaggatggcaaaatgtgtcagatgtcaggaggttacagtgtcagcaagaccaacggagcgatggatttctcagttctagtggagagcacggaaccagaaatcgctcgcattaatttctacggcaatcttagtcccaactccgaaggttccttggtgggagacttgagcttggagaccccatggaaggcgctcggaatcgatacggtgcacctgcactccgacgtcggtttcctcaataaaggaggccacatagtgggcgagtataagatcggtcagtatataggccgaggtagttgcctgtggtcttggattctagccgaggacatgcagctggtactggaaaactacctggagagaccaaatgctaagccaagaattgttcacgctagtgccaagtaccagaacccgggacaaacatttacccagttacaggcgggtggacgactgagcgtcgattccaaatggaatctcgacgtgaatggtagtgcagaatataagtcagttgatgattttaagttcagagttattaccgcattgcctttgcctgttggagatcgccaccagctgagtgccagctatcagggcaacgtgattagccagcagttcaacaatcctgattttgtcctcgaggccagctacgagagttttgaagcacagaataagcttttatctcgaatctcctataaaaatgccaccaataaccttaagggcttgggccacgtcgagtggggtaagattcaaaacttgtctgtagtggagggtgactttgagttgctccacaagcagggagcccaaagagagttctctgcaaagataatcacgcccaaatttaaaaatgagcacacctttgccctaacgggaagttatgacttggaaaagtcgggtcaccacaacgtggtgggatccttggattatcctgccagtcgtcgcattaccgatctggatgtgtccgtcagttcgctaagcaatatgcatggaatcttcaacagcacactgccaaccttcctcaatgtcagttggttaaagacagattttaactttaccaccaacaatggaaagagctaccgctactgtcgttgcttctggccccaggatactgcctacttcaagttgaacagcaactatgatagcgacagcagcaactttaaccacaatctcaatggcaatgtggaaatagaagttccattggcaacacggcatcgagcggatattgtgtatggcttgcaaaagcgtcgcaatcaggatgcaggaaatgtcaaggtcgtctacaatgagaagcaagtgctcgatggcaagtacaagcggttggaacaggcgaaagcgccaatatataaggagacaacggacatctcgctggagaacgaagtgaaaccgctgggaattcactttgtcagcaccagggatgccagcgaccccgcaggaagccaggacgtgaagcacattgagatctatgagctaaggaacacgcagaacttcaatctgaccggtgaattgcactcacgggccacgctcaaggcgcaggacttcaaggtggtggccattcatccgaatcgtgccgtagtgcttagcactaagtacgaggatgtcagccccgaagttgtcaggcatcactcaaagttggagttgtcggaaacagcatggattggatacaatttggagctgggtaatttcagcaaggttggcaatgagtcccagagctttgccctggaaattttctatccgaagcgcaatctctcctcctcaggacagtactacatgacggacacaaactttaactccgacctatctttccaatggctgggcggcaactatgaccaacagcccaagattatacacagcaatctgcaatggaaggcagaacccctgcatcgtggagatcgggagcatcgcaccatcgcgctgacggtggcacatcccctcctggagaaggatataaactgcaaggcgacgtactatcgtggactgcgtgatctgctaaggacacacttgaccatcgactactcggaatatcctgaccaacttattgagctgggtgctcagctgacggatagatacagtgaattgggccacaccaactacaccttccacgtgtacggcaaacatattgcttccgaactggatgtccagttaaatggaactttggcggccatgaactcttactataagacggagtctacagcccactacaagcgtgatatcttcccggcgagatatggtaaatttctggctctgctcgatgtgaataagcgggaactggaatacgaacgccagtcaccattccacgcagtgcgactacacttgctgccaaccatacggtatccgatttacggattgaatgccacaatttgggatactcctgatacaaaccactcgggctacatatacatggacattttggagcgctatgctcgaatggacttcaacttgacggaggacgccagtcagaatcttcaaatggtcggttacattccggatacacgcagtgcattcctggacatttggcgcaactacgaggagatacgtgtgatcgatgtcagttcgtatctaaagatgaatcactctcgtcttattactggccgcttccactggcgtccatcaatccggcaagaagttcgcgagaaaatccaagccgtgggcaaatcggtgtacagctctttctcggaaggtattgatttttggattaaatctatctatacggaaaccaccgaatccatgggcgtggtgtggaacacagccaaggagtacaatagggatttcatcgacgatattggccagctgagcgttttggaggaggatcttgctgatctgcgattgtttgtaaatcagtcgtacgaggcgaatgatttctatatcaagaacgtagtcaatttcacgctaactatcctggatgaactcgccattagagatcatatcgagtcactgcccaagatcttctctgaactgtggcaggcaatgggagattctggaaaggctttgcggaacagcattgtgtggctaatcgaaaccattaaaaccacgtataacaatcttctggatgcggtggcccgatttttccatggcgagagtctcgtctatatatccggtctgctagagaagggcatcgcaaaatacgacagttttattaaagatctgcacatcaagtttataaaatacattgaaaacctctggcacaagacatggacattggcggagaaccactggaaggcagtcctaaagcgattcgagcctcatcttttcaagatgattagctttatagagacaacagcctggaacctcagcaaggaggtatttgatttcatatacaagcgcaccaatgagctggcggagtctccgtacttcaacaaggtatccagttttactgctgatgcggagcgactttaccgggacttcaaggctaacgatgccatcaccaacattaagaagtattcaacgatagcctggaattttgtcaaggagaagtacttcaagctggtacctttcggcgcagaattgaacgaggttcttaccgaaatctggcaggaaatcaaagaacttgagaaaattgatcaggtgcagattatggtgcagaagtactatgaagtaatggccaaggtcgattgggtggcagacgaactgcaactggaacaccgcctgcatcaggtctacggtctggtgaggaataagttccgtaactacgccatgaatgccttggaaacagccgacatgtacagggaggcaaagaccaagtttgtctttgatccggaagtgggcattatcgaccttgaacagaagctacccatgtcctggcatgcatttaacgagacgccccggttcgaggagattcccgagtaccaggtgctcgccaaggcgcagagcttctttagtgagaccaactcatcgatcgtcatgaagctctataacatgcgcacccatctggatcccaagacctggctgccaccgtactactctcgcgccttgctgattgactcgcgtcactacatgaccttcgatcagcgttatgtgggtctgaatcttaactttgacgagttaggaaatggacgttccacttcgcaatgcagctatctgctagcccacgatttcttcaaacgaaacttcactttgcttttggaaccagcgagcaaatccctggctggccaaggactaacacgcaagttgagctttattgcgaatggtcaactgattgaaatcgacctcgaaacagatcacataagcattaatggcaatcctcaacccatcctacctcttaaactcggagatgtgaacatccatcgtgatctggacgtactctccatcacctcagataccgagtttagtctgcactgcaatgttcagtttgatctctgttggttcgaggtgagtggttggtacttcggcagaacagcgggattattgggaaccttgaacaacgagccctacgacgagtacaccatgtccagtggcgtgatctccaatgagacgcagctgttcacggattcgtggagcctgaagcagtgcaggcagaataagctggctcagacccaagaggtcagccaggaggtcagtgatgcctgtaccagcttcttccgcaccggtatactggccacctgtagtgcagtcctcgatccaactcctttctatgaaatgtgtatggatttgggcatgaagtcgccgccaattcgaaagggacacccggcggtgaaaggagcctgtgcagcagctttagcttacatcgaggcctgtacagctctgaaggttccaatgcgggtgccttctcagtgtgtattctgccagctctcgaatggctcatacgtgccagagggaacattcatggagctctcagggccagagattccaaaaagcagcgacgtcgtcttcatcgttgaagctaaggaatgcaatgccaatcttaaaacttccaagaacatcatgacagtggtgagcagcatagaagagcagctgcaggccgctaagataacgaacaatcggtacgctgtggtggccttcggaggagtttctccatatgacaaagccaggagtgtcatatacgaacacaacgaattcacttccaagccggaacagctggcggactactttggtcacattaacaccggaaatggcagcagcaacgatatcctaatggccatttccgcggctgccaagctgaacttccgtccgggcgtatcgaaaaccttcatcctgctctcgtgcagtaaatgtgcggccagggatatgcgcttcgactacacctcgatcctgcaatatttacttgaggagggcgtaaacctccacatcctggccgacacggagtttgactttgagcgaaacaaaaagctgcgacacttctttggcttggacagcaagctggtctattcaaagcggttccccgaaggtgatgcggaaacccgcaacacaacccacattccgaagagcaatctgggaatctgtacaacgctagcggtggaaacacagggatctgtgttcagtgcccgcaagctgcagccggagagaaagtatccgatcaagcgattcgccacaattttcgccaaacgggtcgccttgagtgccacgcccatccagagccagacctgcgagtgctccgcccacaacacgggcgtctcctacatggcctgctcaccacaggctctgccagaggagaagtacgatctagacgactatgactccttcaataactgggactggggagacgagccggagagcgagacaaatgtaatgtcgtagtttatagtccgccacaattagttagctagttcagttatgtccgtgcagaatttaaggtttttctaatgcataaccgacaggcatattttgtaaaaataaatcaaaccatatataaa

SEQ ID NO: 26043 - protein, 4345 aa, DROSOPHILA
MALDGMCAASKEIAPIPKQNALEFPHVTWSNLIRRILDSQGEAHNGWIEATGGYLAASAYRTHSGNPLKDPRICGRPQCDSKSAKFNYGEQLYKYQYTVAVRTEFAGSGDNSSDLLLKSDLEIFFPKPCEGYLRINDAKLYDTLDELNDNESDSSEKTKEYDYYDNLANEESESQNYDNMHPKSSDFNVDLTKNLLRFAFHDGLISEVCPQEQETPWVLNIKKGILSAFQNTMMRFDVDANTTETDVSGQCQVQYALEDTDSSYVTIRKTKDINSCRQRYATHSVLQTTPYTFRDDKTIWPILKSQSHCNLTIDNNVYKEIKCLETHLLVPFSNASSGALTTSTSRLKLDGVESYSAGEFLEQNPELVERRATLVFDHTPAVKPSHDEIKAARELLVEMCRVGFPNIQREFIDVFTNFLQTSKSLDYKTLSVLLQRSASTCEQGRNHLLESLPFIGSTASYKVMQTLETFHSILEYAKNRLDAEYTLGATAVVHSFCKHHEACEENLRVQQIINLLETEFLNLYNLFKGERRTRERMVILLKGLGNIGVVSSAFAEQLQWIIREDEAPVDIRLHGILAFRRVDCARHRSYFLDNYGNYTLNSELRIYSYLQAMRCPDYISVGVIKSILEHEEINQVGSFVWSHLTNLAKSNSPVRIEAQGLLLNDELSERFKMDIRKFSRNYEHSLFFDEYNFGTTTDANVIFGTDSYLPRIASVNFTADLFGQSVNFFEFTARAEGLEELAANAFGPKGPLSGQLLRKKLSFLNRWLGNESAEEDDTLENLLSLDNLRLKRKAQEQARASEEEVDEDYDFEESLEGNKRQKRDVSTTRKQEIDRNVDSLGYKLKYDYNNPRAQFGLRVFGNDLRYFNVESLVEVMALAAKFNPFQQAKNVLSGKEFTYTKSRVFLDASYTVPLAVGLPLAIHAFGASSIDLRVSGNLDEMDPPTDWHFDVEGQFKPSVSVDVITTMQTDMFWEQSGIKVKSNLYSNSELVAKLKVRGRNLVSFSFDLPRDKNEIFSVRSELLVQKREEQLPQAGIANRSANSTCTWPVLDQAIGLQMCSHYSVPDLSNATEIYPSLLLAGPLNFSLILKKSDLSAKKYVFEYKWDQQEEDNNFSLVFTTPGSKVPRVLVANVTKVPDAFNASVAFVNGPNRVSAGCSYDGNPDFRRLDIYLDTNGNRSLDLGMELRRHQDFTAWIYNPRMLLAINGVNITGLAGTVKVNEKNGIKQHDVDLSFETKKLQAVIKGNVVQSEITTSTNMTIKYRFQANKIEEINFAGKLVNNGDKSKTEYRGNMKLQTSAYPKLNFASESTWLSLQGHTEGMITYNNAPDYVNPNYTSLVRLIFARSHSEDSFLDGTQTRASLELKLPRSKIDYRILVKHKEHIKNGTEHNVIVGLKYTPEKEITGLFSVHLPRRNLFAIDAYMNVTVPEFNSCTASLKVNEKATKDYIIFINGSWFTGHSVAVKANYKDRSSRVQALHHLKMIVESPSFNITSLNIIYRRKQLLIFYDIQAKYDQDPYGLTIQYASNAHNRNTNAEVRLKVKERDYWINAKLLSEQPKLLQLEIHMDKIRDVHIQVGLLNVDKRKELSLELKWDANRDPSQRLGLLAEYNSPGTKHYDGNLMITYPERTIHFGFNSFTGGPKYFGKVHASWSINEVIEFEYEAGILPGHTLHNWVKAELRTPFDGWRVNSLDAGIYSLKNLILVNSTLFWADDQKLQVGYKSDYDVNDQLMSFDVRFGINSTIRDIPTINVKVKHWMDVKKVDTELYLGYSGQNDTFNTYSMDSSWEIEKNQRYNNYSGLVHLVSPFKGYEKGGLVAHFSLSDQRVVSGAASLNFDLREFTLTMNGYVKKFTDNMLTVNITTPLEKFGTINARFGLNEKKRHAVAEVRAPTAALGVEVLADIKNLLNFDVKLSVATPIESFQQAAIFALFNPERVDMRGLWNNVTLGFTGVWHMQNITDFEYSYHVFTPLAGFEENGFIVQLLKRKEFVFQLHGKMSNYKLGVKINGEPKSDLVNQLGSNKMELEMLYDADFKPLNAETDYKPDADEEYFSYFTNFQVDTLVWPTIVGNVDIQEIIDFYLVVGHVELPQGKVEFKDRLHYPDYINVHNLLTVTTPFAVAKNIKSIVEYHVDLNFNAFYERVKFIVNDDKDNTQELGFVFNYTALQDNVKPKAHDVQVTLLTPYEMLHEIYVHGHIELDDNAYKGNISAVTAHTHLSMAASIENEDNFLETSVGIQLETDAIPHYGCQVYFKKDFSAVDKAIDIRFEVTDNGTLNQLHISTDWHTDPSYIVNANGRIKTTMLPLQMASTSVLVIQGQNPHLNFDLNLLSQNGQSIAYGARANKKKDVFNIEVWTPMKNFRNISMHGTAIRSPRDPGRYDVSGFLYRNMATYEVTGAVRMTNSLPIDVVLRVQPKAGGRDGVIELNIHEAGPKKIRFSFSAIEDGKMCQMSGGYSVSKTNGAMDFSVLVESTEPEIARINFYGNLSPNSEGSLVGDLSLETPWKALGIDTVHLHSDVGFLNKGGHIVGEYKIGQYIGRGSCLWSWILAEDMQLVLENYLERPNAKPRIVHASAKYQNPGQTFTQLQAGGRLSVDSKWNLDVNGSAEYKSVDDFKFRVITALPLPVGDRHQLSASYQGNVISQQFNNPDFVLEASYESFEAQNKLLSRISYKNATNNLKGLGHVEWGKIQNLSVVEGDFELLHKQGAQREFSAKIITPKFKNEHTFALTGSYDLEKSGHHNVVGSLDYPASRRITDLDVSVSSLSNMHGIFNSTLPTFLNVSWLKTDFNFTTNNGKSYRYCRCFWPQDTAYFKLNSNYDSDSSNFNHNLNGNVEIEVPLATRHRADIVYGLQKRRNQDAGNVKVVYNEKQVLDGKYKRLEQAKAPIYKETTDISLENEVKPLGIHFVSTRDASDPAGSQDVKHIEIYELRNTQNFNLTGELHSRATLKAQDFKVVAIHPNRAVVLSTKYEDVSPEVVRHHSKLELSETAWIGYNLELGNFSKVGNESQSFALEIFYPKRNLSSSGQYYMTDTNFNSDLSFQWLGGNYDQQPKIIHSNLQWKAEPLHRGDREHRTIALTVAHPLLEKDINCKATYYRGLRDLLRTHLTIDYSEYPDQLIELGAQLTDRYSELGHTNYTFHVYGKHIASELDVQLNGTLAAMNSYYKTESTAHYKRDIFPARYGKFLALLDVNKRELEYERQSPFHAVRLHLLPTIRYPIYGLNATIWDTPDTNHSGYIYMDILERYARMDFNLTEDASQNLQMVGYIPDTRSAFLDIWRNYEEIRVIDVSSYLKMNHSRLITGRFHWRPSIRQEVREKIQAVGKSVYSSFSEGIDFWIKSIYTETTESMGVVWNTAKEYNRDFIDDIGQLSVLEEDLADLRLFVNQSYEANDFYIKNVVNFTLTILDELAIRDHIESLPKIFSELWQAMGDSGKALRNSIVWLIETIKTTYNNLLDAVARFFHGESLVYISGLLEKGIAKYDSFIKDLHIKFIKYIENLWHKTWTLAENHWKAVLKRFEPHLFKMISFIETTAWNLSKEVFDFIYKRTNELAESPYFNKVSSFTADAERLYRDFKANDAITNIKKYSTIAWNFVKEKYFKLVPFGAELNEVLTEIWQEIKELEKIDQVQIMVQKYYEVMAKVDWVADELQLEHRLHQVYGLVRNKFRNYAMNALETADMYREAKTKFVFDPEVGIIDLEQKLPMSWHAFNETPRFEEIPEYQVLAKAQSFFSETNSSIVMKLYNMRTHLDPKTWLPPYYSRALLIDSRHYMTFDQRYVGLNLNFDELGNGRSTSQCSYLLAHDFFKRNFTLLLEPASKSLAGQGLTRKLSFIANGQLIEIDLETDHISINGNPQPILPLKLGDVNIHRDLDVLSITSDTEFSLHCNVQFDLCWFEVSGWYFGRTAGLLGTLNNEPYDEYTMSSGVISNETQLFTDSWSLKQCRQNKLAQTQEVSQEVSDACTSFFRTGILATCSAVLDPTPFYEMCMDLGMKSPPIRKGHPAVKGACAAALAYIEACTALKVPMRVPSQCVFCQLSNGSYVPEGTFMELSGPEIPKSSDVVFIVEAKECNANLKTSKNIMTVVSSIEEQLQAAKITNNRYAVVAFGGVSPYDKARSVIYEHNEFTSKPEQLADYFGHINTGNGSSNDILMAISAAAKLNFRPGVSKTFILLSCSKCAARDMRFDYTSILQYLLEEGVNLHILADTEFDFERNKKLRHFFGLDSKLVYSKRFPEGDAETRNTTHIPKSNLGICTTLAVETQGSVFSARKLQPERKYPIKRFATIFAKRVALSATPIQSQTCECSAHNTGVSYMACSPQALPEEKYDLDDYDSFNNWDWGDEPESETNVMS

SEQ ID NO: 26044 - DNA, 2787 bp, DROSOPHILA
ctttgcttgaaattacggcgataaacttcttgtccttcgacaaacgataccatacgagaacgcaaattatatcgttctcgtcgtgcttaattcgcatctggtcatcagcttgcttccgaattatttcgaaagaatcttcagaggacgatcgtccaaaagatttaatcgtctaaaaaacgagtatgtcgcccctgaagtgatcatgtgttgctcaaataccgtataataaggaccaatactaaattatactggcgaccgtaatgcacaacatattcggctaaggaattcatcccaatccttctggtcgaggcgaagatatgccctgattgtagcaattaccgaccggtttacacgctcaaaatagtttgtctgaggcgactgaacagcggtcaacgtgtgcttattccacgtccacctttagaagttctattgttaaagacttaaaattttcgaattctgtcgcagctttttccaactgtcctccaatacaactaatcgacgcgcctgaatccaacaagccataagccaggcgattcaaaaccaatcggtaagagcgatcggggatctcgaggacctgtcgggatagaactgatgtaatccaaactggttttacaatattttaacgttcttccaaaaatatttcaatcgacgagaactacgagatttccgattaagaattaatggggattctttgagattgggaatgcagacattccgtaactcaaaaattttgctgtgaagtagagaataagaaagtttaattggttcgtctgggagggatagagacacactggtattggtgttctctagtgatcggtcacggttgattgatttcgataggcattcaaagtcttcggtttgactggcgacttcgacatgccgaccttgaagttttttgaacacttgttgaaaattggtttataggtgtttgctgcacccacaacaaaaaactcgtctttcggatagacattcctggtagcggtgtccttcgacttggtaattccaacatactagagaaaaatcgtctatgtcgttctcacttccgaaagttgacctcacctcatcttcaaccctctgacagacctaggatatctcacgtttaaacggagaacatttcgtatagcccctatatcttttgacgtcagccaggaatgcctcgcgtcgcttacagatttctctcaacttcgataccgttctaacattccgaattttgtggcgaatctcgggacgaaggttacttctcaacaagtttgttggctgtccagagctgctctagctgatcaactaattctgattgaaactctcatagaaactattaaaagtttcattcggtttttgtttagtgttcctaatcaactccttcatgtcaccatcgttctgactctgtcgaaattcaagtcgtagaggtatcccacagaatccccattggcttgaattcattagacttgccttcatataatacacatttgtttctacataatatgttgaaatttccatttaaagtctttcttgtaagtgcctcgactctgaatataaaattgtctactgacactcctatccggccgatcaaaaaaatcgaaagtagcgcttcgtggagaaggatcaggatttggcgttgttaaatactgcctcttatgggtacttggtttatgagcgaacatttcccttgcagtaacaactaccgcaggactcggattgaacattactcggtgcatgcttgcggtaatagcattttgtatcaaatctgtcatcttctctgacaacgttgatagaagcctacgctccatgactaacaattgcttgaactggttttattggttttagacccgcgatctgatgtcgaaggtctcgtcctactctttctgttggttcgactggaggtctacaggctagtttccacttcatacttgcacgtagttatgtaagagtctggtgtgctgatctctgctgctcatatagcgcaaacagattttgagacactaagagatttcctagttggtgatctgcctaacccaatcatacttcagaaaaacaccacgtttcaaaattgagagaaaaaataaaaataaaataatataaaaaaatatcaacgataatatgcgagataagattatcaaacttggcttgatgtcctcctttcatggggctgtctattattttcagcttaaagaattctcaagaattcttaagattctcatttgctagactaaatttcaaaaacaaaaccaataggtatttgtagtgaagtcttggtccgtgcactcttcctctgcacgagtattccaacctggagggaaatctctcttattttaggagaatagtgaagaagaagaatatcgtcaactatactccatttctctggggtgataccaatattttccgtcatgtaacattgatgatctttttttttgtttctaagacagcggtaagttgactcgaggaagtagatttaactgggacagaaaccaaaccggagttccgtgttacactgttttcctcagaaaaatgcacctttccgtttgctacacctaggataatccctatttttgggataagtcttagttatggccagtcagcaacttgacgtggacttcacaactaattctgaacacaaaaatgttggaagtatgaaactgaaacggaaaatttaaggccccacacgtttgggagacactttatcttatttattattattcctaactaaactgtaacgtgtaacgaaataaattgatggaaggcaagggaacctgtacttgcgttgtgtgtggtggtctttttctacagatg

SEQ ID NO: 26045 - DNA, 565 bp, DROSOPHILA
atggagcgtaggcttctatcaacgttgtcagagaagatgacagatttgatacaaaatgctattaccgcaagcatgcaccgagtaatgttcaatccgagtcctgcggtagttgttactgcaagggaaatgttcgctcataaaccaagtacccataagaggcagtatttaacaacgccaaatcctgatccttctccacgaagcgctactttcgatttttttgatcggccggataggagtgtcctcgagatccccgatcgctcttaccgattggttttgaatcgcctggcttatggcttgttggattcaggcgcgtcgattagttgtattggaggacagttggaaaaagctgcgacagaattcgaaaattttaagtctttaacaatagaacttctaaagacgattaaatcttttggacgatcgtcctctgaagattctttcgaaataattcggaagcaagctgatgaccagatgcgaattaagcacgacgagaacgatataatttgcgttctcgtatggtatcgtttgtcgaaggacaagaagtttatcgccgtaatttcaagcaaag

SEQ ID NO: 26046 - protein, 188 aa, DROSOPHILA
MERRLLSTLSEKMTDLIQNAITASMHRVMFNPSPAVVVTAREMFAHKPSTHKRQYLTTPNPDPSPRSATFDFFDRPDRSVLEIPDRSYRLVLNRLAYGLLDSGASISCIGGQLEKAATEFENFKSLTIELLKTIKSFGRSSSEDSFEIIRKQADDQMRIKHDENDIICVLVWYRLSKDKKFIAVISSK

SEQ ID NO: 26047 - DNA, 3524 bp, DROSOPHILA
aaaaatcctgaactgcataatttaaacgatttcaatgacaccttgattaatatcaaagacaacacaaaagggaactcgagaactgaccactctacctgttggcccctcatcgcccccctcccccacagacatttccatgaaattatgaacgaaacgcaacgcaacgcgcaatgcatttgaccaaaagataaaaaataaggaaaacatatcgggagggaaaaaaaaccaatcaggcaacgttgaaaaccaaaaataaacaaaggcagggcgcaggtagaggactaaaggaggggcaggggtatggactggaacaggggtatggggtggggcaaaagggcagaggctgcaacagtttacctggcaacaaatcaaacaaagagagacagagagagagggagagaaactgaaggcgacgaagagagggcagcgcaacttattgcaattaagcgtgattaattcaggatttatacaaattaagtaaaacccacaggcgatcgaggtcgaggctaggtctacccctctccaccccttataccccattaaactatgtgtaaaagcggtgtgacaacatttttgctcttgcactaggtaaagagcctgtaaatgggttccacagtccaatatctttaaaagattcgtaaactttgtaaaacatggcatctcaaaatagaaataattaagaaatccttaacagttttaaataactcttatagcatatcccataaacatataaaaggtaattcacgcagttcacgccaacgatgctctactgtatgcccgcgctcttctcattttatttcctttttttgttcatcaaaaaggaatttcttgagatttttcgctgcggctgctcctgcctattggactggtcttggaaactggaaccctttgcccccactgggtaggaatggaccgggggcagaaatgggggctgcgatgagcaggcgacgcatgcgccaagatctctgggatggacacgctctccgcgacggactctctcttatttagagcctgtcttgtgctgctgcttattcgcatttcgagttgatttgcctggaattttatttccttcagggggcggagggagtggagggagctctgcaggcgcgttgaaggaacagaatgaatcacggaatcgtccaatttatacacgagttctctttgttcctttgcgaatcaaacttgtttcttatctccggcaatttactattgttatgaaatatacggattctttttcgggtaataccaatattagttgctttgagtttttaattccattggataaataatatggtctttaagcttattaaataactttattaaagattatagtccatttttccatactaaccatacttttccatactacatatatcaatgtaagtatacattttaaaagatctgattgccacgatatggattttcttatcttttttgcattaagaatggcactacctcaaccatttcgcactttaaacatcgctacaaattaaaatttgtactatttgaatgacaccatatgggaaggcaataagttataataagcctactaaagtaccagagttcttgaaaatatctttaagttttttttttaatatccttcacttaaagcgtatttcaaaattaaaaaaaaatttttatgatctgaacatttcacccacaagaagtaattataactttgtttaaaatttaaatatttacaataataaatatttctcgacaggtatttattaagccattggtatataatatcggacataccgttactgggtttttggggaatttcgatggcatcgattcctctcgcttggaaaatgtgtgtcacagcactgcaattcggactgaattgatcgatgatcgaagaccctgctacgccacccgccggattgggggcggcaagggcggccacttggggggcggggccattgtccgcttgtaaggtgggcggcaagtgggtggtgagtagtaatagtagaagaggactgctgaatatcacaaggcgggcagttgttgttgctgtagcttttcttctgcaatgcagatgttgttgttgttgctgctgatgtagcattttgataactctttctttattttaaggggaaagagagagcgagagacagggctaatttcaccggcgtttgttgtcgtttagtttcgattgggattcaaatcgttttgactgtgtttgttctttttgcggtaaataattttggcaaacgcaggcacccacactgaaatacgcacactaatacaccgctttgtttgccggcattattattattatgaaacttatttttgtcgtttgcgtttatcagtgcgcattttgcgttcagaagcaattgaagtgcaacatggttgtcgggtgttattaaatcgggattattaacaattaacaaatagcggcacacgcactgcacatagacgcactcgctccaacacacacgcacccgcgacgacgaaaggcgaattgaaagcaaagcgcgcaacgcaggaagaagcagcacagcgcgtgctcgcgagtcggctataaaattttgactgagaagtctctttgaatttcgactgcttaccgtcgattcttttcagcctgcgcttatcgattggtgaccgcggctatcgatgtctatcgccttacaccgtttttaggtatgtacagtgtcactaggctatgagaattccattctgggaaacgtttgttagaaagttgtgaaatttaaaaataaaataacgaaagttttacaagaaatagattggtcctgttaatacatacatacatataaattattatacatatacaattatacataccataaattttttttgtttgcaaacacacgactgtatatttattaattggttggtaagctaaatggtttttgaataatttaatcacaaaaagtaaaacttccatgtcgcgcttataggcgagatgaatgcctatttaatcacatttaaaatattttgtgtacaaaacaaatagtgtggacatctaaatttattcgaaatatgtgacatcgataaaggaaggtccacactatcgaaagccactatctagccgcattgttcatctctaaaccagctgttttggcggcaaccagttttggtctgaagcaaaacaatgtttatttaaataaaacgcaatttaaataacagcccaagtatggcgcatgaaagcgctgtgcacgaggcgctgaaaaagcattttggccactcgaaattcaaatcggatctacaggaaaaagccgtgaagtgcgctgttaaaagtgaatattggccaaattcttacccaatctcgcagataatacctctcgtaattctcttacagaaaagcaggatgtgtatgtgtcgatgcccacgggctcgggtaaatccctgtgcttccaattgcctggtttgatgtcagagaatcaaataaccattgttttttctccgcttttggctttgattaaagatcagatagatcatttaaccaaactgaaagtgccggcggattctttgaactccaagatgagcaccaaagaaag

SEQ ID NO: 26048 - DNA, 861 bp, DROSOPHILA
ccgactcgcgagcacgcgctgtgctgcttcttcctgcgttgcgcgctttgctttcaattcgcctttcgtcgtcgcgggtgcgtgtgtgttggagcgagtgcgtctatgtgcagtgcgtgtgccgctatttgttaattgttaataatcccgatttaataacacccgacaaccatgttgcacttcaattgcttctgaacgcaaaatgcgcactgataaacgcaaacgacaaaaataagtttcataataataataatgccggcaaacaaagcggtgtattagtgtgcgtatttcagtgtgggtgcctgcgtttgccaaaattatttaccgcaaaaagaacaaacacagtcaaaacgatttgaatcccaatcgaaactaaacgacaacaaacgccggtgaaattagccctgtctctcgctctctctttccccttaaaataaagaaagagttatcaaaatgctacatcagcagcaacaacaacaacatctgcattgcagaagaaaagctacagcaacaacaactgcccgccttgtgatattcagcagtcctcttctactattactactcaccacccacttgccgcccaccttacaagcggacaatggccccgccccccaagtggccgcccttgccgcccccaatccggcgggtggcgtagcagggtcttcgatcatcgatcaattcagtccgaattgcagtgctgtgacacacattttccaagcgagaggaatcgatgccatcgaaattccccaaaaacccagtaacgagctccctccactccctccgccccctgaaggaaataaaattccaggcaaatcaactcgaaatgcgaataagcagcagcacaagacaggctctaaataa

SEQ ID NO: 26049 - protein, 135 aa, DROSOPHILA
MLHQQQQQQHLHCRRKATATTTARLVIFSSPLLLLLLTTHLPPTLQADNGPAPQVAALAAPNPAGGVAGSSIIDQFSPNCSAVTHIFQARGIDAIEIPQKPSNELPPLPPPPEGNKIPGKSTRNANKQQHKTGSK

SEQ ID NO: 26050 - DNA, 2270 bp, DROSOPHILA
taattggccccataagccaacgaatttttgttactttatttccgtttatacagccttaaaattcaatcacttctagtccacaacacacactcctttgttcacttctttcagattcttttcagctccgctgagcactcactgaaaacacccaaagtttttccaattagtttaatgcatcattttgtcatttcggcagccagccaaggatgctccacatattatattcataaatgcacaacgtatgtatatattttgtttagacaagtgcaagccaagattctaaccacttcatggcactgcgaacagaatgtcttcacatgcatttgttatttttcgatgttgttccctttgccttttttgtaagcaagaaattctgcaaccggaatgccaaagaaatatttagctggcaaagtttattttactcttggctttgtttcttttcatgttttcctttttcttcagctggctttggctgttttgtggcgtagacaaaacggcggcgagcacgtttccggttgcgaacggcaccggaattataacaagttgtaaatgaaaggcaaaatttgattacagccgatgtcagaagtcaaagtgagaattgcagaactagttaatttgaatggaaaccgaatgggggagaccagaatataaacaaaatccgatggggagaacaattttatagtttatcaaaatatttatatatttactagcaatttttactacaagcacaaaatttttgtttttcacatgacaagttttaacttttatattaaaattgtatttgtggaaagcaaatttattccaagcaatttatatactttttgaaaatttgtatattgatttgttttgcagtgtctttcaaaaattcaaaagccaattaaaaagcttcatttgaaattgaactccattgaaatgtatctccgtcgtattttattccggatcgaactttatctttatctgcatctctcccccatccaaactgactttaggcacgcgaacgtcacttacgcttactcccactcgaaaaatgcgacgtaaactggatttgtagcacggcgcagactttctgaggaatcccgatccgcaaccgtaaccgaaaccgaaccgcacgtggcgactgacaagcggcaactgagctcaaccgcagctggagaaccgtcgccaaggcaaaagcactcggagtgagtatgaaaaagcagtggaatgagtgccaattgccgattaccggcgaaagagcggagcaaaacaaacccaccgatgagtgagtttgctttgagtgagagagcagagagcctgagtcaacaggttgttttgctggttgggtcacttaacctcgttactctttgtattcctctgtgggtcacacggggcgtatgtgcaatatggctcactcggtgcgtatgtgtggcgtatatggctcaagtttgccgacaaatcgccgacaaattgtttaggaacatggatgctggctacgcacacgacttggattaccagttgggattgtctttaacccaggctgtgggttgtcacagtgcgtatacgtgattttgtcttgacttttctgcaggacaatttgtgcggatgttggcgtgcttttctcttttctttctgttcataattttgtatttttatggtcatcctaagttttttcgtttcaagggttttaacatttcgaacgtcttagaaactttcccacaactataaactgaagaaagagacaatgggttttgtcatttcaccatgcaaatttaattgaatcgataaaaaatataaaacatttgtagccctgaccaccttattattccttttaaatgtgtgaggtggaattgacaacgcattaaattaagacgttagtaatcgaattggtgcggtcttggatcctatttaaaatggttactggtcttctgttatgtttatatcaatagaatccggcacatcttttggatattgctgattaaaatcagacgctgcaagactacggtcattcagaacttctgtctcgtcggaactcggatccaagtcgagaaacgccttggagatcattttgggatttagttcggcatccaggtcgttgttctcaactattttaatcaaaatttccaggagcaattcacaacacttcttttcgtagcccataacattggaaatggcattatggattgtgtccttcatttttaacagctcttgattcaagttttcgatatcaactagagctttctgggaactggccaaagaaacagcaatgcgacgtcccagatcctcgtgctcca

SEQ ID NO: 26051 - DNA, 270 bp, DROSOPHILA
caaactcactcatcggtgggtttgttttgctccgctctttcgccggtaatcggcaattggcactcattccactgctttttcatactcactccgagtgcttttgccttggcgacggttctccagctgcggttgagctcagttgccgcttgtcagtcgccacgtgcggttcggtttcggttacggttgcggatcgggattcctcagaaagtctgcgccgtgctacaaatccagtttacgtcgcatttttcgagtgggagtaagcgtaagtga

SEQ ID NO: 26052 - protein, 89 aa, DROSOPHILA
QTHSSVGLFCSALSPVIGNWHSFHCFFILTPSAFALATVLQLRLSSVAACQSPRAVRFRLRLRIGIPQKVCAVLQIQFTSHFSSGSKRK

SEQ ID NO: 26053 - DNA, 2567 bp, DROSOPHILA
cttgggaaaacaaattattgatatatgatatatgattaccttacctttttgtgcaattatacgtaaaattattttctacaggcttaaaacaaatttgcgtcttggtaaagtcaattgtccttctcatacatgagaaatattttgtgaattaataattcaacgattgaagaacaattggcaataaatgtggagctcgtagccggtacctgcagagctcgatcaatcgaattatagtcgaaaagcgccacatagcgtcgttttattgagcatgtttgctcacttactaaaaacttaccttacattgagtgtgcgagagtgtgaaaaaaattggcctaaaaaaattgcttacaaagcgcgcacataccggttcacaaagggagactaaatgagtcggtaggcggattcggcggaggtgggcacccaatttacggccaccaaatataaatgcataatcagcctttccacgcttaccaaaggcttagggcatactcaacgtatatatcgtatatgcatacgtattctttttctctcccctgctgcaaaacagcaatactgtgaggggtcttaaaactcacaataagtccaggagaacagagcagaaagcagtaatgcgggaggagtcaggtcaaacgctgaagattggaccttggaccccggtaaagcggagagaccggccaagggcacagaggtcgaacggtaaaggtgtttactggacacgtggaccttggactctagcgagccgtgcgtaacgggaaaataaaacagcctatagacggcagcagcgcctctggaccaggcagctaaagcatgtagtgagtaataagtgcacgagggtagtcgagcagtgtatgggcgggagtctcaaagtcaggacgcggacgcgtgggtccgtcaagtgaaaacacaattcaggagcaaagttcagtgtgggaacagaaattttcttaaactagacccagttggtattattgtttgtaatagagctggaaaaccatcgatggaactatcgatactatcgatggttttaagtatcggtgtgagatttcttccgcaaaatcacccgcaaaatgacattcggtgcgaatcgtggcgaccctttcgcatcgatccgtccagggcgcgtttagctttctcggcattgggatgatagtcgacctttaggaatttaaagttcttatccaggttcgagaagatctcgctaatcgtatggctcgtatggcttgaacgtctcgcgtagctcagcgtcggtgatgtcattggtcaggttgcccacatagagacgatttcgatgggagaacttcgtctccgtgggcacttccactgtttccagttcaaaggtgggcccagaaatcctgcgaaaccgatgttaaatgatgaagtcttcacagccgcgcggaccaccatctccatcgctaccaccacccatattggtgctgttcatcgtgccacctgcacctccgccagggcgtggaccacgctactaccgactacggtttcggttgtctgctggttctgcgggcttccggagaaaccgccaccttgattgttaccagcattgcgacctctgaatccttgaccacttccctgaattccggctcctccttgatttccttggcctcctttattgcctgctcctccttgatttcctaatcctccttgatttccttgaccatggacttgattttgattttggttttgtccttgccgttgatttgggcccttgttggcgttctgattcgcttgattttggccagcagctgcagtggccggttcattgttcttagcaagtgcattggacccgtccgcctttgatgtttcgttatggcgcttttgctatatttgtgttatacatttaaataaatacaatatgcaattgatatgtgagccacatctgcagtgccgtcatttcaatccagttacaccattttaatacaaactgaactgatataacatcgattgaatcggctctgcaggcgtgcccccctatttaactcccccccccccccaaatgtgaagaatacctaatatttgtatacaattaagtgcccgggataatctaatcaactttatcgaatttagataacttacatttgaattgttgatagagggccagcatcaccgtcgacgatcgtggcaagcatattggcgagggcatagttgagtttgccaagaagtcatcggccagcgcctgccggatggatgtgcaatgagaagtgcttctttctgactgcttccctcagaccgtgtctggttgatccgatggaggtgaacgacaacacagagaaggagttcatcatcaaaagatgcccgacttcaaccaggatcgtagcattggtccgcgcttcgccgatcccaattcgtttgagcacgagttcgggtcgcgatggaagcagctggacaatttgctcaaaaccaagcggacgcactcaatcgcgaacggaaaatggaggaggacaagttggagtacgcacgctatgagcaagaaactgaactgttgggtcaaggtcagtatatgtcacgatttaggcgggttttccaaatgccaacaccattttaacaatttgcat

SEQ ID NO: 26054 - DNA, 920 bp, DROSOPHILA
ccgatgacttcttggcaaactcaactatgccctcgccaatatgcttgccacgatcgtcgacggtgatgctggccctctatcaacaattcaaatcgccataacgaaacatcaaaggcggacgggtccaatgcacttgctaagaacaatgaaccggccactgcagctgctggccaaaatcaagcgaatcagaacgccaacaagggcccaaatcaacggcaaggacaaaaccaaaatcaaaatcaagtccatggtcaaggaaatcaaggaggattaggaaatcaaggaggagcaggcaataaaggaggccaaggaaatcaaggaggagccggaattcagggaagtggtcaaggattcagaggtcgcaatgctggtaacaatcaaggtggcggtttctccggaagcccgcagaaccagcagacaaccgaaaccgtagtcggtagtagcgtggtccacgccctggcggaggtgcaggtggcacgatgaacagcaccaatatgggtggtggtagcgatggagatggtggtccgcgcggctgtgaagacttcatcatttaacatcggtttcgcaggatttctgggcccacctttgaactggaaacagtggaagtgcccacggagacgaagttctcccatcgaaatcgtctctatgtgggcaacctgaccaatgacatcaccgacgctgagctacgcgagacgttcaagccatacgagccatacgattagcgagatcttctcgaacctggataagaactttaaattcctaaaggtcgactatcatcccaatgccgagaaagctaaacgcgccctggacggatcgatgcgaaagggtcgccacgattcgcaccgaatgtcattttgcgggtgattttgcggaagaaatctcacaccgatacttaaaaccatcgatagtatcgatagttc

SEQ ID NO: 26055 - protein, 77 aa, DROSOPHILA
MLATIVDGDAGPLSTIQIAITKHQRRTGPMHLLRTMNRPLQLLAKIKRIRTPTRAQINGKDKTKIKIKSMVKEIKED
